(19) United States
(12) Patent Application Publication
(10) Pub. No.: US 2022/0348908 A1
(43) Pub. Date: Nov. 3, 2022

(54) COMPOSITIONS AND METHODS FOR MODULATING HEPATOCYTE NUCLEAR FACTOR 4-ALPHA (HNF4alpha) GENE EXPRESSION

(71) Applicant: Omega Therapeutics, Inc., Cambridge, MA (US)

(72) Inventors: Jesse Jerome Smith, Waltham, MA (US); Jodi Michelle Kennedy, Dedham, MA (US); Jeremiah D. Farelli, Marblehead, MA (US); Kendrick Alan Goss, Lexington, MA (US); Adam Walter Scheidegger, Somerville, MA (US); Yoseph Kassa, Cambridge, MA (US); Christian Wessel Cobaugh, Newton, MA (US); Timsi Rao, Allston, MA (US)

(21) Appl. No.: 17/029,820

(22) Filed: Sep. 23, 2020

Related U.S. Application Data
(60) Provisional application No. 62/904,178, filed on Sep. 23, 2019.

(51) Int. Cl. C12N 15/11; C12N 9/22

(52) U.S. Cl. CPC C12N 15/11; C12N 9/22; C07K 2319/80; C07K 2319/81; C12N 2310/20

(57) ABSTRACT

The present invention provides agents and compositions for modulating expression (e.g., enhanced or reduced expression) of a hepatocyte nuclear factor 4 alpha (HNF4a) gene by targeting an HNF4α expression control region and methods of use thereof for treating an HNF4α associated disorder, e.g., cirrhosis.

### CROSS-REFERENCE TO RELATED APPLICATIONS

[0001] The instant application claims the benefit of priority to U.S. Provisional Application No. 62/904,178, filed on Sep. 23, 2019, the entire contents of which are incorporated herein by reference.

### SEQUENCE LISTING

[0002] The instant application contains a Sequence Listing which has been submitted electronically in ASCII format and is hereby incorporated by reference in its entirety. Said ASCII copy, created on Dec. 10, 2020, is named 131717-00103_SL.txt and is 4,343,647 bytes in size.

### BACKGROUND OF THE INVENTION

[0003] Master regulators are proteins, such as transcription factors, with the ability to influence the expression of a network of genes related by cell type, organ system, or response to a stimulus.

[0004] One example of a master regulator is the transcription factor Hepatocyte Nuclear Factor 4-alpha (HNF4α). HNF4α is expressed for the first time in terminally differentiated liver cells, late in embryonic development. HNF4α controls the expression of proteins necessary for the normal function of hepatocytes and other cell types in the liver (Li, et al. (2000) Genes and Devel 14:464-474). In addition, many of these proteins are secreted by the liver cells and contribute to health systemically. For example, proteins such as albumin are required to transport nutrients, hormones, lipids, and small molecule drugs in the circulation. In fibrotic liver disease, HNF4α is dysregulated and, as a result, gene expression in its network declines significantly or stops (Guzman-Lepe, et al. (2018) Hepatol Comm 2(5):582). This dysregulation of the network contributes to the pathology of liver failure in the organ itself, and to co-morbidities throughout the patient.

[0005] Recently, Nishikawa et al. (2015) demonstrated that transgenic expression of HNF4α in a rat model of cirrhosis led to the restoration of gene expression throughout the HNF4α network, restored hepatocyte function, and improved health of the animal. The transgene was delivered with an adeno-associated virus (AAV). However, transgene expression from AAV delivery does not allow subtle control or temporary modification of the expression of genes already in the genome. Once modified with AAV, the affected cells lose the ability to respond to changing conditions in the organ and body in a nimble physiologically meaningful way.

[0006] Accordingly there is a need in the art for temporary and labile effectors that offer greater control and the ability to restore cells and tissues to a nascent “normal” state and, thus, treat HNF4α-associated disease, such as fibrotic liver disease, e.g., cirrhosis.

### SUMMARY OF THE INVENTION

[0007] The present invention provides agents and compositions for modulating the expression (e.g., enhancing or reducing expression) of a hepatocyte nuclear factor 4 alpha (HNF4α) gene by targeting an HNF4α expression control region. The HNF4α gene may be in a cell, e.g., a mammalian cell, such as a mammalian somatic cell, e.g., a human somatic cell. The present invention also provides methods of using the agents and compositions of the invention for modulating the expression of an HNF4α gene or for treating a subject who would benefit from modulating the expression of an HNF4α gene, e.g., a subject suffering or prone to suffering from an HNF4α-associated disease.

[0008] Accordingly, in one aspect, the present invention provides a site-specific disrupting agent, comprising a site-specific HNF4α targeting moiety which targets an HNF4α expression control region.

[0009] In some embodiments, the site-specific HNF4α targeting moiety comprises a polymeric molecule.

[0010] The polymeric molecule may comprise a polyamide, a polynucleotide, a polynucleotide encoding a DNA-binding domain, or fragment thereof, that specifically binds to the HNF4α expression control region, or a peptide nucleic acid (PNA).

[0011] In some embodiments, the expression control region comprises an HNF4α-specific transcriptional control element.

[0012] In some embodiments, the transcriptional control element comprises an HNF4α promoter, such as the nucleotide sequence of HNF4α promoter 1, or a fragment thereof, or the nucleotide sequence of HNF4α promoter 2, or a fragment thereof.

[0013] In some embodiments, the transcriptional control element comprises a transcriptional enhancer.

[0014] In some embodiments, the transcriptional control element comprises a transcriptional repressor.

[0015] In some embodiments, the site-specific HNF4α disrupting agent comprises a nucleotide sequence having at least 85%, 86%, 87%, 88%, 89%, 90%, 91%, 92%, 93%, 94%, 95%, 96%, 97%, 98%, 99%, or 100% nucleotide identity to the entire nucleotide sequence of any of the nucleotide sequences in any one of Tables 2, 3, 4, and 9.

[0016] In some embodiments, the site-specific HNF4α disrupting agent comprises a polynucleotide encoding a DNA-binding domain of a Transcription activator-like effector (TALE) polypeptide or a zinc finger (ZNF) polypeptide, or fragment thereof, that specifically binds to the HNF4α expression control region.

[0017] In one embodiment, the DNA-binding domain of the TALE or ZNF polypeptide comprises an amino acid sequence having at least about 85%, 86%, 87%, 88%, 89%, 90%, 91%, 92%, 93%, 94%, 95%, 96%, 97%, 98%, 99%, or 100% amino acid identity to the entire amino acid sequence of any one of the amino acid sequences listed in column 5 of Table 6A or column 4 of Table 10. In one embodiment, DNA-binding domain of the TALE or ZNF polypeptide comprises an amino acid sequence having at least about 85%, 86%, 87%, 88%, 89%, 90%, 91%, 92%, 93%, 94%, 95%, 96%, 97%, 98%, 99%, or 100% amino acid identity to the entire amino acid sequence of ZF5.3. In one embodiment, DNA-binding domain of the TALE or ZNF polypeptide comprises an amino acid sequence having at least about 85%, 86%, 87%, 88%, 89%, 90%, 91%, 92%, 93%, 94%, 95%, 96%, 97%, 98%, 99%, or 100% amino acid identity to the entire amino acid sequence of ZF7. In one embodiment, DNA-binding domain of the TALE or ZNF polypeptide comprises an amino acid sequence having at least about 85%, 86%, 87%, 88%, 89%, 90%, 91%, 92%, 93%, 94%, 95%, 96%, 97%, 98%, 99%, or 100% amino acid identity to the entire amino acid sequence of ZF14. In one embodiment, DNA-binding domain of the TALE or ZNF polypeptide comprises an amino acid sequence having at least about 85%, 86%, 87%, 88%, 89%, 90%, 91%, 92%, 93%, 94%, 95%, 96%, 97%, 98%, 99%, or 100% amino acid identity to the entire amino acid sequence of ZF15.

[0018] In some embodiments, the expression control region comprises one or more HNF4α-associated anchor sequences within an anchor sequence-mediated conjunction comprising a first and a second HNF4α-associated anchor sequence.

[0019] In some embodiments, the anchor sequence comprises a CCCTC-binding factor (CTCF) binding motif.

[0020] In some embodiments, the anchor sequence-mediated conjunction comprises one or more transcriptional control elements internal to the conjunction.

[0021] In some embodiments, the anchor sequence-mediated conjunction comprises one or more transcriptional control elements external to the conjunction.

[0022] In some embodiments, the first and/or the second anchor sequence is located within about 500 kb of the transcriptional control element.

[0023] In some embodiments, the first and/or the second anchor sequence is located within 300 kb of the transcriptional control element.

[0024] In some embodiments, the site-specific HNF4α disrupting agent comprises a nucleotide modification.

[0025] The present invention also provides vectors, such as viral expression vectors and cells comprising the site-specific HNF4α disrupting agents of the invention as well as the vectors of the invention.

[0026] In some embodiments, the site-specific HNF4α disrupting agents of the invention are present in a composition, such as a pharmaceutical composition.

[0027] In some embodiments, the pharmaceutical composition comprises a lipid formulation.

[0028] In some embodiments, the lipid formulation comprises one or more cationic lipids, one or more non-cationic lipids, one or more cholesterol-based lipids, or one or more PEG-modified lipids, or combinations of any of the foregoing.

[0029] In some embodiments, the pharmaceutical composition comprises a lipid nanoparticle.

[0030] In another aspect, the present invention provides a site-specific HNF4α disrupting agent, comprising a nucleic acid molecule encoding a fusion protein, the fusion protein comprising a site-specific HNF4α targeting moiety which targets an HNF4α expression control region and an effector molecule.

[0031] In some embodiments, the site-specific HNF4α targeting moiety comprises a polynucleotide encoding a DNA-binding domain of a Transcription activator-like effector (TALE) polypeptide or a zinc finger (ZNF) polypeptide, or fragment thereof, that specifically binds to the HNF4α expression control region.

[0032] In one embodiment, the DNA-binding domain of the TALE comprises an amino acid sequence having at least 85%, 86%, 87%, 88%, 89%, 90%, 91%, 92%, 93%, 94%, 95%, 96%, 97%, 98%, 99%, or 100% amino acid identity to the entire amino acid sequence of an amino acid sequence selected from the amino acid sequences listed in column 5 of Table 6A or column 4 of Table 10.

[0033] In some embodiments, the effector molecule comprises a polypeptide or a nucleic acid molecule encoding a polypeptide.

[0034] In some embodiments, the fusion protein comprises a peptide-nucleic acid fusion.

[0035] In some embodiments, the effector is selected from the group consisting of a nuclease, a physical blocker, an epigenetic recruiter, and an epigenetic CpG modifier, and combinations of any of the foregoing.

[0036] In some embodiments, the effector comprises a CRISPR associated protein (Cas) polypeptide or nucleic acid molecule encoding the Cas polypeptide.

[0037] In some embodiments, the Cas polypeptide is an enzymatically inactive Cas polypeptide.

[0038] In some embodiments, the Cas polypeptide comprises a catalytically active domain of human exonuclease 1 (hEXO1).

[0039] In some embodiments, the epigenetic recruiter comprises a transcriptional enhancer or a transcriptional repressor.

[0040] In one embodiment, the transcriptional enhancer is a VPR (VP64-p65-Rta).

[0041] In one embodiment, the VPR comprises an amino acid sequence having at least about 85%, 86%, 87%, 88%, 89%, 90%, 91%, 92%, 93%, 94%, 95%, 96%, 97%, 98%, 99%, or 100% amino acid identity to the entire amino acid sequence of

(SEQ ID NO: 66)
DALDDFDLDMLGSDALDDFDLDMLGSDALDDFDLDMLGSDALDD
FDLDMLSGGPKKKRKVGSQYLPDTDDRHRIEEKRKRTYETFKSI
MKKSPFSGPTDPRPPPRRIAVPSRSSASVPKPAPQPYPFTSSLS
TINYDEFPTMVFPSGQISQASALAPAPPQVLPQAPAPAPAPAMV
SALAQAPAPVPVLAPGPPQAVAPPAPKPTQAGEGTLSEALLQLQ
FDDEDLGALLGNSTDPAVFTDLASVDNSEFQQLLNQGIPVAPHT
TEPMLMEYPEAITRLVTGAQRPPDPAPAPLGAPGLPNGLLSGDE
DFSSIADMDFSALLGSGSGSRDSREGMFLPKPEAGSAISDVFEG
REVCQPKRLRPFHPPGSPWANRPLPASLAPTPTGPVHEPVGSLT
PAPVPQPLDPAPAVTPEASHLLEDPDEETSQAVKALREMADTVI
PQKEEAAICGQMDLSHPPPRGHLDELTTTLESMTEDLNLDSPLT
PELNEILDTFLNDECLLHAMHISTGLSIFDTSLF.

[0042] In one embodiment, the transcriptional enhancer comprises two, three, four, or five VPRs.

[0043] In one embodiment, the transcriptional enhancer is a p300.

[0044] In one embodiment, the p300 comprises an amino acid sequence having at least about 85% 85%, 86%, 87%, 88%, 89%, 90%, 91%, 92%, 93%, 94%, 95%, 96%, 97%, 98%, 99%, or 100% identity to the entire amino acid sequence of

(SEQ ID NO: 67)
IFKPEELRQALMPTLEALYRQDPESLPFRQPVDPQLLGIPDYF
DIVKSPMDLSTIKRKLDTGQYQEPWQYVDDIWLMFNNAWLYNR
KTSRVYKYCSKLSEVFEQEIDPVMQSLGYCCGRKLEFSPQTLC
CYGKQLCTIPRDATYYSYQNRYHFCEKCFNEIQGESVSLGDDP
SQPQTTINKEQFSKRKNDTLDPELFVECTECGRKMHQICVLHH
EIIVVPAGFVCDGCLKKSARTRKENKFSAKRLPSTRLGTFLEN
RVNDFLRRQNHPESGEVTVRVVHASDKTVEVKPGMKARFVDSG
EMAESFPYRTKALFAFEEIDGVDLCFFGMHVQEYGSDCPPPNQ
RRVYISYLDSVHFFRPKCLRTAVYHEILIGYLEYVKKLGYTTG
HIVVACPPSEGDDYIFHCHPPDQKIPKPKRLQEWYKKMLDKAV
SERIVHDYKDIFKQATEDRLTSAKELPYFEGDFWPNVLEESIK
ELEQEEEERKREENTSNESTDVTKGDSKNAKKKNNKKTSKNKS
SLSRGNKKKPGMPNVSNDLSQKLYATMEKHKEVFFVIRLIAGP
PAANSLPPIVDPDPLIPCDLMDGRDAFLTLARDKHLEFSSLRR
AQWSTMCMLVELHTQSQD.

[0045] In some embodiments, the epigenetic CpG modifier comprises a DNA methylase, a DNA demethylase, a histone modifying agent, or a histone deacetylase.

[0046] In some embodiments, the effector molecule comprises a zinc finger polypeptide.

[0047] In some embodiments, the effector molecule comprises a Transcription activator-like effector nuclease (TALEN) polypeptide.

[0048] In some embodiments, the site-specific HNF4α disrupting agent further comprises a second nucleic acid molecule encoding a second fusion protein, wherein the second fusion comprises a second site-specific HNF4α targeting moiety which targets a second HNF4α expression control region and a second effector molecule, wherein the second HNF4α expression control region is different than the HNF4α expression control region.

[0049] In one embodiment, the HNF4α expression control region comprises a ZF5 target sequence GGCGGGGGACCGATTAACCAT (SEQ ID NO: 118) and the second HNF4α expression control region comprises a ZF7 target sequence ACTGAACATCGGTGAGTTAGG (SEQ ID NO: 126).

[0050] In one embodiment, the second effector is different than the first effector.

[0051] In one embodiment, the second effector is the same as the first effector.

[0052] In one embodiment, the fusion protein and the second fusion protein are operably linked.

[0053] In one embodiment, the fusion protein and the second fusion protein comprise an amino acid sequence that has at least about 85%, 86%, 87%, 88%, 89%, 90%, 91%, 92%, 93%, 94%, 95%, 96%, 97%, 98%, 99%, or 100% amino acid sequence identity to the entire amino acid sequence of a polypeptide selected from the group consisting of ZF5.3-VPR-tPT2a-ZF7-VPR; ZF7-VPR-tPT2a-ZF5.3-VPR; ZF5.3-VPR-tPT2a-ZF7-p300; and ZF7-p300-tPT2a-ZF5.3-VPR.

[0054] In one embodiment, the fusion protein comprises an amino acid sequence having at least about 85%, 86%, 87%, 88%, 89%, 90%, 91%, 92%, 93%, 94%, 95%, 96%, 97%, 98%, 99%, or 100% amino acid sequence identity to the entire amino acid sequence of ZF5.3-VPR.

[0055] In one embodiment, the fusion protein is encoded by a polynucleotide comprising a nucleotide sequence having at least about 85%, 86%, 87%, 88%, 89%, 90%, 91%, 92%, 93%, 94%, 95%, 96%, 97%, 98%, 99%, or 100% nucleotide sequence identity to the entire nucleotide sequence of a polynucleotide selected from the group consisting of ZF5-VPR mRNA, ZF5.1-VPR mRNA, ZF5.2-VPR mRNA, ZF5.3-VPR mRNA, ZF5.4-VPR mRNA, ZF5.5-VPR mRNA, and ZF5.6-VPR mRNA.

[0056] In one aspect, the present invention provides a site-specific HNF4α disrupting agent. The disrupting agent includes a nucleic acid molecule encoding a fusion protein, wherein the fusion protein comprises an amino acid sequence having at least about 85%, 86%, 87%, 88%, 89%, 90%, 91%, 92%, 93%, 94%, 95%, 96%, 97%, 98%, 99%, or 100% amino acid identity to the entire amino acid sequence of a polypeptide selected from the group consisting of ZF1-VPR, ZF2-VPR, ZF3-VPR, ZF4-VPR, ZF5-VPR, ZF5.3-VPR, ZF6-VPR, ZF7-VPR, ZF8-VPR, ZF9-VPR, ZF10-VPR, ZF11-VPR, ZF12-VPR, ZF13-VPR, ZF14-VPR, and ZF15-VPR.

[0057] In one embodiment, the polypeptide is selected from the group consisting of ZF5-VPR, ZF5.3-VPR, ZF7-VPR, ZF10-VPR, ZF14-VPR, and ZF15-VPR.

[0058] In one embodiment, the polypeptide is ZF5.3-VPR.

[0059] The present invention also provides vectors, such as viral expression vectors and cells comprising the site-specific HNF4α disrupting agents of the invention as well as the vectors of the invention.

[0060] In some embodiments, the site-specific HNF4α disrupting agents of the invention are present in a composition, such as a pharmaceutical composition.

[0061] In some embodiments, the pharmaceutical composition comprises a lipid formulation.

[0062] In some embodiments, the lipid formulation comprises one or more cationic lipids, one or more non-cationic lipids, one or more cholesterol-based lipids, or one or more PEG-modified lipids, or combinations of any of the foregoing.

[0063] In some embodiments, the pharmaceutical composition comprises a lipid nanoparticle.

[0064] In one aspect, the present invention provides a method of modulating expression of hepatocyte nuclear factor 4 alpha- (HNF4α) in a cell. The method includes contacting the cell with a site-specific HNF4α disrupting agent, the disrupting agent comprising a site-specific HNF4α targeting moiety which targets an HNF4α expression control region, and an effector molecule, thereby modulating expression of HNF4α in the cell.

[0065] The modulation of expression may be enhanced expression of HNF4α in the cell or reduced expression of HNF4α in the cell.

[0066] In some embodiments, the site-specific HNF4α targeting moiety comprises a polymeric molecule.

[0067] The polymeric molecule may comprise a polyamide, a polynucleotide, a peptide nucleic acid (PNA).

[0068] In some embodiments, the expression control region comprises an HNF4α-specific transcriptional control element.

[0069] In some embodiments, the transcriptional control element comprises an HNF4α promoter, such as the nucleotide sequence of HNF4α promoter 1, or a fragment thereof, or the nucleotide sequence of HNF4α promoter 2, or a fragment thereof.

[0070] In some embodiments, the transcriptional control element comprises a transcriptional enhancer.

[0071] In some embodiments, the transcriptional control element comprises a transcriptional repressor.

[0072] In some embodiments, the site-specific HNF4α disrupting agent comprises a nucleotide sequence having at least 85%, 86%, 87%, 88%, 89%, 90%, 91%, 92%, 93%, 94%, 95%, 96%, 97%, 98%, 99%, or 100% nucleotide identity to the entire nucleotide sequence of any of the nucleotide sequences in any one of Tables 2, 3, 4, and 9.

[0073] In some embodiments, the site-specific HNF4α disrupting agent comprises a polynucleotide encoding a DNA-binding domain of a Transcription activator-like effector (TALE) polypeptide or a zinc finger (ZNF) polypeptide, or fragment thereof, that specifically binds to the HNF4α expression control region.

[0074] In some embodiments, the DNA-binding domain of the TALE or ZNF comprises an amino acid sequence having at least 85%, 86%, 87%, 88%, 89%, 90%, 91%, 92%, 93%, 94%, 95%, 96%, 97%, 98%, 99%, or 100% amino acid identity to the entire amino acid sequence of an amino acid sequence selected from the amino acid sequences listed in column 5 of Table 6A or column 4 of Table 10.

[0075] In some embodiments, the expression control region comprises one or more HNF4α-associated anchor sequences within an anchor sequence-mediated conjunction comprising a first and a second HNF4α-associated anchor sequence.

[0076] In some embodiments, the anchor sequence comprises a CCCTC-binding factor (CTCF) binding motif.

[0077] In some embodiments, the anchor sequence-mediated conjunction comprises one or more transcriptional control elements internal to the conjunction.

[0078] In some embodiments, the anchor sequence-mediated conjunction comprises one or more transcriptional control elements external to the conjunction.

[0079] In some embodiments, the first and/or the second anchor sequence is located within about 500 kb of the transcriptional control element.

[0080] In some embodiments, the first and/or the second anchor sequence is located within 300 kb of the transcriptional control element.

[0081] In some embodiments, the site-specific HNF4α disrupting agent comprises a nucleotide modification.

[0082] In some embodiments, the effector molecule comprises a polypeptide.

[0083] In some embodiments, the polypeptide comprises a nucleic acid molecule encoding a fusion protein comprising the site-specific HNF4α targeting moiety which targets an HNF4α expression regulatory region, and the effector molecule.

[0084] In some embodiments, the fusion protein comprises a peptide-nucleic acid fusion molecule.

[0085] In some embodiments, the effector is selected from the group consisting of a nuclease, a physical blocker, an epigenetic recruiter, and an epigenetic CpG modifier, and combinations of any of the foregoing.

[0086] In some embodiments, the effector comprises a CRISPR associated protein (Cas) polypeptide or nucleic acid molecule encoding the Cas polypeptide.

[0087] In some embodiments, the Cas polypeptide is an enzymatically inactive Cas polypeptide.

[0088] In some embodiments, the Cas polypeptide further comprises a catalytically active domain of human exonuclease 1 (hEXO1).

[0089] In some embodiments, the epigenetic recruiter comprises a transcriptional enhancer or a transcriptional repressor.

[0090] In some embodiments, the transcriptional enhancer is a VPR.

[0091] In some embodiments, the VPR comprises an amino acid sequence having at least about 85%, 86%, 87%, 88%, 89%, 90%, 91%, 92%, 93%, 94%, 95%, 96%, 97%, 98%, 99%, or 100% amino acid identity to the entire amino acid sequence of

(SEQ ID NO: 66)
DALDDFDLDMLGSDALDDFDLDMLGSDALDDFDLDMLGSDALD
DFDLDMLSGGPKKKRKVGSQYLPDTDDRHRIEEKRKRTYETFK
SIMKKSPFSGPTDPRPPPRRIAVPSRSSASVPKPAPQPYPFTS
SLSTINYDEFPTMVFPSGQISQASALAPAPPQVLPQAPAPAPA
PAMVSALAQAPAPVPVLAPGPPQAVAPPAPKPTQAGEGTLSEA
LLQLQFDDEDLGALLGNSTDPAVFTDLASVDNSEFQQLLNQGI
PVAPHTTEPMLMEYPEAITRLVTGAQRPPDPAPAPLGAPGLPN
GLLSGDEDFSSIADMDFSALLGSGSGSRDSREGMFLPKPEAGS
AISDVFEGREVCQPKRLRPFHPPGSPWANRPLPASLAPTPTGP
VHEPVGSLTPAPVPQPLDPAPAVTPEASHLLEDPDEETSQAVK
ALREMADTVIPQKEEAAICGQMDLSHPPPRGHLDELTTTLESM
TEDLNLDSPLTPELNEILDTFLNDECLLHAMHISTGLSIFDTSLF.

[0092] In some embodiments, the transcriptional enhancer comprises two, three, four, or five VPRs.

[0093] In some embodiments, the transcriptional enhancer is a p300.

[0094] In some embodiments, the p300 has an amino acid sequence having at least about 85%, 86%, 87%, 88%, 89%, 90%, 91%, 92%, 93%, 94%, 95%, 96%, 97%, 98%, 99%, or 100% amino acid identity to the entire amino acid sequence of

(SEQ ID NO: 67)
IFKPEELRQALMPTLEALYRQDPESLPFRQPVDPQLLGIPDYFDIVKSPM
DLSTIKRKLDTGQYQEPWQYVDDIWLMFNNAWLYNRKTSRVYKYCSKLSE
VFEQEIDPVMQSLGYCCGRKLEFSPQTLCCYGKQLCTIPRDATYYSYQNR
YHFCEKCFNEIQGESVSLGDDPSQPQTTINKEQFSKRKNDTLDPELFVEC
TECGRKMHQICVLHHEIIWPAGFVCDGCLKKSARTRKENKFSAKRLPSTR
LGTFLENRVNDFLRRQNHPESGEVTVRVVHASDKTVEVKPGMKARFVDSG
EMAESFPYRTKALFAFEEIDGVDLCFFGMHVQEYGSDCPPPNQRRVYISY
LDSVHFFRPKCLRTAVYHEILIGYLEYVKKLGYTTGHIWACPPSEGDDYI
FHCHPPDQKIPKPKRLQEWYKKMLDKAVSERIVHDYKDIFKQATEDRLTS
AKELPYFEGDFWPNVLEESIKELEQEEEERKREENTSNESTDVTKGDSKN
AKKKNNKKTSKNKSSLSRGNKKKPGMPNVSNDLSQKLYATMEKHKEVFFV
IRLIAGPAANSLPPIVDPDPLIPCDLMDGRDAFLTLARDKHLEFSSLRRA
QWSTMCMLVELHTQSQD.

[0095] In some embodiments, the epigenetic CpG modifier comprises a DNA methylase, a DNA demethylase, a histone modifying agent, or a histone deacetylase.

[0096] In some embodiments, the effector molecule comprises a zinc finger polypeptide.

[0097] In some embodiments, the effector molecule comprises a Transcription activator-like effector nuclease (TALEN) polypeptide.

[0098] In some embodiments, the fusion protein comprises an enzymatically inactive Cas polypeptide and an epigenetic recruiter polypeptide.

[0099] In some embodiments, the fusion protein comprises an enzymatically Cas polypeptide and an epigenetic CpG modifier polypeptide.

[0100] In some embodiments, the site-specific HNF4α disrupting agent comprises a second nucleic acid molecule encoding a second fusion protein, wherein the second fusion protein comprises a second site-specific HNF4α targeting moiety which targets a second HNF4α expression control region and a second effector molecule, wherein the second HNF4α expression control region is different than the HNF4α expression control region.

[0101] In some embodiments, the HNF4α expression control region comprises a ZF5 target sequence GGCGGGGGACCGATTAACCAT (SEQ ID NO: 118) and the second HNF4α expression control region comprises a ZF7 target sequence ACTGAACATCGGTGAGTTAGG (SEQ ID NO: 126).

[0102] In some embodiments, the second effector is different than the effector.

[0103] In some embodiments, the second effector is the same as the effector.

[0104] In some embodiments, the fusion protein and the second fusion protein are operably linked.

[0105] In some embodiments, the fusion protein and the second fusion protein comprise an amino acid sequence that has at least about 85%, 86%, 87%, 88%, 89%, 90%, 91%, 92%, 93%, 94%, 95%, 96%, 97%, 98%, 99%, or 100% sequence identity to the entire amino acid sequence of a polypeptide selected from ZF5.3-VPR-tPT2a-ZF7-VPR protein, ZF7-VPR-tPT2a-ZF5.3-VPR protein, ZF5.3-VPR-tPT2a-ZF7-p300 protein, and ZF7-p300-tPT2a-ZF5.3-VPR protein.

[0106] In some embodiments, the fusion protein comprises an amino acid sequence having at least 85%, 86%, 87%, 88%, 89%, 90%, 91%, 92%, 93%, 94%, 95%, 96%, 97%, 98%, 99%, or 100% sequence identity to the entire amino acid sequence of ZF5.3-VPR protein.

[0107] In some embodiments, the fusion protein is encoded by a polynucleotide having a sequence that has at least about 85%, 86%, 87%, 88%, 89%, 90%, 91%, 92%, 93%, 94%, 95%, 96%, 97%, 98%, 99%, or 100% sequence identity to the entire nucleotide sequence of a polynucleotide selected from the group consisting of ZF5-VPR mRNA, ZF5.1-VPR mRNA, ZF5.2-VPR mRNA, ZF5.3-VPR mRNA, ZF5.4-VPR mRNA, ZF5.5-VPR mRNA, and ZF5.6-VPR mRNA.

[0108] In some embodiments, the administration of the site-specific HNF4α disrupting agent and the second site-specific HNF4α disrupting agent has a synergistic effect in modulating the expression of HNF4α.

[0109] In some embodiments, the HNF4α expression control region comprises a ZF5 target sequence GGCGGGGGACCGATTAACCAT (SEQ ID NO: 118) and the second HNF4α expression control region comprises a sequence selected from ZF7 target sequence ACTGAACATCGGTGAGTTAGG (SEQ ID NO: 126), ZF10 target sequence CCTGCAGCCCCGCCCAGCCTA (SEQ ID NO: 138), ZF14 target sequence GGAGGGGTGGGGGTTAATGGT (SEQ ID NO: 154), and ZF15 target sequence GAAGGGGTGGAGGCTCTGCCG (SEQ ID NO: 158).

[0110] In some embodiments, the HNF4α expression control region comprises a ZF5 target sequence GGCGGGGGACCGATTAACCAT (SEQ ID NO: 118) and the second HNF4α expression control region comprises a ZF7 target sequence ACTGAACATCGGTGAGTTAGG (SEQ ID NO: 126).

[0111] In some embodiments, the fusion protein comprises a sequence having at least 85%, 86%, 87%, 88%, 89%, 90%, 91%, 92%, 93%, 94%, 95%, 96%, 97%, 98%, 99%, or 100% sequence identity to the entire amino acid sequence of ZF5-VPR, and the second fusion protein comprises a sequence having at least 85%, 86%, 87%, 88%, 89%, 90%, 91%, 92%, 93%, 94%, 95%, 96%, 97%, 98%, 99%, or 100% sequence identity to the entire amino acid sequence of a polypeptide selected from ZF7-VPR, ZF10-VPR, ZF14-VPR, and ZF15-VPR.

[0112] In some embodiments, the fusion protein comprises an amino acid sequence having at least about 85%, 86%, 87%, 88%, 89%, 90%, 91%, 92%, 93%, 94%, 95%, 96%, 97%, 98%, 99%, or 100% identity to the entire amino acid sequence of a polypeptide selected from the group consisting of ZF1-VPR, ZF2-VPR, ZF3-VPR, ZF4-VPR, ZF5-VPR, ZF5.3-VPR, ZF6-VPR, ZF7-VPR, ZF8-VPR, ZF9-VPR, ZF10-VPR, ZF11-VPR, ZF12-VPR, ZF13-VPR, ZF14-VPR, and ZF15-VPR.

[0113] In some embodiments, the polypeptide is selected from the group consisting of ZF5-VPR, ZF5.3-VPR, ZF7-VPR, ZF10-VPR, ZF14-VPR, and ZF15-VPR.

[0114] In some embodiments, the polypeptide is ZF5.3-VPR.

[0115] In some embodiments, the site-specific disrupting agent, the effector, or both the site-specific disrupting agent and the effector are present in a vector, such as a viral expression vector.

[0116] In some embodiments, the site-specific disrupting agent and the effector are present in the same vector.

[0117] In some embodiments, the site-specific disrupting agent and the effector are present in different vectors.

[0118] In some embodiments, the site-specific disrupting agent, the effector, or both the site-specific disrupting agent and the effector are present in a composition.

[0119] In some embodiments, the site-specific disrupting agent and the effector are present in the same composition.

[0120] In some embodiments, the site-specific disrupting agent and the effector are present in different compositions.

[0121] In some embodiments, the composition comprises a pharmaceutical composition.

[0122] In some embodiments, the pharmaceutical composition comprises a lipid formulation.

[0123] In some embodiments, the lipid formulation comprises one or more cationic lipids, one or more non-cationic lipids, one or more cholesterol-based lipids, or one or more PEG-modified lipids, or combinations of any of the foregoing.

[0124] In some embodiments, the pharmaceutical composition comprises a lipid nanoparticle.

[0125] In some embodiments, the cell is a mammalian cell, such as a somatic cell or a primary cell.

[0126] In some embodiments, the contacting is performed in vitro.

[0127] In some embodiments, the contacting is performed in vivo.

[0128] In some embodiments, the contacting is performed ex vivo.

[0129] In some embodiments, the methods of the invention further comprise administering the cell to a subject.

[0130] In some embodiments, the cell is within a subject.

[0131] In some embodiments, the subject has an HNF4α-associated disease.

[0132] In some embodiments, the HNF4α-associated disease is selected from the group consisting of fatty liver (steatosis), nonalcoholic steatohepatitis (NASH), cirrhosis of the liver, accumulation of fat in the liver, inflammation of the liver, hepatocellular necrosis, liver fibrosis, and nonalcoholic fatty liver disease (NAFLD), polycystic kidney disease, inflammatory bowel disease (IBD), and MODY I.

[0133] In another aspect, the present invention provides a method for treating a subject having an HNF4α-associated disease. The method includes administering to the subject a therapeutically effective amount of the site-specific HNF4α disrupting agent, the disrupting agent comprising a site-specific HNF4α targeting moiety which targets an HNF4α expression control region, and an effector molecule, thereby treating the subject.

[0134] In some embodiments, the HNF4α-associated disease is hepatocellular cancer and the site-specific HNF4α disrupting agent reduces expression of HNF4α in the subject.

[0135] In some embodiments, the HNF4α-associated disease is selected from the group consisting of fatty liver (steatosis), nonalcoholic steatohepatitis (NASH), cirrhosis of the liver, accumulation of fat in the liver, inflammation of the liver, hepatocellular necrosis, liver fibrosis, and nonalcoholic fatty liver disease (NAFLD) and the site-specific HNF4α disrupting agent enhances expression of HNF4α in the subject.

[0136] In some embodiments, the site-specific HNF4α disrupting agent and the effector molecule are administered to the subject concurrently.

[0137] In some embodiments, the site-specific HNF4α disrupting agent and the effector molecule are administered to the subject sequentially.

[0138] In some embodiments, the effector molecule is administered to the subject prior to administration of the site-specific HNF4α disrupting agent.

[0139] In some embodiments, the site-specific HNF4α disrupting agent is administered to the subject prior to administration of the effector molecule.

[0140] In one aspect, the present invention provides a site-specific HNF4α disrupting agent, comprising a site-specific HNF4α targeting moiety which targets an HNF4α expression control region, wherein the HNFα expression control region comprises the nucleotide sequence of any one of the nucleotide sequences listed in column 3 of Table 1 or column 4 of Table 10.

[0141] In one embodiment, the site-specific HNF4α targeting moiety comprises a nucleotide sequence having at least 85%, 86%, 87%, 88%, 89%, 90%, 91%, 92%, 93%, 94%, 95%, 96%, 97%, 98%, 99%, or 100% nucleotide identity to the entire nucleotide sequence of any of the nucleotide sequences in any one of Table 2, 3, 4, and 9.

[0142] In one embodiment, the site-specific HNF4α targeting moiety comprises a polymeric molecule comprising a polynucleotide encoding a DNA-binding domain of a Transcription activator-like effector (TALE) polypeptide or a zinc finger (ZNF) polypeptide, or fragment thereof, that specifically binds to the HNF4α expression control region.

[0143] In one embodiment, the DNA-binding domain of the TALE or ZNF polypeptide comprises an amino acid sequence having at least about 85%, 86%, 87%, 88%, 89%, 90%, 91%, 92%, 93%, 94%, 95%, 96%, 97%, 98%, 99%, or 100% amino acid identity to the entire amino acid sequence of any one of the amino acid sequences listed in column 5 of Table 6A or column 4 of Table 10.

[0144] In one embodiment, the HNFα expression control region comprises a nucleotide sequence of a ZF5 target sequence GGCGGGGGACCGATTAACCAT (SEQ ID NO: 118).

[0145] In one embodiment, the HNFα expression control region comprises a nucleotide sequence of a ZF7 target sequence ACTGAACATCGGTGAGTTAGG (SEQ ID NO: 126).

[0146] In one aspect, the present invention provides a site-specific HNF4α disrupting agent, comprising a polynucleotide encoding the amino acid sequence of ZF5-VPR comprising the amino acid sequence of

(SEQ ID NO: 301)
MAPKKKRKVGIHGVPAAGSSGSLEPGEKPYKCPECGKSFSTSGNLTEHQR
THTGEKPYKCPECGKSFSDSGNLRVHQRTHTGEKPYKCPECGKSFSHKNA
LQNHQRTHTGEKPYKCPECGKSFSRNDTLTEHQRTHTGEKPYKCPECGKS
FSQRAHLERHQRTHTGEKPYKCPECGKSFSRSDKLVRHQRTHTGEKPYKC
PECGKSFSDPGHLVRHQRTHTGEKPTGKKTSASGSGGGSGGDALDDFDLD
MLGSDALDDFDLDMLGSDALDDFDLDMLGSDALDDFDLDMLSGGPKKKRK
VGSQYLPDTDDRHRIEEKRKRTYETFKSIMKKSPFSGPTDPRPPPRRIAV
PSRSSASVPKPAPQPYPFTSSLSTINYDEFPTMVFPSGQISQASALAPAP
PQVLPQAPAPAPAPAMVSALAQAPAPVPVLAPGPPQAVAPPAPKPTQAGE
GTLSEALLQLQFDDEDLGALLGNSTDPAVFTDLASVDNSEFQQLLNQGIP
VAPHTTEPMLMEYPEAITRLVTGAQRPPDPAPAPLGAPGLPNGLLSGDED
FSSIADMDFSALLGSGSGSRDSREGMFLPKPEAGSAISDVFEGREVCQPK
RLRPFHPPGSPWANRPLPASLAPTPTGPVHEPVGSLTPAPVPQPLDPAPA
VTPEASHLLEDPDEETSQAVKALREMADTVIPQKEEAAICGQMDLSHPPP
RGHLDELTTTLESMTEDLNLDSPLTPELNEILDTFLNDECLLHAMHISTG
LSIFDTSLFSGGKRPAATKKAGQAKKKKGSYPYDVPDYA.

[0147] In another aspect, the present invention provides a site-specific HNF4α disrupting agent, comprising a polynucleotide encoding the amino acid sequence of ZF5.3-VPR comprising the amino acid sequence of

(SEQ ID NO: 301)
MAPKKKRKVGIHGVPAAGSSGSLEPGEKPYKCPECGKSFSTSGNLTEHQR
THTGEKPYKCPECGKSFSDSGNLRVHQRTHTGEKPYKCPECGKSFSHKNA
LQNHQRTHTGEKPYKCPECGKSFSRNDTLTEHQRTHTGEKPYKCPECGKS
FSQRAHLERHQRTHTGEKPYKCPECGKSFSRSDKLVRHQRTHTGEKPYKC
PECGKSFSDPGHLVRHQRTHTGEKPTGKKTSASGSGGGSGGDALDDFDLD
MLGSDALDDFDLDMLGSDALDDFDLDMLGSDALDDFDLDMLSGGPKKKRK
VGSQYLPDTDDRHRIEEKRKRTYETFKSIMKKSPFSGPTDPRPPPRRIAV
PSRSSASVPKPAPQPYPFTSSLSTINYDEFPTMVFPSGQISQASALAPAP
PQVLPQAPAPAPAPAMVSALAQAPAPVPVLAPGPPQAVAPPAPKPTQAGE
GTLSEALLQLQFDDEDLGALLGNSTDPAVFTDLASVDNSEFQQLLNQGIP
VAPHTTEPMLMEYPEAITRLVTGAQRPPDPAPAPLGAPGLPNGLLSGDED
FSSIADMDFSALLGSGSGSRDSREGMFLPKPEAGSAISDVFEGREVCQPK
RLRPFHPPGSPWANRPLPASLAPTPTGPVHEPVGSLTPAPVPQPLDPAPA
VTPEASHLLEDPDEETSQAVKALREMADTVIPQKEEAAICGQMDLSHPPP
RGHLDELTTTLESMTEDLNLDSPLTPELNEILDTFLNDECLLHAMHISTG
LSIFDTSLFSGGKRPAATKKAGQAKKKKGSYPYDVPDYA.

[0148] In yet another aspect, the present invention provides a site-specific HNF4α disrupting agent, comprising a polynucleotide encoding the amino acid sequence of ZF7-VPR comprising the amino acid sequence of

(SEQ ID NO: 302)
MAPKKKRKVGIHGVPAAGSSGSLEPGEKPYKCPECGKSFSRSDHLTNHQR
THTGEKPYKCPECGKSFSTSGSLVRHQRTHTGEKPYKCPECGKSFSQAGH
LASHQRTHTGEKPYKCPECGKSFSRSDKLTEHQRTHTGEKPYKCPECGKS
FSTSGNLTEHQRTHTGEKPYKCPECGKSFSQSSNLVRHQRTHTGEKPYKC
PECGKSFSTHLDLIRHQRTHTGEKPTGKKTSASGSGGGSGGDALDDFDLD
MLGSDALDDFDLDMLGSDALDDFDLDMLGSDALDDFDLDMLSGGPKKKRK
VGSQYLPDTDDRHRIEEKRKRTYETFKSIMKKSPFSGPTDPRPPPRRIAV
PSRSSASVPKPAPQPYPFTSSLSTINYDEFPTMVFPSGQISQASALAPAP
PQVLPQAPAPAPAPAMVSALAQAPAPVPVLAPGPPQAVAPPAPKPTQAGE
GTLSEALLQLQFDDEDLGALLGNSTDPAVFTDLASVDNSEFQQLLNQGIP
VAPHTTEPMLMEYPEAITRLVTGAQRPPDPAPAPLGAPGLPNGLLSGDED
FSSIADMDFSALLGSGSGSRDSREGMFLPKPEAGSAISDVFEGREVCQPK
RLRPFHPPGSPWANRPLPASLAPTPTGPVHEPVGSLTPAPVPQPLDPAPA
VTPEASHLLEDPDEETSQAVKALREMADTVIPQKEEAAICGQMDLSHPPP
RGHLDELTTTLESMTEDLNLDSPLTPELNEILDTFLNDECLLHAMHISTG
LSIFDTSLFSGGKRPAATKKAGQAKKKKGSYPYDVPDYA.

[0149] In one aspect, the present invention provides a site-specific HNF4α disrupting agent, comprising a polynucleotide encoding the amino acid sequence of ZF10-VPR comprising the amino acid sequence of

(SEQ ID NO: 303)
MAPKKKRKVGIHGVPAAGSSGSLEPGEKPYKCPECGKSFSQNSTLTEHQR
THTGEKPYKCPECGKSFSERSHLREHQRTHTGEKPYKCPECGKSFSSKKH
LAEHQRTHTGEKPYKCPECGKSFSRNDTLTEHQRTHTGEKPYKCPECGKS
FSDCRDLARHQRTHTGEKPYKCPECGKSFSQSGDLRRHQRTHTGEKPYKC
PECGKSFSTKNSLTEHQRTHTGEKPTGKKTSASGSGGGSGGDALDDFDLD
MLGSDALDDFDLDMLGSDALDDFDLDMLGSDALDDFDLDMLSGGPKKKRK
VGSQYLPDTDDRHRIEEKRKRTYETFKSIMKKSPFSGPTDPRPPPRRIAV
PSRSSASVPKPAPQPYPFTSSLSTINYDEFPTMVFPSGQISQASALAPAP
PQVLPQAPAPAPAPAMVSALAQAPAPVPVLAPGPPQAVAPPAPKPTQAGE
GTLSEALLQLQFDDEDLGALLGNSTDPAVFTDLASVDNSEFQQLLNQGIP
VAPHTTEPMLMEYPEAITRLVTGAQRPPDPAPAPLGAPGLPNGLLSGDED
FSSIADMDFSALLGSGSGSRDSREGMFLPKPEAGSAISDVFEGREVCQPK
RLRPFHPPGSPWANRPLPASLAPTPTGPVHEPVGSLTPAPVPQPLDPAPA
VTPEASHLLEDPDEETSQAVKALREMADTVIPQKEEAAICGQMDLSHPPP
RGHLDELTTTLESMTEDLNLDSPLTPELNEILDTFLNDECLLHAMHISTG
LSIFDTSLFSGGKRPAATKKAGQAKKKKGSYPYDVPDYA.

[0150] In another aspect, the present invention provides a site-specific HNF4α disrupting agent, comprising a polynucleotide encoding the amino acid sequence of ZF14-VPR comprising the amino acid sequence of

(SEQ ID NO: 304)
MAPKKKRKVGIHGVPAAGSSGSLEPGEKPYKCPECGKSFSTSGHLVRHQR
THTGEKPYKCPECGKSFSTTGNLTVHQRTHTGEKPYKCPECGKSFSTSGS
LVRHQRTHTGEKPYKCPECGKSFSRSDKLVRHQRTHTGEKPYKCPECGKS
FSRSDELVRHQRTHTGEKPYKCPECGKSFSRSDKLVRHQRTHTGEKPYKC
PECGKSFSQRAHLERHQRTHTGEKPTGKKTSASGSGGGSGGDALDDFDLD
MLGSDALDDFDLDMLGSDALDDFDLDMLGSDALDDFDLDMLSGGPKKKRK
VGSQYLPDTDDRHRIEEKRKRTYETFKSIMKKSPFSGPTDPRPPPRRIAV
PSRSSASVPKPAPQPYPFTSSLSTINYDEFPTMVFPSGQISQASALAPAP
PQVLPQAPAPAPAPAMVSALAQAPAPVPVLAPGPPQAVAPPAPKPTQAGE
GTLSEALLQLQFDDEDLGALLGNSTDPAVFTDLASVDNSEFQQLLNQGIP
VAPHTTEPMLMEYPEAITRLVTGAQRPPDPAPAPLGAPGLPNGLLSGDED
FSSIADMDFSALLGSGSGSRDSREGMFLPKPEAGSAISDVFEGREVCQPK
RLRPFHPPGSPWANRPLPASLAPTPTGPVHEPVGSLTPAPVPQPLDPAPA
VTPEASHLLEDPDEETSQAVKALREMADTVIPQKEEAAICGQMDLSHPPP
RGHLDELTTTLESMTEDLNLDSPLTPELNEILDTFLNDECLLHAMHISTG
LSIFDTSLFSGGKRPAATKKAGQAKKKKGSYPYDVPDYA.

[0151] In one aspect, the present invention provides a site-specific HNF4α disrupting agent, comprising a polynucleotide encoding the amino acid sequence of ZF15-VPR comprising the amino acid sequence of

(SEQ ID NO: 305)
MAPKKKRKVGIHGVPAAGSSGSLEPGEKPYKCPECGKSFSRNDTLTEHQR
THTGEKPYKCPECGKSFSRNDALTEHQRTHTGEKPYKCPECGKSFSTSGE
LVRHQRTHTGEKPYKCPECGKSFSRSDNLVRHQRTHTGEKPYKCPECGKS
FSRSDELVRHQRTHTGEKPYKCPECGKSFSRSDKLVRHQRTHTGEKPYKC
PECGKSFSQSSNLVRHQRTHTGEKPTGKKTSASGSGGGSGGDALDDFDLD
MLGSDALDDFDLDMLGSDALDDFDLDMLGSDALDDFDLDMLSGGPKKKRK
VGSQYLPDTDDRHRIEEKRKRTYETFKSIMKKSPFSGPTDPRPPPRRIAV
PSRSSASVPKPAPQPYPFTSSLSTINYDEFPTMVFPSGQISQASALAPAP
PQVLPQAPAPAPAPAMVSALAQAPAPVPVLAPGPPQAVAPPAPKPTQAGE
GTLSEALLQLQFDDEDLGALLGNSTDPAVFTDLASVDNSEFQQLLNQGIP
VAPHTTEPMLMEYPEAITRLVTGAQRPPDPAPAPLGAPGLPNGLLSGDED
FSSIADMDFSALLGSGSGSRDSREGMFLPKPEAGSAISDVFEGREVCQPK
RLRPFHPPGSPWANRPLPASLAPTPTGPVHEPVGSLTPAPVPQPLDPAPA
VTPEASHLLEDPDEETSQAVKALREMADTVIPQKEEAAICGQMDLSHPPP
RGHLDELTTTLESMTEDLNLDSPLTPELNEILDTFLNDECLLHAMHISTG
LSIFDTSLFSGGKRPAATKKAGQAKKKKGSYPYDVPDYA.

[0152] In one aspect, the present invention provides a bicistronic site-specific HNF4α disrupting agent, comprising a polynucleotide encoding the amino acid sequence of a bicistronic ZF5.3-VPR-tPT2a-ZF7-VPR comprising the amino acid sequence of

(SEQ ID NO: 306)
MAPKKKRKVGIHGVPAAGSSGSSGSLEPGEKPYKCPECGKSFSTSGNLTE
HQRTHTGEKPYKCPECGKSFSDSGNLRVHQRTHTGEKPYKCPECGKSFSH
KNALQNHQRTHTGEKPYKCPECGKSFSRNDTLTEHQRTHTGEKPYKCPEC
GKSFSQRAHLERHQRTHTGEKPYKCPECGKSFSRSDKLVRHQRTHTGEKP
YKCPECGKSFSDPGHLVRHQRTHTGEKPTGKKTSASGSGGGSGGDALDDF
DLDMLGSDALDDFDLDMLGSDALDDFDLDMLGSDALDDFDLDMLSGGPKK
KRKVGSQYLPDTDDRHRIEEKRKRTYETFKSIMKKSPFSGPTDPRPPPRR
IAVPSRSSASVPKPAPQPYPFTSSLSTINYDEFPTMVFPSGQISQASALA
PAPPQVLPQAPAPAPAPAMVSALAQAPAPVPVLAPGPPQAVAPPAPKPTQ
AGEGTLSEALLQLQFDDEDLGALLGNSTDPAVFTDLASVDNSEFQQLLNQ
GIPVAPHTTEPMLMEYPEAITRLVTGAQRPPDPAPAPLGAPGLPNGLLSG
DEDFSSIADMDFSALLGSGSGSRDSREGMFLPKPEAGSAISDVFEGREVC
QPKRLRPFHPPGSPWANRPLPASLAPTPTGPVHEPVGSLTPAPVPQPLDP
APAVTPEASHLLEDPDEETSQAVKALREMADTVIPQKEEAAICGQMDLSH
PPPRGHLDELTTTLESMTEDLNLDSPLTPELNEILDTFLNDECLLHAMHI
STGLSIFDTSLFSGGKRPAATKKAGQAKKKKGSYPYDVPDYAATNFSLLK
QAGDVEENPGPTSAGKLGSGEGRGSLLTCGDVEENPGPLEGSSGSGSLEP
GEKPYKCPECGKSFSRSDHLTNHQRTHTGEKPYKCPECGKSFSTSGSLVR
HQRTHTGEKPYKCPECGKSFSQAGHLASHQRTHTGEKPYKCPECGKSFSR
SDKLTEHQRTHTGEKPYKCPECGKSFSTSGNLTEHQRTHTGEKPYKCPEC
GKSFSQSSNLVRHQRTHTGEKPYKCPECGKSFSTHLDLIRHQRTHTGEKP
TGKKTSASGSGGGSGGDALDDFDLDMLGSDALDDFDLDMLGSDALDDFDL
DMLGSDALDDFDLDMLSGGPKKKRKVGSQYLPDTDDRHRIEEKRKRTYET
FKSIMKKSPFSGPTDPRPPPRRIAVPSRSSASVPKPAPQPYPFTSSLSTI
NYDEFPTMVFPSGQISQASALAPAPPQVLPQAPAPAPAPAMVSALAQAPA
PVPVLAPGPPQAVAPPAPKPTQAGEGTLSEALLQLQFDDEDLGALLGNST
DPAVFTDLASVDNSEFQQLLNQGIPVAPHTTEPMLMEYPEAITRLVTGAQ
RPPDPAPAPLGAPGLPNGLLSGDEDFSSIADMDFSALLGSGSGSRDSREG
MFLPKPEAGSAISDVFEGREVCQPKRLRPFHPPGSPWANRPLPASLAPTP
TGPVHEPVGSLTPAPVPQPLDPAPAVTPEASHLLEDPDEETSQAVKALRE
MADTVIPQKEEAAICGQMDLSHPPPRGHLDELTTTLESMTEDLNLDSPLT
PELNEILDTFLNDECLLHAMHISTGLSIFDTSLFSGGKRPAATKKAGQAK
KKKGSYPYDVPDYA.

[0153] In one aspect, the present invention provides a bicistronic site-specific HNF4α disrupting agent, comprising a polynucleotide encoding the amino acid sequence of a bicistronic ZF7-VPR-tPT2a-ZF5.3-VPR comprising the amino acid sequence of

(SEQ ID NO: 178)
MAPKKKRKVGIHGVPAAGSSGSLEPGEKPYKCPECGKSFSRSDHLTNHQR
THTGEKPYKCPECGKSFSTSGSLVRHQRTHTGEKPYKCPECGKSFSQAGH
LASHQRTHTGEKPYKCPECGKSFSRSDKLTEHQRTHTGEKPYKCPECGKS
FSTSGNLTEHQRTHTGEKPYKCPECGKSFSQSSNLVRHQRTHTGEKPYKC
PECGKSFSTHLDLIRHQRTHTGEKPTGKKTSASGSGGGSGGDALDDFDLD
MLGSDALDDFDLDMLGSDALDDFDLDMLGSDALDDFDLDMLSGGPKKKRK
VGSQYLPDTDDRHRIEEKRKRTYETFKSIMKKSPFSGPTDPRPPPRRIAV
PSRSSASVPKPAPQPYPFTSSLSTINYDEFPTMVFPSGQISQASALAPAP
PQVLPQAPAPAPAPAMVSALAQAPAPVPVLAPGPPQAVAPPAPKPTQAGE
GTLSEALLQLQFDDEDLGALLGNSTDPAVFTDLASVDNSEFQQLLNQGIP
VAPHTTEPMLMEYPEAITRLVTGAQRPPDPAPAPLGAPGLPNGLLSGDED
FSSIADMDFSALLGSGSGSRDSREGMFLPKPEAGSAISDVFEGREVCQPK
RLRPFHPPGSPWANRPLPASLAPTPTGPVHEPVGSLTPAPVPQPLDPAPA
VTPEASHLLEDPDEETSQAVKALREMADTVIPQKEEAAICGQMDLSHPPP
RGHLDELTTTLESMTEDLNLDSPLTPELNEILDTFLNDECLLHAMHISTG
LSIFDTSLFSGGKRPAATKKAGQAKKKKGSYPYDVPDYAATNFSLLKQAG
DVEENPGPTSAGKLGSGEGRGSLLTCGDVEENPGPLEGSSGSLEPGEKPY
KCPECGKSFSTSGNLTEHQRTHTGEKPYKCPECGKSFSDSGNLRVHQRTH
TGEKPYKCPECGKSFSHKNALQNHQRTHTGEKPYKCPECGKSFSRNDTLT
EHQRTHTGEKPYKCPECGKSFSQRAHLERHQRTHTGEKPYKCPECGKSFS
RSDKLVRHQRTHTGEKPYKCPECGKSFSDPGHLVRHQRTHTGEKPTGKKT
SASGSGGGSGGDALDDFDLDMLGSDALDDFDLDMLGSDALDDFDLDMLGS
DALDDFDLDMLSGGPKKKRKVGSQYLPDTDDRHRIEEKRKRTYETFKSIM
KKSPFSGPTDPRPPPRRIAVPSRSSASVPKPAPQPYPFTSSLSTINYDEF
PTMVFPSGQISQASALAPAPPQVLPQAPAPAPAPAMVSALAQAPAPVPVL
APGPPQAVAPPAPKPTQAGEGTLSEALLQLQFDDEDLGALLGNSTDPAVF
TDLASVDNSEFQQLLNQGIPVAPHTTEPMLMEYPEAITRLVTGAQRPPDP
APAPLGAPGLPNGLLSGDEDFSSIADMDFSALLGSGSGSRDSREGMFLPK
PEAGSAISDVFEGREVCQPKRLRPFHPPGSPWANRPLPASLAPTPTGPVH
EPVGSLTPAPVPQPLDPAPAVTPEASHLLEDPDEETSQAVKALREMADTV
IPQKEEAAICGQMDLSHPPPRGHLDELTTTLESMTEDLNLDSPLTPELNE
ILDTFLNDECLLHAMHISTGLSIFDTSLFSGGKRPAATKKAGQAKKKKGS
YPYDVPDYA.

[0154] In one aspect, the present invention provides a bicistronic site-specific HNF4α disrupting agent, comprising a polynucleotide encoding the amino acid sequence of a bicistronic ZF5.3-VPR-tPT2a-ZF7-p300 comprising the amino acid sequence of

(SEQ ID NO: 307)
MAPKKKRKVGIHGVPAAGSSGSSGSLEPGEKPYKCPECGKSFSTSGNLTE
HQRTHTGEKPYKCPECGKSFSDSGNLRVHQRTHTGEKPYKCPECGKSFSH
KNALQNHQRTHTGEKPYKCPECGKSFSRNDTLTEHQRTHTGEKPYKCPEC
GKSFSQRAHLERHQRTHTGEKPYKCPECGKSFSRSDKLVRHQRTHTGEKP
YKCPECGKSFSDPGHLVRHQRTHTGEKPTGKKTSASGSGGGSGGDALDDF
DLDMLGSDALDDFDLDMLGSDALDDFDLDMLGSDALDDFDLDMLSGGPKK
KRKVGSQYLPDTDDRHRIEEKRKRTYETFKSIMKKSPFSGPTDPRPPPRR
IAVPSRSSASVPKPAPQPYPFTSSLSTINYDEFPTMVFPSGQISQASALA
PAPPQVLPQAPAPAPAPAMVSALAQAPAPVPVLAPGPPQAVAfPPAPKPT
QAGEGTLSEALLQLQFDDEDLGALLGNSTDPAVFTDLASVDNSEFQQLLN
QGIPVAPHTTEPMLMEYPEAITRLVTGAQRPPDPAPAPLGAPGLPNGLLS
GDEDFSSIADMDFSALLGSGSGSRDSREGMFLPKPEAGSAISDVFEGREV
CQPKRLRPFHPPGSPWANRPLPASLAPTPTGPVHEPVGSLTPAPVPQPLD
PAPAVTPEASHLLEDPDEETSQAVKALREMADTVIPQKEEAAICGQMDLS
HPPPRGHLDELTTTLESMTEDLNLDSPLTPELNEILDTFLNDECLLHAMH
ISTGLSIFDTSLFSGGKRPAATKKAGQAKKKKGSYPYDVPDYAATNFSLL
KQAGDVEENPGPTSAGKLGSGEGRGSLLTCGDVEENPGPLEGSSGSGSLE
PGEKPYKCPECGKSFSRSDHLTNHQRTHTGEKPYKCPECGKSFSTSGSLV
RHQRTHTGEKPYKCPECGKSFSQAGHLASHQRTHTGEKPYKCPECGKSFS
RSDKLTEHQRTHTGEKPYKCPECGKSFSTSGNLTEHQRTHTGEKPYKCPE
CGKSFSQSSNLVRHQRTHTGEKPYKCPECGKSFSTHLDLIRHQRTHTGEK
PTGKKTSASGSGGGSGGIFKPEELRQALMPTLEALYRQDPESLPFRQPVD
PQLLGIPDYFDIVKSPMDLSTIKRKLDTGQYQEPWQYVDDIWLMFNNAWL
YNRKTSRVYKYCSKLSEVFEQEIDPVMQSLGYCCGRKLEFSPQTLCCYGK
QLCTIPRDATYYSYQNRYHFCEKCFNEIQGESVSLGDDPSQPQTTINKEQ
FSKRKNDTLDPELFVECTECGRKMHQICVLHHEIIWPAGFVCDGCLKKSA
RTRKENKFSAKRLPSTRLGTFLENRVNDFLRRQNHPESGEVTVRVVHASD
KTVEVKPGMKARFVDSGEMAESFPYRTKALFAFEEIDGVDLCFFGMHVQE
YGSDCPPPNQRRVYISYLDSVHFFRPKCLRTAVYHEILIGYLEYVKKLGY
TTGHIWACPPSEGDDYIFHCHPPDQKIPKPKRLQEWYKKMLDKAVSERIV
HDYKDIFKQATEDRLTSAKELPYFEGDFWPNVLEESIKELEQEEEERKRE
ENTSNESTDVTKGDSKNAKKKNNKKTSKNKSSLSRGNKKKPGMPNVSNDL
SQKLYATMEKHKEVFFVIRLIAGPAANSLPPIVDPDPLIPCDLMDGRDAF
LTLARDKHLEFSSLRRAQWSTMCMLVELHTQSQDSGGKRPAATKKAGQAK
KKKGSYPYDVPDYA.

[0155] In one aspect, the present invention provides a bicistronic site-specific HNF4α disrupting agent, comprising a polynucleotide encoding the amino acid sequence of a bicistronic ZF7-p300-tPT2a-ZF5.3-VPR comprising the amino acid sequence of

(SEQ ID NO: 308)
MAPKKKRKVGIHGVPAAGSSGSLEPGEKPYKCPECGKSFSRSDHLTNHQR
THTGEKPYKCPECGKSFSTSGSLVRHQRTHTGEKPYKCPECGKSFSQAGH
LASHQRTHTGEKPYKCPECGKSFSRSDKLTEHQRTHTGEKPYKCPECGKS
FSTSGNLTEHQRTHTGEKPYKCPECGKSFSQSSNLVRHQRTHTGEKPYKC
PECGKSFSTHLDLIRHQRTHTGEKPTGKKTSASGSGGGSGGIFKPEELRQ
ALMPTLEALYRQDPESLPFRQPVDPQLLGIPDYFDIVKSPMDLSTIKRKL
DTGQYQEPWQYVDDIWLMFNNAWLYNRKTSRVYKYCSKLSEVFEQEIDPV
MQSLGYCCGRKLEFSPQTLCCYGKQLCTIPRDATYYSYQNRYHFCEKCFN
EIQGESVSLGDDPSQPQTTINKEQFSKRKNDTLDPELFVECTECGRKMHQ
ICVLHHEIIWPAGFVCDGCLKKSARTRKENKFSAKRLPSTRLGTFLENRV
NDFLRRQNHPESGEVTVRVVHASDKTVEVKPGMKARFVDSGEMAESFPYR
TKALFAFEEIDGVDLCFFGMHVQEYGSDCPPPNQRRVYISYLDSVHFFRP
KCLRTAVYHEILIGYLEYVKKLGYTTGHIWACPPSEGDDYIFHCHPPDQK
IPKPKRLQEWYKKMLDKAVSERIVHDYKDIFKQATEDRLTSAKELPYFEG
DFWPNVLEESIKELEQEEEERKREENTSNESTDVTKGDSKNAKKKNNKKT
SKNKSSLSRGNKKKPGMPNVSNDLSQKLYATMEKHKEVFFVIRLIAGPAA
NSLPPIVDPDPLIPCDLMDGRDAFLTLARDKHLEFSSLRRAQWSTMCMLV
ELHTQSQDSGGKRPAATKKAGQAKKKKGSYPYDVPDYAATNFSLLKQAGD
VEENPGPTSAGKLGSGEGRGSLLTCGDVEENPGPLEGSSGSLEPGEKPYK
CPECGKSFSTSGNLTEHQRTHTGEKPYKCPECGKSFSDSGNLRVHQRTHT
GEKPYKCPECGKSFSHKNALQNHQRTHTGEKPYKCPECGKSFSRNDTLTE
HQRTHTGEKPYKCPECGKSFSQRAHLERHQRTHTGEKPYKCPECGKSFSR
SDKLVRHQRTHTGEKPYKCPECGKSFSDPGHLVRHQRTHTGEKPTGKKTS
ASGSGGGSGGDALDDFDLDMLGSDALDDFDLDMLGSDALDDFDLDMLGSD
ALDDFDLDMLSGGPKKKRKVGSQYLPDTDDRHRIEEKRKRTYETFKSIMK
KSPFSGPTDPRPPPRRIAVPSRSSASVPKPAPQPYPFTSSLSTINYDEFP
TMVFPSGQISQASALAPAPPQVLPQAPAPAPAPAMVSALAQAPAPVPVLA
PGPPQAVAPPAPKPTQAGEGTLSEALLQLQFDDEDLGALLGNSTDPAVFT
DLASVDNSEFQQLLNQGIPVAPHTTEPMLMEYPEAITRLVTGAQRPPDPA
PAPLGAPGLPNGLLSGDEDFSSIADMDFSALLGSGSGSRDSREGMFLPKP
EAGSAISDVFEGREVCQPKRLRPFHPPGSPWANRPLPASLAPTPTGPVHE
PVGSLTPAPVPQPLDPAPAVTPEASHLLEDPDEETSQAVKALREMADTVI
PQKEEAAICGQMDLSHPPPRGHLDELTTTLESMTEDLNLDSPLTPELNEI
LDTFLNDECLLHAMHISTGLSIFDTSLFSGGKRPAATKKAGQAKKKKGSY
PYDVPDYA.

[0156] The present invention also provides vectors, such as viral expression vectors and cells comprising the site-specific HNF4α disrupting agents of the invention as well as the vectors of the invention.

[0157] In some embodiments, the site-specific HNF4α disrupting agents of the invention are present in a composition, such as a pharmaceutical composition.

[0158] In some embodiments, the pharmaceutical composition comprises a lipid formulation.

[0159] In some embodiments, the lipid formulation comprises one or more cationic lipids, one or more non-cationic lipids, one or more cholesterol-based lipids, or one or more PEG-modified lipids, or combinations of any of the foregoing.

[0160] In some embodiments, the pharmaceutical composition comprises a lipid nanoparticle.

[0161] In one aspect, the present invention provides a pharmaceutical composition comprising a site-specific HNF4α disrupting agent, comprising a polynucleotide encoding the amino acid sequence of ZF5.3-VPR comprising the amino acid sequence of

(SEQ ID NO: 301)
MAPKKKRKVGIHGVPAAGSSGSLEPGEKPYKCPECGKSFSTSGNLTEHQR
THTGEKPYKCPECGKSFSDSGNLRVHQRTHTGEKPYKCPECGKSFSHKNA
LQNHQRTHTGEKPYKCPECGKSFSRNDTLTEHQRTHTGEKPYKCPECGKS
FSQRAHLERHQRTHTGEKPYKCPECGKSFSRSDKLVRHQRTHTGEKPYKC
PECGKSFSDPGHLVRHQRTHTGEKPTGKKTSASGSGGGSGGDALDDFDLD
MLGSDALDDFDLDMLGSDALDDFDLDMLGSDALDDFDLDMLSGGPKKKRK
VGSQYLPDTDDRHRIEEKRKRTYETFKSIMKKSPFSGPTDPRPPPRRIAV
PSRSSASVPKPAPQPYPFTSSLSTINYDEFPTMVFPSGQISQASALAPAP
PQVLPQAPAPAPAPAMVSALAQAPAPVPVLAPGPPQAVAPPAPKPTQAGE
GTLSEALLQLQFDDEDLGALLGNSTDPAVFTDLASVDNSEFQQLLNQGIP
VAPHTTEPMLMEYPEAITRLVTGAQRPPDPAPAPLGAPGLPNGLLSGDED
FSSIADMDFSALLGSGSGSRDSREGMFLPKPEAGSAISDVFEGREVCQPK
RLRPFHPPGSPWANRPLPASLAPTPTGPVHEPVGSLTPAPVPQPLDPAPA
VTPEASHLLEDPDEETSQAVKALREMADTVIPQKEEAAICGQMDLSHPPP
RGHLDELTTTLESMTEDLNLDSPLTPELNEILDTFLNDECLLHAMHISTG
LSIFDTSLFSGGKRPAATKKAGQAKKKKGSYPYDVPDYA,

and a lipid nanoparticle.

[0162] In one aspect, the present invention provides a pharmaceutical composition comprising a site-specific HNF4α disrupting agent, comprising a polynucleotide encoding the amino acid sequence of ZF5.3-VPR comprising the amino acid sequence of

(SEQ ID NO: 301)
MAPKKKRKVGIHGVPAAGSSGSLEPGEKPYKCPECGKSFSTSGNLTEHQR
THTGEKPYKCPECGKSFSDSGNLRVHQRTHTGEKPYKCPECGKSFSHKNA
LQNHQRTHTGEKPYKCPECGKSFSRNDTLTEHQRTHTGEKPYKCPECGKS
FSQRAHLERHQRTHTGEKPYKCPECGKSFSRSDKLVRHQRTHTGEKPYKC
PECGKSFSDPGHLVRHQRTHTGEKPTGKKTSASGSGGGSGGDALDDFDLD
MLGSDALDDFDLDMLGSDALDDFDLDMLGSDALDDFDLDMLSGGPKKKRK
VGSQYLPDTDDRHRIEEKRKRTYETFKSIMKKSPFSGPTDPRPPPRRIAV
PSRSSASVPKPAPQPYPFTSSLSTINYDEFPTMVFPSGQISQASALAPAP
PQVLPQAPAPAPAPAMVSALAQAPAPVPVLAPGPPQAVAPPAPKPTQAGE
GTLSEALLQLQFDDEDLGALLGNSTDPAVFTDLASVDNSEFQQLLNQGIP
VAPHTTEPMLMEYPEAITRLVTGAQRPPDPAPAPLGAPGLPNGLLSGDED
FSSIADMDFSALLGSGSGSRDSREGMFLPKPEAGSAISDVFEGREVCQPK
RLRPFHPPGSPWANRPLPASLAPTPTGPVHEPVGSLTPAPVPQPLDPAPA
VTPEASHLLEDPDEETSQAVKALREMADTVIPQKEEAAICGQMDLSHPPP
RGHLDELTTTLESMTEDLNLDSPLTPELNEILDTFLNDECLLHAMHISTG
LSIFDTSLFSGGKRPAATKKAGQAKKKKGSYPYDVPDYA;

and

[0163] a site-specific HNF4α disrupting agent, comprising a polynucleotide encoding the amino acid sequence of ZF7-VPR comprising the amino acid sequence of

(SEQ ID NO: 302)
MAPKKKRKVGIHGVPAAGSSGSLEPGEKPYKCPECGKSFSRSDHLTNHQR
THTGEKPYKCPECGKSFSTSGSLVRHQRTHTGEKPYKCPECGKSFSQAGH
LASHQRTHTGEKPYKCPECGKSFSRSDKLTEHQRTHTGEKPYKCPECGKS
FSTSGNLTEHQRTHTGEKPYKCPECGKSFSQSSNLVRHQRTHTGEKPYKC
PECGKSFSTHLDLIRHQRTHTGEKPTGKKTSASGSGGGSGGDALDDFDLD
MLGSDALDDFDLDMLGSDALDDFDLDMLGSDALDDFDLDMLSGGPKKKRK
VGSQYLPDTDDRHRIEEKRKRTYETFKSIMKKSPFSGPTDPRPPPRRIAV
PSRSSASVPKPAPQPYPFTSSLSTINYDEFPTMVFPSGQISQASALAPAP
PQVLPQAPAPAPAPAMVSALAQAPAPVPVLAPGPPQAVAPPAPKPTQAGE
GTLSEALLQLQFDDEDLGALLGNSTDPAVFTDLASVDNSEFQQLLNQGIP
VAPHTTEPMLMEYPEAITRLVTGAQRPPDPAPAPLGAPGLPNGLLSGDED
FSSIADMDFSALLGSGSGSRDSREGMFLPKPEAGSAISDVFEGREVCQPK
RLRPFHPPGSPWANRPLPASLAPTPTGPVHEPVGSLTPAPVPQPLDPAPA
VTPEASHLLEDPDEETSQAVKALREMADTVIPQKEEAAICGQMDLSHPPP
RGHLDELTTTLESMTEDLNLDSPLTPELNEILDTFLNDECLLHAMHISTG
LSIFDTSLFSGGKRPAATKKAGQAKKKKGSYPYDVPDYA;

and a lipid nanoparticle.

[0164] In one aspect, the present invention provides a pharmaceutical composition, comprising a site-specific HNF4α disrupting agent, comprising a polynucleotide encoding the amino acid sequence of a bicistronic ZF5.3-VPR-tPT2a-ZF7-VPR comprising the amino acid sequence of

(SEQ ID NO: 306)
MAPKKKRKVGIHGVPAAGSSGSSGSLEPGEKPYKCPECGKSFSTSGNLTE
HQRTHTGEKPYKCPECGKSFSDSGNLRVHQRTHTGEKPYKCPECGKSFSH
KNALQNHQRTHTGEKPYKCPECGKSFSRNDTLTEHQRTHTGEKPYKCPEC
GKSFSQRAHLERHQRTHTGEKPYKCPECGKSFSRSDKLVRHQRTHTGEKP
YKCPECGKSFSDPGHLVRHQRTHTGEKPTGKKTSASGSGGGSGGDALDDF
DLDMLGSDALDDFDLDMLGSDALDDFDLDMLGSDALDDFDLDMLSGGPKK
KRKVGSQYLPDTDDRHRIEEKRKRTYETFKSIMKKSPFSGPTDPRPPPRR
IAVPSRSSASVPKPAPQPYPFTSSLSTINYDEFPTMVFPSGQISQASALA
PAPPQVLPQAPAPAPAPAMVSALAQAPAPVPVLAPGPPQAVAPPAPKPTQ
AGEGTLSEALLQLQFDDEDLGALLGNSTDPAVFTDLASVDNSEFQQLLNQ
GIPVAPHTTEPMLMEYPEAITRLVTGAQRPPDPAPAPLGAPGLPNGLLSG
DEDFSSIADMDFSALLGSGSGSRDSREGMFLPKPEAGSAISDVFEGREVC
QPKRLRPFHPPGSPWANRPLPASLAPTPTGPVHEPVGSLTPAPVPQPLDP
APAVTPEASHLLEDPDEETSQAVKALREMADTVIPQKEEAAICGQMDLSH
PPPRGHLDELTTTLESMTEDLNLDSPLTPELNEILDTFLNDECLLHAMHI
STGLSIFDTSLFSGGKRPAATKKAGQAKKKKGSYPYDVPDYAATNFSLLK
QAGDVEENPGPTSAGKLGSGEGRGSLLTCGDVEENPGPLEGSSGSGSLEP
GEKPYKCPECGKSFSRSDHLTNHQRTHTGEKPYKCPECGKSFSTSGSLVR
HQRTHTGEKPYKCPECGKSFSQAGHLASHQRTHTGEKPYKCPECGKSFSR
SDKLTEHQRTHTGEKPYKCPECGKSFSTSGNLTEHQRTHTGEKPYKCPEC
GKSFSQSSNLVRHQRTHTGEKPYKCPECGKSFSTHLDLIRHQRTHTGEKP
TGKKTSASGSGGGSGGDALDDFDLDMLGSDALDDFDLDMLGSDALDDFDL
DMLGSDALDDFDLDMLSGGPKKKRKVGSQYLPDTDDRHRIEEKRKRTYET
FKSIMKKSPFSGPTDPRPPPRRIAVPSRSSASVPKPAPQPYPFTSSLSTI
NYDEFPTMVFPSGQISQASALAPAPPQVLPQAPAPAPAPAMVSALAQAPA
PVPVLAPGPPQAVAPPAPKPTQAGEGTLSEALLQLQFDDEDLGALLGNST
DPAVFTDLASVDNSEFQQLLNQGIPVAPHTTEPMLMEYPEAITRLVTGAQ
RPPDPAPAPLGAPGLPNGLLSGDEDFSSIADMDFSALLGSGSGSRDSREG
MFLPKPEAGSAISDVFEGREVCQPKRLRPFHPPGSPWANRPLPASLAPTP
TGPVHEPVGSLTPAPVPQPLDPAPAVTPEASHLLEDPDEETSQAVKALRE
MADTVIPQKEEAAICGQMDLSHPPPRGHLDELTTTLESMTEDLNLDSPLT
PELNEILDTFLNDECLLHAMHISTGLSIFDTSLFSGGKRPAATKKAGQAK
KKKGSYPYDVPDYA;

and a lipid nanoparticle.

[0165] In one aspect, the present invention provides a method of modulating expression of hepatocyte nuclear factor 4 alpha- (HNF4α) in a cell. The method includes contacting the cell with a site-specific HNF4α disrupting agent, the disrupting agent comprising a site-specific HNF4α targeting moiety which targets an HNF4α expression control region, and an effector molecule, thereby modulating expression of HNF4α in the cell.

[0166] The modulation of expression may be enhanced expression of HNF4α in the cell or reduced expression of HNF4α in the cell.

### BRIEF DESCRIPTION OF THE DRAWINGS

[0167] FIG. 1 depicts a chromosomal view of a portion of the upstream region and coding sequence of HNF4α and the positions of guide RNAs and pools of guide RNAs described herein.

[0168] FIG. 2 is a graph depicting the percent of HNF4α mRNA remaining in HepG2 cells at 72 hours after contacting the cells with the indicated pools of site-specific HNF4α targeting moieties and an effector molecule comprising dCas and KRAB at the indicated doses.

[0169] FIG. 3 is a graph depicting the percent of HNF4α mRNA remaining in HepG2 cells at 72 hours after contacting the cells with either the indicated site-specific HNF4α targeting moieties and an effector molecule comprising dCas and KRAB, or the indicated pools of HNF4α targeting moieties and an effector molecule comprising dCas and KRAB, at the indicated doses. Untreated cells and cells contacted with dCas9 alone were used as controls.

[0170] FIG. 4A is a graph depicting the percent of HNF4α mRNA measured in A549 cells at 48 hours after contacting the cells with the indicated pools of HNF4α targeting moieties and an effector molecule comprising dCas and VPR, at the indicated doses. SH is the abbreviation for “Safe Harbor” which is a non-target guide control.

[0171] FIG. 4B is a graph depicting the percent of HNF4α mRNA measured in LX-2 cells at 48 hours after contacting the cells with the indicated pools of HNF4α targeting moieties and an effector molecule comprising dCas and VPR at the indicated doses.

[0172] FIG. 5 is a graph depicting activation of HNF4α by dCas9-VPR in LX-2 cells with transfection using LNP formulations.

[0173] FIG. 6 is a graph depicting activation of HNF4 α by dCas9-VPR in HepG2 cells with transfection using LNP formulations.

[0174] FIG. 7 are immunohistological images depicting that HNF4α protein induced by dCas9-VPR Pool 1 is localized to the nucleus.

[0175] FIG. 8 is a schematic depicticting the structure of the human HNF4α promoter region and the isoforms of HNF4α.

[0176] FIG. 9 schematically depicticts the localization to the HNF4α promoter region of the various site-specific HNF4α targeting moieties. FIG. 9 discloses SEQ ID NOS 2519-2525, respectively, in order of appearance.

[0177] FIG. 10 schematically depicts the structure of an exemplary zinc finger-VPR fusion protein of the invention.

[0178] FIG. 11 is a graph depicting activation of HNF4α in LX-2 cells using ZF-VPR mRNAs.

[0179] FIG. 12 is a graph depicting activation of HNF4α in LX-2 cells with TAL-VPRs and ZF-VPRs.

[0180] FIG. 13 is a graph depicting activation of HNF4α in LX-2 Cells with ATUM-Codon Optimized ZF5-VPR variants.

[0181] FIG. 14 is a graph depicting the durability of VPR activation of HNF4α in K562 cells with ZF5-VPR, ZF5-p300, ZF5-VPR and ZF5-p300, and ZF5-VPR and ZF7-VPR.

[0182] FIG. 15 is a graph depicting the durability of VPR activation of HNF4α in K562 cells with ZF5-VPR and ZF7-VPR.

[0183] FIG. 16 is a graph depicting the durability of VPR activation of HNF4α in K562 cells with ZF5-VPR and ZF7-VPR, and ZF5.3-VPR and ZF7-VPR.

[0184] FIG. 17 is a graph depicting the change in expression level of biomarkers downstream of HNF4α following activation of HNF4α by dCas9-VPR in LX-2 cells.

[0185] FIG. 18 is a graph depicting the change in expression level of biomarkers of HNF4α following activation of HNF4α by ZF5-VPR, ZF5.3-VPR, ZF5-VPR and ZF7-VPR, and ZF5.3-VPR and ZF7-VPR in LX-2 cells.

[0186] FIG. 19 is a graph depicting screening of ZF11, ZF13, and ZF14 in LX-2 cells and synergy in activating HNF4α by ZF5-VPR and ZF7-VPR, and ZF5.3-VPR and ZF7-VPR.

[0187] FIG. 20 is a graph depicting activation of HNF4α using dCas9-VPR3-Pool 1 and screening of ZF-VPR combinations

[0188] FIG. 21 is a graph depicting HNF4α activation in FRG-KO mouse liver humanized hepatocytes (Yecuris human hepatocytes).

[0189] FIG. 22 is a graph depicting activation of HNF4α in LX-2 cells with bicistronic ZF5.3-VPR and ZF7-VPR.

[0190] FIG. 23 is a graph depicting the effect of repeat dosing of Yecuris hepatocytes with various ZF-VPR and ZF-p300 on HNF4α gene expression.

[0191] FIG. 24 is a graph depicting activation of HNF4α in Yecuris hepatocytes with bicistronic ZF-effector constructs.

[0192] FIG. 25 is graph depicting the 10 days durability of VPR activation of HNF4α in K562 cells with bicistronic ZF-effector constructs.

### DETAILED DESCRIPTION OF THE INVENTION

[0193] The present invention provides agents and compositions for modulating expression (e.g., enhanced or reduced expression) of a hepatocyte nuclear factor 4 alpha (HNF4α) gene by targeting an HNF4α expression control region. The HNF4α gene may be in a cell, e.g., a mammalian cell, such as a mammalian somatic cell, e.g., a human somatic cell. The present invention also provides methods of using the agents and compositions of the invention for modulating the expression of an HNF4α gene or for treating a subject who would benefit from modulating the expression of an HNF4α gene, e.g., a subject suffering or prone to suffering from an HNF4α-associated disease.

[0194] The agents of the invention are referenced to herein as site-specific HNF4α disrupting agents and are described in Section II, below.

### I. Definitions

[0195] In order that the present invention may be more readily understood, certain terms are first defined. In addition, it should be noted that whenever a value or range of values of a parameter are recited, it is intended that values and ranges intermediate to the recited values are also intended to be part of this invention.

[0196] The articles “a” and “an” are used herein to refer to one or to more than one (i.e., to at least one) of the grammatical object of the article. By way of example, “an element” means one element or more than one element, e.g., a plurality of elements.

[0197] The term “including” is used herein to mean, and is used interchangeably with, the phrase “including but not limited to”. The term “or” is used herein to mean, and is used interchangeably with, the term “and/or,” unless context clearly indicates otherwise.

[0198] The term “about” is used herein to mean within the typical ranges of tolerances in the art. For example, “about” can be understood as about 2 standard deviations from the mean. In certain embodiments, about means ±10%. In certain embodiments, about means ±5%. When about is present before a series of numbers or a range, it is understood that “about” can modify each of the numbers in the series or range.

[0199] The term “at least” prior to a number or series of numbers is understood to include the number adjacent to the term “at least”, and all subsequent numbers or integers that could logically be included, as clear from context. For example, the number of nucleotides in a nucleic acid molecule must be an integer. For example, “at least 18 nucleotides of a 21 nucleotide nucleic acid molecule” means that 18, 19, 20, or 21 nucleotides have the indicated property. When at least is present before a series of numbers or a range, it is understood that “at least” can modify each of the numbers in the series or range.

[0200] As used herein, “no more than” or “less than” is understood as the value adjacent to the phrase and logical lower values or integers, as logical from context, to zero. When “no more than” is present before a series of numbers or a range, it is understood that “no more than” can modify each of the numbers in the series or range.

[0201] As used herein, the term “substantially” refers to the qualitative condition of exhibiting total or near-total extent or degree of a characteristic or property of interest. One of ordinary skill in the art will understand that biological and chemical phenomena rarely, if ever, go to completion and/or proceed to completeness or achieve or avoid an absolute result. The term “substantially” may therefore be used in some embodiments herein to capture potential lack of completeness inherent in many biological and chemical phenomena.

[0202] As used herein, the terms “hepatocyte nuclear factor 4 alpha,” “HNF4α,” and “HNF4A,” as used interchangeably herein, refer to the gene as well as the well known encoded protein which is a nuclear transcription factor which binds DNA as a homodimer. The encoded protein controls the expression of several genes, including hepatocyte nuclear factor 1 alpha, a transcription factor which regulates the expression of several hepatic genes. HNF4α also plays a role in development of the liver, kidney, and intestines. Decreased expression of this gene has been associated with monogenic autosomal dominant non-insulin-dependent diabetes mellitus type I (MODY I) and liver disease, e.g., cirrhosis. Dysregulated, e.g., increased, expression of this gene has been associated with hepatocellular carcinoma. The nucleotide and amino acid sequence of HNF4α is known and may be found in, for example, GenBank Accession Nos. NM_000457; NM_175914; NM_178849; NM_178850; NM_001030003; NM_001030004; NM_001258355; NM_001287182; NM_001287183; NM_001287184; XM_005260407; NP_000448.3; NP_787110.2; NP_849180.1; NP_849181.1; NP_001025174.1; NP_001025175.1; NP_001245284.1; NP_001274111.1; NP_001274112.1; NP_001274113.1; XP_005260464.1, the entire contents of each of which are incorporated herein by reference. The nucleotide sequence of the genomic region of Chromosome 20 which includes the endogenous promoters of HNF4α and the HNF4α coding sequence is also known and may be found in GenBank Accession No. NC_000020.10 (42984441 . . . 43061485).

[0203] The HNF4α gene is located on chromosome 20, with transcription regulated by two promoters (P1 and P2) and alternative splicing variants, resulting in nine distinct isoforms (α1-α9) (FIG. 8). The HNF4α locus is transcriptionally regulated through the use of two distinct promoters that are physically separated by more than 45 kb. Isoforms produced by the activity of the closer promoter are designated P1 whereas isoforms produced by the second and more distant promoter are designated P2. Isoforms most common in the liver are expressed from promoter 1 (P1), with isoforms from P2 most commonly found in fetal tissues, and in the adult kidney and small intestine.

[0204] HNF4α controls the expression of proteins necessary for the normal function of hepatocytes and other cell types in the liver. (Argemi J, et al. Defective HNF4alpha-dependent gene expression as a driver of hepatocellular failure in alcoholic hepatitis. Nat Commun. 2019; 10(1):3126. doi:10.1038/s41467-019-11004-3; Nishikawa T, et al. Resetting the transcription factor network reverses terminal chronic hepatic failure. J Clin Invest. 2015; 125(4):1533-1544. doi:10.1172/JCI73137). In addition, many of these proteins are secreted by liver cells and contribute to health systemically. For example, proteins such as albumin are required to transport nutrients, hormones, lipids, and small molecule drugs in the circulation.

[0205] The term “site-specific HNF4α disrupting agent,” as used herein, refers to any agent that specifically binds to a target HNF4α expression control region and, e.g., modulates expression of an HNF4α gene. The modulation of expression may be permanent or transient modulation. Site-specific HNF4α disruption agents of the invention may comprise a “site-specific HNF4α targeting moiety.”

[0206] As used herein, the term “site-specific HNF4α targeting moiety” refers to a moiety that specifically binds to an HNF4α expression control region, e.g., a transcriptional control region of an HNF4α gene, such as a promoter, an enhancer, or a repressor; or an HNF4α-associated anchor sequence, such as, for example within an HNF4α-associated anchor sequence-mediated conjunction. Exemplary “site-specific HNF4α targeting moieties” include, but are not limited to, polyamides, nucleic acid molecules, such as RNA, DNA, or modified RNA or DNA, polypeptides, protein nucleic acid molecules, and fusion proteins.

[0207] As used herein, the terms “specific binding” or “specifically binds” refer to an ability to discriminate between possible binding partners in the environment in which binding is to occur. In some embodiments, a disrupting agent that interacts, e.g., preferentially interacts, with one particular target when other potential disrupting agents are present is said to “bind specifically” to the target (i.e., the expression control region) with which it interacts. In some embodiments, specific binding is assessed by detecting or determining the degree of association between the disrupting agent and its target; in some embodiments, specific binding is assessed by detecting or determining degree of dissociation of a disrupting agent-target complex. In some embodiments, specific binding is assessed by detecting or determining ability of the disrupting agent to compete with an alternative interaction between its target and another entity. In some embodiments, specific binding is assessed by performing such detections or determinations across a range of concentrations.

[0208] As used herein, the term “expression control region” or expression control domain” refers to a region or domain present in a genomic DNA that modulates the expression of a target gene in a cell. A functionality associated with an expression control region may directly affect expression of a target gene, e.g., by recruiting or blocking recruitment of a transcription factor that would stimulate expression of the gene. A functionality associated with an expression control region may indirectly affect expression of a target gene, e.g., by introducing epigenetic modifications or recruiting other factors that introduce epigenetic modifications that induce a change in chromosomal topology that modulates expression of a target gene. Expression control regions may be upstream and/or downstream of the protein coding sequence of a gene and include, for example, transcriptional control elements, e.g., promoters, ehnacers, or repressors; and anchor sequences, and anchor sequence-mediated conjunctions.

[0209] The term “transcriptional control element,” as used herein, refers to a nucleic acid sequence that controls transcription of a gene. Transcriptional control elements include, for example, anchor sequences, anchor sequence-mediated conjunctions, promoters, transcriptional enhancers, and transcriptional repressors.

[0210] A promoter is a region of DNA recognized by an RNA polymerase to initiate transcription of a particular gene and is generally located upstream of the 5′-end of the transcription start site of the gene.

[0211] A “transcriptional enhancer” increases gene transcription. A “transcriptional silencer” or “transcriptional repressor” decreases gene transcription. Enhancing and silencing sequences may be about 50-3500 base pairs in length and may influence gene transcription up to about 1 megabases away.

[0212] The term “gene,” as used herein, refers to a sequence of nucleotides that encode a molecule, such as a protein, that has a function. A gene contains sequences that are transcribed (e.g., a 3′UTR), sequences that are not transcribed (e.g., a promoter), sequences that are translated (e.g., an exon), and sequences that are not translated (e.g., intron).

[0213] As used herein, the term “target gene” means an HNF4α gene that is targeted for modulation, e.g., increase or decrease, of expression. In some embodiments, an HNF4α target gene is part of a targeted genomic complex (e.g. an HNF4α gene that has at least part of its genomic sequence as part of a target genomic complex, e.g. inside an anchor sequence-mediated conjunction), which genomic complex is targeted by one or more site-specific disrupting agents as described herein. In some embodiments, modulation comprises inhibition of expression of the target gene. In some embodiments, an HNF4α gene is modulated by contacting the HNF4α gene or a transcription control element operably linked to the HNF4α gene with one or more site-specific disrupting agents as described herein. In some embodiments, an HNF4α gene is aberrantly expressed (e.g., over-expressed) in a cell, e.g., a cell in a subject (e.g., a subject having an HNF4α-associated disease). In some embodiments, an HNF4α gene is aberrantly expressed (e.g., under-expressed) in a cell, e.g., a cell in a subject (e.g., a subject having an HNF4α-associated disease).

[0214] The term “anchor sequence” as used herein, refers to a nucleic acid sequence recognized by a nucleating agent that binds sufficiently to form an anchor sequence-mediated conjunction, e.g., a complex. In some embodiments, an anchor sequence comprises one or more CTCF binding motifs. In some embodiments, an anchor sequence is not located within a gene coding region. In some embodiments, an anchor sequence is located within an intergenic region. In some embodiments, an anchor sequence is not located within either of an enhancer or a promoter. In some embodiments, an anchor sequence is located at least 400 bp, at least 450 bp, at least 500 bp, at least 550 bp, at least 600 bp, at least 650 bp, at least 700 bp, at least 750 bp, at least 800 bp, at least 850 bp, at least 900 bp, at least 950 bp, or at least 1 kb away from any transcription start site. In some embodiments, an anchor sequence is located within a region that is not associated with genomic imprinting, monoallelic expression, and/or monoallelic epigenetic marks. In some embodiments, the anchor sequence has one or more functions selected from binding an endogenous nucleating polypeptide (e.g., CTCF), interacting with a second anchor sequence to form an anchor sequence mediated conjunction, or insulating against an enhancer that is outside the anchor sequence mediated conjunction. In some embodiments of the present invention, technologies are provided that may specifically target a particular anchor sequence or anchor sequences, without targeting other anchor sequences (e.g., sequences that may contain a nucleating agent (e.g., CTCF) binding motif in a different context); such targeted anchor sequences may be referred to as the “target anchor sequence”. In some embodiments, sequence and/or activity of a target anchor sequence is modulated while sequence and/or activity of one or more other anchor sequences that may be present in the same system (e.g., in the same cell and/or in some embodiments on the same nucleic acid molecule, e.g., the same chromosome) as the other targeted anchor sequence is not modulated. In some embodiments, the anchor sequence comprises or is a nucleating polypeptide binding motif. In some embodiments, the anchor sequence is adjacent to a nucleating polypeptide binding motif.

[0215] The term “anchor sequence-mediated conjunction” as used herein, refers to a DNA structure, in some cases, a complex, that occurs and/or is maintained via physical interaction or binding of at least two anchor sequences in the DNA by one or more polypeptides, such as nucleating polypeptides, or one or more proteins and/or a nucleic acid entity (such as RNA or DNA), that bind the anchor sequences to enable spatial proximity and functional linkage between the anchor sequences.

[0216] As used herein, the term “genomic complex” is a complex that brings together two genomic sequence elements that are spaced apart from one another on one or more chromosomes, via interactions between and among a plurality of protein and/or other components (potentially including, the genomic sequence elements). In some embodiments, the genomic sequence elements are anchor sequences to which one or more protein components of the complex bind. In some embodiments, a genomic complex may comprise an anchor sequence-mediated conjunction. In some embodiments, a genomic sequence element may be or comprise a CTCF binding motif, a promoter and/or an enhancer.

[0217] In some embodiments, a genomic sequence element includes at least one or both of a promoter and/or regulatory region (e.g., an enhancer). In some embodiments, complex formation is nucleated at the genomic sequence element(s) and/or by binding of one or more of the protein component(s) to the genomic sequence element(s). As will be understood by those skilled in the art, in some embodiments, co-localization (e.g., conjunction) of the genomic sites via formation of the complex alters DNA topology at or near the genomic sequence element(s), including, in some embodiments, between them. In some embodiments, a genomic complex comprises an anchor sequence-mediated conjunction, which comprises one or more loops. In some embodiments, a genomic complex as described herein is nucleated by a nucleating polypeptide such as, for example, CTCF and/or Cohesin. In some embodiments, a genomic complex as described herein may include, for example, one or more of CTCF, Cohesin, non-coding RNA (e.g., eRNA), transcriptional machinery proteins (e.g., RNA polymerase, one or more transcription factors, for example selected from the group consisting of TFIIA, TFIIB, TFIID, TFIIE, TFIIF, TFIIH, etc.), transcriptional regulators (e.g., Mediator, P300, enhancer-binding proteins, repressor-binding proteins, histone modifiers, etc.), etc. In some embodiments, a genomic complex as described herein includes one or more polypeptide components and/or one or more nucleic acid components (e.g., one or more RNA components), which may, in some embodiments, be interacting with one another and/or with one or more genomic sequence elements (e.g., anchor sequences, promoter sequences, regulatory sequences (e.g., enhancer sequences)) so as to constrain a stretch of genomic DNA into a topological configuration (e.g., a loop) that the stretch of genomic DNA does not adopt when the complex is not formed.

[0218] An “effector molecule,” as used herein, refers to a molecule that is able to regulate a biological activity, such as enzymatic activity, gene expression, anchor sequence-mediated conjunction or cell signaling. Exemplary effectors are described in Section II, below, and in some embodiment include, for example, nucleases, physical blockers, epigenetic recruiters, e.g., a transcriptional enhancer or a transcriptional repressor, and epigenetic CpG modifiers, e.g., a DNA methylase, a DNA demethylase, a histone modifying agent, or a histone deacetylase, and combinations of any of the foregoing.

### II. Site-Specific HNF4α Disrupting Agents of the Invention

[0219] The present invention provides site-specific HNF4α disrupting agents which, in one aspect of the invention include a site-specific HNF4α targeting moiety which targets an HNF4α expression control region. In another aspect, the site-specific disrupting agents of the invention include a site-specific HNF4α targeting moiety which targets an HNF4α expression control region and an effector molecule. As will be appreciated by one of ordinary skill in the art, such disrupting agents are site-specific and, thus, specifically bind to an HNF4α expression control region (e.g., one or more transcriptional control elements and/or one or more target anchor sequences), e.g., within a cell and not to non-targeted expression control regions (e.g., within the same cell).

[0220] The site-specific HNF4α disrupting agents of the invention comprise a site-specific HNF4α targeting moiety targeting an HNF4α expression control region. The expression control region targeted by the site-specific targeting moiety may be, for example, a transcriptional control element or an anchor sequence, such as an anchor sequence within an anchor-mediated conjunction.

[0221] Thus, site-specific HNF4α disrupting agents of the invention may modulate expression of a gene, i.e., HNF4α, e.g., by modulating expression of the gene from an endogenous promoter, an enhancer, or an repressor, may alter methylation of the control region, may alter at least one anchor sequence; may alter at least one conjunction nucleating molecule binding site, such as by altering binding affinity for the conjunction nucleating molecule; may alter an orientation of at least one common nucleotide sequence, such as a CTCF binding motif by, e.g., substitution, addition or deletion in at least one anchor sequence, such as a CTCF binding motif.

[0222] In certain embodiments, the site-specific disrupting agents and compositions described herein target an expression control region comprising one or more HNF4α-specific transcriptional control elements to modulate expression in a cell. HNF4α-specific transcriptional control elements that can be targeted include HNF4α-specific promoters, HNF4α-specific enhancers, and HNF4α-specific repressors. In one embodiment, an HNF4α-specific promoter substantially drives expression in cells of the liver, i.e., promoter 1. In one embodiment, an HNF4α-specific promoter substantially drives expression in cells of the pancreas, i.e., promoter 2. The nucleotide sequences of HNF4α promoter 1 and promoter 2 are known and may be found in, for example, GenBank Accession No. NC_000020.10 (42984441 . . . 43061485).

[0223] For example, a site-specific disrupting agent may include a site-specific targeting moiety, e.g., a nucleic acid molecule encoding a DNA-binding domain of a Transcription activator-like effector (TALE) polypeptide or a zinc finger (ZNF) polypeptide, or fragment thereof, that specifically targets and binds to an HNF4α expression control region, such as an HNF4α endogenous promoter region, e.g., promoter 1, and an effector molecule, such as an effector molecule that includes a transcriptional enhancer or transcriptional repressor that modulates, e.g., enhances or represses, expression of a target gene from an endogenous promoter to modulate gene expression. In one embodiment, the disrupting agent is “bicistronic nucleic acid molecule,” i.e., capable of making two fusion proteins from a single messenger RNA molecule, a first and a second site-specific targeting moiety, e.g., a nucleic acid molecule encoding a DNA-binding domain of a Transcription activator-like effector (TALE) polypeptide or a zinc finger (ZNF) polypeptide, or fragment thereof, that specifically targets and binds to an HNF4α expression control region, such as an HNF4α endogenous promoter region, e.g., promoter 1, and an effector molecule, such as an effector molecule that includes a transcriptional enhancer or transcriptional repressor that modulates, e.g., enhances or represses, expression of a target gene from an endogenous promoter to modulate gene expression.

[0224] In some embodiments of the invention, a site-specific disrupting agent may include a site-specific targeting moiety, e.g., a nucleic acid molecule such as a guide RNA targeting an HNF4α endogenous promoter region, e.g., promoter 1, and an effector molecule, such as an effector molecule that includes a transcriptional enhancer or transcriptional repressor that modulates, e.g., enhances or represses, expression of a target gene from an endogenous promoter to modulate gene expression.

[0225] In certain embodiments of the invention, the site-specific disrupting agents and compositions described herein target an expression control region comprising one or more HNF4α-associated anchor sequences, e.g., within an anchor sequence-mediated conjunction, comprising a first and a second HNF4α-associated anchor sequence to alter a two-dimensional chromatin structure (e.g., anchor sequence-mediated conjunctions in order to modulate expression in a cell, e.g., a cell within a subject, e.g., by modifying anchor sequence-mediated conjunctions in DNA, e.g., genomic DNA.

[0226] In one aspect, the invention includes a site-specific HNF4α disrupting agent comprising a site-specific HNF4α targeting moiety which targets an HNF4α expression control region comprising one or more HNF4α-associated anchor sequences within an anchor sequence-mediated conjunction. The disrupting agent binds, e.g., specifically binds, a specific anchor sequence-mediated conjunction to alter a topology of the anchor sequence-mediated conjunction, e.g., an anchor sequence-mediated conjunction having a physical interaction of two or more DNA loci bound by a conjunction nucleating molecule.

[0227] The formation of an anchor sequence-mediated conjunction may force transcriptional control elements to interact with an HNF4α gene or spatially constrain the activity of the transcriptional control elements. Altering anchor sequence-mediated conjunctions, therefore, allows for modulating HNF4α expression without altering the coding sequences of the HNF4α gene being modulated.

[0228] In some embodiments, the site-specific disrupting agents and compositions of the invention modulate expression of an HNF4α gene associated with an anchor sequence-mediated conjunction by physically interfering between one or more anchor sequences and a conjunction nucleating molecule. For example, a DNA binding small molecule (e.g., minor or major groove binders), peptide (e.g., zinc finger, TALE, novel or modified peptide), protein (e.g., CTCF, modified CTCF with impaired CTCF binding and/or cohesion binding affinity), or nucleic acids (e.g., ssDNA, modified DNA or RNA, peptide oligonucleotide conjugates, locked nucleic acids, bridged nucleic acids, polyamides, and/or triplex forming oligonucleotides) may physically prevent a conjunction nucleating molecule from interacting with one or more anchor sequences to modulate HNF4α gene expression.

[0229] In some embodiments, the site-specific disrupting agents and compositions of the invention modulate expression of an HNF4α gene associated with an anchor sequence-mediated conjunction by modification of an anchor sequence, e.g., epigenetic modifications, e.g., histone protein modifications, or genomic editing modifications. For example, one or more anchor sequences associated with an anchor sequence-mediated conjunction comprising an HNF4α gene may be targeted for methylation modification by a DNA methyltransferase, e.g., dCas9-methyltransferase fusion, e.g., antisense oligonucleotide-enzyme fusion, to modulate expression of the gene.

[0230] In some embodiments, the site-specific disrupting agents and compositions of the invention modulate expression of an HNF4α gene associated with an anchor sequence-mediated conjunction, e.g., activate or represses transcription, e.g., induces epigenetic changes to chromatin.

[0231] In some embodiments, an anchor sequence-mediated conjunction includes one or more anchor sequences, an HNF4α gene, and one or more transcriptional control elements, such as an enhancing or silencing element. In some embodiments, the transcriptional control element is within, partially within, or outside the anchor sequence-mediated conjunction.

[0232] In one embodiment, the anchor sequence-mediated conjunction comprises a loop, such as an intra-chromosomal loop. In certain embodiments, the anchor sequence-mediated conjunction has a plurality of loops. One or more loops may include a first anchor sequence, a nucleic acid sequence, a transcriptional control element, and a second anchor sequence. In another embodiment, at least one loop includes, in order, a first anchor sequence, a transcriptional control element, and a second anchor sequence; or a first anchor sequence, a nucleic acid sequence, and a second anchor sequence. In yet another embodiment, either one or both of the nucleic acid sequences and the transcriptional control element is located within or outside the loop. In still another embodiment, one or more of the loops comprises a transcriptional control element.

[0233] In some embodiments, the anchor sequence-mediated conjunction includes a TATA box, a CAAT box, a GC box, or a CAP site.

[0234] In some embodiments, the anchor sequence-mediated conjunction comprises a plurality of loops, and where the anchor sequence-mediated conjunction comprises at least one of an anchor sequence, a nucleic acid sequence, and a transcriptional control element in one or more of the loops.

[0235] In one aspect, the site-specific disrupting agents and compositions of the invention may introduce a targeted alteration to an anchor sequence-mediated conjunction to modulate expression of a nucleic acid sequence with a disrupting agent that binds the anchor sequence. In some embodiments, the anchor sequence-mediated conjunction is altered by targeting one or more nucleotides within the anchor sequence-mediated conjunction for substitution, addition or deletion.

[0236] In some embodiments, expression, e.g., transcription, is activated by inclusion of an activating loop or exclusion of a repressive loop. In one such embodiment, the anchor sequence-mediated conjunction comprises a transcriptional control sequence that increases transcription of a nucleic acid sequence, e.g., such an HNF4α encoding nucleic acid. In another such embodiment, the anchor sequence-mediated conjunction excludes a transcriptional control element that decreases expression, e.g., transcription, of a nucleic acid sequence, e.g., such an HNF4α encoding nucleic acid.

[0237] In some embodiments, expression, e.g., transcription, is repressed by inclusion of a repressive loop or exclusion of an activating loop. In one such embodiment, the anchor sequence-mediated conjunction includes a transcriptional control element that decreases expression, e.g., transcription, of a nucleic acid sequence, e.g., such an HNF4α encoding nucleic acid sequence. In another such embodiment, the anchor sequence-mediated conjunction excludes a transcriptional control sequence that increases transcription of a nucleic acid sequence, e.g., such an HNF4α encoding nucleic acid.

[0238] Each anchor sequence-mediated conjunction comprises one or more anchor sequences, e.g., a plurality. Anchor sequences can be manipulated or altered to disrupt naturally occurring loops or form new loops (e.g., to form exogenous loops or to form non-naturally occurring loops with exogenous or altered anchor sequences). Such alterations modulate HNF4α gene expression by changing the 2-dimensional structure of DNA containing all or a portion of an HNF4α gene, e.g., by thereby modulating the ability of the HNF4α gene to interact with transcriptional control elements (e.g., enhancing and silencing/repressive sequences). In some embodiments, the chromatin structure is modified by substituting, adding or deleting one or more nucleotides within an anchor sequence of the anchor sequence-mediated conjunction.

[0239] The anchor sequences may be non-contiguous with one another. In embodiments with noncontiguous anchor sequences, the first anchor sequence may be separated from the second anchor sequence by about 500 bp to about 500 Mb, about 750 bp to about 200 Mb, about 1 kb to about 100 Mb, about 25 kb to about 50 Mb, about 50 kb to about 1 Mb, about 100 kb to about 750 kb, about 150 kb to about 500 kb, or about 175 kb to about 500 kb. In some embodiments, the first anchor sequence is separated from the second anchor sequence by about 500 bp, 600 bp, 700 bp, 800 bp, 900 bp, 1 kb, 5 kb, 10 kb, 15 kb, 20 kb, 25 kb, 30 kb, 35 kb, 40 kb, 45 kb, 50 kb, 55 kb, 60 kb, 65 kb, 70 kb, 75 kb, 80 kb, 85 kb, 90 kb, 95 kb, 100 kb, 125 kb, 150 kb, 175 kb, 200 kb, 225 kb, 250 kb, 275 kb, 300 kb, 350 kb, 400 kb, 500 kb, 600 kb, 700 kb, 800 kb, 900 kb, 1 Mb, 2 Mb, 3 Mb, 4 Mb, 5 Mb, 6 Mb, 7 Mb, 8 Mb, 9 Mb, 10 Mb, 15 Mb, 20 Mb, 25 Mb, 50 Mb, 75 Mb, 100 Mb, 200 Mb, 300 Mb, 400 Mb, 500 Mb, or any size therebetween.

[0240] In one embodiment, the anchor sequence comprises a common nucleotide sequence, e.g., a CTCF-binding motif:

(SEQ ID NO: 64)
N(T/C/G)N(G/A/T)CC(A/T/G)(C/G)(C/T/A)AG(G/A)(G/T)
GG(C/A/T)(G/A)(C/G)(C/T/A)(G/A/C),

where N is any nucleotide.

[0241] A CTCF-binding motif may also be in the opposite orientation, e.g.,

(SEQ ID NO: 65)
(G/A/C)(C/T/A)(C/G)(G/A)(C/A/T)GG(G/T)(G/A)GA
(C/T/A)(C/G)(A/T/G)CC(G/A/T)N(T/C/G)N.

[0242] In one embodiment, the anchor sequence comprises SEQ ID NO: 64 or SEQ ID NO:65 or a nucleotide sequence at least 75%, at least 80%, at least 85%, at least 86%, at least 87%, at least 88%, at least 89%, at least 90%, at least 91%, at least 92%, at least 93%, at least 94%, at least 95%, at least 96%, at least 97%, at least 98%, at least 99% identical to either SEQ ID NO: 64 or SEQ ID NO:65.

[0243] In some embodiments, the anchor sequence-mediated conjunction comprises at least a first anchor sequence and a second anchor sequence. The first anchor sequence and second anchor sequence may each comprise a common nucleotide sequence, e.g., each comprises a CTCF binding motif. In some embodiments, the first anchor sequence and second anchor sequence comprise different sequences, e.g., the first anchor sequence comprises a CTCF binding motif and the second anchor sequence comprises an anchor sequence other than a CTCF binding motif. In some embodiments, each anchor sequence comprises a common nucleotide sequence and one or more flanking nucleotides on one or both sides of the common nucleotide sequence.

[0244] Two CTCF-binding motifs (e.g., contiguous or non-contiguous CTCF binding motifs) that can form a conjunction may be present in the genome in any orientation, e.g., in the same orientation (tandem) either 5′->3′ (left tandem, e.g., the two CTCF-binding motifs that comprise SEQ ID NO: 64) or 3′->5′ (right tandem, e.g., the two CTCF-binding motifs comprise SEQ ID NO: 65), or convergent orientation, where one CTCF-binding motif comprises SEQ ID NO: 64 and the other comprises SEQ ID NO: 65. CTCFBSDB 2.0: Database For CTCF binding motifs And Genome Organization (http://insulatordb.uthsc.edu/) can be used to identify CTCF binding motifs associated with a target gene, e.g., HNF4α.

[0245] In some embodiments, the anchor sequence-mediated conjunction is altered by changing an orientation of at least one common nucleotide sequence, e.g., a conjunction nucleating molecule binding site.

[0246] In some embodiments, the anchor sequence comprises a conjunction nucleating molecule binding site, e.g., CTCF binding motif, and site-specific disrupting agent of the invention introduces an alteration in at least one conjunction nucleating molecule binding site, e.g. altering binding affinity for the conjunction nucleating molecule.

[0247] In some embodiments, the anchor sequence-mediated conjunction is altered by introducing an exogenous anchor sequence. Addition of a non-naturally occurring or exogenous anchor sequence to form or disrupt a naturally occurring anchor sequence-mediated conjunction, e.g., by inducing a non-naturally occurring loop to form that alters transcription of the nucleic acid sequence.

[0248] In some embodiments, the anchor sequence-mediated conjunction comprises an HNF4α gene, and one or more, e.g., 2, 3, 4, 5, or other genes other than the HNF4α gene.

[0249] In some embodiments, the anchor sequence-mediated conjunction is associated with one or more, e.g., 2, 3, 4, 5, or more, transcriptional control elements. In some embodiments, the HNF4α gene is noncontiguous with one or more of the transcriptional control elements. In some embodiments where the HNF4α gene is non-contiguous with the transcriptional control element, the gene may be separated from one or more transcriptional control elements by about 100 bp to about 500 Mb, about 500 bp to about 200 Mb, about 1 kb to about 100 Mb, about 25 kb to about 50 Mb, about 50 kb to about 1 Mb, about 100 kb to about 750 kb, about 150 kb to about 500 kb, or about 175 kb to about 500 kb. In some embodiments, the gene is separated from the transcriptional control element by about 100 bp, 300 bp, 500 bp, 600 bp, 700 bp, 800 bp, 900 bp, 1 kb, 5 kb, 10 kb, 15 kb, 20 kb, 25 kb, 30 kb, 35 kb, 40 kb, 45 kb, 50 kb, 55 kb, 60 kb, 65 kb, 70 kb, 75 kb, 80 kb, 85 kb, 90 kb, 95 kb, 100 kb, 125 kb, 150 kb, 175 kb, 200 kb, 225 kb, 250 kb, 275 kb, 300 kb, 350 kb, 400 kb, 500 kb, 600 kb, 700 kb, 800 kb, 900 kb, 1 Mb, 2 Mb, 3 Mb, 4 Mb, 5 Mb, 6 Mb, 7 Mb, 8 Mb, 9 Mb, 10 Mb, 15 Mb, 20 Mb, 25 Mb, 50 Mb, 75 Mb, 100 Mb, 200 Mb, 300 Mb, 400 Mb, 500 Mb, or any size therebetween.

[0250] In some embodiments, the type of anchor sequence-mediated conjunction may help to determine how to modulate gene expression, e.g., choice of site-specific targeting moiety, by altering the anchor sequence-mediated conjunction. For example, some types of anchor sequence-mediated conjunctions comprise one or more transcription control elements within the anchor sequence-mediated conjunction. Disruption of such an anchor sequence-mediated conjunction by disrupting the formation of the anchor sequence-mediated conjunction, e.g., altering one or more anchor sequences, is likely to decrease transcription of an HNF4α gene within the anchor sequence-mediated conjunction.

[0251] In some embodiments, expression of the HNF4α gene is regulated, modulated, or influenced by one or more transcriptional control elements associated with the anchor sequence-mediated conjunction. In some embodiments, the anchor sequence-mediated conjunction comprises an HNF4α gene and one or more transcriptional control elements. For example, the HNF4α gene and one or more transcriptional control sequences are located within, at least partially, an anchor sequence-mediated conjunction, e.g., a Type 1 anchor sequence-mediated conjunction. The anchor sequence-mediated conjunction may also be referred to as a “Type 1, EP subtype.” In some embodiments, the HNF4α gene has a defined state of expression, e.g., in its native state, e.g., in a diseased state. For example, the HNF4α gene may have a high level of expression. By disrupting the anchor sequence-mediated conjunction, expression of the HNF4α gene may be decreased, e.g., decreased transcription due to conformational changes of the DNA previously open to transcription within the anchor sequence-mediated conjunction, e.g., decreased transcription due to conformational changes of the DNA creating additional distance between the HNF4α gene and the enhancing sequences. In one embodiment, both the HNF4α gene associated and one or more transcriptional control sequences, e.g., enhancing sequences, reside inside the anchor sequence-mediated conjunction. Disruption of the anchor sequence-mediated conjunction decreases expression of the HNF4α gene. In one embodiment, the HNF4α gene associated with the anchor sequence-mediated conjunction is accessible to one or more transcriptional control elements that reside inside, at least partially, the anchor sequence-mediated conjunction.

[0252] In some embodiments, expression of the HNF4α gene is regulated, modulated, or influenced by one or more transcriptional control elements associated with, but inaccessible due to the anchor sequence-mediated conjunction. For example, the anchor sequence-mediated conjunction associated with an HNF4α gene disrupts the ability of one or more transcriptional control elements to regulate, modulate, or influence expression of the HNF4α gene. The transcriptional control sequences may be separated from the HNF4α gene, e.g., reside on the opposite side, at least partially, e.g., inside or outside, of the anchor sequence-mediated conjunction as the HNF4α gene, e.g., the HNF4α gene is inaccessible to the transcriptional control elements due to proximity of the anchor sequence-mediated conjunction. In some embodiments, one or more enhancing sequences are separated from the HNF4α gene by the anchor sequence-mediated conjunction, e.g., a Type 2 anchor sequence-mediated conjunction.

[0253] In some embodiments, the HNF4α gene is inaccessible to one or more transcriptional control elements due to the anchor sequence-mediated conjunction, and disruption of the anchor sequence-mediated conjunction allows the transcriptional control element to regulate, modulate, or influence expression of the HNF4α gene. In one embodiment, the HNF4α gene is inside and outside the anchor sequence-mediated conjunction and inaccessible to the one or more transcriptional control elements. Disruption of the anchor sequence-mediated conjunction increases access of the transcriptional control elements to regulate, modulate, or influence expression of the HNF4α gene, e.g., the transcriptional control elements increase expression of the HNF4α gene. In one embodiment, the HNF4α gene is inside the anchor sequence-mediated conjunction and inaccessible to the one or more transcriptional control elements residing outside, at least partially, the anchor sequence-mediated conjunction. Disruption of the anchor sequence-mediated conjunction increases expression of the HNF4α gene. In one embodiment, the HNF4α gene is outside, at least partially, the anchor sequence-mediated conjunction and inaccessible to the one or more transcriptional control elements residing inside the anchor sequence-mediated conjunction. Disruption of the anchor sequence-mediated conjunction increases expression of the HNF4α gene.

[0254] A. HNF4α Site-Specific Targeting Moieties

[0255] The site-specific HNF4α targeting moieties of the invention target an HNF4α expression control region and may comprise a polymer or polymeric molecule, such as a polyamide (i.e., a molecule of repeating units linked by amide binds, e.g., a polypeptide), a polymer of nucleotides (such as a guide RNA, a nucleic acid molecule encoding a TALE polypeptide or a zinc finger polypeptides), a peptide nucleic acid (PNA), or a polymer of amino acids, such as a peptide or polypeptide, e.g., a fusion protein, etc. Suitable site-specific HNF4α targeting moieties, compositions, and methods of use of such agents and compositions are described below and in PCT Publication WO 2018/049073, the entire contents of which are expressly incorporated herein by reference.

[0256] In one embodiment, a site specific disrupting agent of the invention comprises a site-specific HNF4α targeting moiety comprising a nucleic acid molecule encoding a polypeptide, such as a DNA-binding domain, of a Transcription activator-like effector (TALE) polypeptide or a zinc finger (ZNF) polypeptide, or fragment thereof, that is engineered to specifically target an HNF4α expression control region to modulate expression of an HNF4α gene.

[0257] In another embodiment, a site-specific disrupting agent of the invention comprises a site-specific HNF4α targeting moiety comprising a nucleic acid molecule, such as a guide RNA (or gRNA) or a guide RNA and an effector, or fragment thereof, or nucleic acid molecule encoding an effector, or fragment thereof.

[0258] In another embodiment, a site-specific disrupting agent of the invention comprises a site-specific HNF4α targeting moiety comprising a polynucleotide, such as a PNA, e.g., a nucleic acid gRNA linked to an effector polypeptide, or fragment thereof.

[0259] In another embodiment, a site-specific disrupting agent of the invention comprises a site-specific HNF4α targeting moiety comprising a fusion molecule, such as a nucleic acid molecule encoding a DNA-binding domain, of a Transcription activator-like effector (TALE) polypeptide or a zinc finger (ZNF) polypeptide, or fragment thereof, and an effector.

[0260] In one embodiment, such site-specific disrupting agents comprise a second fusion protein, wherein the second fusion protein comprises a second site-specific HNF4α targeting moiety which targets a second HNF4α expression control region and a second effector molecule, wherein the second HNF4α expression control region is different than the HNF4α expression control region.

[0261] In another embodiment, a site-specific disrupting agent of the invention comprises a site-specific HNF4α targeting moiety comprising a fusion molecule, such as a nucleic acid molecule encoding a protein comprising a Cas polypeptide and, e.g., an epigenetic recruiter or an epigenetic CpG modifier.

[0262] In yet, another embodiment, a site-specific disrupting agent of the invention comprises a site-specific HNF4α targeting moiety comprising a fusion molecule, such as fusion protein comprising a Cas polypeptide and, e.g., an epigenetic recruiter or an epigenetic CpG modifier.

[0263] As used herein, in its broadest sense, the term “nucleic acid” refers to any compound and/or substance that is or can be incorporated into an oligonucleotide chain. In some embodiments, a nucleic acid is a compound and/or substance that is or can be incorporated into a polynucleotide chain via a phosphodiester linkage. As will be clear from context, in some embodiments, “nucleic acid” refers to an individual nucleic acid residue (e.g., a nucleotide and/or nucleoside); in some embodiments, “nucleic acid” refers to a polynucleotide chain comprising individual nucleic acid residues. In some embodiments, a “nucleic acid” is or comprises RNA; in some embodiments, a “nucleic acid” is or comprises DNA. In some embodiments, a “nucleic acid” is a “mixmer” comprising locked nucleic acid molecules and deoxynucleic acid molecules. In some embodiments, a nucleic acid is, comprises, or consists of one or more natural nucleic acid residues. In some embodiments, a nucleic acid is, comprises, or consists of one or more nucleic acid analogs. In some embodiments, a nucleic acid analog differs from a nucleic acid in that it does not utilize a phosphodiester backbone. For example, in some embodiments, a nucleic acid is, comprises, or consists of one or more “peptide nucleic acids”, which are known in the art and have peptide bonds instead of phosphodiester bonds in the backbone, are considered within the scope of the present invention. Alternatively or additionally, in some embodiments, a nucleic acid has one or more phosphorothioate and/or 5′-N-phosphoramidite linkages rather than phosphodiester bonds. In some embodiments, a nucleic acid is, comprises, or consists of one or more natural nucleosides (e.g., adenosine, thymidine, guanosine, cytidine, uridine, deoxyadenosine, deoxythymidine, deoxy guanosine, and deoxycytidine). In some embodiments, a nucleic acid is, comprises, or consists of one or more nucleoside analogs (e.g., 2-aminoadenosine, 2-thiothymidine, inosine, pyrrolo-pyrimidine, 3-methyl adenosine, 5-methylcytidine, C-5 propynyl-cytidine, C-5 propynyl-uridine, 2-aminoadenosine, C5-bromouridine, C5-fluorouridine, C5-iodouridine, C5-propynyl-uridine, C5-propynyl-cytidine, C5-methylcytidine, 2-aminoadenosine, 7-deazaadenosine, 7-deazaguanosine, 8-oxoadenosine, 8-oxoguanosine, O(6)-methylguanine, 2-thiocytidine, methylated bases, intercalated bases, and combinations thereof). In some embodiments, a nucleic acid comprises one or more modified sugars (e.g., 2′-fluororibose, ribose, 2′-deoxyribose, arabinose, and hexose) as compared with those in natural nucleic acids. In some embodiments, a nucleic acid has a nucleotide sequence that encodes a functional gene product such as an RNA or protein. In some embodiments, a nucleic acid includes one or more introns. In some embodiments, nucleic acids are prepared by one or more of isolation from a natural source, enzymatic synthesis by polymerization based on a complementary template (in vivo or in vitro), reproduction in a recombinant cell or system, and chemical synthesis. In some embodiments, a nucleic acid is at least 3, 4, 5, 6, 7, 8, 9, 10, 15, 20, 25, 30, 35, 40, 45, 50, 55, 60, 65, 70, 75, 80, 85, 90, 95, 100, 110, 120, 130, 140, 150, 160, 170, 180, 190, 20, 225, 250, 275, 300, 325, 350, 375, 400, 425, 450, 475, 500, 600, 700, 800, 900, 1000, 1500, 2000, 2500, 3000, 3500, 4000, 4500, 5000 or more residues long. In some embodiments, a nucleic acid is partly or wholly single stranded; in some embodiments, a nucleic acid is partly or wholly double stranded. In some embodiments a nucleic acid has a nucleotide sequence comprising at least one element that encodes, or is the complement of a sequence that encodes, a polypeptide. In some embodiments, a nucleic acid has enzymatic activity.

[0264] As used herein, the terms “peptide,” “polypeptide,” and “protein” refer to a compound comprised of amino acid residues covalently linked by peptide bonds, or by means other than peptide bonds. A protein or peptide must contain at least two amino acids, and no limitation is placed on the maximum number of amino acids that can comprise a protein's or peptide's sequence. Polypeptides include any peptide or protein comprising two or more amino acids joined to each other by peptide bonds or by means other than peptide bonds. As used herein, the term refers to both short chains, which also commonly are referred to in the art as peptides, oligopeptides and oligomers, for example, and to longer chains, which generally are referred to in the art as proteins, of which there are many types.

[0265] In certain embodiments, a polypeptide is or may comprise a chimeric or “fusion protein.” As used herein, a “chimeric protein” or “fusion protein” comprises all or part (preferably a biologically active part) of a first protein operably linked to a heterologous second polypeptide (i.e., a polypeptide other than the first protein). Within the fusion protein, the term “operably linked” is intended to indicate that the first protein or segment thereof and the heterologous polypeptide are fused in-frame to each other. The heterologous polypeptide can be fused to the amino-terminus or the carboxyl-terminus of the first protein or segment.

[0266] A “polyamide” is a polymeric molecule with repeating units linked by amide binds. Proteins are examples of naturally occurring polyamides. In some embodiments, a polyamide comprises a peptide nucleic acid (PNA).

[0267] A “peptide nucleic acid” (“PNA”) is a molecule in which one or more amino acid units in the PNA have an amide containing backbone, e.g., aminoethyl-glycine, similar to a peptide backbone, with a nucleic acid side chain in place of the amino acid side chain. Peptide nucleic acids (PNA) are known to hybridize complementary DNA and RNA with higher affinity than their oligonucleotide counterparts. This character of PNA not only makes them a stable hybrid with the nucleic acid side chains, but at the same time, the neutral backbone and hydrophobic side chains result in a hydrophobic unit within the polypeptide. The nucleic acid side chain includes, but is not limited to, a purine or a pyrimidine side chain such as adenine, cytosine, guanine, thymine and uracil. In one embodiment, the nucleic acid side chain includes a nucleoside analog as described herein.

[0268] In one embodiment, a site-specific HNF4α targeting moiety of the invention comprises a polyamide. Suitable polyamides for use in the agents and compositions of the invention are known in the art.

[0269] In one embodiment, a site-specific HNF4α targeting moiety of the invention comprises a polynucleotide. In some embodiments, the nucleotide sequence of the polynucleotide encodes an HNF4α gene or an HNF4α expression product. In some embodiments, the nucleotide sequence of the polynucleotide does not include an HNF4α coding sequence or an HNF4α expression product. For example, in some embodiments, a site-specific HNF4α targeting moiety of the invention comprises a polynucleotide that hybridizes to a target expression control region, e.g., a promoter or an anchor sequence. In some embodiments, the nucleotide sequence of the polynucleotide is a complement of a target anchor sequence, or has a sequence that is at least 80%, at least 85%, at least 85%, at least 86%, at least 87%, at least 88%, at least 89%, at least 90%, at least 91%, at least 92%, at least 93%, at least 94%, at least 95%, at least 96%, at least 97%, at least 98%, at least 99% identical to a complement of the target sequence.

[0270] The polynucleotides of the invention may include deoxynucleotides, ribonucleotides, modified deoxynucleotides, modified ribonucleotides (e.g., chemical modifications, such as modifications that alter the backbone linkages, sugar molecules, and/or nucleic acid bases), and artificial nucleic acids. In some embodiments, the polynucleotide includes, but is not limited to, genomic DNA, cDNA, peptide nucleic acids (PNA) or peptide oligonucleotide conjugates, locked nucleic acids (LNA), bridged nucleic acids (BNA), polyamides, triplex forming oligonucleotides, modified DNA, antisense DNA oligonucleotides, tRNA, mPvNA, rPvNA, modified RNA, miRNA, gRNA, and siRNA or other RNA or DNA molecules.

[0271] In some embodiments, the polynucleotides of the invention have a length from about 2 to about 5000 nts, about 10 to about 100 nts, about 50 to about 150 nts, about 100 to about 200 nts, about 150 to about 250 nts, about 200 to about 300 nts, about 250 to about 350 nts, about 300 to about 500 nts, about 10 to about 1000 nts, about 50 to about 1000 nts, about 100 to about 1000 nts, about 1000 to about 2000 nts, about 2000 to about 3000 nts, about 3000 to about 4000 nts, about 4000 to about 5000 nts, or any range therebetween.

[0272] The polynucleotides of the invention may include nucleosides, e.g., purines or pyrimidines, e.g., adenine, cytosine, guanine, thymine and uracil. In some embodiments, the polynucleotides includes one or more nucleoside analogs. The nucleoside analog includes, but is not limited to, a nucleoside analog, such as 5-fluorouracil; 5-bromouracil, 5-chlorouracil, 5-iodouracil, hypoxanthine, xanthine, 4-acetylcytosine, 4-methylbenzimidazole, 5-(carboxyhydroxylmethyl) uracil, 5-carboxymethylaminomethyl-2-thiouridine, 5-carboxymethylaminomethyluracil, dihydrouracil, dihydrouridine, beta-D-galactosylqueosine, inosine, N6-isopentenyladenine, 1-methylguanine, 1-methylinosine, 2,2-dimethylguanine, 2-methyladenine, 2-methylguanine, 3-methylcytosine, 5-methylcytosine, N6-adenine, 7-methylguanine, 5-methylaminomethyluracil, 5-methoxyaminomethyl-2-thiouracil, beta-D-mannosylqueosine, 5′-methoxycarboxymethyluracil, 5-methoxyuracil, 2-methylthio-N6-isopentenyladenine, uracil-5-oxyacetic acid (v), wybutoxosine, pseudouracil, queosine, 2-thiocytosine, 5-methyl-2-thiouracil, 2-thiouracil, 4-thiouracil, 5-methyluracil, uracil-5-oxyacetic acid methylester, uracil-5-oxyacetic acid (v), 5-methyl-2-thiouracil, 3-(3-amino-3-N-2-carboxypropyl) uracil, (acp3)w, 2,6-diaminopurine, 3-nitropyrrole, inosine, thiouridine, queuosine, wyosine, diaminopurine, isoguanine, isocytosine, diaminopyrimidine, 2,4-difluorotoluene, isoquinoline, pyrrolo[2,3-]pyridine, and any others that can base pair with a purine or a pyrimidine side chain.

[0273] In some embodiments, the site-specific HNF4α targeting moieties of the invention comprise a polynucleotide encoding a polypeptide that comprises a DNA-binding domain (DBD), or fragment thereof, of a zinc finger or TALE, that is engineered to specifically target an HNF4α expression control region to modulate expression of an HNF4α gene.

[0274] The design and preparation of such zinc finger polypeptides which specifically bind to a DNA target region of interest, such as an HNF4α expression control region, is well known in the art. For example, zinc finger (ZNF) proteins contain a DNA binding domain that specifically binds a triplet of nucleotides. Thus, to design and prepare the site-specific HNF4α targeting moieties of the invention, a modular assembly process which includes combining separate zinc finger DNA binding domains that can each recognize a specific 3-basepair DNA sequence to generate 3-finger, 4-, 5-, 6-, 7-, or 8-zinc finger polypeptide that recognizes specific target sites ranging from 9 base pairs to 24 base pairs in length may be used. Another suitable method may include 2-finger modules to generate ZNF polynucleotides with up to six individual zinc fingers. See, e.g., Shukla V K, et al., Nature. 459 (7245) 2009: 437-41; Dreier B, et al., JBC. 280 (42) 2005: 35588-97; Dreier B, et al, JBC 276 (31) 2001: 29466-78; Bae K H, et al., Nature Biotechnology. 21 (3) 2003: 275-80.

[0275] In some embodiments, a site-specific HNF4α targeting moiety of the invention comprises a polynucleotide encoding a polypeptide that comprises a DNA-binding domain (DBD), or fragment thereof, of a zinc finger, that is engineered to specifically target an HNF4α expression control region to modulate expression of an HNF4α gene. Exemplary amino acid sequences encoding a zinc finger that binds to a nucleotide triplet suitable for use in the present invention are provide in Table 1A below. (See, e.g., Gersbach et al., Synthetic Zinc Finger Proteins: The Advent of Targeted Gene Regulation and Genome Modification Technologies).

TABLE 1A

| Amino Acid | | |
|---|---|---|
| Sequence of | | |
| Zing Finger | | |
| DNA Binding | | |
| Domain | Nucleotide | SEQ ID |
| (Finger) | Triplet | NO. |
| RKDALRG | TTG | 1 |
| TTGALTE | CTT | 2 |
| QRHHLVE | CTC | 3 |
| QNSTLTE | CTA | 4 |
| RNDALTE | CTG | 5 |
| HKNALQN | ATT | 6 |
| RRSACRR | ATC | 7 |
| QKSSLIA | ATA | 8 |
| RRDELNV | ATG | 9 |
| TSGSLVR | GTT | 10 |
| DPGALVR | GTC | 11 |
| QSSSLVR | GTA | 12 |
| RSDELVR | GTG | 13 |
| RLRDIQF | TCT | 14 |
| RSDERKR | TCC | 15 |
| RSDHLTT | TCA | 16 |
| RLRALDR | TCG | 17 |
| TKNSLTE | CCT | 18 |
| SKKHLAE | CCC | 19 |
| TSHSLTE | CCA | 20 |
| RNDTLTE | CCG | 21 |
| THLDLIR | ACT | 22 |
| DKKDLTR | ACC | 23 |
| SPADLTR | ACA | 24 |
| RTDTLRD | ACG | 25 |
| TSGELVR | GCT | 26 |
| DCRDLAR | GCC | 27 |
| QSGDLRR | GCA | 28 |
| RSDDLVR | GCG | 29 |
| ARGNLRT | TAT | 30 |
| SRGNLKS | TAC | 31 |
| QASNLIS | TAA | 32 |
| REDNLHT | TAG | 33 |
| TSGNLTE | CAT | 34 |
| SKKALTE | CAC | 35 |
| QSGNLTE | CAA | 36 |
| RADNLTE | CAG | 37 |
| TTGNLTV | AAT | 38 |
| DSGNLRV | AAC | 39 |
| QRANLRA | AAA | 40 |
| RKDNLKN | AAG | 41 |
| TSGNLVR | GAT | 42 |
| DPGNLVR | GAC | 43 |
| QSSNLVR | GAA | 44 |
| RSDNLVR | GAG | 45 |
| APKALGW | TGC | 46 |
| QAGHLAS | TGA | 47 |
| RSDHLTT | TGG | 48 |
| SRRTCRA | CGT | 49 |
| HTGHLLE | CGC | 50 |
| QSGHLTE | CGA | 51 |
| RSDKLTE | CGG | 52 |
| HRTTLTN | AGT | 53 |
| ERSHLRE | AGC | 54 |
| QLAHLRA | AGA | 55 |
| RSDHLTN | AGG | 56 |
| TSGHLVR | GGT | 57 |
| DPGHLVR | GGC | 58 |
| QRAHLER | GGA | 59 |
| RSDKLVR | GGG | 60 |

[0276] A zinc finger DNA binding domain comprises an N-terminal region and a C-terminal region with the “fingers” that bind to the target DNA sequence in between. The N-terminal region generally is 7 amino acids in length. The C-terminal region is generally 6 amino acids in length. Thus, the N-terminal region generally comprises the amino acid sequence of X₁X₂X₃X₄X₅X₆X₇. “X” can be any amino acid. In some embodiments, the N-terminal region comprises the exemplary amino acid sequence of LEPGEKP (SEQ ID NO: 309). “X” can be any amino acid. The C-terminal region generally comprises the amino acid sequence of X₂₅X₂₆X₂₇X₂₈X₂₉X₃₀. In certain embodiments, the C-terminal region comprises the exemplary amino acid sequence of TGKKTS (SEQ ID NO: 310)

[0277] Each finger in the DNA binding domain is flanked by a N-terminal backbone located to the N-terminus of the finger and a C-terminal backbone located to the C-terminus of the finger. The N-terminal backbone of the finger generally is 11 amino acids long with two conservative cysteines (C) locate at 3^{rd} and 6^{th} positions. Thus, the N-terminal backbone of the finger generally comprises the amino acid sequence of X₈X₉CX₁₀X₁₁CX₁₂X₁₃X₁₄X₁₅X₁₆. “X” can be any amino acid. The C-terminal backbone of the finger generally is 5 amino acids long with two conservative histines (H) located at 1ₛₜ and 5^{th} positions. Thus, the C-terminal backbone of the finger generally comprises the amino acid sequence of HX₁₇X₁₈X₁₉H. “X” can be any amino acid. In some embodiments, the N-terminal backbone comprises the exemplary amino acid sequence of YKCPECGKSFS (SEQ ID No. 61) and the C-terminal backbone comprises the exemplary amino acid sequence of HQRTH (SEQ ID No. 62). Two “fingers” are linked through a linker. A linker generally is 5 amino acids in length and comprises the amino acid sequence of X₂₀X₂₁X₂₂X₂₃X₂₄ “X” can be any amino acid. In certain embodiments, the linker comprises the exemplary amino acid sequence of TGEKP (SEQ ID No. 63). Thus, the zinc finger of a site specific HNF4α site-specific disrupting agent has a structure as follows: (N-terminal backbone-finger-C-terminal backbone-linker)ₙ and the zinc finger DNA binding domain of a site specific HNF4α site-specific disrupting agent has a structure as follows: [N-terminal region (N-terminal backbone-finger-C-terminal backbone-linker)ₙ-C-terminal region]. “N” represents the number of triplets of nucleotides to which the zinc finger DNA binding domain and, thus, to which the HNF4α site-specific disrupting agent binds.

[0278] The “finger” amino acid sequences of four nucleotide triplets are unknown, however, if such a triplet is identified in a target area of interest, two “linker span sequences”—linker span 1 and linker span 2—are useful to circumvent the issue. Linker span 1 is used to skip one base pair if a “finger” amino acid sequence of a triplet is not available. Linker span 2 is used to skip 2 base pairs if a “finger” amino acid sequence of a triplet is not available. Linker span 1 is generally 12 amino acids long. Linker span 2 is generally 16 amino acids long. Thus, linker span 1 generally comprises the amino acid sequence of X₃₁X₃₂X₃₃X₃₄X₃₅X₃₆X₃₇X₃₈X₃₉X₄₀X₄₁X₄₂. Linker span 2 generally comprises the amino acid sequence of X₄₃X₄₄X₄₅X₄₆X₄₇X₄₈X₄₉X₅₀X₅₁X₅₂X₅₃X₅₄X₅₅X₅₆X₅₇X₅₈. In some embodiments, linker span 1 comprises the amino acid sequence of THPRAPIPKPFQ (SEQ ID NO: 311). In certain embodiments, linker span 2 comprises the amino acid sequence of TPNPHRRTDPSHKPFQ (SEQ ID NO: 312). When linker span 1 and/or linker span 2 is used, the finger-linker span 1/span 2-finger comprises the structure as follows: N-terminal back bone-finger-C-terminal backbone-linker span 1/span 2-N-terminal backbone-finger-C-terminal backbone-linker.

[0279] Table 1B provides the amino acid sequence structure of exemplary zinc finger DNA binding domains of the disrupting agents comprising a zinc finger DNA binding domain described in the working examples below (see Table 6A). Table 10 also provides the nucleotide sequence of suitable target sequences in the expression control region, the amino acid sequences of exemplary zinc finger DNA binding domains suitable for use in the disrupting agents comprising a zinc finger DNA binding domain of the present invention as well as the amino acid sequence structure of the exemplary zinc finger DNA binding domains suitable for use in the disrupting agents comprising a zinc finger DNA binding domain of the present invention. The “X,” as used in Table 1B, represents any amino acid.

[0280] In some embodiments, a zinc finger DNA binding domain suitable for use in the disrupting agents of the invention comprises an amino acid sequence having at least 75%, at least 80%, at least 85%, at least 86%, at least 87%, at least 88%, at least 89%, at least 90%, at least 91%, at least 92%, at least 93%, at least 94%, at least 95%, at least 96%, at least 97%, at least 98%, at least 99% amino acid identity to the entire amino acid sequence of any one of the zinc finger DNA binding domains provided in any one of Tables 6A and 10.

TABLE 1B

| Name of | | |
|---|---|---|
| Exemplary Zinc | | SEQ |
| Finger DNA | | ID |
| Binding Domain | Amino Acid Sequence Structure | NO: |
| ZF1 | X₁X₂X₃X₄X₅X₆X₇X₈X₉CX₁₀X₁₁CX₁₂X₁₃X₁₄X₁₅X₁₆RSDNLVRHX₁₇X₁₈ | 313 |
| | X₁₉HX₂₀X₂₁X₂₂X₂₃X₂₄X₈X₉CX₁₀X₁₁CX₁₂X₁₃X₁₄X₁₅X₁₆RSDHLTNHX₁₇ | |
| | X₁₈X₁₉HX₂₀X₂₁X₂₂X₂₃X₂₄X₈X₉CX₁₀X₁₁CX₁₂X₁₃X₁₄X₁₅X₁₆DPGHLVR | |
| | HX₁₇X₁₈X₁₉HX₂₀X₂₁X₂₂X₂₃X₂₄X₈X₉CX₁₀X₁₁CX₁₂X₁₃X₁₄X₁₅X₁₆QRAH | |
| | LERHX₁₇X₁₈X₁₉HX₂₀X₂₁X₂₂X₂₃X₂₄X₈X₉CX₁₀X₁₁CX₁₂X₁₃X₁₄X₁₅X₁₆SR | |
| | RTCRAHX₁₇X₁₈X₁₉HX₂₀X₂₁X₂₂X₂₃X₂₄X₈X₉CX₁₀X₁₁CX₁₂X₁₃X₁₄X₁₅X₁₆ | |
| | RSDKLTEHX₁₇X₁₈X₁₉HX₂₀X₂₁X₂₂X₂₃X₂₄X₈X₉CX₁₀X₁₁CX₁₂X₁₃X₁₄X₁₅ | |
| | X₁₆RNDTLTEHX₁₇X₁₈X₁₉HX₂₀X₂₁X₂₂X₂₃X₂₄X₂₅X₂₆X₂₇X₂₈X₂₉X₃₀ | |
| ZF2 | X₁X₂X₃X₄X₅X₆X₇X₈X₉CX₁₀X₁₁CX₁₂X₁₃X₁₄X₁₅X₁₆QSSNLVRHX₁₇X₁₈ | 314 |
| | X₁₉HX₂₀X₂₁X₂₂X₂₃X₂₄X₈X₉CX₁₀X₁₁CX₁₂X₁₃X₁₄X₁₅X₁₆SKKHLAEHX₁₇ | |
| | X₁₈X₁₉HX₂₀X₂₁X₂₂X₂₃X₂₄X₈X₉CX₁₀X₁₁CX₁₂X₁₃X₁₄X₁₅X₁₆SKKALTEH | |
| | X₁₇X₁₈X₁₉HX₂₀X₂₁X₂₂X₂₃X₂₄X₈X₉CX₁₀X₁₁CX₁₂X₁₃X₁₄X₁₅X₁₆DCRDL | |
| | ARHX₁₇X₁₈X₁₉HX₂₀X₂₁X₂₂X₂₃X₂₄X₈X₉CX₁₀X₁₁CX₁₂X₁₃X₁₄X₁₅X₁₆DP | |
| | GHLVRHX₁₇X₁₈X₁₉HX₂₀X₂₁X₂₂X₂₃X₂₄X₈X₉CX₁₀X₁₁CX₁₂X₁₃X₁₄X₁₅X₁₆ | |
| | RNDALTEHX₁₇X₁₈X₁₉HX₂₀X₂₁X₂₂X₂₃X₂₄X₈X₉CX₁₀X₁₁CX₁₂X₁₃X₁₄X₁₅ | |
| | X₁₆DKKDLTRHX₁₇X₁₈X₁₉HX₂₀X₂₁X₂₂X₂₃X₂₄X₂₅X₂₆X₂₇X₂₈X₂₉X₃₀ | |
| ZF3 | X₁X₂X₃X₄X₅X₆X₇X₈X₉CX₁₀X₁₁CX₁₂X₁₃X₁₄X₁₅X₁₆RSDNLVRHX₁₇X₁₈ | 315 |
| | X₁₉HX₂₀X₂₁X₂₂X₂₃X₂₄X₈X₉CX₁₀X₁₁CX₁₂X₁₃X₁₄X₁₅X₁₆QLAHLRAHX₁₇ | |
| | X₁₈X₁₉HX₂₀X₂₁X₂₂X₂₃X₂₄X₈X₉CX₁₀X₁₁CX₁₂X₁₃X₁₄X₁₅X₁₆DPGHLVR | |
| | HX₁₇X₁₈X₁₉HX₂₀X₂₁X₂₂X₂₃X₂₄X₈X₉CX₁₀X₁₁CX₁₂X₁₃X₁₄X₁₅X₁₆QSSNL | |
| | VRHX₁₇X₁₈X₁₉HX₂₀X₂₁X₂₂X₂₃X₂₄X₈X₉CX₁₀X₁₁CX₁₂X₁₃X₁₄X₁₅X₁₆RK | |
| | DNLKNHX₁₇X₁₈X₁₉HX₂₀X₂₁X₂₂X₂₃X₂₄X₈X₉CX₁₀X₁₁CX₁₂X₁₃X₁₄X₁₅X61 | |
| | QAGHLASHX₁₇X₁₈X₁₉HX₂₀X₂₁X₂₂X₂₃X₂₄X₈X₉CX₁₀X₁₁CX₁₂X₁₃X₁₄X₁₅ | |
| | X₁₆TSGSLVRHX₁₇X₁₈X₁₉HX₂₀X₂₁X₂₂X₂₃X₂₄X₂₅X₂₆X₂₇X₂₈X₂₉X₃₀ | |
| ZF4 | X₁X₂X₃X₄X₅X₆X₇X₈X₉CX₁₀X₁₁CX₁₂X₁₃X₁₄X₁₅X₁₆QRAHLERHX₁₇X₁₈ | 316 |
| | X₁₉HX₂₀X₂₁X₂₂X₂₃X₂₄X₈X₉CX₁₀X₁₁CX₁₂X₁₃X₁₄X₁₅X₁₆QLAHLRAHX₁₇ | |
| | X₁₈X₁₉HX₂₀X₂₁X₂₂X₂₃X₂₄X₈X₉CX₁₀X₁₁CX₁₂X₁₃X₁₄X₁₅X₁₆SKKHLAE | |
| | HX₁₇X₁₈X₁₉HX₂₀X₂₁X₂₂X₂₃X₂₄X₈X₉CX₁₀X₁₁CX₁₂X₁₃X₁₄X₁₅X₁₆TTGAL | |
| | TEHX₁₇X₁₈X₁₉HX₂₀X₂₁X₂₂X₂₃X₂₄X₈X₉CX₁₀X₁₁CX₁₂X₁₃X₁₄X₁₅X₁₆TSG | |
| | NLVRHX₁₇X₁₈X₁₉HX₂₀X₂₁X₂₂X₂₃X₂₄X₈X₉CX₁₀X₁₁CX₁₂X₁₃X₁₄X₁₅X₁₆ | |
| | QSGDLRRHX₁₇X₁₈X₁₉HX₂₀X₂₁X₂₂X₂₃X₂₄X₈X₉CX₁₀X₁₁CX₁₂X₁₃X₁₄X₁₅ | |
| | X₁₆TSHSLTEHX₁₇X₁₈X₁₉HX₂₀X₂₁X₂₂X₂₃X₂₄X₂₅X₂₆X₂₇X₂₈X₂₉X₃₀ | |
| ZF5 | X₁X₂X₃X₄X₅X₆X₇X₈X₉CX₁₀X₁₁CX₁₂X₁₃X₁₄X₁₅X₁₆TSGNLTEHX₁₇X₁₈ | 317 |
| | X₁₉HX₂₀X₂₁X₂₂X₂₃X₂₄X₈X₉CX₁₀X₁₁CX₁₂X₁₃X₁₄X₁₅X₁₆DSGNLRVHX₁₇ | |
| | X₁₈X₁₉HX₂₀X₂₁X₂₂X₂₃X₂₄X₈X₉CX₁₀X₁₁CX₁₂X₁₃X₁₄X₁₅X₁₆HKNALQN | |
| | HX₁₇X₁₈X₁₉HX₂₀X₂₁X₂₂X₂₃X₂₄X₈X₉CX₁₀X₁₁CX₁₂X₁₃X₁₄X₁₅X₁₆RNDT | |
| | LTEHX₁₇X₁₈X₁₉HX₂₀X₂₁X₂₂X₂₃X₂₄X₈X₉CX₁₀X₁₁CX₁₂X₁₃X₁₄X₁₅X₁₆QR | |
| | AHLERHX₁₇X₁₈X₁₉HX₂₀X₂₁X₂₂X₂₃X₂₄X₈X₉CX₁₀X₁₁CX₁₂X₁₃X₁₄X₁₅X₁₆ | |
| | RSDKLVRHX₁₇X₁₈X₁₉HX₂₀X₂₁X₂₂X₂₃X₂₄X₈X₉CX₁₀X₁₁CX₁₂X₁₃X₁₄X₁₅ | |
| | X₁₆DPGHLVRHX₁₇X₁₈X₁₉HX₂₀X₂₁X₂₂X₂₃X₂₄X₂₅X₂₆X₂₇X₂₈X₂₉X₃₀ | |
| ZF6 | X₁X₂X₃X₄X₅X₆X₇X₈X₉CX₁₀X₁₁CX₁₂X₁₃X₁₄X₁₅X₁₆TSHSLTEHX₁₇X₁₈ | 318 |
| | X₁₉HX₂₀X₂₁X₂₂X₂₃X₂₄X₈X₉CX₁₀X₁₁CX₁₂X₁₃X₁₄X₁₅X₁₆QRANLRAHX₁₇ | |
| | X₁₈X₁₉HX₂₀X₂₁X₂₂X₂₃X₂₄X₈X₉CX₁₀X₁₁CX₁₂X₁₃X₁₄X₁₅X₁₆RADNLTE | |
| | HX₁₇X₁₈X₁₉HX₂₀X₂₁X₂₂X₂₃X₂₄X₈X₉CX₁₀X₁₁CX₁₂X₁₃X₁₄X₁₅X₁₆ERSHL | |
| | REHX₁₇X₁₈X₁₉HX₂₀X₂₁X₂₂X₂₃X₂₄X₈X₉CX₁₀X₁₁CX₁₂X₁₃X₁₄X₁₅X₁₆DPG | |
| | ALVRHXI7X₁₈X₁₉HX₂₀X₂₁X₂₂X₂₃X₂₄X₈X₉CX₁₀X₁₁CX₁₂X₁₃X₁₄X₁₅X₁₆ | |
| | TSGHLVRHX₁₇X₁₈X₁₉HX₂₀X₂₁X₂₂X₂₃X₂₄X₈X₉CX₁₀X₁₁CX₁₂X₁₃X₁₄X₁₅ | |
| | X₁₆RNDTLTEHX₁₇X₁₈X₁₉HX₂₀X₂₁X₂₂X₂₃X₂₄X₂₅X₂₆X₂₇X₂₈X₂₉X₃₀ | |
| ZF7 | X₁X₂X₃X₄X₅X₆X₇X₈X₉CX₁₀X₁₁CX₁₂X₁₃X₁₄X₁₅X₁₆RSDHLTNHX₁₇X₁₈ | 319 |
| | X₁₉HX₂₀X₂₁X₂₂X₂₃X₂₄X₈X₉CX₁₀X₁₁CX₁₂X₁₃X₁₄X₁₅X₁₆TSGSLVRHX₁₇ | |
| | X₁₈X₁₉HX₂₀X₂₁X₂₂X₂₃X₂₄X₈X₉CX₁₀X₁₁CX₁₂X₁₃X₁₄X₁₅X₁₆QAGHLAS | |
| | HX₁₇X₁₈X₁₉HX₂₀X₂₁X₂₂X₂₃X₂₄X₈X₉CX₁₀X₁₁CX₁₂X₁₃X₁₄X₁₅X₁₆RSDKL | |
| | TEHX₁₇X₁₈X₁₉HX₂₀X₂₁X₂₂X₂₃X₂₄X₈X₉CX₁₀X₁₁CX₁₂X₁₃X₁₄X₁₅X₁₆TSG | |
| | NLTEHX₁₇X₁₈X₁₉HX₂₀X₂₁X₂₂X₂₃X₂₄X₈X₉CX₁₀X₁₁CX₁₂X₁₃X₁₄X₁₅X₁₆Q | |
| | SSNLVRHX₁₇X₁₈X₁₉HX₂₀X₂₁X₂₂X₂₃X₂₄X₈X₉CX₁₀X₁₁CX₁₂X₁₃X₁₄X₁₅X₁₆ | |
| | THLDLIRHX₁₇X₁₈X₁₉HX₂₀X₂₁X₂₂X₂₃X₂₄X₂₅X₂₆X₂₇X₂₈X₂₉X₃₀ | |
| ZF8 | X₁X₂X₃X₄X₅X₆X₇X₈X₉CX₁₀X₁₁CX₁₂X₁₃X₁₄X₁₅X₁₆RSDHLTTHX₁₇X₁₈ | 320 |
| | X₁₉HX₂₀X₂₁X₂₂X₂₃X₂₄X₈X₉CX₁₀X₁₁CX₁₂X₁₃X₁₄X₁₅X₁₆TSGELVRHX₁₇ | |
| | X₁₈X₁₉HX₂₀X₂₁X₂₂X₂₃X₂₄X₈X₉CX₁₀X₁₁CX₁₂X₁₃X₁₄X₁₅X₁₆RRDELNV | |
| | HX₁₇X₁₈X₁₉HX₂₀X₂₁X₂₂X₂₃X₂₄X₈X₉CX₁₀X₁₁CX₁₂X₁₃X₁₄X₁₅X₁₆SPADL | |
| | TRHX₁₇X₁₈X₁₉HX₂₀X₂₁X₂₂X₂₃X₂₄X₈X₉CX₁₀X₁₁CX₁₂X₁₃X₁₄X₁₅X₁₆RSD | |
| | ELVRHX₁₇X₁₈X₁₉HX₂₀X₂₁X₂₂X₂₃X₂₄X₈X₉CX₁₀X₁₁CX₁₂X₁₃X₁₄X₁₅X₁₆R | |
| | SDKLVRHX₁₇X₁₈X₁₉HX₂₀X₂₁X₂₂X₂₃X₂₄X₈X₉CX₁₀X₁₁CX₁₂X₁₃X₁₄X₁₅ | |
| | X₁₆TTGALTEHX₁₇X₁₈X₁₉HX₂₀X₂₁X₂₂X₂₃X₂₄X₂₅X₂₆X₂₇X₂₈X₂₉X₃₀ | |
| ZF9 | X₁X₂X₃X₄X₅X₆X₇X₈X₉CX₁₀X₁₁CX₁₂X₁₃X₁₄X₁₅X₁₆QSGNLTEHX₁₇X₁₈ | 321 |
| | X₁₉HX₂₀X₂₁X₂₂X₂₃X₂₄X₈X₉CX₁₀X₁₁CX₁₂X₁₃X₁₄X₁₅X₁₆HKNALQNHX₁₇ | |
| | X₁₈X₁₉HX₂₀X₂₁X₂₂X₂₃X₂₄X₈X₉CX₁₀X₁₁CX₁₂X₁₃X₁₄X₁₅X₁₆QNSTLTE | |
| | HX₁₇X₁₈X₁₉HX₂₀X₂₁X₂₂X₂₃X₂₄X₈X₉CX₁₀X₁₁CX₁₂X₁₃X₁₄X₁₅X₁₆SKKH | |
| | LAEHX₁₇X₁₈X₁₉HX₂₀X₂₁X₂₂X₂₃X₂₄X₈X₉CX₁₀X₁₁CX₁₂X₁₃X₁₄X₁₅X₁₆TS | |
| | GNLVRHX₁₇X₁₈X₁₉HX₂₀X₂₁X₂₂X₂₃X₂₄X₈X₉CX₁₀X₁₁CX₁₂X₁₃X₁₄X₁₅X₁₆ | |
| | QSGHLTEHX₁₇X₁₈X₁₉HX₄₃X₄₄X₄₅X₄₆X₄₇X₄₈X₄₉X₅₀X₅₁X₅₂X₅₃X₅₄X₅₅ | |
| | X₅₆X₅₇X58X8X9CX₁₀X₁₁CX₁₂X₁₃X₁₄X₁₅X₁₆DKKDLTRHX₁₇X₁₈X₁₉HX₂₀ | |
| | X₂₁X₂₂X₂₃X₂₄X₂₅X₂₆X₂₇X₂₈X₂₉X₃₀ | |
| ZF10 | X₁X₂X₃X₄X₅X₆X₇X₈X₉CX₁₀X₁₁CX₁₂X₁₃X₁₄X₁₅X₁₆QNSTLTEHX₁₇X₁₈ | 322 |
| | X₁₉HX₂₀X₂₁X₂₂X₂₃X₂₄X₈X₉CX₁₀X₁₁CX₁₂X₁₃X₁₄X₁₅X₁₆ERSHLREHX₁₇ | |
| | X₁₈X₁₉HX₂₀X₂₁X₂₂X₂₃X₂₄X₈X₉CX₁₀X₁₁CX₁₂X₁₃X₁₄X₁₅X₁₆SKKHLAEH | |
| | X₁₇X₁₈X₁₉HX₂₀X₂₁X₂₂X₂₃X₂₄X₈X₉CX₁₀X₁₁CX₁₂X₁₃X₁₄X₁₅X₁₆RNDTLT | |
| | EHX₁₇X₁₈X₁₉HX₂₀X₂₁X₂₂X₂₃X₂₄X₈X₉CX₁₀X₁₁CX₁₂X₁₃X₁₄X₁₅X₁₆DCR | |
| | DLARHX₁₇X₁₈X₁₉HX₂₀X₂₁X₂₂X₂₃X₂₄X₈X₉CX₁₀X₁₁CX₁₂X₁₃X₁₄X₁₅X₁₆ | |
| | QSGDLRRHX₁₇X₁₈X₁₉HX₂₀X₂₁X₂₂X₂₃X₂₄X₈X₉CX₁₀X₁₁CX₁₂X₁₃X₁₄X₁₅ | |
| | X₁₆TKNSLTEHX₁₇X₁₈X₁₉HX₂₀X₂₁X₂₂X₂₃X₂₄X₂₅X₂₆X₂₇X₂₈X₂₉X₃₀ | |
| ZF11 | X₁X₂X₃X₄X₅X₆X₇X₈X₉CX₁₀X₁₁CX₁₂X₁₃X₁₄X₁₅X₁₆ERSHLREHX₁₇X₁₈ | 323 |
| | X₁₉HX₂₀X₂₁X₂₂X₂₃X₂₄X₈X₉CX₁₀X₁₁CX₁₂X₁₃X₁₄X₁₅X₁₆RADNLTEHX₁₇ | |
| | X₁₈X₁₉HX₂₀X₂₁X₂₂X₂₃X₂₄X₈X₉CX₁₀X₁₁CX₁₂X₁₃X₁₄X₁₅X₁₆RSDKLTEH | |
| | X₁₇X₁₈X₁₉HX₂₀X₂₁X₂₂X₂₃X₂₄X₈X₉CX₁₀X₁₁CX₁₂X₁₃X₁₄X₁₅X₁₆SKKHL | |
| | AEHX₁₇X₁₈X₁₉HX₂₀X₂₁X₂₂X₂₃X₂₄X₈X₉CX₁₀X₁₁CX₁₂X₁₃X₁₄X₁₅X₁₆TK | |
| | NSLTEHX₁₇X₁₈X₁₉HX₂₀X₂₁X₂₂X₂₃X₂₄X₈X₉CX₁₀X₁₁CX₁₂X₁₃X₁₄X₁₅X₁₆ | |
| | DKKDLTRHX₁₇X₁₈X₁₉HX₂₀X₂₁X₂₂X₂₃X₂₄X₈X₉CX₁₀X₁₁CX₁₂X₁₃X₁₄X₁₅ | |
| | X₁₆SKKHLAEHX₁₇X₁₈X₁₉HX₂₀X₂₁X₂₂X₂₃X₂₄X₂₅X₂₆X₂₇X₂₈X₂₉X₃₀ | |
| ZF12 | X₁X₂X₃X₄X₅X₆X₇X₈X₉CX₁₀X₁₁CX₁₂X₁₃X₁₄X₁₅X₁₆SKKHLAEHX₁₇X₁₈ | 324 |
| | X₁₉HX₂₀X₂₁X₂₂X₂₃X₂₄X₈X₉CX₁₀X₁₁CX₁₂X₁₃X₁₄X₁₅X₁₆THLDLIRHX₁₇ | |
| | X₁₈X₁₉HX₂₀X₂₁X₂₂X₂₃X₂₄X₈X₉CX₁₀X₁₁CX₁₂X₁₃X₁₄X₁₅X₁₆RKDNLKN | |
| | HX₁₇X₁₈X₁₉HX₂₀X₂₁X₂₂X₂₃X₂₄X₈X₉CX₁₀X₁₁CX₁₂X₁₃X₁₄X₁₅X₁₆DCRD | |
| | LARHX₁₇X₁₈X₁₉HX₂₀X₂₁X₂₂X₂₃X₂₄X₈X₉CX₁₀X₁₁CX₁₂X₁₃X₁₄X₁₅X₁₆RE | |
| | DNLHTHX₁₇X₁₈X₁₉HX₂₀X₂₁X₂₂X₂₃X₂₄X₈X₉CX₁₀X₁₁CX₁₂X₁₃X₁₄X₁₅X₁₆ | |
| | DPGHLVRHX₁₇X₁₈X₁₉HX₂₀X₂₁X₂₂X₂₃X₂₄X₈X₉CX₁₀X₁₁CX₁₂X₁₃X₁₄X₁₅ | |
| | X₁₆QLAHLRAHX₁₇X₁₈X₁₉HX₂₀X₂₁X₂₂X₂₃X₂₄X₂₅X₂₆X₂₇X₂₈X₂₉X₃₀ | |
| ZF13 | X₁X₂X₃X₄X₅X₆X₇X₈X₉CX₁₀X₁₁CX₁₂X₁₃X₁₄X₁₅X₁₆RSDKLVRHX₁₇X₁₈ | 325 |
| | X₁₉HX₂₀X₂₁X₂₂X₂₃X₂₄X₈X₉CX₁₀X₁₁CX₁₂X₁₃X₁₄X₁₅X₁₆QSGDLRRHX₁₇ | |
| | X₁₈X₁₉HX₂₀X₂₁X₂₂X₂₃X₂₄X₈X₉CX₁₀X₁₁CX₁₂X₁₃X₁₄X₁₅X₁₆TSGELVRH | |
| | X₁₇X₁₈X₁₉HX₂₀X₂₁X₂₂X₂₃X₂₄X₈X₉CX₁₀X₁₁CX₁₂X₁₃X₁₄X₁₅X₁₆RSDKLV | |
| | RHX₁₇X₁₈X₁₉HX₂₀X₂₁X₂₂X₂₃X₂₄X₈X₉CX₁₀X₁₁CX₁₂X₁₃X₁₄X₁₅X₁₆DPG | |
| | HLVRHX₁₇X₁₈X₁₉HX₂₀X₂₁X₂₂X₂₃X₂₄X₈X₉CX₁₀X₁₁CX₁₂X₁₃X₁₄X₁₅X₁₆ | |
| | RNDALTEHX₁₇X₁₈X₁₉HX₂₀X₂₁X₂₂X₂₃X₂₄X₈X₉CX₁₀X₁₁CX₁₂X₁₃X₁₄X₁₅ | |
| | X₁₆RSDHLTNHX₁₇X₁₈X₁₉HX₂₀X₂₁X₂₂X₂₃X₂₄X₂₅X₂₆X₂₇X₂₈X₂₉X₃₀ | |
| ZF14 | X₁X₂X₃X₄X₅X₆X₇X₈X₉CX₁₀X₁₁CX₁₂X₁₃X₁₄X₁₅X₁₆TSGHLVRHX₁₇X₁₈ | 326 |
| | X₁₉HX₂₀X₂₁X₂₂X₂₃X₂₄X₈X₉CX₁₀X₁₁CX₁₂X₁₃X₁₄X₁₅X₁₆TTGNLTVHX₁₇ | |
| | X₁₈X₁₉HX₂₀X₂₁X₂₂X₂₃X₂₄X₈X₉CX₁₀X₁₁CX₁₂X₁₃X₁₄X₁₅X₁₆TSGSLVRH | |
| | X₁₇X₁₈X₁₉HX₂₀X₂₁X₂₂X₂₃X₂₄X₈X₉CX₁₀X₁₁CX₁₂X₁₃X₁₄X₁₅X₁₆RSDKLV | |
| | RHX₁₇X₁₈X₁₉HX₂₀X₂₁X₂₂X₂₃X₂₄X₈X₉CX₁₀X₁₁CX₁₂X₁₃X₁₄X₁₅X₁₆RSDE | |
| | LVRHX₁₇X₁₈X₁₉HX₂₀X₂₁X₂₂X₂₃X₂₄X₈X₉CX₁₀X₁₁CX₁₂X₁₃X₁₄X₁₅X₁₆RS | |
| | DKLVRHX₁₇X₁₈X₁₉HX₂₀X₂₁X₂₂X₂₃X₂₄X₈X₉CX₁₀X₁₁CX₁₂X₁₃X₁₄X₁₅X₁₆ | |
| | QRAHLERHX₁₇X₁₈X₁₉HX₂₀X₂₁X₂₂X₂₃X₂₄X₂₅X₂₆X₂₇X₂₈X₂₉X₃₀ | |
| ZF15 | X₁X₂X₃X₄X₅X₆X₇X₈X₉CX₁₀X₁₁CX₁₂X₁₃X₁₄X₁₅X₁₆RNDTLTEHX₁₇X₁₈ | 327 |
| | X₁₉HX₂₀X₂₁X₂₂X₂₃X₂₄X₈X₉CX₁₀X₁₁CX₁₂X₁₃X₁₄X₁₅X₁₆RNDALTEHX₁₇ | |
| | X₁₈X₁₉HX₂₀X₂₁X₂₂X₂₃X₂₄X₈X₉CX₁₀X₁₁CX₁₂X₁₃X₁₄X₁₅X₁₆TSGELVRH | |
| | X₁₇X₁₈X₁₉HX₂₀X₂₁X₂₂X₂₃X₂₄X₈X₉CX₁₀X₁₁CX₁₂X₁₃X₁₄X₁₅X₁₆RSDNLV | |
| | RHX₁₇X₁₈X₁₉HX₂₀X₂₁X₂₂X₂₃X₂₄X₈X₉CX₁₀X₁₁CX₁₂X₁₃X₁₄X₁₅X₁₆RSDE | |
| | LVRHX₁₇X₁₈X₁₉HX₂₀X₂₁X₂₂X₂₃X₂₄X₈X₉CX₁₀X₁₁CX₁₂X₁₃X₁₄X₁₅X₁₆RS | |
| | DKLVRHX₁₇X₁₈X₁₉HX₂₀X₂₁X₂₂X₂₃X₂₄X₈X₉CX₁₀X₁₁CX₁₂X₁₃X₁₄X₁₅X₁₆ | |
| | QSSNLVRHX₁₇X₁₈X₁₉11X₂₀X₂₁X₂₂X₂₃X₂₄X₂₅X₂₆X₂₇X₂₈X₂₉X₃₀ | |

[0281] Similarly, the design and preparation of such TALE polypeptide which specifically bind to a DNA target region of interest, such as an HNF4α expression control region, is well known in the art. For example, the DNA binding domain of TALE contains a repeated highly conserved 33-34 amino acid sequence with divergent 12th and 13th amino acids. These two positions, referred to as the Repeat Variable Diresidue (RVD), are highly variable and show a strong correlation with specific nucleotide recognition. This straightforward relationship between amino acid sequence and DNA recognition has allowed for the engineering of specific DNA-binding domains by selecting a combination of repeat segments containing the appropriate RVDs. See, e.g., Boch J Nature Biotechnology. 29 (2) 2011: 135-6; Boch J, et al., Science. 326 (5959) 2009: 1509-12; Moscou M J & Bogdanove A J Science. 326 (5959) 2009: 1501.

[0282] In some embodiments, the site-specific HNF4α targeting moieties of the invention comprising a polynucleotide comprise a guide RNA (or gRNA) or nucleic acid encoding a guide RNA. A gRNA is a short synthetic RNA molecule comprising a “scaffold” sequence necessary for, e.g., directing an effector to an HNF4α expression control element which may, e.g., include an about 20 nucleotide site-specific sequence targeting a genomic target sequence comprising the HNF4α expression control element.

[0283] Generally, guide RNA sequences are designed to have a length of between about 17 to about 24 nucleotides (e.g., 19, 20, or 21 nucleotides) and are complementary to the target sequence. Custom gRNA generators and algorithms are available commercially for use in the design of effective guide RNAs. Gene editing has also been achieved using a chimeric “single guide RNA” (“sgRNA”), an engineered (synthetic) single RNA molecule that mimics a naturally occurring crRNA-tracrRNA complex and contains both a tracrRNA (for binding the nuclease) and at least one crRNA (to guide the nuclease to the sequence targeted for editing). Chemically modified sgNAs have also been demonstrated to be effective in genome editing; see, for example, Hendel et al. (2015) Nature Biotechnol., 985-991.

[0284] Exemplary site-specific HNF4α promoter 1 targeting moieties are provided in Table 2, below. In some embodiments, the polynucleotide comprises a nucleotide sequence at least 75%, at least 80%, at least 85%, at least 86%, at least 87%, at least 88%, at least 89%, at least 90%, at least 91%, at least 92%, at least 93%, at least 94%, at least 95%, at least 96%, at least 97%, at least 98%, at least 99% identical to the entire nucleotide sequence of any one of the nucleotide sequences in Table 2.

[0285] Exemplary site-specific HNF4α promoter 2 targeting moieties are provided in Table 3, below. In some embodiments, the polynucleotide comprises a nucleotide sequence at least 75%, at least 80%, at least 85%, at least 86%, at least 87%, at least 88%, at least 89%, at least 90%, at least 91%, at least 92%, at least 93%, at least 94%, at least 95%, at least 96%, at least 97%, at least 98%, at least 99% identical to the entire nucleotide sequence of any one of the nucleotide sequences in Table 3.

[0286] Exemplary site-specific HNF4α promoter targeting moieties are also provided in Table 9, below. In some embodiments, the polynucleotide comprises a nucleotide sequence at least 75%, at least 80%, at least 85%, at least 86%, at least 87%, at least 88%, at least 89%, at least 90%, at least 91%, at least 92%, at least 93%, at least 94%, at least 95%, at least 96%, at least 97%, at least 98%, at least 99% identical to the entire nucleotide sequence of any one of the nucleotide sequences in Table 9.

[0287] It will be understood that, although the sequences in Tables 2, 3, 4, and 9 are described as modified (or unmodified), the nucleic acid molecule encompassed by the of the invention, e.g., a site-specific disrupting agent, may comprise any one of the sequences set forth in any one of Tables 2, 3, 4, or 9 that is un-modified or modified differently than described therein. It will also be understood that although some of the sequences in Table 9 have “Ts”, when used as an RNA molecule, such as a guide RNA, in the site-specific targeting moieties of the invention, the “Ts” may be replaced with “Us.”

[0288] In some embodiments, a site-specific HNF4α targeting moiety comprising a polynucleotide, e.g., gRNA, comprises a nucleotide sequence complementary to an anchor sequence. In one embodiment, the anchor sequence comprises a CTCF-binding motif or consensus sequence:

(SEQ ID NO: 64)
N(T/C/G)N(G/A/T)CC(A/T/G)(C/G)(C/T/A)AG(G/A)(G/T)
GG(C/A/T)(G/A)(C/G)(C/T/A)(G/A/C),

where N is any nucleotide. A CTCF-binding motif or consensus sequence may also be in the opposite orientation, e.g.,

(SEQ ID NO: 65)
(G/A/C)(C/T/A)(C/G)(G/A)(C/A/T)GG(G/T)(G/A)GA
(C/T/A)(C/G)(A/T/G)CC(G/A/T)N(T/C/G)N.

In some embodiments, the nucleic acid sequence comprises a sequence complementary to a CTCF-binding motif or consensus sequence.

[0289] In some embodiments, the polynucleotide comprises a nucleotide sequence at least 75%, at least 80%, at least 85%, at least 86%, at least 87%, at least 88%, at least 89%, at least 90%, at least 91%, at least 92%, at least 93%, at least 94%, at least 95%, at least 96%, at least 97%, at least 98%, at least 99% complementary to an anchor sequence.

[0290] In some embodiments, the polynucleotide comprises a nucleotide sequence at least 80%, at least 85%, at least 86%, at least 87%, at least 88%, at least 89%, at least 90%, at least 91%, at least 92%, at least 93%, at least 94%, at least 95%, at least 96%, at least 97%, at least 98%, at least 99% complementary to a CTCF-binding motif or consensus sequence. In some embodiments, the polynucleotide is selected from the group consisting of a gRNA, and a sequence complementary or a sequence comprising at least 80%, at least 85%, at least 86%, at least 87%, at least 88%, at least 89%, at least 90%, at least 91%, at least 92%, at least 93%, at least 94%, at least 95%, at least 96%, at least 97%, at least 98%, at least 99% complementary sequence to an anchor sequence.

[0291] In some embodiments, a site-specific HNF4α targeting moiety comprising a polynucleotide of the invention is an RNAi molecule. RNAi molecules comprise RNA or RNA-like structures typically containing 15-50 base pairs (such as about 18-25 base pairs) and having a nucleobase sequence identical (complementary) or nearly identical (substantially complementary) to a coding sequence in an expressed target gene within the cell. RNAi molecules include, but are not limited to: short interfering RNAs (siRNAs), double-strand RNAs (dsRNA), micro RNAs (miRNAs), short hairpin RNAs (shRNA), meroduplexes, and dicer substrates (U.S. Pat. Nos. 8,084,599, 8,349,809, and 8,513,207). In one embodiment, the invention includes a composition to inhibit expression of a gene encoding a polypeptide described herein, e.g., a conjunction nucleating molecule.

[0292] RNAi molecules comprise a sequence substantially complementary, or fully complementary, to all or a fragment of a target gene. RNAi molecules may complement sequences at the boundary between introns and exons to prevent the maturation of newly-generated nuclear RNA transcripts of specific genes into mRNA for transcription. RNAi molecules complementary to specific genes can hybridize with the mRNA for that gene and prevent its translation. The antisense molecule can be DNA, RNA, or a derivative or hybrid thereof. Examples of such derivative molecules include, but are not limited to, peptide nucleic acid (PNA) and phosphorothioate-based molecules such as deoxyribonucleic guanidine (DNG) or ribonucleic guanidine (R G).

[0293] RNAi molecules can be provided to the cell as “ready-to-use” RNA synthesized in vitro or as an antisense gene transfected into cells which will yield RNAi molecules upon transcription. Hybridization with mRNA results in degradation of the hybridized molecule by RNAse H and/or inhibition of the formation of translation complexes. Both result in a failure to produce the product of the original gene.

[0294] The length of the RNAi molecule that hybridizes to the transcript of interest should be around 10 nucleotides, between about 15 or 30 nucleotides, or about 15, 16, 17, 18, 19, 20, 21, 22, 23, 24, 25, 26, 27, 28, 29, 30 or more nucleotides. The degree of identity of the antisense sequence to the targeted transcript should be at least 75%, at least 80%, at least 85%, at least 90%, or at least 95.

[0295] RNAi molecules may also comprise overhangs, i.e. typically unpaired, overhanging nucleotides which are not directly involved in the double helical structure normally formed by the core sequences of the herein defined pair of sense strand and antisense strand. RNAi molecules may contain 3′ and/or 5′ overhangs of about 1-5 bases independently on each of the sense strands and antisense strands. In one embodiment, both the sense strand and the antisense strand contain 3′ and 5′ overhangs. In one embodiment, one or more of the 3′ overhang nucleotides of one strand base pairs with one or more 5′ overhang nucleotides of the other strand. In another embodiment, the one or more of the 3′ overhang nucleotides of one strand base do not pair with the one or more 5′ overhang nucleotides of the other strand. The sense and antisense strands of an RNAi molecule may or may not contain the same number of nucleotide bases. The antisense and sense strands may form a duplex wherein the 5′ end only has a blunt end, the 3′ end only has a blunt end, both the 5′ and 3′ ends are blunt ended, or neither the 5′ end nor the 3′ end are blunt ended. In another embodiment, one or more of the nucleotides in the overhang contains a thiophosphate, phosphorothioate, deoxynucleotide inverted (3′ to 3′ linked) nucleotide or is a modified ribonucleotide or deoxynucleotide.

[0296] Small interfering RNA (siRNA) molecules comprise a nucleotide sequence that is identical to about 15 to about 25 contiguous nucleotides of the target mRNA. In some embodiments, the siRNA sequence commences with the dinucleotide AA, comprises a GC-content of about 30-70% (about 50-60%, about 40-60%, or about 45%-55%), and does not have a high percentage identity to any nucleotide sequence other than the target in the genome of the mammal in which it is to be introduced, for example as determined by standard BLAST search.

[0297] siRNAs and shRNAs resemble intermediates in the processing pathway of the endogenous microRNA (miRNA) genes (Bartel, Cell 116:281-297, 2004). In some embodiments, siRNAs can function as miRNAs and vice versa (Zeng et al., Mol Cell 9: 1327-1333, 2002; Doench et al., Genes Dev 17:438-442, 2003). MicroRNAs, like siRNAs, use RISC to downregulate target genes, but unlike siRNAs, most animal miRNAs do not cleave the mRNA. Instead, miRNAs reduce protein output through translational suppression or polyA removal and mRNA degradation (Wu et al., Proc Natl Acad Sci USA 103:4034-4039, 2006). Known miRNA binding sites are within mRNA 3′ UTRs; miRNAs seem to target sites with near-perfect complementarity to nucleotides 2-8 from the miRNA's 5′ end (Rajewsky, Nat Genet 38 Suppl: S8-13, 2006; Lim et al, Nature 433:769-773, 2005). This region is known as the seed region. Because siRNAs and miRNAs are interchangeable, exogenous siRNAs downregulate mRNAs with seed complementarity to the siRNA (Birmingham et al., Nat Methods 3: 199-204, 2006. Multiple target sites within a 3′ UTR give stronger downregulation (Doench et al., Genes Dev 17:438-442, 2003).

[0298] Lists of known miRNA sequences can be found in databases maintained by research organizations, such as Wellcome Trust Sanger Institute, Perm Center for Bioinformatics, Memorial Sloan Kettering Cancer Center, and European Molecule Biology Laboratory, among others. Known effective siRNA sequences and cognate binding sites are also well represented in the relevant literature. RNAi molecules are readily designed and produced by technologies known in the art. In addition, there are computational tools that increase the chance of finding effective and specific sequence motifs (Pei et al. 2006, Reynolds et al. 2004, Khvorova et al. 2003, Schwarz et al. 2003, Ui-Tei et al. 2004, Heale et al. 2005, Chalk et al. 2004, Amarzguioui et al. 2004).

[0299] An RNAi molecule modulates expression of RNA encoded by a gene. Because multiple genes can share some degree of sequence homology with each other, in some embodiments, the RNAi molecule can be designed to target a class of genes with sufficient sequence homology. In some embodiments, the RNAi molecule can contain a sequence that has complementarity to sequences that are shared amongst different gene targets or are unique for a specific gene target. In some embodiments, the RNAi molecule can be designed to target conserved regions of an RNA sequence having homology between several genes thereby targeting several genes in a gene family (e.g., different gene isoforms, splice variants, mutant genes, etc.). In some embodiments, the RNAi molecule can be designed to target a sequence that is unique to a specific RNA sequence of a single gene.

[0300] In some embodiments, the RNAi molecule targets a sequence in a conjunction nucleating molecule, e.g., CTCF, cohesin, USF 1, YY1, TATA-box binding protein associated factor 3 (TAF3), ZNF 143, or another polypeptide that promotes the formation of an anchor sequence-mediated conjunction, or an epigenetic modifying agent, e.g., an enzyme involved in post-translational modifications including, but are not limited to, DNA methylases (e.g., DNMT3a, DNMT3b, DNMTL), DNA demethylation (e.g., the TET family enzymes catalyze oxidation of 5-methylcytosine to 5-hydroxymethylcytosine and higher oxidative derivatives), histone methyltransferases, histone deacetylase (e.g., HDAC1, HDAC2, HDAC3), sirtuin 1, 2, 3, 4, 5, 6, or 7, lysine-specific histone demethylase 1 (LSD1), histone-lysine-N-methyltransferase (Setdbl), euchromatic histone-lysine N-methyltransferase 2 (G9a), histone-lysine N-methyltransferase (SUV39H1), enhancer of zeste homolog 2 (EZH2), viral lysine methyltransferase (vSET), histone methyltransferase (SET2), protein-lysine N-methyltransferase (SMYD2), and others. In one embodiment, the RNAi molecule targets a protein deacetylase, e.g., sirtuin 1, 2, 3, 4, 5, 6, or 7. In one embodiment, the invention includes a composition comprising an RNAi that targets a conjunction nucleating molecule, e.g., CTCF.

[0301] In some embodiments, the site-specific HNF4α targeting moiety comprises a peptide or protein moiety. In some embodiments, a site-specific disrupting agent comprises a fusion protein. In some embodiments, an effector is ca peptide or protein moiety. The peptide or protein moieties may include, but is not limited to, a peptide ligand, antibody fragment, or targeting aptamer that binds a receptor such as an extracellular receptor, neuropeptide, hormone peptide, peptide drug, toxic peptide, viral or microbial peptide, synthetic peptide, and agonist or antagonist peptide.

[0302] Exemplary peptides or protein include a DNA-binding protein, a CRISPR component protein, a conjunction nucleating molecule, a dominant negative conjunction nucleating molecule, an epigenetic modifying agent, or any combination thereof. In some embodiments, the peptide comprises a nuclease, a physical blocker, an epigenetic recruiter, and an epigenetic CpG modifier, and fragments and combinations of any of the foregoing. In some embodiments, the peptide comprises a DNA-binding domain of a protein, such as a helix-turn-helix motif, a leucine zipper, a Zn-finger, a TATA box binding proteins, a transcription factor.

[0303] Peptides or proteins may be linear or branched. The peptide or protein moiety may have a length from about 5 to about 200 amino acids, about 15 to about 150 amino acids, about 20 to about 125 amino acids, about 25 to about 100 amino acids, 20-70 amino acids, 20-80 amino acids, 20-90 amino acids, 30-100 amino acids, 30-60 amino acids, 30-80 amino acids, 35-85 amino acids, 40-100 amino acids, or 50-125 amino acids or any range therebetween.

[0304] As indicated above, in some embodiments, the site-specific HNF4α targeting moieties of the invention comprise a fusion protein.

[0305] In some embodiments, the fusion proteins of the invention include a site-specific HNF4α targeting moiety which targets an HNF4α expression control region and an effector molecule. In other embodiments, a fusion protein of the invention comprises an effector molecule. Exemplary effector molecules include are described below and in some embodiments include, for example, nucleases, physical blockers, epigenetic recruiters, e.g., a transcriptional enhancer or a transcriptional repressor, and epigenetic CpG modifiers, e.g., a DNA methylase, a DNA demethylase, a histone modifying agent, or a histone deacetylase, and combinations of any of the foregoing.

[0306] For example, a site-specific targeting moiety may comprise a gRNA and an effector, such as a nuclease, e.g., a Cas9, e.g., a wild type Cas9, a nickase Cas9 (e.g., Cas9 D10A), a dead Cas9 (dCas9), eSpCas9, Cpf1, C2C1, or C2C3, or a nucleic acid encoding such a nuclease. The choice of nuclease and gRNA(s) is determined by whether the targeted mutation is a deletion, substitution, or addition of nucleotides, e.g., a deletion, substitution, or addition of nucleotides to a targeted sequence. Fusions of a catalytically inactive endonuclease e.g., a dead Cas9 (dCas9, e.g., D10A; H840A) tethered with all or a portion of (e.g., biologically active portion of) an (one or more) effector domain create chimeric proteins that can be linked to the polypeptide to guide the composition to specific DNA sites by one or more RNA sequences (e.g., DNA recognition elements including, but not restricted to zinc finger arrays, sgRNA, TAL arrays, peptide nucleic acids described herein) to modulate activity and/or expression of one or more target nucleic acids sequences (e.g., to methylate or demethylate a DNA sequence).

[0307] In one embodiment, a fusion protein of the invention may comprise an effector molecule comprising, for example, a CRISPR associated protein (Cas) polypeptide, or fragment thereof, (e.g., a Cas9 polypeptide, or fragment thereof) and an epigenetic recruiter or an epigenetic CpG modifier.

[0308] In one embodiment, a suitable Cas polypeptide is an enzymatically inactive Cas polypeptide, e.g., a “dead Cas polypeptide” or “dCas” polypeptide

[0309] Exemplary Cas polypeptides that are adaptable to the methods and compositions described herein are described below. Using methods known in the art, a Cas polypeptide can be fused to any of a variety of agents and/or molecules as described herein; such resulting fusion molecules can be useful in various disclosed methods.

[0310] In one aspect, the invention includes a composition comprising a protein comprising a domain, e.g., an effector, that acts on DNA (e.g., a nuclease domain, e.g., a Cas9 domain, e.g., a dCas9 domain; a DNA methyltransferase, a demethylase, a deaminase), in combination with at least one guide RNA (gRNA) or antisense DNA oligonucleotide that targets the protein to site-specific target sequence, wherein the composition is effective to alter, in a human cell, the expression of a target gene. In some embodiments, the enzyme domain is a Cas9 or a dCas9. In some embodiments, the protein comprises two enzyme domains, e.g., a dCas9 and a methylase or demethylase domain.

[0311] In one aspect, the invention includes a composition comprising a protein comprising a domain, e.g., an effector, that comprises a transcriptional control element (e.g., a nuclease domain, e.g., a Cas9 domain, e.g., a dCas9 domain; a transcriptional enhancer; a transcriptional repressor), in combination with at least one guide RNA (gRNA) or antisense DNA oligonucleotide that targets the protein to a site-specific target sequence, wherein the composition is effective to alter, in a human cell, the expression of a target gene. In some embodiments, the enzyme domain is a Cas9 or a dCas9. In some embodiments, the protein comprises two enzyme domains, e.g., a dCas9 and a transcriptional enhancer or transcriptional repressor domain.

[0312] As used herein, a “biologically active portion of an effector domain” is a portion that maintains the function (e.g. completely, partially, minimally) of an effector domain (e.g., a “minimal” or “core” domain).

[0313] The chimeric proteins described herein may also comprise a linker, e.g., an amino acid linker. In some aspects, a linker comprises 2 or more amino acids, e.g., one or more GS sequences. In some aspects, fusion of Cas9 (e.g., dCas9) with two or more effector domains (e.g., of a DNA methylase or enzyme with a role in DNA demethylation or protein acetyl transferase or deacetylase) comprises one or more interspersed linkers (e.g., GS linkers) between the domains. In some aspects, dCas9 is fused with 2-5 effector domains with interspersed linkers.

[0314] In some embodiments, a site-specific HNF4α targeting moiety comprises a conjunction nucleating molecule, a nucleic acid encoding a conjunction nucleating molecule, or a combination thereof. In some embodiments, an anchor sequence-mediated conjunction is mediated by a first conjunction nucleating molecule bound to the first anchor sequence, a second conjunction nucleating molecule bound to the noncontiguous second anchor sequence, and an association between the first and second conjunction nucleating molecules. In some embodiments, a conjunction nucleating molecule may disrupt, e.g., by competitive binding, the binding of an endogenous conjunction nucleating molecule to its binding site.

[0315] The conjunction nucleating molecule may be, e.g., CTCF, cohesin, USF1, YY1, TATA-box binding protein associated factor 3 (TAF3), ZNF143 binding motif, or another polypeptide that promotes the formation of an anchor sequence-mediated conjunction. The conjunction nucleating molecule may be an endogenous polypeptide or other protein, such as a transcription factor, e.g., autoimmune regulator (AIRE), another factor, e.g., X-inactivation specific transcript (XIST), or an engineered polypeptide that is engineered to recognize a specific DNA sequence of interest, e.g., having a zinc finger, leucine zipper or bHLH domain for sequence recognition. The conjunction nucleating molecule may modulate DNA interactions within or around the anchor sequence-mediated conjunction. For example, the conjunction nucleating molecule can recruit other factors to the anchor sequence that alters an anchor sequence-mediated conjunction formation or disruption.

[0316] The conjunction nucleating molecule may also have a dimerization domain for homo- or heterodimerization. One or more conjunction nucleating molecules, e.g., endogenous and engineered, may interact to form the anchor sequence-mediated conjunction. In some embodiments, the conjunction nucleating molecule is engineered to further include a stabilization domain, e.g., cohesion interaction domain, to stabilize the anchor sequence-mediated conjunction. In some embodiments, the conjunction nucleating molecule is engineered to bind a target sequence, e.g., target sequence binding affinity is modulated. In some embodiments, the conjunction nucleating molecule is selected or engineered with a selected binding affinity for an anchor sequence within the anchor sequence-mediated conjunction. Conjunction nucleating molecules and their corresponding anchor sequences may be identified through the use of cells that harbor inactivating mutations in CTCF and Chromosome Conformation Capture or 3C-based methods, e.g., Hi-C or high-throughput sequencing, to examine topologically associated domains, e.g., topological interactions between distal DNA regions or loci, in the absence of CTCF. Long-range DNA interactions may also be identified. Additional analyses may include ChlA-PET analysis using a bait, such as Cohesin, YY1 or USF1, ZNF143 binding motif, and MS to identify complexes that are associated with the bait.

[0317] B. Effector Molecules

[0318] Effector molecules for use in the compositions and methods of the invention include those that modulate a biological activity, for example increasing or decreasing enzymatic activity, gene expression, cell signalling, and cellular or organ function. Preferred effector molecules of the invention are nucleases, physical blockers, epigenetic recruiters, e.g., a transcriptional enhancer or a transcriptional repressor, and epigenetic CpG modifiers, e.g., a DNA methylase, a DNA demethylase, a histone modifying agent, or a histone deacetylase, and combinations of any of the foregoing.

[0319] Additional effector effector activities of the effector molecules of the invention may also include binding regulatory proteins to modulate activity of the regulator, such as transcription or translation. Effector molecules also may include activator or inhibitor (or “negative effector”) functions as described herein. For example, the effector molecule may inhibit substrate binding to a receptor and inhibit its activation, e.g., naltrexone and naloxone bind opioid receptors without activating them and block the receptors' ability to bind opioids. Effector molecules may also modulate protein stability/degradation and/or transcript stability/degradation. For example, proteins may be targeted for degradation by the polypeptide co-factor, ubiquitin, onto proteins to mark them for degradation. In another example, an effector molecule inhibits enzymatic activity by blocking the enzyme's active site, e.g., methotrexate is a structural analog of tetrahydrofolate, a coenzyme for the enzyme dihydrofolate reductase that binds to dihydrofolate reductase 1000-fold more tightly than the natural substrate and inhibits nucleotide base synthesis.

[0320] In some embodiments, the effector molecule is a chemical, e.g., a chemical that modulates a cytosine (C) or an adenine (A) (e.g., Na bisulfite, ammonium bisulfite). In some embodiments, the effector molecule has enzymatic activity (methyl transferase, demethylase, nuclease (e.g., Cas9), a deaminase). In some embodiments, the effector molecule sterically hinders formation of an anchor sequence-mediated conjunction or binding of an RNA polymerase to a promoter.

[0321] The effector molecule with effector activity may be any one of the small molecules, peptides, fusion proteins, nucleic acids, nanoparticle, aptamers, or pharmacoagents with poor PK/PD described herein.

[0322] In some embodiments, the effector molecule is an inhibitor or “negative effector molecule”. In the context of a negative effector molecule that modulates formation of an anchor sequence-mediated conjunction, in some embodiments, the negative effector molecule is characterized in that dimerization of an endogenous nucleating polypeptide is reduced when the negative effector molecule is present as compared with when it is absent. For example, in some embodiments, the negative effector molecule is or comprises a variant of the endogenous nucleating polypeptide's dimerization domain, or a dimerizing portion thereof.

[0323] For example, in certain embodiments, an anchor sequence-mediated conjunction is altered (e.g., disrupted) by use of a dominant negative effector, e.g., a protein that recognizes and binds an anchor sequence, (e.g., a CTCF binding motif), but with an inactive (e.g., mutated) dimerization domain, e.g., a dimerization domain that is unable to form a functional anchor sequence-mediated conjunction. For example, the Zinc Finger domain of CTCF can be altered so that it binds a specific anchor sequence (by adding zinc fingers that recognize flanking nucleic acids), while the homo-dimerization domain is altered to prevent the interaction between the engineered CTCF and endogenous forms of CTCF.

[0324] In some embodiments, the effector molecule comprises a synthetic conjunction nucleating molecule with a selected binding affinity for an anchor sequence within a target anchor sequence-mediated conjunction, (the binding affinity may be at least 10%, 15%, 20%, 25%, 30%, 35%, 40%, 45%, 50%, 55%, 60%, 65%, 70%, 75%, 80%, 85%, 90%, 95%, or higher or lower than the affinity of an endogenous conjunction nucleating molecule that associates with the target anchor sequence. The synthetic conjunction nucleating molecule may have between 30-90%, 30-85%, 30-80%, 30-70%, 50-80%, 50-90% amino acid sequence identity to the endogenous conjunction nucleating molecule). The conjunction nucleating molecule may disrupt, such as through competitive binding, the binding of an endogenous conjunction nucleating molecule to its anchor sequence. In some more embodiments, the conjunction nucleating molecule is engineered to bind a novel anchor sequence within the anchor sequence-mediated conjunction.

[0325] In some embodiments, a dominant negative effector molecule has a domain that recognizes specific DNA sequences (e.g., an anchor sequence, a CTCF anchor sequence, flanked by sequences that confer sequence specificity), and a second domain that provides a steric presence in the vicinity of the anchoring sequence. The second domain may include a dominant negative conjunction nucleating molecule or fragment thereof, a polypeptide that interferes with conjunction nucleating molecule sequence recognition (e.g., the amino acid backbone of a peptide/nucleic acid or PNA), a nucleic acid sequence ligated to a small molecule that imparts steric interference, or any other combination of DNA recognition elements and a steric blocker.

[0326] In some embodiments, the effector molecule is an epigenetic modifying agent. Epigenetic modifying agents useful in the methods and compositions described herein include agents that affect, e.g., DNA methylation, histone acetylation, and RNA-associated silencing. In some embodiments, the effectors sequence-specifically target an epigenetic enzyme (e.g., an enzyme that generates or removes epigenetic marks, e.g., acetylation and/or methylation). Exemplary epigenetic effectors may target an expression control region comprising, e.g., a transcriptional control element or an anchor sequence, by a site-specific disrupting agent comprising a site-specific targeting moiety.

[0327] In some embodiments, an effector molecule comprises one or more components of a gene editing system. Components of gene editing systems may be used in a variety of contexts including but not limited to gene editing. For example, such components may be used to target agents that physically modify, genetically modify, and/or epigenetically modify HNF4α sequences.

[0328] Exemplary gene editing systems include the clustered regulatory interspaced short palindromic repeat (CRISPR) system, zinc finger nucleases (ZFNs), and Transcription Activator-Like Effector-based Nucleases (TALEN). ZFNs, TALENs, and CRISPR-based methods are described, e.g., in Gaj et al. Trends Biotechnol. 31.7(2013):397-405; CRISPR methods of gene editing are described, e.g., in Guan et al, Application of CRISPR-Cas system in gene therapy: Pre-clinical progress in animal model. DNA Repair 2016 Jul. 30 [Epub ahead of print]; Zheng et al, Precise gene deletion and replacement using the CRISPR/Cas9 system in human cells. BioTechniques, Vol. 57, No. 3, September 2014, pp. 115-124.

[0329] CRISPR systems are adaptive defense systems originally discovered in bacteria and archaea. CRISPR systems use RNA-guided nucleases termed CRISPR-associated or “Cas” endonucleases (e.g., Cas9 or Cpf1) to cleave foreign DNA. In a typical CRISPR/Cas system, an endonuclease is directed to a target nucleotide sequence (e.g., a site in the genome that is to be sequence-edited) by sequence-specific, non-coding “guide RNAs” that target single- or double-stranded DNA sequences. Three classes (I-III) of CRISPR systems have been identified. The class II CRISPR systems use a single Cas endonuclease (rather than multiple Cas proteins). One class II CRISPR system includes a type II Cas endonuclease such as Cas9, a CRISPR RNA (“crRNA”), and a trans-activating crRNA (“tracrRNA”). The crRNA contains a “guide RNA”, typically about 20-nucleotide RNA sequence that corresponds to a target DNA sequence. The crRNA also contains a region that binds to the tracrRNA to form a partially double-stranded structure which is cleaved by RNase III, resulting in a crRNA/tracrRNA hybrid. The crRNA/tracrRNA hybrid then directs the Cas9 endonuclease to recognize and cleave the target DNA sequence. The target DNA sequence must generally be adjacent to a “protospacer adjacent motif (“PAM”) that is specific for a given Cas endonuclease; however, PAM sequences appear throughout a given genome. CRISPR endonucleases identified from various prokaryotic species have unique PAM sequence requirements; examples of PAM sequences include 5′-NGG (Streptococcus pyogenes), 5′-NNAGAA (Streptococcus thermophilus CRISPR1), 5′-NGGNG (Streptococcus thermophilus CRISPR3), and 5′-NNNGATT (Neisseria meningiditis). Some endonucleases, e.g., Cas9 endonucleases, are associated with G-rich PAM sites, e.g., 5′-NGG, and perform blunt-end cleaving of the target DNA at a location 3 nucleotides upstream from (5′ from) the PAM site. Another class II CRISPR system includes the type V endonuclease Cpf1, which is smaller than Cas9; examples include AsCpf1 (from Acidaminococcus sp.) and LbCpf1 (from Lachnospiraceae sp.). Cpf 1-associated CRISPR arrays are processed into mature crRNAs without the requirement of a tracrRNA; in other words a Cpf1 system requires only the Cpf1 nuclease and a crRNA to cleave the target DNA sequence. Cpf1 endonucleases, are associated with T-rich PAM sites, e.g., 5′-TTN. Cpf1 can also recognize a 5′-CTA PAM motif. Cpf1 cleaves the target DNA by introducing an offset or staggered double-strand break with a 4- or 5-nucleotide 5′ overhang, for example, cleaving a target DNA with a 5-nucleotide offset or staggered cut located 18 nucleotides downstream from (3′ from) from the PAM site on the coding strand and 23 nucleotides downstream from the PAM site on the complimentary strand; the 5-nucleotide overhang that results from such offset cleavage allows more precise genome editing by DNA insertion by homologous recombination than by insertion at blunt-end cleaved DNA. See, e.g., Zetsche et al. (2015) Cell, 163:759-771.

[0330] A variety of CRISPR associated (Cas) genes or proteins can be used in the present invention and the choice of Cas protein will depend upon the particular conditions of the method.

[0331] Specific examples of Cas proteins include class II systems including Cas1, Cast, Cas3, Cas4, Cas5, Cas6, Cas7, Cas8, Cas9, Cas10, Cpf1, C2C1, or C2C3. In some embodiments, a Cas protein, e.g., a Cas9 protein, may be from any of a variety of prokaryotic species. In some embodiments a particular Cas protein, e.g., a particular Cas9 protein, is selected to recognize a particular protospacer-adjacent motif (PAM) sequence. In some embodiments, the site-specific targeting moiety includes a sequence targeting polypeptide, such as an enzyme, e.g., Cas9. In certain embodiments a Cas protein, e.g., a Cas9 protein, may be obtained from a bacteria or archaea or synthesized using known methods. In certain embodiments, a Cas protein may be from a gram positive bacteria or a gram negative bacteria. In certain embodiments, a Cas protein may be from a Streptococcus, (e.g., a S. pyogenes, a S. thermophilus) a Crptococcus, a Corynebacterium, a Haemophilus, a Eubacterium, a Pasteurella, a Prevotella, a Veillonella, or a Marinobacter. In some embodiments nucleic acids encoding two or more different Cas proteins, or two or more Cas proteins, may be introduced into a cell, zygote, embryo, or animal, e.g., to allow for recognition and modification of sites comprising the same, similar or different PAM motifs. In some embodiments, the Cas protein is modified to deactivate the nuclease, e.g., nuclease-deficient Cas9, and to recruit transcription activators or repressors, e.g., the co-subunit of the E. coli Pol, VP64, the activation domain of p65, KRAB, or SID4X, to induce epigenetic modifications, e.g., histone acetyltransferase, histone methyltransferase and demethylase, DNA methyltransferase and enzyme with a role in DNA demethylation (e.g., the TET family enzymes catalyze oxidation of 5-methylcytosine to 5-hydroxymethylcytosine and higher oxidative derivatives).

[0332] For the purposes of gene editing, CRISPR arrays can be designed to contain one or multiple guide RNA sequences corresponding to a desired target DNA sequence; see, for example, Cong et al. (2013) Science, 339:819-823; Ran et al. (2013) Nature Protocols, 8:2281-2308. At least about 16 or 17 nucleotides of gRNA sequence are required by Cas9 for DNA cleavage to occur; for Cpf1 at least about 16 nucleotides of gRNA sequence is needed to achieve detectable DNA cleavage.

[0333] Whereas wild-type Cas9 generates double-strand breaks (DSBs) at specific DNA sequences targeted by a gRNA, a number of CRISPR endonucleases having modified functionalities are available, for example: a “nickase” version of Cas9 generates only a single-strand break; a catalytically inactive Cas9 (“dCas9”) does not cut the target DNA but interferes with transcription by steric hindrance. dCas9 can further be fused with a heterologous effector to repress (CRISPRi) or activate (CRISPRa) expression of a target gene. For example, Cas9 can be fused to a transcriptional silencer (e.g., a KRAB domain) or a transcriptional activator (e.g., a dCas9-VP64 fusion). A catalytically inactive Cas9 (dCas9) fused to FokI nuclease (“dCas9-FokI”) can be used to generate DSBs at target sequences homologous to two gRNAs. See, e.g., the numerous CRISPR/Cas9 plasmids disclosed in and publicly available from the Addgene repository (Addgene, 75 Sidney St., Suite 550A, Cambridge, Mass. 02139; addgene.org/crispr). A “double nickase” Cas9 that introduces two separate double-strand breaks, each directed by a separate guide RNA, is described as achieving more accurate genome editing by Ran et al. (2013) Cell, 154: 1380-1389.

[0334] CRISPR technology for editing the genes of eukaryotes is disclosed in US Patent Application Publications 2016/0138008A1 and US2015/0344912A1, and in U.S. Pat. Nos. 8,697,359, 8,771,945, 8,945,839, 8,999,641, 8,993,233, 8,895,308, 8,865,406, 8,889,418, 8,871,445, 8,889,356, 8,932,814, 8,795,965, and 8,906,616. Cpf1 endonuclease and corresponding guide RNAs and PAM sites are disclosed in US Patent Application Publication 2016/0208243 A1.

[0335] In some embodiments, an effector comprises one or more components of a CRISPR system described hereinabove.

[0336] In some embodiments, suitable effectors for use in the agents, compositions, and methods of the invention include, for example, nucleases, physical blockers, epigenetic recruiters, e.g., a transcriptional enhancer or a transcriptional repressor, and epigenetic CpG modifiers, e.g., a DNA methylase, a DNA demethylase, a histone modifying agent, or a histone deacetylase, and combinations of any of the foregoing.

[0337] Suitable effectors include a polypeptide or its variant. The term “variant,” as used herein, refers to a polypeptide that is derived by incorporation of one or more amino acid insertions, substitutions, or deletions in a precursor polypeptide (e.g., “parent” polypeptide). In certain embodiments, a variant polypeptide has at least about 85% amino acid sequence identity, e.g., about 90%, about 91%, about 92%, about 93%, about 94%, about 95%, about 96%, about 97%, about 98%, about 99%, or about 100%, amino acid sequence identity to the entire amino acid sequence of a parent polypeptide.

[0338] The term “sequence identity,” as used herein, refers to a comparison between pairs of nucleic acid or amino acid molecules, i.e., the relatedness between two amino acid sequences or between two nucleotide sequences. In general, the sequences are aligned so that the highest order match is obtained. Methods for determining sequence identity are known and can be determined by commercially available computer programs that can calculate the percentage of identity between two or more sequences. A typical example of such a computer program is CLUSTAL.

[0339] Exemplary effectors include ubiquitin, bicyclic peptides as ubiquitin ligase inhibitors, transcription factors, DNA and protein modification enzymes such as topoisomerases, topoisomerase inhibitors such as topotecan, DNA methyltransferases such as the DNMT family (e.g., DNMT3a, DNMT3b, DNMTL), protein methyltransferases (e.g., viral lysine methyltransferase (vSET), protein-lysine N-methyltransferase (SMYD2), deaminases (e.g., APOBEC, UG1), histone methyltransferases such as enhancer of zeste homolog 2 (EZH2), PRMT1, histone-lysine-N-methyltransferase (Setdbl), histone methyltransferase (SET2), euchromatic histone-lysine N-methyltransferase 2 (G9a), histone-lysine N-methyltransferase (SUV39H1), and G9a), histone deacetylase (e.g., HDAC1, HDAC2, HDAC3), enzymes with a role in DNA demethylation (e.g., the TET family enzymes catalyze oxidation of 5-methylcytosine to 5-hydroxymethylcytosine and higher oxidative derivatives), protein demethylases such as KDMIA and lysine-specific histone demethylase 1 (LSD1), helicases such as DHX9, acetyltransferases, deacetylases (e.g., sirtuin 1, 2, 3, 4, 5, 6, or 7), kinases, phosphatases, DNA-intercalating agents such as ethidium bromide, sybr green, and proflavine, efflux pump inhibitors such as peptidomimetics like phenylalanine arginyl-naphthylamide or quinoline derivatives, nuclear receptor activators and inhibitors, proteasome inhibitors, competitive inhibitors for enzymes such as those involved in lysosomal storage diseases, zinc finger proteins, TALENs, specific domains from proteins, such as a KRAB domain, a VP64 domain, a p300 domain (e.g., p300 core domain), an MeCP2 domain, an MQ1 domain, a DNMT3a-3L domain a TET1 domain, and a TET2 domain, protein synthesis inhibitors, nucleases (e.g., Cpf1, Cas9, zinc finger nuclease), fusions of one or more thereof (e.g., dCas9-DNMT, dCas9-APOBEC, dCas9-UG1, dCas9-VP64, dCas9-p300 core, dCas9-KRAB, dCas9-KRAB-MeCP2, dCas9-MQ1, dCas9-DNMT3a-3L, dCAS9-TET1, dCAS9-TET2, and dCas9-MC/MN).

[0340] In some embodiments, a suitable nuclease for use in the agent, compositions, and methods of the invention comprises a Cas9 polypeptide, or enzymatically active portion thereof. In one embodiment, the Cas9 polypeptide, or enzymatically active portion thereof, further comprises a catalytically active domain of human exonuclease 1 (hEXO1), e.g., 5′ to 3′ exonuclease activity and/or an RNase H activity. In other embodiments, a suitable nuclease comprises a transcription activator like effector nucleases (TALEN). In yet other embodiments, a suitable nuclease comprises a zinc finger protein.

[0341] The term TALEN, as used herein, is broad and includes a monomeric TALEN that can cleave double stranded DNA without assistance from another TALEN. The term TALEN is also used to refer to one or both members of a pair of TALENs that are engineered to work together to cleave DNA at the same site. TALENs that work together may be referred to as a left-TALEN and a right-TALEN, which references the handedness of DNA. See U.S. Ser. No. 12/965,590; U.S. Ser. No. 13/426,991 (U.S. Pat. No. 8,450,471); U.S. Ser. No. 13/427,040 (U.S. Pat. No. 8,440,431); U.S. Ser. No. 13/427,137 (U.S. Pat. No. 8,440,432); and U.S. Ser. No. 13/738,381, all of which are incorporated by reference herein in their entirety.

[0342] TAL effectors are proteins secreted by Xanthomonas bacteria. The DNA binding domain contains a highly conserved 33-34 amino acid sequence with the exception of the 12th and 13th amino acids. These two locations are highly variable (Repeat Variable Diresidue (RVD)) and show a strong correlation with specific nucleotide recognition. This simple relationship between amino acid sequence and DNA recognition has allowed for the engineering of specific DNA binding domains by selecting a combination of repeat segments containing the appropriate RVDs.

[0343] The non-specific DNA cleavage domain from the end of the FokI endonuclease can be used to construct hybrid nucleases that are active in a yeast assay. These reagents are also active in plant cells and in animal cells. Initial TALEN studies used the wild-type FokI cleavage domain, but some subsequent TALEN studies also used FokI cleavage domain variants with mutations designed to improve cleavage specificity and cleavage activity. The FokI domain functions as a dimer, requiring two constructs with unique DNA binding domains for sites in the target genome with proper orientation and spacing. Both the number of amino acid residues between the TALEN DNA binding domain and the Fold cleavage domain and the number of bases between the two individual TALEN binding sites are parameters for achieving high levels of activity. The number of amino acid residues between the TALEN DNA binding domain and the Fold cleavage domain may be modified by introduction of a spacer (distinct from the spacer sequence) between the plurality of TAL effector repeat sequences and the Fold endonuclease domain. The spacer sequence may be 12 to 30 nucleotides.

[0344] The relationship between amino acid sequence and DNA recognition of the TALEN binding domain allows for designable proteins. In this case artificial gene synthesis is problematic because of improper annealing of the repetitive sequence found in the TALE binding domain. One solution to this is to use a publicly available software program (DNAWorks) to calculate oligonucleotides suitable for assembly in a two step PCR; oligonucleotide assembly followed by whole gene amplification. A number of modular assembly schemes for generating engineered TALE constructs have also been reported. Both methods offer a systematic approach to engineering DNA binding domains that is conceptually similar to the modular assembly method for generating zinc finger DNA recognition domains.

[0345] Once the TALEN genes have been assembled they are inserted into plasmids; the plasmids are then used to transfect the target cell where the gene products are expressed and enter the nucleus to access the genome. TALENs can be used to edit genomes by inducing double-strand breaks (DSB), which cells respond to with repair mechanisms. In this manner, they can be used to correct mutations in the genome which, for example, cause disease.

[0346] As used herein, a “zinc finger polypeptide” or “zinc finger protein” is a protein that binds to DNA, RNA and/or protein, in a sequence-specific manner, by virtue of a metal stabilized domain known as a zinc finger. Zinc finger proteins are nucleases having a DNA cleavage domain and a DNA binding zinc finger domain. Zinc finger polypeptides may be made by fusing the nonspecific DNA. cleavage domain of an endonuclease with site-specific DNA binding zinc finger domains. Such nucleases are powerful tools for gene editing and can be assembled to induce double strand breaks (DSBs) site-specifically into genomic DNA. ZFNs allow specific gene disruption as during DNA repair, the targeted genes can be disrupted via mutagenic non-homologous end joint (NHEJ) or modified via homologous recombination (HR) if a closely related DNA template is supplied.

[0347] Zinc finger nucleases are chimeric enzymes made by fusing the nonspecific DNA. cleavage domain of the endonuclease FokI with site-specific DNA binding zinc finger domains. Due to the flexible nature of zinc finger proteins (ZFPs), ZFNs can be assembled that induce double strand breaks (DSBs) site-specifically into genomic DNA. ZFNs allow specific gene disruption as during DNA repair, the targeted genes can be disrupted via mutagenic non-homologous end joint (NHEJ) or modified via homologous recombination (HR) if a closely related DNA template is supplied.

[0348] In some embodiments, a suitable physical blocker for use in the agent, compositions, and methods of the invention comprises a gRNA, antisense DNA, or triplex forming oligonucleotide (which may target an expression control unit) steric block a transcriptional control element or anchoring sequence. The gRNA recognizes specific DNA sequences and further includes sequences that interfere with, e.g., a conjunction nucleating molecule sequence to act as a steric blocker. In some embodiments, the gRNA is combined with one or more peptides, e.g., S-adenosyl methionine (SAM), that acts as a steric presence. In other embodiments, a physical blocker comprises an enzymatically inactive Cas9 polypeptide, or fragment thereof (e.g., dCas9).

[0349] In one embodiment, an epigenetic recruiter activates or enhances transcription of a target gene. In some embodiments, a suitable epigenetic recruiter for use in the agent, compositions, and methods of the invention comprises a VP64 domain or a p300 core domain.

[0350] In one embodiment, an epigenetic recruiter silences or represses transcription of a target gene. In some embodiments, a suitable epigenetic recruiter for use in the agent, compositions, and methods of the invention comprises a KRAB domain, or an MeCP2 domain.

[0351] In one embodiment, a suitable epigenetic recruiter for use in the agent, compositions, and methods of the invention comprises dCas9-VP64 fusion, a dCas9-p300 core fusion, a dCas9-KRAB fusion, or a dCas9-KRAB-MeCP2 fusion.

[0352] As used herein, “VP64” is a transcriptional activator composed of four tandem copies of VP16 (Herpes Simplex Viral Protein 16, amino acids 437-447*: DALDDFDLDML (SEQ ID NO: 328) connected with glycine-serine (GS) linkers. In one embodiment, the VP64 further comprises the transcription factors p65 (RelA) and Rta at the C terminus. An effector that comprises VP64, p65 and Rta is referred to as “VPR.” The GenBank Accession number of VP64 is ADD60007.1, the GenBank Accession number of p65 is NP_001138610.1, and the GenBank Accession number of Rta is AAA66528.1.

[0353] An exemplary amino acid sequence of a VPR is as follows:

(SEQ ID NO.: 66)
DALDDFDLDMLGSDALDDFDLDMLGSDALDDFDLDMLGSDALDDFDLDML
SGGPKKKRKVGSQYLPDTDDRHRIEEKRKRTYETFKSIMKKSPFSGPTDP
RPPPRRIAVPSRSSASVPKPAPQPYPFTSSLSTINYDEFPTMVFPSGQIS
QASALAPAPPQVLPQAPAPAPAPAMVSALAQAPAPVPVLAPGPPQAVAPP
APKPTQAGEGTLSEALLQLQFDDEDLGALLGNSTDPAVFTDLASVDNSEF
QQLLNQGIPVAPHTTEPMLMEYPEAITRLVTGAQRPPDPAPAPLGAPGLP
NGLLSGDEDFSSIADMDFSALLGSGSGSRDSREGMFLPKPEAGSAISDVF
EGREVCQPKRLRPFHPPGSPWANRPLPASLAPTPTGPVHEPVGSLTPAPV
PQPLDPAPAVTPEASHLLEDPDEETSQAVKALREMADTVIPQKEEAAICG
QMDLSHPPPRGHLDELTTTLESMTEDLNLDSPLTPELNEILDTFLNDECL
LHAMHISTGLSIFDTSLF

[0354] As used herein, “p300 core domain” refers to the catalytic core of the human acetyltransferase p300. The GenBank Accession number for the protein comprising p300 is NP_001420.2.

[0355] An exemplary amino acid sequence of a p300 is as follows:

(SEQ ID NO.: 67)
IFKPEELRQALMPTLEALYRQDPESLPFRQPVDPQLLGIPDYEDIVKSPM
DLSTIKRKLDTGQYQEPWQYVDDIWLMFNNAWLYNRKTSRVYKYCSKLSE
VFEQEIDPVMQSLGYCCGRKLEFSPQTLCCYGKQLCTIPRDATYYSYQNR
YHFCEKCFNEIQGESVSLGDDPSQPQTTINKEQFSKRKNDTLDPELFVEC
TECGRKMHQICVLHHEIIWPAGFVCDGCLKKSARTRKENKFSAKRLPSTR
LGTFLENRVNDFLRRQNHPESGEVTVRVVHASDKTVEVKPGMKARFVDSG
EMAESFPYRTKALFAFEEIDGVDLCFFGMHVQEYGSDCPPPNQRRVYISY
LDSVHFFRPKCLRTAVYHEILIGYLEYVKKLGYTTGHIWACPPSEGDDYI
FHCHPPDQKIPKPKRLQEWYKKMLDKAVSERIVHDYKDIFKQATEDRLTS
AKELPYFEGDFWPNVLEESIKELEQEEEERKREENTSNESTDVTKGDSKN
AKKKNNKKTSKNKSSLSRGNKKKPGMPNVSNDLSQKLYATMEKHKEVFFV
IRLIAGPAANSLPPIVDPDPLIPCDLMDGRDAFLTLARDKHLEFSSLRRA
QWSTMCMLVELHTQSQD.

[0356] As used herein, “KRAB” refers to a Krüppel associated box (KRAB) transcriptional repression domain present in human zinc finger protein-based transcription factors (KRAB zinc finger proteins).

[0357] As used herein, “MeCp2” refers to methyl CpG binding protein 2 which represses transcription, e.g., by binding to a promoter comprising methylated DNA.

[0358] In one embodiment, an epigenetic CpG modifier methylates DNA and inactivates or represses transcription. In some embodiments, a suitable epigenetic CpG modifier for use in the agent, compositions, and methods of the invention comprises a MQ1 domain or a DNMT3a-3L domain.

[0359] In one embodiment, an epigenetic CpG modifier demethylates DNA and activates or stimulates transcription. In some embodiments, a suitable epigenetic recruiter for use in the agent, compositions, and methods of the invention comprises a TET1 or TET2 domain.

[0360] As used herein “TET1” refers to “ten-eleven translocation methylcytosine dioxygenase 1,” a member of the TET family of enzymes, encoded by the TET1 gene. TET1 is a dioxygenase that catalyzes the conversion of the modified DNA base 5-methylcytosine (5-mC) to 5-hydroxymethylcytosine (5-hmC) by oxidation of 5-mC in an iron and alpha-ketoglutarate dependent manner, the initial step of active DNA demethylation in mammals. Methylation at the C5 position of cytosine bases is an epigenetic modification of the mammalian genome which plays an important role in transcriptional regulation. In addition to its role in DNA demethylation, plays a more general role in chromatin regulation. Preferentially binds to CpG-rich sequences at promoters of both transcriptionally active and Polycomb-repressed genes. Involved in the recruitment of the O-GlcNAc transferase OGT to CpG-rich transcription start sites of active genes, thereby promoting histone H2B GlcNAcylation by OGT.

[0361] As used herein, “TET2” refers to “ten-eleven translocation 2 (TET2),” a member of the TET family of enzymes, encoded by the TET1 gene. Similarly to TET1, TET2 is a dioxygenase that catalyzes the conversion of the modified genomic base 5-methylcytosine (5mC) into 5-hydroxymethylcytosine (5hmC) and plays a key role in active DNA demethylation. TET2 a preference for 5-hydroxymethylcytosine in CpG motifs. TET2 also mediates subsequent conversion of 5hmC into 5-formylcytosine (5fC), and conversion of 5fC to 5-carboxylcytosine (5caC). The conversion of 5mC into 5hmC, 5fC and 5caC probably constitutes the first step in cytosine demethylation. Methylation at the C5 position of cytosine bases is an epigenetic modification of the mammalian genome which plays an important role in transcriptional regulation. In addition to its role in DNA demethylation, also involved in the recruitment of the O-GlcNAc transferase OGT to CpG-rich transcription start sites of active genes, thereby promoting histone H2B GlcNAcylation by OGT.

[0362] As used herein “DNMT3a-3L” refers to a fusion of a DNA methyltransferase, Dnmt3a and a Dnmt3L which is catalytically inactive, but directly interacts with the catalytic domains of Dnmt3a.

[0363] In some embodiments, a suitable epigenetic recruiter for use in the agent, compositions, and methods of the invention comprises a MQ1 domain, a DNMT3a-3L domain, a TET1 domain, or a TET2 domain. In one embodiment, a suitable epigenetic recruiter for use in the agent, compositions, and methods of the invention comprises a dCas9-MQ1 fusion, a dCas9-DNMT3a-3L fusion, a dCas9-TET1 fusion or a dCAS9-TET2 fusion.

### III. Delivery of a Site-Specific HNF4α Disrupting Agent of the Invention and Compositions Comprising a Site-Specific an HNF4α Disrupting Agents of the Invention

[0364] The delivery of the disrupting agents of the invention to a cell e.g., a cell within a subject, such as a human subject (e.g., a subject in need thereof, such as a subject having an HNF4α-associated disorder, e.g., cirrhosis) may be achieved in a number of different ways. For example, delivery may be performed by contacting a cell with a disrupting agent of the invention either in vitro, ex vivo, or in vivo. In vivo delivery may be performed directly by administering a composition, such as a lipid composition, comprising a disrupting agent to a subject. Alternatively, in vivo delivery may be performed indirectly by administering one or more vectors that encode and direct the expression of the disrupting agent. These alternatives are discussed further below.

[0365] In some embodiments, the disrupting agent comprises a nucleic acid molecule encoding a fusion protein, the fusion protein comprising a site-specific HNF4α targeting moiety, such as a polynucleotide encoding a DNA-binding domain of a Transcription activator-like effector (TALE) polypeptide or a zinc finger (ZNF) polypeptide, or fragment thereof, that specifically targets and binds to the HNF4α expression control region and an effector molecule, such as a VPR.

[0366] In other embodiments, the disrupting agent comprises a guide RNA and an mRNA encoding an effector molecule. The ratio of guide RNA to mRNA may be about 100:1 to about 1:100 (wt:wt).

[0367] In general, any method of delivery of a site-specific HNF4α disrupting agent of the invention (in vitro, ex vivo, or in vivo) may be adapted for use with the disrupting agents of the invention (see e.g., Akhtar S. and Julian R L., (1992) Trends Cell. Biol. 2(5):139-144 and WO94/02595, which are incorporated herein by reference in their entireties). For in vivo delivery, factors to be considered for delivering a site-specific HNF4α disrupting agent of the invention include, for example, biological stability of the disrupting agent, prevention of non-specific effects, and accumulation of the disrupting agent in the target tissue. The non-specific effects of a disrupting agent can be minimized by local administration, for example, by direct injection or implantation into a tissue or topically administering a composition comprising the disrupting agent. Local administration to a treatment site maximizes local concentration of the disrupting agent, limits the exposure of the disrupting agent to systemic tissues that can otherwise be harmed by the disrupting agent or that can degrade the disrupting agent, and permits a lower total dose of the disrupting agent to be administered.

[0368] For administering a site-specific HNF4α disrupting agent systemically for the treatment of a disease, such as an HNF4α-associate disease, the disrupting agent, e.g., a disrupting agent comprising a site-specific targeting moiety comprising a nucleic acid molecule, can be modified or alternatively delivered using a drug delivery system; both methods act to prevent the rapid degradation of a site-specific targeting moiety comprising a nucleic acid molecule by endo- and exo-nucleases in vivo. Modification of a disrupting agent comprising a site-specific targeting moiety comprising a nucleic acid molecule or a pharmaceutical carrier also permits targeting of the disrupting agent to a target tissue and avoidance of undesirable off-target effects. For example, a disrupting agent of the invention may be modified by chemical conjugation to lipophilic groups such as cholesterol to enhance cellular uptake and prevent degradation.

[0369] Alternatively, a disrupting agent of the invention may be delivered using a drug delivery system such as a nanoparticle, a dendrimer, a polymer, a liposome, or a cationic delivery system. Positively charged cationic delivery systems facilitate binding of disrupting agent (e.g., negatively charged molecule) and also enhance interactions at the negatively charged cell membrane to permit efficient uptake of a disrupting agent by the cell. Cationic lipids, dendrimers, or polymers can either be bound to a disrupting agent, or induced to form a vesicle or micelle (see e.g., Kim S H. et al., (2008) Journal of Controlled Release 129(2):107-116) that encases the disrupting agent. The formation of vesicles or micelles further prevents degradation of the disrupting agent when administered systemically. Methods for making and administering cationic complexes are well within the abilities of one skilled in the art (see e.g., Sorensen, D R., et al. (2003) J. Mol. Biol 327:761-766; Verma, U N. et al., (2003) Clin. Cancer Res. 9:1291-1300; Arnold, A S et al. (2007) J. Hypertens. 25:197-205, which are incorporated herein by reference in their entirety). Some non-limiting examples of drug delivery systems useful for systemic delivery of a distrupting agent of the invention include DOTAP (Sorensen, D R., et al (2003), supra; Verma, U N. et al., (2003), supra), Oligofectamine, “solid nucleic acid lipid particles” (Zimmermann, T S. et al., (2006) Nature 441:111-114), cardiolipin (Chien, P Y. et al., (2005) Cancer Gene Ther. 12:321-328; Pal, A. et al., (2005) Int J. Oncol. 26:1087-1091), polyethyleneimine (Bonnet M E. et al., (2008) Pharm. Res. August 16 Epub ahead of print; Aigner, A. (2006) J. Biomed. Biotechnol. 71659), Arg-Gly-Asp (RGD) peptides (Liu, S. (2006) Mol. Pharm. 3:472-487), and polyamidoamines (Tomalia, D A. et al., (2007) Biochem. Soc. Trans. 35:61-67; Yoo, H. et al., (1999) Pharm. Res. 16:1799-1804). In some embodiments, a disrupting agent (e.g., gRNA, or mRNA) forms a complex with cyclodextrin for systemic administration. Methods for administration and pharmaceutical compositions comprising cyclodextrins may be found in U.S. Pat. No. 7,427,605, the entire contents of which are incorporated herein by reference.

[0370] The disrupting agents of the invention may be incorporated into pharmaceutical compositions suitable for administration. Such compositions typically include one or more species of disrupting agent and a pharmaceutically acceptable carrier. As used herein the language “pharmaceutically acceptable carrier” is intended to include any and all solvents, dispersion media, coatings, antibacterial and antifungal agents, isotonic and absorption delaying agents, and the like, compatible with pharmaceutical administration. The use of such media and agents for pharmaceutically active substances is well known in the art. Except insofar as any conventional media or agent is incompatible with the active compound, use thereof in the compositions is contemplated. Supplementary active compounds can also be incorporated into the compositions.

[0371] The pharmaceutical compositions of the present invention may be administered in a number of ways depending upon whether local or systemic treatment is desired and upon the area to be treated. Administration may be topical (including ophthalmic, vaginal, rectal, intranasal, transdermal), oral, or parenteral. Parenteral administration includes intravenous drip, subcutaneous, intraperitoneal or intramuscular injection, or intrathecal or intraventricular administration.

[0372] The route and site of administration may be chosen to enhance delivery or targeting of the disrupting agent comprising a site-specific targeting moiety to a particular location. For example, to target liver cells, intravenous injection may be used. Lung cells may be targeted by administering the disrupting agent in aerosol form. Jejunum cells may be targeted by anal administration.

[0373] Formulations for topical administration may include transdermal patches, ointments, lotions, creams, gels, drops, suppositories, sprays, liquids, and powders. Conventional pharmaceutical carriers, aqueous, powder or oily bases, thickeners and the like may be necessary or desirable. Coated condoms, gloves and the like may also be useful.

[0374] Compositions for oral administration include powders or granules, suspensions or solutions in water, syrups, elixirs or non-aqueous media, tablets, capsules, lozenges, or troches. In the case of tablets, carriers that can be used include lactose, sodium citrate and salts of phosphoric acid. Various disintegrants such as starch, and lubricating agents such as magnesium stearate, sodium lauryl sulfate and talc, are commonly used in tablets. For oral administration in capsule form, useful diluents are lactose and high molecular weight polyethylene glycols. When aqueous suspensions are required for oral use, the nucleic acid compositions can be combined with emulsifying and suspending agents. If desired, certain sweetening or flavoring agents can be added.

[0375] Compositions for intravenous administration may include sterile aqueous solutions which may also contain buffers, diluents, and other suitable additives.

[0376] Formulations for parenteral administration may include sterile aqueous solutions which may also contain buffers, diluents, and other suitable additives. For intravenous use, the total concentration of solutes may be controlled to render the preparation isotonic.

[0377] In one embodiment, the administration of a disrupting agent composition of the invention is parenteral, e.g., intravenous (e.g., as a bolus or as a diffusible infusion), intradermal, intraperitoneal, intramuscular, intrathecal, intraventricular, intracranial, subcutaneous, transmucosal, buccal, sublingual, endoscopic, rectal, oral, vaginal, topical, pulmonary, intranasal, urethral, or ocular. Administration can be provided by the subject or by another person, e.g., a health care provider. The composition may be provided in measured doses or in a dispenser which delivers a metered dose. Selected modes of delivery are discussed in more detail below.

[0378] In certain embodiments, the disrupting agents of the invention are polynucleotides, such as mRNAs, and are formulated in lipid nanoparticles (LNPs).

[0379] A. Compositions Comprising a Site-Specific an HNF4α Disrupting Agent of the Invention

[0380] The site-specific HNF4α disrupting agents of the invention may be formulated into compositions, such as pharmaceutical compositions, using one or more excipients to: (1) increase stability; (2) increase cell transfection; (3) permit sustained or delayed release (e.g., from a depot formulation); (4) alter the biodistribution (e.g., target the disrupting agent to specific tissues or cell types); (5) increase the translation of an encoded protein in vivo; and/or (6) alter the release profile of an encoded protein in vivo. In addition to traditional excipients, such as any and all solvents, dispersion media, diluents, or other liquid vehicles, dispersion or suspension aids, surface active agents, isotonic agents, thickening or emulsifying agents, preservatives, excipients for use in the compositions of the invention may include, without limitation, lipidoids, liposomes, lipid nanoparticles, polymers, lipoplexes, core-shell nanoparticles, peptides, proteins, cells transfected with nucleic acid molecules, modified nucleic acid molecules, or RNA (e.g., for transplantation into a subject), hyaluronidase, nanoparticle mimics and combinations thereof. Accordingly, the pharmaceutical compositions of the invention can include one or more excipients, each in an amount that together increases the stability of the disrupting agent, increases cell transfection by the disrupting agent, increases the expression of modified nucleic acid, or mRNA encoded protein, and/or alters the release profile of a disrupting agent. Further, the disrupting agents of the present invention may be formulated using self-assembled nucleic acid nanoparticles (see, e.g., U.S. Patent Publication No. 2016/0038612A1, which is incorporated herein by reference in its entirety).

[0381] i. Lipidoid

[0382] The synthesis of lipidoids has been extensively described and formulations containing these compounds are particularly suited for delivery of a disrupting agent of the invention, such as a disrupting agent comprising a site-specific HNF4α targeting moiety comprising a nucleic acid molecule, e.g., comprising modified nucleic acid molecules or mRNA (see Mahon et al., Bioconjug Chem. 2010 21:1448-1454; Schroeder et al., J Intern Med. 2010 267:9-21; Akinc et al., Nat Biotechnol. 2008 26:561-569; Love et al., Proc Natl Acad Sci USA. 2010 107: 1864-1869; Siegwart et al., Proc Natl Acad Sci USA. 2011108:12996-3001; the contents of all of which are incorporated herein in their entireties).

[0383] For example, lipidoids have been used to effectively deliver double stranded small interfering RNA molecules, single stranded nucleic acid molecules, modified nucleic acid molecules or modified mRNA. (See, e.g., US Patent Publication 2016/0038612A1). Complexes, micelles, liposomes or particles can be prepared containing these lipidoids and, therefore, provide effective delivery of a site-specific HNF4α targeting moiety comprising a nucleic acid molecule, as judged by the production of an encoded protein, following the administration of a lipidoid formulation, e.g., via localized and/or systemic administration. Lipidoid complexes of can be administered by various means including, but not limited to, intravenous, intramuscular, intradermal, intraperitoneal or subcutaneous routes.

[0384] In vivo delivery of a site-specific HNF4α targeting moiety comprising, e.g., a nucleic acid molecule, may be affected by many parameters, including, but not limited to, the formulation composition, nature of particle PEGylation, degree of loading, polynucleotide to lipid ratio, and biophysical parameters such as, but not limited to, particle size (Akinc et al., Mol Ther. 2009 17:872-879; herein incorporated by reference in its entirety). As an example, small changes in the anchor chain length of poly(ethylene glycol) (PEG) lipids may result in significant effects on in vivo efficacy. Formulations with different lipidoids, including, but not limited to penta[3-(1-laurylaminopropionyl)]-triethylenetetramine hydrochloride (TETA-SLAP; aka 98NI2-5, see Murugaiah et al., Analytical Biochemistry, 401:61 (2010); the contents of which are herein incorporated by reference in their entirety), C12-200 (including derivatives and variants), and MDI, may be used.

[0385] In one embodiment, a disrupting agent comprising a site-specific HNF4α targeting moiety comprising, e.g., a nucleic acid molecule, is formulated with a lipidoid for systemic intravenous administration to target cells of the liver. For example, a final optimized intravenous formulation comprising a disrupting agent comprising a site-specific HNF4α targeting moiety comprising a nucleic acid molecule, and a lipid molar composition of 42% 98NI2-5, 48% cholesterol, and 10% PEG-lipid with a final weight ratio of about 7.5 to 1 total lipid to nucleic acid molecule, and a C14 alkyl chain length on the PEG lipid, with a mean particle size of roughly 50-60 nm, can result in the distribution of the formulation to be greater than 90% to the liver (see, Akinc et al., Mol Ther. 2009 17:872-879; the contents of which is herein incorporated by reference in its entirety). In another example, an intravenous formulation using a C12-200 lipidoid (see, e.g., PCT Publication No. WO 2010/129709, which is herein incorporated by reference in its entirety) having a molar ratio of 50/10/38.5/1.5 of C12-200/disteroylphosphatidyl choline/cholesterol/PEG-DMG, with a weight ratio of 7 to 1 total lipid to nucleic acid molecule, and a mean particle size of 80 nm may be used to deliver a disrupting agent comprising a site-specific HNF4α targeting moiety comprising a nucleic acid molecule, to hepatocytes (see, Love et al., Proc Natl Acad Sci USA. 2010 107:1864-1869; the contents of which are herein incorporated by reference in their entirety). In another embodiment, an MDI lipidoid-containing formulation may be used to effectively deliver a disrupting agent comprising a site-specific HNF4α targeting moiety comprising a nucleic acid molecule, to hepatocytes in vivo. The characteristics of optimized lipidoid formulations for intramuscular or subcutaneous routes may vary significantly depending on the target cell type and the ability of formulations to diffuse through the extracellular matrix into the blood stream. While a particle size of less than 150 nm may be desired for effective hepatocyte delivery due to the size of the endothelial fenestrae (see, Akinc et al., Mol Ther. 2009 17:872-879; the contents of which are herein incorporated by reference in their entirety), use of lipidoid-formulated nucleic acid molecules to deliver the formulation to other cells types including, but not limited to, endothelial cells, myeloid cells, and muscle cells may not be similarly size-limited. Use of lipidoid formulations to deliver siRNA in vivo to other non-hepatocyte cells such as myeloid cells and endothelium has been reported (see Akinc et al., Nat Biotechnol. 200826:561-569; Leuschner et al., Nat Biotechnol. 2011 29: 1005-1010; Cho et al. Adv. Funct. Mater. 2009 19:3112-3118; 8th International Judah Folkman Conference, Cambridge, Mass. Oct. 8-9, 2010; the contents of each of which are herein incorporated by reference in their entirety). For delivery to myeloid cells, such as monocytes, lipidoid formulations may have a similar component molar ratio. Different ratios of lipidoids and other components including, but not limited to, disteroylphosphatidyl choline, cholesterol and PEG-DMG, may be used to optimize the formulation for delivery to different cell types including, but not limited to, hepatocytes, myeloid cells, muscle cells, etc. For example, the component molar ratio may include, but is not limited to, 50% CI2-200, 10% disteroylphosphatidyl choline, 38.5% cholesterol, and 1.5% PEG-DMG (see Leuschner et al., Nat Biotechnol 2011 29: 1005-1010; the contents of which are herein incorporated by reference in its entirety). The use of lipidoid formulations for the localized delivery to cells (such as, but not limited to, adipose cells and muscle cells) via either subcutaneous, intradermal or intramuscular delivery, may not require all of the formulation components desired for systemic delivery and, as such, may comprise only the lipidoid and a disrupting agent comprising comprising a site-specific HNF4α targeting moiety comprising, e.g., a nucleic acid molecule, as described herein.

[0386] Combinations of different lipidoids may be used to improve the efficacy of the formualtions by increasing cell transfection and/or increasing the translation of encoded protein contained therein (see Whitehead et al., Mol. Ther. 2011, 19:1688-1694, the contents of which are herein incorporated by reference in their entirety).

[0387] In one embodiment, the lipidoid may be prepared from the conjugate addition of alklamines to acrylates. As a non-limiting example, a lipidoid may be prepared by the methods described in PCT Patent Publication No. WO 2014/028487, the contents of which are herein incorporated by reference in its entirety. In one embodiment, the lipidoid may comprise a compound having formula (I), formula (II), formula (III), formula (IV) or formula (V) as described in PCT Patent Publication No. WO 2014/028487, the contents of which are herein incorporated by reference in their entirety. In one embodiment, the lipidoid may be biodegradable.

[0388] ii. Liposomes, Lipoplexes, and Lipid Nanoparticles

[0389] A disrupting agent of the invention may be formulated using one or more liposomes, lipoplexes, or lipid nanoparticles. In one embodiment, pharmaceutical compositions of the invention include liposomes. Liposomes are artificially-prepared vesicles which are primarily composed of a lipid bilayer and may be used as a delivery vehicle for the administration of nutrients and pharmaceutical formulations. Liposomes may be of different sizes such as, but not limited to, a multilamellar vesicle (MLV) which may be hundreds of nanometers in diameter and may contain a series of concentric bilayers separated by narrow aqueous compartments, a small unicellular vesicle (SUV) which may be smaller than 50 nm in diameter, and a large unilamellar vesicle (LUV) which may be between 50 and 500 nm in diameter. Liposome design may include, but is not limited to, opsonins or ligands in order to improve the attachment of liposomes to unhealthy tissue or to activate events such as, but not limited to, endocytosis. Liposomes may contain a low or a high pH in order to improve the delivery of the pharmaceutical formulations. The formation of liposomes may depend on the physicochemical characteristics such as, but not limited to, the pharmaceutical formulation entrapped and the liposomal ingredients, the nature of the medium in which the lipid vesicles are dispersed, the effective concentration of the entrapped substance and its potential toxicity, any additional processes involved during the application and/or delivery of the vesicles, the optimization size, polydispersity and the shelf-life of the vesicles for the intended application, and the batch-to-batch reproducibility and possibility of large-scale production of safe and efficient liposomal products.

[0390] As a non-limiting example, liposomes, such as synthetic membrane vesicles, may be prepared by the methods, apparatus and devices described in U.S. Patent Publication Nos. 2013/0177638, 2013/0177637, 2013/0177636, 201/30177635, 2013/0177634, 2013/0177633, 2013/0183375, 2013/0183373, 2013/0183372 and 2016/0038612) and PCT Patent Publication No WO 2008/042973, the contents of each of which are herein incorporated by reference in their entirety.

[0391] In one embodiment, a pharmaceutical composition described herein may include, without limitation, liposomes such as those formed from 1,2-dioleyloxy-N,N-dimethyl aminopropane (DODMA) liposomes, DiLa2 liposomes from Marina Biotech (Bothell, Wash.), 1,2-dilinoleyloxy-3-dimethylaminopropane (DLin-DMA), 2,2-dilinoleyl-4-(2-dimethylaminoethyl)-[1,3]-dioxolane (DLin-KC2-DMA), and MC3 (US20100324120; herein incorporated by reference in its entirety) and liposomes which may deliver small molecule drugs such as, but not limited to, DOXIL® from Janssen Biotech, Inc. (Horsham, Pa.). In one embodiment, a pharmaceutical composition described herein may include, without limitation, liposomes such as those formed from the synthesis of stabilized plasmid-lipid particles (SPLP) or stabilized nucleic acid lipid particle (SNALP) that have been previously described and shown to be suitable for oligonucleotide delivery in vitro and in vivo (see Wheeler et al. Gene Therapy. 1999 6:271-281; Zhang et al. Gene Therapy. 19996:1438-1447; Jeffs et al. Pharm Res. 2005 22:362-372; Morrissey et al., Nat Biotechnol. 2005 2:1002-1007; Zimmermann et al., Nature. 2006 441:111-114; Heyes et al. J Contr Rel. 2005 107:276-287; Semple et al. Nature Biotech. 2010 28:172-176; Judge et al. J Clin Invest. 2009 119:661-673; deFougerolles Hum Gene Ther. 2008 19:125-132; U.S. Patent Publication Nos 2013/0122104, 2013/0303587, and 2016/0038612; the contents of each of which are incorporated herein in their entireties). The original manufacturing method of Wheeler et al. was a detergent dialysis method, which was later improved by Jeffs et al. and is referred to as the spontaneous vesicle formation method. The liposome formulations of the invention may be composed of 3 to 4 lipid components in addition a disrupting agent comprising a site-specific HNF4α targeting moiety. As an example a liposome of the invention can contain, but is not limited to, 55% cholesterol, 20% disteroylphosphatidyl choline (DSPC), 10% PEG-SDSG, and 15% 1,2-dioleyloxy-N,N-dimethylaminopropane (DODMA), as described by Jeffs et al. As another example, liposome formulationsof the invention may contain, but are not limited to, 48% cholesterol, 20% DSPC, 2% PEG-c-DMA, and 30% cationic lipid, where the cationic lipid can be 1,2-distearloxy-N,N-dimethylaminopropane (DSDMA), DODMA, DLin-DMA, or 1,2-dilinolenyloxy-3-dimethylaminopropane (DLenDMA), as described by Heyes et al. In some embodiments, liposome formulations may comprise from about 25.0% cholesterol to about 40.0% cholesterol, from about 30.0% cholesterol to about 45.0% cholesterol, from about 35.0% cholesterol to about 50.0% cholesterol and/or from about 48.5% cholesterol to about 60% cholesterol. In another embodiment, formulations of the invention may comprise a percentage of cholesterol selected from the group consisting of 28.5%, 31.5%, 33.5%, 36.5%, 37.0%, 38.5%, 39.0% and 43.5%. In some embodiments, liposome formulations of the invention may comprise from about 5.0% to about 10.0% DSPC and/or from about 7.0% to about 15.0% DSPC.

[0392] In one embodiment, a pharmaceutical composition may include liposomes which may be formed to deliver a disrupting agent of the invention. The disrupting agent comprising a site-specific HNF4α targeting moiety comprising may be encapsulated by the liposome and/or it may be contained in an aqueous core which may then be encapsulated by the liposome (see, e.g., PCT Patent Publication Nos. WO 2012/031046, WO 2012/031043, WO 2012/030901 and WO 2012/006378 and U.S. Patent Publication Nos. 2013/0189351, 2013/0195969 and 201/30202684, the contents of each of which are herein incorporated by reference in their entirety).

[0393] In another embodiment, liposomes for use in the present invention may be formulated for targeted delivery. As a non-limiting example, the liposome may be formulated for targeted delivery to the liver. Such a liposome may include, but is not limited to, a liposome described in U.S. Patent Publication No. 2013/0195967, the contents of which are herein incorporated by reference in their entirety.

[0394] In one embodiment, formulations comprising liposomes and a disrupting agent may be administered intramuscularly, intrademrally, or intravenously.

[0395] In another embodiment, a lipid formulation of the invention may include at least one cationic lipid, a lipid which enhances transfection and a least one lipid which contains a hydrophilic head group linked to a lipid moiety (International Pub. No. WO2011076807 and U.S. Pub. No. 20110200582; the contents of each of which is herein incorporated by reference in their entirety). In another embodiment, a lipdid formulation of the invention is a lipid vesicle which may have crosslinks between functionalized lipid bilayers (see U.S Patent Publication No. 2012/0177724, the contents of which are herein incorporated by reference in their entirety).

[0396] In one embodiment, a formulation comprising a disrupting agent is a lipid nanoparticle (LNP) which may comprise at least one lipid. The lipid may be selected from, but is not limited to, DLin-DMA, DLin-K-DMA, 98NI2-5, CI2-200, DLin-MC3-DMA, DLin-KC2-DMA, DODMA, PLGA, PEG, PEG-DMG, PEGylated lipids and amino alcohol lipids. In another aspect, the lipid may be a cationic lipid such as, but not limited to, DLin-DMA, DLin-D-DMA, DLin-MC3-DMA, DLin-KC2-DMA, DODMA and amino alcohol lipids. The amino alcohol cationic lipid may be the lipids described in and/or made by the methods described in U.S. Patent Publication No. 2013/0150625.

[0397] In one embodiment, the cationic lipid may be selected from, but not limited to, a cationic lipid described in PCT Publication Nos. WO 2012/040184, WO 2011/153120, WO 2011/149733, WO 2011/090965, WO 2011/043913, WO 2011/022460, WO 2012/061259, WO 2012/054365, WO 2012/044638, WO 2010/080724, WO 2010/21865, WO 2008/103276, WO 2013/086373 and WO 2013/086354, U.S. Pat. Nos. 7,893,302, 7,404,969, 8,283, 333, 8,466,122 and 8,569,256, and U.S. Patent Publication Nos. 2010/0036115, 2012/0202871, 2013/0064894, 2013/0129785, 2013/0150625, 2013/0178541, 2013/0225836 and 2014/0039032; the contents of each of which are herein incorporated by reference in their entirety. In another embodiment, the cationic lipid may be selected from, but not limited to, formula A described in PCT Publication Nos. WO 2012/040184, WO 0111/53120, WO 2011/149733, WO 2011/090965, WO 2011/043913, WO 2011/022460, WO 2012/061259, WO 2012/054365, WO 2012/044638 and WO 2013/116126 or U.S. Patent Publication Nos. 2013/0178541 and 2013/0225836; the contents of each of which is herein incorporated by reference in their entirety. In yet another embodiment, the cationic lipid may be selected from, but not limited to, formula CLI-CLXXIX of PCT Publication No. WO 2008/103276, formula CLICLXXIX of U.S. Pat. No. 7,893,302, formula CLICLXXXXII of U.S. Pat. No. 7,404,969 and formula I-VI of us Patent Publication No. 2010/0036115, formula I of U.S. Patent Publication No 2013/0123338; each of which is herein incorporated by reference in their entirety.

[0398] In one embodiment, the cationic lipid may be synthesized by methods known in the art and/or as described in PCT Publication Nos. WO 2012/040184 WO 2011/153120, WO 2011/149733, WO 2011/090965: WO 2011/043913, WO 2011/022460, WO 2012/061259, WO 2012/054365, WO 2012/044638, WO 2010/080724, WO 2010/21865, WO 2013/126803, WO 2013/086373, and WO 2013/086354; the contents of each of which are herein incorporated by reference in their entirety.

[0399] In one embodiment, the lipids which may be used in the formulations and/or for delivery of the disrupting agents described herein may be a cleavable lipid. As a non-limiting example, a cleavable lipid and/or pharmaceutical compositions comprising cleavable lipids include those described in PCT Patent Publication No. WO 2012/170889, the contents of which are herein incorporated by reference in their entirety. As another non-limiting example, the cleavable lipid may be HGT4001, HGT4002, HGT4003, HGT4004 and/or HGT4005 as described in PCT Patent Publication No. WO 2012/170889, the contents of which are herein incorporated by reference in their entirety.

[0400] In one embodiment, polymers which may be used in the formulation and/or delivery of the disrupting agents described herein may include, but is not limited to, poly(ethylene) glycol (PEG), polyethylenimine (PEI), dithiobis(succinimidylpropionate) (DSP), Dimethyl-3,3′-dithiobispropionimidate (DTBP), poly(ethylene imine) biscarbamate (PEIC), poly(L-lysine) (PLL), histidine modified PLL, poly(N-vinylpyrrohdone) (PVP), poly(propylenimine (PPI), poly(amidoamine) (PAMAM), poly(amido ethylenimine) (SS-PAEI), triehtylenetetramine (TETA), poly(β-aminoester), poly(4-hydroxy-L-proine ester) (PHP), poly(allylamine), poly(α-[4-aminobutyl]-L-glycolic acid (PAGA), Poly(D,L-lactic-coglycolid acid (PLGA), Poly(N-ethyl-4-vinylpyridinium bromide), poly(phosphazene)s (PPZ), poly(phosphoester)s (PPE), poly(phosphoramidate)s (PPA), poly(N-2-hydroxypropylmethacrylamide) (pHPMA), poly(2-(dimethylamino)ethyl methacrylate) (pDMAEMA), poly(2-aminoethyl propylene phosphate) PPE_EA), Chitosan, galactosylated chitosan, N-dodecylated chitosan, histone, collagen and dextran-spermine. In one embodiment, the polymer may be an inert polymer such as, but not limited to, PEG.

[0401] In one embodiment, the polymer may be a cationic polymer such as, but not limited to, PEL PLL, TETA, poly(allylamine), Poly(N-ethyl-4-vinylpyridinium bromide), pHPMA and pDMAEMA. In one embodiment, the polymer may be a biodegradable PEI such as, but not limited to, DSP, DTBP and PEIC. In one embodiment, the polymer may be biodegradable such as, but not limited to, histine modified PLL SSPAEI, poly(β-aminoester), PHP, PAGA, PLGA, PPZ, PPE, PPA and PPE-EA. In one embodiment, an LNP formulation of the invention may be prepared according to the methods described in PCT Publication Nos. WO 2011/127255 or WO 2008/103276, the contents of each of which are herein incorporated by reference in their entirety. As a non-limiting example, a disrupting agent comprising a site-specific HNF4α targeting moiety may be encapsulated in an LNP formulation as described in PCT Publication Nos. WO 2011/127255 and/or WO 2008/103276; the contents of each of which are herein incorporated by reference in their entirety. As another non-limiting example, a disrupting agent comprising a site-specific HNF4α targeting moiety as described herein, may be formulated in a nanoparticle to be delivered by a parenteral route as described in U.S. Patent Publication No. 2012/0207845 and PCT Publication No. WO 2014/008334; the contents of each of which are herein incorporated by reference in their entirety.

[0402] In one embodiment, LNP formulations described herein may be administered intramusculary. The LNP formulation may comprise a cationic lipid described herein, such as, but not limited to, DLin-DMA, DLin-KC2-DMA, DLin-MC3-DMA, DODMA and C12-200.

[0403] In one embodiment, LNP formulations described herein comprising a disrupting agent as described herein, may be administered intradermally. The LNP formulation may comprise a cationic lipid described herein, such as, but not limited to, DLin-DMA, DLin-KC2-DMA, DLin-MC3-DMA, DODMA and C12-200.

[0404] The nanoparticle formulations may comprise conjugate, such as a phosphate conjugate, a polymer conjugates, a conjugate that enhances the delivery of nanoparticle as described in US Patent Publication No. US20160038612 A1.

[0405] In one embodiment, the lipid nanoparticle formulation comprises DLin-MC3-DMA as described in US Patent Publication No. US20100324120.

[0406] In one embodiment, the lipid nanoparticle comprises a lipid compound, or a pharmaceutically acceptable salt, tautomer or stereoisomer thereof, or a lipid nanoparticle formulation, as described in U.S. Pat. No. 10,723,692B2, US Patent Publication Nos. US20200172472A1, US20200163878A1, US20200046838A1, US20190359556A1, US20190314524A1, US20190274968A1, US20190022247A1, US20180303925A1, US20180185516A1, US20160317676A1, International Patent Publication No.: WO20200146805A1, WO2020081938A1, WO2019089828A1, WO2019036030A1, WO2019036028A1, WO2019036008A1, WO 2018200943A1, WO2018191719A1, WO2018107026A1, WO2018081480A1, the contents of each of which are herein incorporated by reference in their entirety (Acuitas Therapeutics, Inc.).

[0407] In one embodiment, the lipid nanoparticle comprises an amino lipid, or a pharmaceutically acceptable salt, tautomer or stereoisomer thereof, or a lipid nanoparticle formulation, described by Tekmira Pharmaceuticals Corp. in U.S. Pat. No. 9,139,554B2, U.S. Pat. No. 9,051,567B2, U.S. Pat. No. 8,883,203B2, US Patent Publication US20110117125A1, the contents of each of which are herein incorporated by reference in their entirety. In one particular example, the compound described in U.S. Pat. No. 9,139,554B2 is DLin-kC2-DMA.

[0408] In one embodiment, the lipid nanoparticle comprises an amino lipid, or a pharmaceutically acceptable salt, tautomer or stereoisomer thereof, or a lipid nanoparticle formulation, described by Arbutus Biopharma Corp. in U.S. Ser. No. 10/561,732B2, U.S. Pat. No. 9,938,236B2, U.S. Pat. No. 9,687,550B2, US Patent Publication US20190240354A1, US20170027658A1, WO2020097493A1, WO2020097520A1, WO2020097540A1, WO2020097548A1, the contents of each of which are herein incorporated by reference in their entirety.

[0409] Lipid nanoparticles may be engineered to alter the surface properties of particles so the lipid nanoparticles may penetrate the mucosal barrier. Mucus is located on mucosal tissue such as, but not limited to, oral (e.g., the buccal and esophageal membranes and tonsil tissue), ophthalmic, gastrointestinal (e.g., stomach, small intestine, large intestine, colon, rectum), nasal, respiratory (e.g., nasal, pharyngeal, tracheal and bronchial membranes), genital (e.g., vaginal, cervical and urethral membranes). Nanoparticles larger than 10-200 nm which are preferred for higher drug encapsulation efficiency and the ability to provide the sustained delivery of a wide array of drugs have been thought to be too large to rapidly diffuse through mucosal barriers. Mucus is continuously secreted, shed, discarded or digested and recycled so most of the trapped particles may be removed from the mucosla tissue within seconds or within a few hours. Large polymeric nanoparticles (200 nm-500 nm in diameter) which have been coated densely with a low molecular weight polyethylene glycol (PEG) diffused through mucus only 4 to 6-fold lower than the same particles diffusing in water (Lai et al. PNAS 2007 104(5): 1482-487; Lai et al. Adv Drug Deliv Rev. 200961(2): 158-171; the contents of each of which are herein incorporated by reference in their entirety). The transport of nanoparticles may be determined using rates of permeation and/or fluorescent microscopy techniques including, but not limited to, fluorescence recovery after photobleaching (FRAP) and high resolution multiple particle tracking (MPT). As a non-limiting example, compositions which can penetrate a mucosal barrier may be made as described in U.S. Pat. No. 8,241,670 or International Patent Publication No. WO2013110028, the contents of each of which are herein incorporated by reference in their entirety.

[0410] In one embodiment, a disrupting agent comprising a site-specific HNF4α targeting moiety as described herein, is formulated as a lipoplex, such as, without limitation, the ATUPLEX™ system, the DACC system, the DBTC system and other siRNAlipoplex technology from Silence Therapeutics (London, United Kingdom), STEMFECFM from STEMGENT® (Cambridge, Mass.), and polyethylenimine (PEI) or protamine-based targeted and non-targeted delivery of nucleic acids acids (Aleku et al. Cancer Res. 2008 68:9788-9798; Strumberg et al. Int J Clin Pharmacol Ther 2012 50:76-78; Santel et al., Gene Ther 2006 13:1222-1234; Santel et al., Gene Ther 200613:1360-1370; Gutbier et al., PulmPharmacol. Ther. 201023:334-344; Kaufmann et al. Microvasc Res 2010 80:286-293; Weide et al. J Immunother. 2009 32:498-507; Weide et al. J Immnnother. 2008 31:180-188; Pascolo Expert Opin. Biol. Ther. 4:1285-1294; Fotin-Mleczek et al., 2011 J. Immunother. 34: 1-15; Song et al., Nature Biotechnol. 2005, 23:709-717; Peer et al., Proc NatlAcad Sci USA. 2007 6; 104:4095-4100; deFougerolles Hum Gene Ther. 2008 19: 125-132; all of which are incorporated herein by reference in their entirety).

[0411] In one embodiment such formulations may also be constructed or compositions altered such that they passively or actively are directed to different cell types in vivo, including but not limited to hepatocytes, immune cells, tumor cells, endothelial cells, antigen presenting cells, and leukocytes (Akinc et al. Mol Ther. 2010 18:1357-1364; Song et al., Nat Biotechnol. 2005 23:709-717; Judge et al., J Clin Invest. 2009 119:661-673; Kaufmann et al., Microvasc Res 2010 80:286-293; Santel et al., Gene Ther 200613:1222-1234; Santel et al., Gene Ther 2006 13: 1360-1370; Gutbier et al., Pulm Pharmacol. Ther. 2010 23:334-344; Basha et al., Mol. Ther. 2011 19:2186-2200; Fenske and Cullis, Expert Opin Drug Deliv. 20085:25-44; Peer et al., Science. 2008 319:627-630; Peer and Lieberman, Gene Ther. 2011 18: 1127-1133; all of which are incorporated herein by reference in its entirety). One example of passive targeting of formulations to liver cells includes the DLin-DMA, DLin-KC2-DMA and DLin-MC3-DMA-based lipid nanoparticle formulations which have been shown to bind to apolipoprotein E and promote binding and uptake of these formulations into hepatocytes in vivo (Akinc et al. Mol Ther. 2010 18: 1357-1364; the contents of which are herein incorporated by reference in its entirety). Formulations can also be selectively targeted through expression of different ligands on their surface as exemplified by, but not limited by, folate, transferrin, N-acetylgalactosamine (GalNAc), and antibody targeted approaches (Kolhatkar et al., Curr Drug Discov Technol. 2011 8: 197-206; Musacchio and Torchilin, Front Biosci. 201116: 1388-1412; Yu et al., Mol Membr Biol. 2010 27:286-298; Patil et al., Crit Rev Ther Drug Carrier Syst. 2008 25: 1-61; Benoit et al., Biomacromolecules. 2011 12:2708-2714; Zhao et al., Expert Opin Drug Deliv. 2008 5:309-319; Akinc et al., Mol Ther. 2010 18:1357-1364; Srinivasan et al., Methods Mol Biol. 2012 820: 105-116; Ben-Arie et al., Methods Mol Biol. 2012 757:497-507; Peer 2010 J Control Release. 20:63-68; Peer et al., Proc Natl Acad Sci USA. 2007 104:4095-4100; Kim et al., Methods Mol Biol. 2011 721:339-353; Subramanya et aL, Mol Ther. 2010 18:2028-2037; Song et aL, Nat Biotechnol. 2005 23:709-717; Peer et al., Science. 2008 319:627-630; Peer and Lieberman, Gene Ther. 2011 18:1127-1133; the contents of all of which are incorporated herein by reference in its entirety).

[0412] In one embodiment, a disrupting agent comprising a site-specific HNF4α targeting moiety of the invention, may be formulated as a solid lipid nanoparticle. A solid lipid nanoparticle (SLN) may be spherical with an average diameter between 10 to 1000 nm. SLN possess a solid lipid core matrix that can solubilize lipophilic molecules and may be stabilized with surfactants and/or emulsifiers. In a further embodiment, the lipid nanoparticle may be a self-assembly lipid-polymer nanoparticle (see Zhang et al., ACS Nano, 2008, 2 (8), pp 1696-1702; herein incorporated by reference in its entirety). As a non-limiting example, the SLN may be the SLN described in PCT Publication No. WO2013/105101, the contents of which are herein incorporated by reference in their entirety. As another non-limiting example, the SLN may be made by the methods or processes described in PCT Publication No. WO 2013/105101, the contents of which are herein incorporated by reference in their entirety.

[0413] Liposomes, lipoplexes, or lipid nanoparticles may be used to improve the efficacy of a disrupting agent comprising a site-specific HNF4α targeting moiety comprising, e.g., a nucleic acid molecule, to direct protein production as these formulations may be able to increase cell transfection by a nucleic acid molecule; and/or increase the translation of encoded protein (e.g., an effector of the invention). One such example involves the use of lipid encapsulation to enable the effective systemic delivery of polyplex plasmid DNA (Heyes et al., Mol Ther. 2007 15:713-720; the contents of which are herein incorporated by reference in its entirety). The liposomes, lipoplexes, or lipid nanoparticles of the invention may also increase the stability of a a disrupting agent comprising a site-specific HNF4α targeting moiety comprising, e.g., a nucleic acid molecule. Liposomes, lipoplexes, or lipid nanoparticles are described in U.S. Patent Publication No. 2016/0038612, the contents of which are incorporated herein by reference in their entirety.

[0414] In one embodiment, a disrupting agent comprising a site-specific HNF4α targeting moiety comprising may be formulated for controlled release and/or targeted delivery. As used herein, “controlled release” refers to a pharmaceutical composition or compound release profile that conforms to a particular pattern of release to effect a therapeutic outcome. In one embodiment, a disrupting agent comprising a site-specific HNF4α targeting moiety, as described herein, may be encapsulated into a delivery agent described herein and/or known in the art for controlled release and/or targeted delivery. As used herein, the term “encapsulate” means to enclose, surround or encase. As it relates to the formulation of the compounds of the invention, encapsulation may be substantial, complete or partial. The term “substantially encapsulated” means that at least greater than 50, 60, 70, 80, 85, 90, 95, 96, 97, 98, 99, 99.9, 99.9 or greater than 99.999% of the pharmaceutical composition or disrupting agent of the invention may be enclosed, surrounded or encased within the delivery agent. “Partial encapsulation” or “partially encapsulated” means that less than 10, 10, 20, 30, 40 50 or less of the pharmaceutical composition or disrupting agent of the invention may be enclosed, surrounded or encased within the delivery agent. Advantageously, encapsulation may be determined by measuring the escape or the activity of the pharmaceutical composition or compound of the invention using fluorescence and/or electron micrograph. For example, at least 1, 5, 10, 20, 30, 40, 50, 60, 70, 80, 85, 90, 95, 96, 97, 98, 99, 99.9, 99.99 or greater than 99.99% of the pharmaceutical composition or disrupting agent of the invention are encapsulated in the delivery agent.

[0415] In one embodiment, a disrupting agent comprising a site-specific HNF4α targeting moiety comprising as described herein, may be encapsulated in a therapeutic nanoparticle (e.g., a therapeutic nanoparticle from BIND Therapeutics). Therapeutic nanoparticles may be formulated by methods described herein and known in the art such as, but not limited to, PCT Publication Nos. WO 2010/005740, WO 2010/030763, WO 2010/005721, WO 2010/005723, WO 2012/054923, U.S. Patent Publication Nos. 2201/10262491, 2010/0104645, 2010/0087337, 2010/0068285, 2011/0274759, 2010/0068286, 2012/0288541, 2013/0123351, 2013/0230567, 2013/0236500, 2013/0302433, 2013/0302432, 1013/0280339 and 2013/0251757, and U.S. Pat. Nos. 8,206,747, 8,293,276 8,318,208, 8,318,211, 8,623,417, 8,617,608, 8,613,954, 8,613,951, 8,609,142, 8,603,534 and 8,563,041; the contents of each of which is herein incorporated by reference in their entirety. In another embodiment, therapeutic polymer nanoparticles may be prepared by the methods described in U.S. Patent Publication No. 2012/0140790, herein incorporated by reference in its entirety. As a non-limiting example, the therapeutic nanoparticle may comprise about 4 to about 25 weight percent of a disrupting agent and about 10 to about 99 weight percent of a diblock poly (lactic) acid-poly (ethylene)glycol copolymer comprising poly(lactic) acid as described in US Patent Publication No. 2013/0236500 (Bind), the contents of which are herein incorporated by reference in its entirety. As another non-limiting example, the nanoparticle may comprise about 0.2 to about 35 weight percent of a disrupting agent and about 10 to about 99 weight percent of a diblock poly(lactic) acid-poly(ethylene)glycol copolymer as described in U.S. Patent Publication Nos. 2013/0280339 (Bind) and 2010251757 and U.S. Pat. No. 8,652,528, the contents of each of which are herein incorporated by reference in their entirety.

[0416] In one embodiment, a disrupting agent formulated in therapeutic nanoparticles may be administered intramuscularly, intrademrally, or intravenously.

[0417] In one embodiment, a disrupting agent formulated in ACCURINS™ nanoparticles may be administered intramuscularly, intrademrally, or intravenously.

[0418] In one embodiment, a disrupting agent may be delivered in therapeutic nanoparticles having a high glass transition temperature such as, but not limited to, the nanoparticles described in US Patent Publication Nos. 2014/0030351 and 2011/0294717, the entire contents of each of which are incorporated herein by reference.

[0419] In one embodiment, the therapeutic nanoparticle may be formulated for sustained release. As used herein, “sustained release” refers to a pharmaceutical composition or compound that conforms to a release rate over a specific period of time. The period of time may include, but is not limited to, hours, days, weeks, months and years. As a nonlimiting example, the sustained release nanoparticle may comprise a polymer and a disrupting agent of the present invention (see PCT Publication No. WO2010075072 and U.S. Patent Publication Nos. 2010/0216804, 2011/0217377, 2012/0201859, 2013/0243848 and 2013/0243827, each of which is herein incorporated by reference in their entirety).

[0420] In one embodiment, a disrupting agent of the invention may be encapsulated in, linked to and/or associated with synthetic nanocarriers. Synthetic nanocarriers include, but are not limited to, those described in PCT Publication Nos. WO 2010/005740, WO 2010/030763, WO 2012/13501, WO 2012/149252, WO 2012149255, WO 2012149259, WO 2012149265, WO 2012149268, WO 2012149282, WO 2012149301, WO 2012149393, WO 2012149405, WO 2012149411 and WO 2012149454 and US Patent Publication Nos. 20110262491, 20100104645, 20100087337, 20120244222 and US20130236533, and U.S. Pat. No. 8,652,487, the contents of each of which is herein incorporated by reference in their entirety. The synthetic nanocarriers may be formulated using methods known in the art and/or described herein. As a nonlimiting example, the synthetic nanocarriers may be formulated by the methods described in PCT Publication Nos. WO 2010005740, WO 2010030763 and WO 201213501 and US Patent Publication Nos. 20110262491, 20100104645, 20100087337 and 20120244222, each of which is herein incorporated by reference in their entirety. In another embodiment, the synthetic nanocarrier formulations may be lyophilized by methods described in PCT Publication No. WO 2011072218 and U.S. Pat. No. 8,211,473; each of which is herein incorporated by reference in their entirety. In yet another embodiment, formulations of the present invention, including, but not limited to, synthetic nanocarriers, may be lyophilized or reconstituted by the methods described in US Patent Publication No. 20130230568, the contents of which are herein incorporated by reference in its entirety.

[0421] In one embodiment, synthetic nanocarriers comprising a disrupting agent may be administered intramuscularly, intrademrally, or intravenously.

[0422] In some embodiments, a disrupting agent may be formulated for delivery using smaller LNPs. Such particles may comprise a diameter from below 0.1 μm up to 1000 μm such as, but not limited to, less than 0.1 μm, less than 1.0 μm, less than 5 μm, less than 10 μm, less than 15 μm, less than 20 μm, less than 25 μm, less than 30 μm, less than 35 μm, less than 40 μm, less than 50 μm, less than 55 μm, less than 60 μm, less than 65 μm, less than 70 μm, less than 75 μm, less than 80 μm, less than 85 μm, less than 90 μm, less than 95 μm, less than 100 μm, less than 125 μm, less than 150 μm, less than 175 μm, less than 200 μm, less than 225 μm, less than 250 μm, less than 275 μm, less than 300 μm, less than 325 μm, less than 350 μm, less than 375 μm, less than 400 μm, less than 425 μm, less than 450 μm, less than 475 μm, less than 500 μm, less than 525 μm, less than 550 μm, less than 575 μm, less than 600 μm, less than 625 μm, less than 650 μm, less than 675 μm, less than 700 μm, less than 725 μm, less than 750 μm, less than 775 μm, less than 800 μm, less than 825 μm, less than 850 μm, less than 875 μm, less than 900 μm, less than 925 μm, less than 950 μm, less than 975 μm.

[0423] In another embodiment, a disrupting agent may be formulated for delivery using smaller LNPs which may comprise a diameter from about 1 nm to about 100 nm, from about 1 nm to about 10 nm, about 1 nm to about 20 nm, from about 1 nm to about 30 nm, from about 1 nm to about 40 nm, from about 1 nm to about 50 nm, from about 1 nm to about 60 nm, from about 1 nm to about 70 nm, from about 1 nm to about 80 nm, from about 1 nm to about 90 nm, from about 5 nm to about from 100 nm, from about 5 nm to about 10 nm, about 5 nm to about 20 nm, from about 5 nm to about 30 nm, from about 5 nm to about 40 nm, from about 5 nm to about 50 nm, from about 5 nm to about 60 nm, from about 5 nm to about 70 nm, from about 5 nm to about 80 nm, from about 5 nm to about 90 nm, about 10 to about 50 nm, from about 20 to about 50 nm, from about 30 to about 50 nm, from about 40 to about 50 nm, from about 20 to about 60 nm, from about 30 to about 60 nm, from about 40 to about 60 nm, from about 20 to about 70 nm, from about 30 to about 70 nm, from about 40 to about 70 nm, from about 50 to about 70 nm, from about 60 to about 70 nm, from about 20 to about 80 nm, from about 30 to about 80 nm, from about 40 to about 80 nm, from about 50 to about 80 nm, from about 60 to about 80 nm, from about 20 to about 90 nm, from about 30 to about 90 nm, from about 40 to about 90 nm, from about 50 to about 90 nm, from about 60 to about 90 nm and/or from about 70 to about 90 nm.

[0424] In one embodiment, a disrupting agent may be formulated in smaller LNPs and may be administered intramuscularly, intrademrally, or intravenously.

[0425] In one embodiment, a disrupting agent may be formulated for delivery using the drug encapsulating microspheres described in PCT Patent Publication No. WO 2013063468 or U.S. Pat. No. 8,440,614, each of which is herein incorporated by reference in its entirety. In another aspect, the amino acid, peptide, polypeptide, lipids (APPL) are useful in delivering the disrupting agents of the invention to cells (see PCT Patent Publication No. WO 2013063468, herein incorporated by reference in its entirety).

[0426] In one aspect, the lipid nanoparticle may be a limit size lipid nanoparticle described in PCT Patent Publication No. WO 2013059922, herein incorporated by reference in its entirety. The limit size lipid nanoparticle may comprise a lipid bilayer surrounding an aqueous core or a hydrophobic core; where the lipid bilayer may comprise a phospholipid such as, but not limited to, diacylphosphatidylcholine, a diacylphosphatidylethanolamine, a ceramide, a sphingomyelin, a dihydrosphingomyelin, a cephalin, a cerebroside, a C8-C20 fatty acid diacylphophatidylcholine, and I-palmitoyl-2-oleoyl phosphatidylcholine (POPC). In another aspect the limit size lipid nanoparticle may comprise a polyethylene glycol-lipid such as, but not limited to, DLPEPEG, DMPE-PEG, DPPC-PEG and DSPE-PEG.

[0427] In one embodiment, a disrupting agent of the invention may be delivered, localized and/or concentrated in a specific location using the delivery methods described in PCT Patent Publication No. WO 2013063530, the contents of which are herein incorporated by reference in its entirety. As a non-limiting example, a subject may be administered an empty polymeric particle prior to, simultaneously with or after delivering the disrupting agent to the subject. The empty polymeric particle undergoes a change in volume once in contact with the subject and becomes lodged, embedded, immobilized or entrapped at a specific location in the subject.

[0428] In one embodiment, a disrupting agent may be formulated in an active substance release system (See e.g., US Patent Publication No. 20130102545, herein incorporated by reference in its entirety). The active substance release system may comprise 1) at least one nanoparticle bonded to an oligonucleotide inhibitor strand which is hybridized with a catalytically active nucleic acid and 2) a compound bonded to at least one substrate molecule bonded to a therapeutically active substance (e.g., a disrupting agent of the invention), where the therapeutically active substance is released by the cleavage of the substrate molecule by the catalytically active nucleic acid.

[0429] In one embodiment, the nanoparticles of the present invention may be water soluble nanoparticles such as, but not limited to, those described in PCT Publication No. WO 2013090601, the contents of which are herein incorporated by reference in its entirety. The nanoparticles may be inorganic nanoparticles which have a compact and zwitterionic ligand in order to exhibit good water solubility. The nanoparticles may also have small hydrodynamic diameters (HD), stability with respect to time, pH, and salinity and a low level of non-specific protein binding.

[0430] In one embodiment, the nanoparticles of the present invention are stealth nanoparticles or target-specific stealth nanoparticles such as, but not limited to, those described in U.S. Patent Publication Nos. 20130172406 (Bind), US20130251817 (Bind), 2013251816 (Bind) and 20130251766 (Bind), the contents of each of which are herein incorporated by reference in its entirety. The stealth nanoparticles may comprise a diblock copolymer and a chemotherapeutic agent. These stealth nanoparticles may be made by the methods described in us Patent Publication Nos. 20130172406, 20130251817, 2013251816 and 20130251766, the contents of each of which are herein incorporated by reference in its entirety. As a non-limiting example, the stealth nanoparticles may target cancer cells such as the nanoparticles described in US Patent Publication Nos. 20130172406, 20130251817, 2013251816 and 20130251766, the contents of each of which are herein incorporated by reference in its entirety.

[0431] In one embodiment, stealth nanoparticles comprising a disrupting agent of the invention may be administered intramuscularly, intradermally, or intravenously.

[0432] In one embodiment, a disrupting agent of the invention may be formulated in and/or delivered in a lipid nanoparticle comprising a plurality of cationic lipids such as, but not limited to, the lipid nanoparticles described in US Patent Publication No. 20130017223, the contents of which are herein incorporated by reference in its entirety. As a non-limiting example, the LNP formulation may comprise a first cationic lipid and a second cationic lipid. As another non-limiting example, the LNP formulation may comprise DLin-MC2-DMA and DLinMC4-DMA. As yet another non-limiting example, the LNP formulation may comprise DLin-MC3-DMA and CI2-200. In one embodiment, the LNP formulations comprising a plurality of cationic lipids (such as, but not limited to, those described in US Patent Publication No. US20130017223, the contents of which are herein incorporated by reference in its entirety) and may be administered intramuscularly, intradermally, or intravenously.

[0433] In one embodiment, a disrupting agent as described herein, may be formulated in and/or delivered in a lipid nanoparticle comprising the cationic lipid DLin-MC3-DMA and the neutral lipid DOPE. The lipid nanoparticle may also comprise a PEG based lipid and a cholesterol or antioxidant. These lipid nanoparticle formulations comprising DLin-MC3-DMA and DOPE and a disrupting agent may be administered intramuscularly, intradermally, or intravenously.

[0434] In one embodiment, the lipid nanoparticle comprising DLin-MC3-DMA and DOPE may comprise a PEG lipid such as, but not limited to, pentaerythritol PEG ester tetrasuccinimidyl and pentaerythritol PEG ether tetra-thiol, PEGc-DOMG, PEG-DMG (1,2-Dimyristoyl-sn-glycerol, methoxypolyethylene Glycol), PEG-DSG (1,2-Distearoyl-snglycerol, methoxypolyethylene Glycol), PEG-DPG (1,2-Dipalmitoyl-sn-glycerol, methoxypolyethylene glycol), PEG-DSA (PEG coupled to 1,2-distearyloxypropyl-3-amine), PEG-DMA (PEG coupled to 1,2-dimyristyloxypropyl-3-amine, PEG-c-DNA, PEG-c-DMA, PEG-S-DSG, PEG-c-DMA, PEG-DPG, PEG-DMG 2000 and those described herein and/or known in the art.

[0435] In one embodiment, the lipid nanoparticle comprising DLin-MC3-DMA and DOPE may include 0.5% to about 3.0%, from about 1.0% to about 3.5%, from about 1.5% to about 4.0%, from about 2.0% to about 4.5%, from about 2.5% to about 5.0% and/or from about 3.0% to about 6.0% of the lipid molar ratio of a PEG lipid.

[0436] In one embodiment, the lipid nanoparticle comprising DLin-MC3-DMA and DOPE may include 25.0% cholesterol to about 50.0% cholesterol, from about 30.0% cholesterol to about 45.0% cholesterol, from about 35.0% cholesterol to about 50.0% cholesterol and/or from about 48.5% cholesterol to about 60% cholesterol. In one embodiment, formulations may comprise a percentage of cholesterol selected from the group consisting of 28.5%, 31.5%, 33.5%, 36.5%, 37.0%, 38.5%, 39.0%, 43.5% and 48.5%.

[0437] In one embodiment, the lipid nanoparticle comprising DLin-MC3-DMA and DOPE may include 25.0% antioxidant to about 50.0% antioxidant, from about 30.0% antioxidant to about 45.0% antioxidant, from about 35.0% antioxidant to about 50.0% antioxidant and/or from about 48.5% antioxidant to about 60% antioxidant. In one embodiment, formulations may comprise a percentage of antioxidant selected from the group consisting of 28.5%, 31.5%, 33.5%, 36.5%, 37.0%, 38.5%, 39.0%, 43.5% and 48.5%.

[0438] The disrupting agent of the invention can be formulated using natural and/or synthetic polymers. Non-limiting examples of polymers which may be used for delivery include, but are not limited to, DYNAMIC POLYCONJUGATE (Arrowhead Research Corp., Pasadena, Calif.) formulations from MIRUS® Bio (Madison, Wis.) and Roche Madison (Madison, Wis.), PHASERX™ polymer formulations such as, without limitation, SMARTT POLYMER TECHNOLOGY™ (Seattle, Wash.), DMRIIDOPE, poloxamer, VAXFECTIN® adjuvant from Vical (San Diego, Calif.), chitosan, cyclodextrin from Calando Pharmaceuticals (Pasadena, Calif.), dendrimers and polylactic-co-glycolic acid) (PLGA) polymers, RONDEL™ (RNAVOligonucleotide Nanoparticle Delivery) polymers (Arrowhead Research Corporation, Pasadena, Calif.) and pH responsive co-block polymers such as, but not limited to, PHASERX™ (Seattle, Wash.).

[0439] The polymer formulations may permit the sustained or delayed release of a disrupting agent (e.g., following intramuscular, intradermal or subcutaneous injection). The altered release profile of the disrupting agent can result in, for example, translation of an encoded protein over an extended period of time. The polymer formulation may also be used to increase the stability of the disrupting agent. For example, biodegradable polymers have been previously used to protect nucleic acids other than modified mRNA from degradation and been shown to result in sustained release of payloads in vivo (Rozema et al., Proc Natl Acad Sci USA. 2007 104:12982-12887; Sullivan et al., Expert Opin Drug Deliv. 2010 7:1433-1446; Convertine et al., Biomacromolecules. 2010 Oct. 1; Chu et al., Acc Chern Res. 2012 Jan. 13; Manganiello et al et al., Biomaterials. 2012 33:2301-2309; Benoit et al., Biomacromolecules. 2011 12:2708-2714; Singha et al., Nucleic Acid Ther. 2011 2: 133-147; deFougerolles Hum Gene Ther. 2008 19:125-132; Schaffert and Wagner, Gene Ther. 2008 16:1131-1138; Chaturvedi et al., Expert Opin Drug Deliv. 2011 8: 1455-1468; Davis, Mol Pharm. 2009 6:659-668; Davis, Nature 201 0464: 1067-1070; each of which is herein incorporated by reference in its entirety).

[0440] In one embodiment, the pharmaceutical compositions may be sustained release formulations. In a further embodiment, the sustained release formulations may be for subcutaneous delivery. Sustained release formulations may include, but are not limited to, PLGA microspheres, ethylene vinyl acetate (EVAc), poloxamer, GELSITE® (Nanotherapeutics, Inc. Alachua, Fla.), HYLENEX® (Halozyme Therapeutics, San Diego Calif.), surgical sealants such as fibrinogen polymers (Ethic on Inc. Cornelia, Ga.), TISSELL® (Baxter International, Inc Deerfield, Ill.), PEG-based sealants, and COSEAL® (Baxter International, Inc Deerfield, Ill.).

[0441] B. Vector Encoded Site-Specific HNF4α Disrupting Agents of the Invention

[0442] Disrupting agents comprising a site-specific HNF4α targeting moiety, e.g., comprising a nucleic acid molecule, may be expressed from transcription units inserted into DNA or RNA vectors (see, e.g., Couture, A, et al., TIG. (1996), 12:5-10; WO 00/22113, WO 00/22114, and U.S. Pat. No. 6,054,299). In some embodiment, expression is sustained (months or longer), depending upon the specific construct used and the target tissue or cell type. These transgenes can be introduced as a linear construct, a circular plasmid, or a viral vector, which can be an integrating or non-integrating vector. The transgene can also be constructed to permit it to be inherited as an extrachromosomal plasmid (Gassmann, et al., (1995) Proc. Natl. Acad. Sci. USA 92:1292). Different components of the disrupting agent, e.g., gRNA and effector, can be located on separate expression vectors that can be co-introduced (e.g., by transfection or infection) into a target cell. Alternatively, each individual component can be transcribed by promoters both of which are located on the same expression plasmid.

[0443] Delivery of a disrupting agent expressing vector can be systemic, such as by intravenous or intramuscular administration, by administration to target cells ex-planted from the patient followed by reintroduction into the patient, or by any other means that allows for introduction into a desired target cell.

[0444] In certain embodiment, the nucleic acids described herein or the nucleic acids encoding a protein described herein, e.g., an effector, are incorporated into a vector, e.g., a viral vector.

[0445] The individual strand or strands of a disrupting agent comprising a site-specific HNF4α targeting moiety comprising a nucleic acid molecule can be transcribed from a promoter in an expression vector. Where two separate strands are to be expressed to generate, for example, a dsRNA, two separate expression vectors can be co-introduced (e.g., by transfection or infection) into a target cell. Alternatively, each individual strand of a nucleic acid molecule can be transcribed by promoters both of which are located on the same expression plasmid. In one embodiment, a nucleic acid molecule is expressed as inverted repeat polynucleotides joined by a linker polynucleotide sequence such that the nucleic acid molecule has a stem and loop structure.

[0446] Expression vectors are generally DNA plasmids or viral vectors. Expression vectors compatible with eukaryotic cells, preferably those compatible with vertebrate cells, can be used to produce recombinant constructs for the expression of a disrupting agent as described herein.

[0447] Constructs for the recombinant expression of a disrupting agent will generally require regulatory elements, e.g., promoters, enhancers, etc., to ensure the expression of the disrupting agent in target cells.

[0448] Expression of natural or synthetic nucleic acids is typically achieved by operably linking a nucleic acid encoding the nucleic acid of interest to a regulatory region, such as a promoter, and incorporating the construct into an expression vector. The vectors can be suitable for replication and integration in eukaryotes.

[0449] Regulatory regions, such as a promoter, suitable for operable linking to a nucleic acid molecules can be operably linked to a regulatory region such as a promoter. can be from any species. Any type of promoter can be operably linked to a nucleic acid sequence. Examples of promoters include, without limitation, tissue-specific promoters, constitutive promoters, and promoters responsive or unresponsive to a particular stimulus (e.g., inducible promoters). Additional promoter elements, e.g., enhancing sequences, regulate the frequency of transcriptional initiation. Typically, these are located in the region 30-110 bp upstream of the start site, although a number of promoters have recently been shown to contain functional elements downstream of the start site as well. The spacing between promoter elements frequently is flexible, so that promoter function is preserved when elements are inverted or moved relative to one another. In the thymidine kinase (tk) promoter, the spacing between promoter elements can be increased to 50 bp apart before activity begins to decline. Depending on the promoter, individual elements can function either cooperatively or independently to activate transcription.

[0450] One example of a suitable promoter is the immediate early cytomegalovirus (CMV) promoter sequence. This promoter sequence is a strong constitutive promoter sequence capable of driving high levels of expression of any polynucleotide sequence operatively linked thereto. Another example of a suitable promoter is Elongation Growth Factor-1a (EF-1a). However, other constitutive promoter sequences may also be used, including, but not limited to the simian virus 40 (SV40) early promoter, mouse mammary tumor virus (MMTV), human immunodeficiency virus (HIV) long terminal repeat (LTR) promoter, MoMuLV promoter, an avian leukemia virus promoter, an Epstein-Barr virus immediate early promoter, a Rous sarcoma virus promoter, as well as human gene promoters such as, but not limited to, the actin promoter, the myosin promoter, the hemoglobin promoter, and the creatine kinase promoter.

[0451] Further, the present invention should not be limited to the use of constitutive promoters. Inducible promoters are also contemplated as part of the invention. The use of an inducible promoter provides a molecular switch capable of turning on expression of the polynucleotide sequence which it is operatively linked when such expression is desired, or turning off the expression when expression is not desired. Examples of inducible promoters include, but are not limited to a metallothionine promoter, a glucocorticoid promoter, a progesterone promoter, and a tetracycline promoter.

[0452] Additional regulatory regions that may be useful in nucleic acid constructs, include, but are not limited to, transcription and translation terminators, initiation sequences, polyadenylation sequences, translation control sequences (e.g., an internal ribosome entry segment, IRES), enhancers, inducible elements, or introns. Such regulatory regions may not be necessary, although they may increase expression by affecting transcription, stability of the mRNA, translational efficiency, or the like. Such regulatory regions can be included in a nucleic acid construct as desired to obtain optimal expression of the nucleic acids in the cell(s). Sufficient expression, however, can sometimes be obtained without such additional elements.

[0453] The expression vector to be introduced can also contain either a selectable marker gene or a reporter gene or both to facilitate identification and selection of expressing cells from the population of cells sought to be transfected or infected through viral vectors. In other aspects, the selectable marker may be carried on a separate piece of DNA and used in a co-transfection procedure. Both selectable markers and reporter genes may be flanked with appropriate transcriptional control sequences to enable expression in the host cells. Useful selectable markers include, for example, antibiotic-resistance genes, such as neo and the like. Non-limiting examples of selectable markers include puromycin, ganciclovir, adenosine deaminase (ADA), aminoglycoside phosphotransferase (neo, G418, APH), dihydrofolate reductase (DHFR), hygromycin-B-phosphtransferase, thymidine kinase (TK), and xanthin-guanine phosphoribosyltransferase (XGPRT). Such markers are useful for selecting stable transformants in culture. Other selectable markers include fluorescent polypeptides, such as green fluorescent protein or yellow fluorescent protein.

[0454] Signal peptides may also be included and can be used such that an encoded polypeptide is directed to a particular cellular location (e.g., the cell surface).

[0455] Reporter genes may be used for identifying potentially transfected cells and for evaluating the functionality of transcriptional control sequences. In general, a reporter gene is a gene that is not present in or expressed by the recipient source and that encodes a polypeptide whose expression is manifested by some easily detectable property, e.g., enzymatic activity. Expression of the reporter gene is assayed at a suitable time after the DNA has been introduced into the recipient cells. Suitable reporter genes may include genes encoding luciferase, beta-galactosidase, chloramphenicol acetyl transferase, secreted alkaline phosphatase, or the green fluorescent protein gene (e.g., Ui-Tei et al., 2000 FEBS Letters 479: 79-82). Suitable expression systems are well known and may be prepared using known techniques or obtained commercially. In general, the construct with the minimal 5′ flanking region showing the highest level of expression of reporter gene is identified as the promoter. Such promoter regions may be linked to a reporter gene and used to evaluate agents for the ability to modulate promoter-driven transcription.

[0456] Other aspects to consider for vectors and constructs are known in the art.

[0457] In some embodiments, a vector, e.g., a viral vector comprises a disrupting agent comprising a site-specific HNF4α targeting moiety comprising a nucleic acid molecule.

[0458] Viral vector systems which can be utilized with the methods and compositions described herein include, but are not limited to, (a) adenovirus vectors (e.g., an Ad5/F35 vector); (b) retrovirus vectors, including but not limited to lentiviral vectors (including integration competent or integration-defective lentiviral vectors), moloney murine leukemia virus, etc.; (c) adeno-associated virus vectors; (d) herpes simplex virus vectors; (e) SV 40 vectors; (f) polyoma virus vectors; (g) papilloma virus vectors; (h) picornavirus vectors; (i) pox virus vectors such as an orthopox, e.g., vaccinia virus vectors or avipox, e.g. canary pox or fowl pox; and (j) a helper-dependent or gutless adenovirus. Replication-defective viruses can also be advantageous. Different vectors will or will not become incorporated into the cells' genome. The constructs can include viral sequences for transfection, if desired. Alternatively, the construct can be incorporated into vectors capable of episomal replication, e.g. EPV and EBV vectors. See, e.g., U.S. Pat. Nos. 6,534,261; 6,607,882; 6,824,978; 6,933,113; 6,979,539; 7,013,219; and 7,163,824, the entire contents of each of which is incorporated by reference herein.

[0459] Vectors, including those derived from retroviruses such as adenoviruses and adeno-associated viruses and lentiviruses, are suitable tools to achieve long-term gene transfer since they allow long-term, stable integration of a transgene and its propagation in daughter cells. Examples of vectors include expression vectors, replication vectors, probe generation vectors, and sequencing vectors. The expression vector may be provided to a cell in the form of a viral vector. Viral vector technology is well known in the art, and described in a variety of virology and molecular biology manuals.

[0460] In one embodiment, a suitable viral vector for use in the present invention is an adeno-associated viral vector, such as a recombinant adeno-associate viral vector.

[0461] Recombinant adeno-associated virus vectors (rAAV) are gene delivery systems based on the defective and nonpathogenic parvovirus adeno-associated type 2 virus. All vectors are derived from a plasmid that retains only the AAV 145 bp inverted terminal repeats flanking the transgene expression cassette. Efficient gene transfer and stable transgene delivery due to integration into the genomes of the transduced cell are key features for this vector system. (Wagner et al., Lancet 351:9117 1702-3 (1998), Kearns et al., Gene Ther. 9:748-55 (1996)). AAV serotypes, including AAV1, AAV2, AAV3, AAV4, AAV5, AAV6, AAV7, AAV8 and AAV9, can be used in accordance with the present invention.

[0462] Replication-deficient recombinant adenoviral vectors (Ad) can be produced at high titer and readily infect a number of different cell types. Most adenovirus vectors are engineered such that a transgene replaces the Ad E1a, E1b, and/or E3 genes; subsequently the replication defective vector is propagated in human 293 cells that supply deleted gene function in trans. Ad vectors can transduce multiple types of tissues in vivo, including nondividing, differentiated cells such as those found in liver, kidney and muscle. Conventional Ad vectors have a large carrying capacity. An example of the use of an Ad vector in a clinical trial involved polynucleotide therapy for antitumor immunization with intramuscular injection (Sterman et al., Hum. Gene Ther. 7:1083-9 (1998)). Additional examples of the use of adenovirus vectors for gene transfer in clinical trials include Rosenecker et al., Infection 24:1 5-10 (1996); Sterman et al., Hum. Gene Ther. 9:7 1083-1089 (1998); Welsh et al., Hum. Gene Ther. 2:205-18 (1995); Alvarez et al., Hum. Gene Ther. 5:597-613 (1997); Topf et al., Gene Ther. 5:507-513 (1998); Sterman et al., Hum. Gene Ther. 7:1083-1089 (1998).

[0463] Packaging cells are used to form virus particles that are capable of infecting a host cell. Such cells include 293 cells, which package adenovirus, and ψ2 cells or PA317 cells, which package retrovirus. Viral vectors used in gene therapy are usually generated by a producer cell line that packages a nucleic acid vector into a viral particle. The vectors typically contain the minimal viral sequences required for packaging and subsequent integration into a host (if applicable), other viral sequences being replaced by an expression cassette encoding the protein to be expressed. The missing viral functions are supplied in trans by the packaging cell line. For example, AAV vectors used in gene therapy typically only possess inverted terminal repeat (ITR) sequences from the AAV genome which are required for packaging and integration into the host genome. Viral DNA is packaged in a cell line, which contains a helper plasmid encoding the other AAV genes, namely rep and cap, but lacking ITR sequences. The cell line is also infected with adenovirus as a helper. The helper virus promotes replication of the AAV vector and expression of AAV genes from the helper plasmid. The helper plasmid is not packaged in significant amounts due to a lack of ITR sequences. Contamination with adenovirus can be reduced by, e.g., heat treatment to which adenovirus is more sensitive than AAV

### IV. Methods of the Invention

[0464] The present invention also provides methods of use of the agents and compositions described herein to modulate expression of hepatocyte nuclear factor 4 alpha- (HNF4α) in a cell. The methods include contacting the cell with a site-specific HNF4α disrupting agent, the disrupting agent comprising a site-specific HNF4α targeting moiety which targets an HNF4α expression control region, and an effector molecule, thereby modulating expression of HNF4α in the cell. The site-specific disrupting agent, the effector, or both the site-specific disrupting agent and the effector may be present in a composition, such as a composition described above. In some embodiments, the site-specific disrupting agent and the effector are present in the same compositions. In other embodiments, the site-specific disrupting agent and the effector are present in different compositions. In some embodiments, the methods of the invention include contacting a cell with two site-specific HNF4α disrupting agents (a first and a second agent). The two site specific HNF4α disrupting agents may be present in the same composition, e.g., pharmaceutical composition, e.g., pharmaceutical composition comprising an LNP, or in seprate compositions, e.g., pharmaceutical composition, e.g., pharmaceutical composition comprising an LNP. The cell may be contacted with the first site specific HNF4α disrupting agent at one time and contacted with the second site specific HNF4α disrupting agent at a second time, or the cell may be contacted with both agents at the same time.

[0465] As indicated above, in fibrotic liver disease, HNF4α is dysregulated and, as a result, gene expression in its network declines significantly or stops. As reported by Guzman-Lepe (Guzman-Lepe J, et al. Liver-enriched transcription factor expression relates to chronic hepatic failure in humans. Hepatol Commun. 2018; 2(5):582-594. doi:10.1002/hep4.1172), HNF4α expression was down-regulated and correlated well with the extent of liver dysfunction (P=0.001), stage of fibrosis (P=0.0005), and serum levels of total bilirubin (P=0.009; r=0.35), albumin (P<0.001; r=0.52), and prothrombin time activity (P=0.002; r=0.41). HNF4α expression also correlated with CYP3A4, ornithine transcarbamylase (OTC), and F7 as well as CDH1 RNA levels. This dysregulation of the network contributes to the pathology of liver failure in the organ itself, and to co-morbidities throughout the patient. In addition to a repression of proteins associated with healthy liver (e.g. albumin and CYP3A enzyme production), proteins that contribute to the production of fibrosis are activated, including COL1a1 and αSMA.

[0466] Proof of principle that increased expression of HNF4α can revert senescent and irreversibly dysfunctional hepatocytes from terminal rodent livers to normal function has been established in several studies (Nishikawa, supra; Scholten D, Trebicka J, Liedtke C, Weiskirchen R. The carbon tetrachloride model in mice. Lab Anim 2015; 49(1 Suppl):4-11. doi:10.1177/0023677215571192; Varga J, Brenner D A, Phan S H, eds. Fibrosis Research: Methods and Protocols. Humana Press; 2005. doi:10.1385/1592599400). Interestingly, as reported by Nishikawa et al. (Nishikawa, supra), reversal of the distorted extracellular matrix is not absolutely required to reverse hepatic failure in degenerative liver disease, as only minimal resolution of fibrosis was found by histology two weeks after forced re-expression of HNF4α, well after improvement in hepatic function was documented. Significant improvement in histology, however, was observed at 100 days. In addition, long-term correction took place despite that forced re-expression generated only 0.01% of the endogenous level of HNF4α. Thus, improvement in hepatic function may only require increasing expression of HNF4α in a relatively modest number of hepatocytes in end-stage degenerative disease.

[0467] Recently, Huang et al. (Huang K-W, et al. Liver Activation of Hepatocellular Nuclear Factor-4a by Small Activating RNA Rescues Dyslipidemia and Improves Metabolic Profile. Mol Ther Nucleic Acids. 2019; 19:361-370. doi:10.1016/j.omtn.2019.10.044) also observed that stimulating HNF4α expression with a small-activating RNA in a rat model of non-alcoholic fatty liver disease (NAFLD) restored metabolic regulation and improved lipid profile.

[0468] As demonstrated in the examples below, one embodiment of the invention is to increase the expression of the HNF4α gene by delivering an engineered transcription factor to the gene that is pathologically dysregulated. The transcriptional activator, VPR (Chavez A, et al. Highly efficient Cas9-mediated transcriptional programming Nat Methods. 2015; 12(4):326-328. doi:10.1038/nmeth.3312), is a concatemer of the HSV transcriptional activator VP16, nuclear factor NF-kappa-B p65 subunit, and the EBV R transactivator. Each of these transcription factors is capable, individually, of attracting the cellular machinery of transcription, resulting in an upregulation of RNA production from the target locus. As a group, their synergistic cooperation results in physiologic or supra-physiologic expression of a target gene.

[0469] Expression of HNF4α may be enhanced or reduced as compared to, for example, a cell that was not contacted with the site-specific HNF4α disrupting agent. Modulation in gene expression can be assessed by any methods known in the art. For example, a modulation in the expression may be determined by determining the mRNA expression level of a gene, e.g., in a cell, a plurality of cells, and/or a tissue sample, using methods routine to one of ordinary skill in the art, e.g., northern blotting, qRT-PCR; by determining the protein level of a gene using methods routine to one of ordinary skill in the art, such as western blotting, immunological techniques.

[0470] The term “reduced” in the context of the level of HNF4α gene expression or HNF4α protein production in a subject, or a disease marker or symptom refers to a statistically significant decrease in such level. The decrease can be, for example, at least 20%, 25%, 30%, 35%, 40%, 45%, 50%, 55%, 60%, 65%, 70%, 75%, 80%, 85%, 90%, or 95%, or below the level of detection for the detection method. In certain embodiments, the expression of the target is normalized, i.e., decreased towards or to a level accepted as within the range of normal for an individual without such disorder. As used here, “lower” in a subject can refer to lowering of gene expression or protein production in a cell in a subject does not require lowering of expression in all cells or tissues of a subject. For example, as used herein, lowering in a subject can include lowering of gene expression or protein production in the liver of a subject.

[0471] The term “reduced” can also be used in association with normalizing a symptom of a disease or condition, i.e. decreasing the difference between a level in a subject suffering from an HNF4α-associated disease towards or to a level in a normal subject not suffering from an HNF4α-associated disease. As used herein, if a disease is associated with an elevated value for a symptom, “normal” is considered to be the upper limit of normal. If a disease is associated with a decreased value for a symptom, “normal” is considered to be the lower limit of normal.

[0472] The term “enhanced” in the context of the level of HNF4α gene expression or HNF4α protein production in a subject, or a disease marker or symptom refers to a statistically significant increase in such level. The increase can be, for example, at least 20%, 25%, 30%, 35%, 40%, 45%, 50%, 55%, 60%, 65%, 70%, 75%, 80%, 85%, 90%, or 95%, or above the level of detection for the detection method. In certain embodiments, the expression of the target is normalized, i.e., increase towards or to a level accepted as within the range of normal for an individual without such disorder. As used here, “higher” in a subject can refer to increasing gene expression or protein production in a cell in a subject does not require increasing expression in all cells or tissues of a subject. For example, as used herein, increasing in a subject can include increasing gene expression or protein production in the liver of a subject.

[0473] The term “enhanced” can also be used in association with normalizing a symptom of a disease or condition, i.e. increasing the difference between a level in a subject suffering from an HNF4α-associated disease towards or to a level in a normal subject not suffering from an HNF4α-associated disease. As used herein, if a disease is associated with an elevated value for a symptom, “normal” is considered to be the upper limit of normal. If a disease is associated with a decreased value for a symptom, “normal” is considered to be the lower limit of normal.

[0474] In some embodiments, a suitable cell for use in the methods of the invention is a mammalian cell. In some embodiments, the cell is a somatic cell. In some embodiments, the cell is a primary cell. For example, in some embodiments, the cell is a mammalian somatic cell. In some embodiments, the mammalian somatic cell is a primary cell. In some embodiments, the mammalian somatic cell is a non-embryonic cell.

[0475] The step of contacting may be performed in vitro, in vivo (i.e., the cell may be within a subject), or ex vivo. In some embodiments, contacting a cell is performed ex vivo and the methods further include, prior to the step of contacting, a step of removing the cell (e.g., a mammalian cell) from a subject. In some embodiments, the methods further comprise, after the step of contacting, a step of (b) administering the cell (e.g., mammalian cells) to a subject.

[0476] The in vivo methods of the invention may include administering to a subject an agent or composition of the invention.

[0477] The term “subject,” as used herein refers to an organism, for example, a mammal (e.g., a human, a non-human mammal, a non-human primate, a primate, a laboratory animal, a mouse, a rat, a hamster, a gerbil, a cat, or a a dog). In some embodiments a human subject is an adult, adolescent, or pediatric subject. In some embodiments, a subject had a disease or a condition. In some embodiments, the subject is suffering from a disease, disorder or condition, e.g., a disease, disorder or condition that can be treated as provided herein. In some embodiments, a subject is susceptible to a disease, disorder, or condition; in some embodiments, a susceptible subject is predisposed to and/or shows an increased risk (as compared to the average risk observed in a reference subject or population) of developing the disease, disorder or condition. In some embodiments, a subject displays one or more symptoms of a disease, disorder or condition. In some embodiments, a subject does not display a particular symptom (e.g., clinical manifestation of disease) or characteristic of a disease, disorder, or condition. In some embodiments, a subject does not display any symptom or characteristic of a disease, disorder, or condition. In some embodiments, a subject is a patient. In some embodiments, a subject is an individual to whom diagnosis and/or therapy is and/or has been administered.

[0478] Subjects that would benefit from the methods of the invention include subjects having an “HNF4α-associated disease” or a subject at risk of an “HNF4α-associated disease.”

[0479] Thus, the present invention further provides methods of treatment of a subject in need thereof. The treatment methods of the invention include administering an agent or composition of the invention to a subject, e.g., a subject that would benefit from a modulation of HNF4α expression, such as a subject having an HNF4α-associated disease, in a therapeutically effective amount. In some embodiments, the methods of the invention include the subject may be administered two site-specific HNF4α disrupting agents (a first and a second agent). The two site specific HNF4α disrupting agents may be present in the same composition, e.g., pharmaceutical composition, e.g., pharmaceutical composition comprising an LNP, or in seprate compositions, e.g., pharmaceutical composition, e.g., pharmaceutical composition comprising an LNP. The subject may be administered the first site specific HNF4α disrupting agent at one time and administered the second site specific HNF4α disrupting agent at a second time, or the subject may be administered both agents at the same time.

[0480] In addition, the present invention provides methods for preventing at least one symptom in a subject that would benefit from a modulation of HNF4α expression, such as a subject having an HNF4α-associated disease, by administering to the subject an agent or composition of the invention in a prophylactically effective amount.

[0481] “Therapeutically effective amount,” as used herein, is intended to include the amount of an agent or composition that, when administered to a patient for treating a subject having a HNF4α-associated disease, is sufficient to effect treatment of the disease (e.g., by diminishing, ameliorating, or maintaining the existing disease or one or more symptoms of disease or its related comorbidities). The “therapeutically effective amount” may vary depending on the agent or composition, how it is administered, the disease and its severity and the history, age, weight, family history, genetic makeup, stage of pathological processes mediated by HNF4α gene expression, the types of preceding or concomitant treatments, if any, and other individual characteristics of the patient to be treated.

[0482] “Prophylactically effective amount,” as used herein, is intended to include the amount of an agent or composition that, when administered to a subject who does not yet experience or display symptoms of an HNF4α-associated disease, but who may be predisposed to an HNF4α-associated disease, is sufficient to prevent or delay the development or progression of the disease or one or more symptoms of the disease for a clinically significant period of time. The “prophylactically effective amount” may vary depending on the agent or composition, how it is administered, the degree of risk of disease, and the history, age, weight, family history, genetic makeup, the types of preceding or concomitant treatments, if any, and other individual characteristics of the patient to be treated.

[0483] As used herein, “prevention” or “preventing,” when used in reference to a disease, disorder or condition thereof, that would benefit from a reduction in expression of an HNF4α gene or production of HNF4α protein, refers to a reduction in the likelihood that a subject will develop a symptom associated with such a disease, disorder, or condition, e.g., a sign or symptom of HNF4α gene expression or HNF4α activity.

[0484] A “therapeutically-effective amount” or “prophylactically effective amount” also includes an amount of an agent or composition that produces some desired local or systemic effect at a reasonable benefit/risk ratio applicable to any treatment. Agents and compositions employed in the methods of the present invention may be administered in a sufficient amount to produce a reasonable benefit/risk ratio applicable to such treatment. In some embodiments, a therapeutically effective amount or prophylactically effect amount tis administered in a single dose; in some embodiments, multiple unit doses are required to deliver a therapeutically or prophylactically effective amount.

[0485] As used herein, the phrase “symptoms are reduced” may be used when one or more symptoms of a particular disease, disorder or condition is reduced in magnitude (e.g., intensity, severity, etc.) and/or frequency. In some embodiments, a delay in the onset of a particular symptom is considered one form of reducing the frequency of that symptom.

[0486] When the subject to be treated is a mammal such as a human, the composition can be administered by any means known in the art including, but not limited to oral, intraperitoneal, or parenteral routes, including intracranial (e.g., intraventricular, intraparenchymal, and intrathecal), intravenous, intramuscular, subcutaneous, transdermal, airway (aerosol), nasal, rectal, and topical (including buccal and sublingual) administration. In certain embodiments, the compositions are administered by intravenous infusion or injection. In certain embodiments, the compositions are administered by subcutaneous injection.

[0487] As used herein, the term “HNF4α-associated disease,” is a disease or disorder that is caused by, or associated with HNF4α gene expression or HNF4α protein production. The term “HNF4α-associated disease” includes a disease, disorder or condition that would benefit from a decrease in HNF4α gene expression, replication, or protein activity. Non-limiting examples of HNF4α-associated diseases include, for example, liver disease (e.g., fatty liver, steatohepatitis including non-alcoholic steatohepatitis (NASH)), inflammatory bowel disease (IBD), hepatocellular carcinoma, MODY I, polycystic kidney disease, dyslipidemia (e.g., hyperlipidemia, high LDL cholesterol, low HDL cholesterol, hypertriglyceridemia, postprandial hypertriglyceridemia), disorders of glycemic control (e.g., insulin resistance not related to immune response to insulin, type 2 diabetes), cardiovascular disease (e.g., hypertension, endothelial cell dysfunction), kidney disease (e.g., acute kidney disorder, tubular dysfunction, proinflammatory changes to the proximal tubules, chronic kidney disease), metabolic syndrome, disease of lipid deposition or dysfunction (e.g., adipocyte dysfunction, visceral adipose deposition, obesity), disease of elevated uric acid (e.g., hyperuricemia, gout), and eating disorders such as excessive sugar craving. Details regarding signs and symptoms of the various diseases or conditions are well known in the art.

[0488] In one embodiment, the HNF4α-associated disease is selected from the group consisting of fatty liver (steatosis), nonalcoholic steatohepatitis (NASH), cirrhosis of the liver, accumulation of fat in the liver, inflammation of the liver, hepatocellular necrosis, liver fibrosis, and nonalcoholic fatty liver disease (NAFLD), polycystic kidney disease, inflammatory bowel disease (IBD), and MODY I.

[0489] Administration of the agents or compositions according to the methods of the invention may result in a reduction of the severity, signs, symptoms, or markers of an HNF4α-associated disease or disorder in a patient with an HNF4α-associated disease or disorder. By “reduction” in this context is meant a statistically significant decrease in such level. The reduction (absolute reduction or reduction of the difference between the elevated level in the subject and a normal level) can be, for example, at least about 20%, 25%, 30%, 35%, 40%, 45%, 50%, 55%, 60%, 65%, 70%, 75%, 80%, 85%, 90%, or 95%, or to below the level of detection of the assay used.

[0490] Administration of the agents or compositions according to the methods of the invention may stably or transiently modulating expression of a target gene. In some embodiments, a modulation of expression persists for at least about 1 hr to about 30 days, or at least about 2 hrs, 6 hrs, 12 hrs, 18 hrs, 24 hrs, 2 days, 3, days, 4 days, 5 days, 6 days, 7 days, 8 days, 9 days, 10 days, 11 days, 12 days, 13 days, 14 days, 15 days, 16 days, 17 days, 18 days, 19 days, 20 days, 21 days, 22 days, 23 days, 24 days, 25 days, 26 days, 27 days, 28 days, 29 days, 30 days, or longer or any time therebetween. In some other embodiments, a modulation of expression persists for no more than about 30 mins to about 7 days, or no more than about 1 hr, 2 hrs, 3 hrs, 4 hrs, 5 hrs, 6 hrs, 7 hrs, 8 hrs, 9 hrs, 10 hrs, 11 hrs, 12 hrs, 13 hrs, 14 hrs, 15 hrs, 16 hrs, 17 hrs, 18 hrs, 19 hrs, 20 hrs, 21 hrs, 22 hrs, 24 hrs, 36 hrs, 48 hrs, 60 hrs, 72 hrs, 4 days, 5 days, 6 days, 7 days, or any time therebetween.

[0491] The agents or compositions may be administered once to the subject or, alternatively, multiple administrations may be performed over a period of time. For example, two, three, four, five, or more administrations may be given to the subject during one treatment or over a period of time. In some embodiments, six, eight, ten, 12, 15 or 20 or more administrations may be given to the subject during one treatment or over a period of time as a treatment regimen.

[0492] In some embodiments, administrations may be given as needed, e.g., for as long as symptoms associated with the disease, disorder or condition persist. In some embodiments, repeated administrations may be indicated for the remainder of the subject's life. Treatment periods may vary and could be, e.g., one day, two days, three days, one week, two weeks, one month, two months, three months, six months, a year, or longer.

[0493] Efficacy of treatment or prevention of disease can be assessed, for example by measuring disease progression, disease remission, symptom severity, reduction in pain, quality of life, dose of a medication required to sustain a treatment effect, level of a disease marker, or any other measurable parameter appropriate for a given disease being treated or targeted for prevention. It is well within the ability of one skilled in the art to monitor efficacy of treatment or prevention by measuring any one of such parameters, or any combination of parameters. As discussed herein, the specific parameters to be measured depend on the HNF4α-associated disease that the subject is suffering from.

[0494] Comparisons of the later readings with the initial readings provide a physician an indication of whether the treatment is effective. It is well within the ability of one skilled in the art to monitor efficacy of treatment or prevention by measuring any one of such parameters, or any combination of parameters. In connection with the administration of an agent or composition, “effective against” a HNF4α-associated disorder indicates that administration in a clinically appropriate manner results in a beneficial effect for at least a statistically significant fraction of patients, such as a improvement of symptoms, a cure, a reduction in disease, extension of life, improvement in quality of life, or other effect generally recognized as positive by medical doctors familiar with treating HNF4α-associated disorders.

[0495] A treatment or preventive effect is evident when there is a statistically significant improvement in one or more parameters of disease status, or by a failure to worsen or to develop symptoms where they would otherwise be anticipated. As an example, a favorable change of at least 10% in a measurable parameter of disease, and preferably at least 20%, 30%, 40%, 50% or more can be indicative of effective treatment. Efficacy for a given agent or composition can also be judged using an experimental animal model for the given disease as known in the art. When using an experimental animal model, efficacy of treatment is evidenced when a statistically significant reduction in a marker or symptom is observed.

[0496] Alternatively, the efficacy can be measured by a reduction in the severity of disease as determined by one skilled in the art of diagnosis based on a clinically accepted disease severity grading scale. Any positive change resulting in e.g., lessening of severity of disease measured using the appropriate scale, represents adequate treatment using an agent or composition as described herein.

[0497] As used herein, the terms “treating” or “treatment” refer to a beneficial or desired result including, but not limited to, alleviation or amelioration of one or more signs or symptoms associated with HNF4α gene expression or HNF4α protein production. “Treatment” can also mean prolonging survival as compared to expected survival in the absence of treatment.

[0498] The present invention is next described by means of the following examples. However, the use of these and other examples anywhere in the specification is illustrative only, and in no way limits the scope and meaning of the invention or of any exemplified form. The invention is not limited to any particular preferred embodiments described herein. Many modifications and variations of the invention may be apparent to those skilled in the art and can be made without departing from its spirit and scope. The contents of all references, patents and published patent applications cited throughout this application, including the figures and informal sequence listing, are incorporated herein by reference.

### EXAMPLES

### Example 1. Modulation of HNF4α Expression

[0499] This example describes silencing of HNF4α expression with a site-specific HNF4α disrupting agent, comprising a site-specific HNF4α targeting moiety which targets an HNF4α expression control region, i.e., a guide RNA, and an effector comprising a fusion molecule comprising dCAS9 and KRAB.

[0500] Guide RNAs were designed to site-specifically target the transcriptional control region comprising promoter 1 (near the transcriptional start site) of the HNF4α gene (see, e.g., FIG. 1) and synthesized according to standard methods for oligonucleotide synthesis. The nucleotide sequences of the guide RNAs are provided in Table 2, below. Exemplary guide RNAs designed to site-specifically target the transcriptional control region comprising promoter 2 (near the transcriptional start site) of the HNF4α gene were also designed and are provided in Table 3, below. Additional exemplary guide RNAs designed to site-specifically target the transcriptional control region comprising promoter 2 (near the transcriptional start site) of the HNF4α gene were also designed and are provided in Table 9, below. Table 4, below, includes the unmodified nucleotide sequences, reverse complement nucleotide sequences, and chromosomal coordinates of the targeting portion of the guide RNAs in Tables 2 and 3.

[0501] HepG2 cells were seeded in 96-well plate (at a density of 3×10E4 cells/well) in appropriate media 24 hours prior to transfection. Cells were transfected with SSOP Lipid Nano-Particles (LNPs) containing mRNA encoding fusion proteins for dCAS9-KRAB (MR_28122) and guide RNAs (sgRNA) according to standard methods (see, e.g., Akita, et al. (Advanced Healthcare Materials (2013) 2:8.:1120-1125).

[0502] LNP formulations prepared using individual sgRNAs or Pools of sgRNAs (see, FIG. 1), were added to the cells for a final concentration of 5.0, 2.5, 1.25, or 0.625 μg/ml. The experiment was ended after 72 hours by lysing/freezing in RLT buffer for downstream mRNA purification or treatment with the Cell Titer Glo 2 reagent to quantify final cell number. qPCR was performed using HNF4α and ACTB probes to quantify relative HNF4α RNA transcription.

[0503] FIG. 2 demonstrates that Pool 1 or Pool 2 guides in combination with the effector dCAS-KRAB inhibited HNF4α expression in a dose dependent manner relative to dCAS alone, SH-KRAB, and untreated. dCAS alone does affect transcription in some cases, and without wishing to be bound by theory, the inhibition may be the result of dCAS interference with polymerase binding.

[0504] In addition, and as demonstrated in FIG. 3, Pool 1 at the highest concentration has the strongest silencing activity and guide RNAs GD-28432 and GD-28433 each have strong silencing activity alone, even at the lowest concentration.

### Example 2. Modulation of HNF4α Expression

[0505] This example describes activation of HNF4α expression with a site-specific HNF4α disrupting agent, comprising a site-specific HNF4α targeting moiety which targets an HNF4α expression control region, i.e., a guide RNA, and an effector comprising a fusion molecule comprising dCAS9 (a non-editing Cas9 protein) and VPR.

[0506] Guide RNAs were designed to site-specifically target the transcriptional control region comprising promoter 1 (near the transcriptional start site) of the HNF4α gene (see, e.g., FIG. 1) and were synthesized according to standard methods for oligonucleotide synthesis. The nucleotide sequences of the guide RNAs are provided in Table 2, below. Exemplary guide RNAs designed to site-specifically target the transcriptional control region comprising promoter 2 (near the transcriptional start site) of the HNF4α gene were also designed and are provided in Table 3, below. Additional exemplary guide RNAs designed to site-specifically target the transcriptional control region comprising promoter 2 (near the transcriptional start site) of the HNF4α gene were also designed and are provided in Table 9, below. Table 4, below, includes the unmodified nucleotide sequences, reverse complement nucleotide sequences, and chromosomal coordinates of the guide RNAs in Tables 2 and 3.

[0507] LX-2, A549, and HepG2 cells were seeded in 96-well plates (at a density of 1×10E4 cells/well) in appropriate media 24 hours prior to transfection. LX-2 cells normally do not express HNF4α; HepG2 cells, liver cancer cell line cells, normally express more HNF4α that normal non-cancerous liver cells.

[0508] Cells were transfected with mRNA encoding fusion proteins for dCAS9-VPR (MR_28196) and guide RNAs (sgRNA). Individual sgRNAs or pools of sgRNAs were prepared using the Lipofectamine MessengerMAX Transfection protocol as described by the manufacturer. Untreated HepG2 cells were also included in the experiment as an internal control (comparator).

[0509] Briefly, 2.5 μl lipofectamine per μg of RNA was mixed with OptiMEM media and incubated for 10 minutes at room temperature (RT), and then added to cells in a 1:10 ratio of the media volume to the cells. Lipofectmine media mix was combined with RNA for a total volume of 120 μl at a final concentration of 100 μg/ml. This mix was incubated at RT for 5 minutes and added to the cells for a final concentration of 5.0, 2.5, 1.25, 0.625 μg/ml.

[0510] The experiment was ended after 48 hours by lysing/freezing in RLT buffer for downstream mRNA purification or treatment with the Cell Titer Glo 2 reagent to quantify final cell number. Briefly, the plate for RNA extraction was washed three times with PBS, following which 150 μL RLT buffer was added to each well. The plate was then frozen at −80° C. for later RNA processing. RNA was extracted following thawing of the plates, using the Qiagen RNeasy 96-well kit. RNA was quantified using Ribogreen. Reverse transcription and qPCR were carried out following the protocol for Absolute Quantitation for mRNA Expression by RT-qPCR.

[0511] The standard curves for HNF4α and β-actin (ACTB) were prepared as follows: HNF4α and ACTB gene block stocks (a synthesized reference copy of target cDNA) were prepared in nuclease-free water to a concentration of 10 mg/mL. A mixture 0.5 mg/mL of each gene block stock was prepared by combining 5 μL of each individual gene block stock and 40 μL H2O to a final volume of 50 uL. This mixture was then serially diluted (10-fold dilutions) 8 times. Two microliter (2 μL) of each standard curve dilution was used as the cDNA for the standard curve to which was added 8 μL of Taqman Master Mix with probes. The standard curve was set up in duplicate Wells were analyzed in technical triplicates.

[0512] RNA was extracted and HNF4α mRNA levels were determined by qPCR.

[0513] qPCR was performed using HNF4α and ACTB probes to quantify relative HNF4α RNA transcription. HepG2 HNF4α RNA expression was measured as a positive control.

[0514] FIGS. 4A and 4B demonstrate that Pool 1 guides in combination with the effector dCAS-VPR show strong activation of HNF4α expression in both A549 cells and LX-2 cells in a dose dependent manner relative to SH-VPR, and untreated.

[0515] Delivering dCAS9-P300 using Lipofectamine MessengerMAX Transfection also upregulates HNF4α, but significantly less than dCAS-VPR (data not shown).

[0516] Similar experiments were conducted to evaluate the effect of dCas9 fusion proteins comprising dCas9-VPR and guides targeting the promoter region of HNF4α using Dlin-MC3-DMA (MC3), an LNP formulated for in vivo delivery. Using MC3-LNP, mRNA for dCas9-VPR and individual and pooled sgRNAs (Pool 1) were delivered to cells in culture. RNA was extracted and HNF4α mRNA levels were determined by qPCR as described above. Untreated HepG2 cells were included in the experiment as an internal control (comparitor).

[0517] FIG. 5 demonstrates that, in this experiment, the MC3 LNPs are more efficient at transfecting LX-2 cells than Messanger Max in comparison to HNF4α levels to HepG2 (internal control). The individual sgRNAs targeting the HNF4α promoter show upregulation but significantly less than the pooled guides.

[0518] Activation of HNF4α in HepG2 Cells using MC3-LNP mediated delivery was also evaluated. HepG2 cells express a basal level of HNF4α that is higher than normal cells. Supraphysiological expression may facilitate greater durability of efficacy.

[0519] Using MC3-LNP, mRNA for dCas9-VPR and pooled sgRNAs were delivered to HepG2 cells in culture. A dCas9-VPR control with a control, SH (safe harbor non-targeting control) guide, was also included. HNF4α mRNA levels were determined by qPCR.

[0520] FIG. 6 demonstrates that MC3-LNP formulations induced over-expression of HNF4α in HepG2 cells. Expression levels of up to about 200% of control levels were observed. Such expression level were tolerated in cells in culture. The result of the SH control demonstrates that upregulation of HNF4α is specifically due to the promoter targeted delivery of the activating effector.

[0521] To investigate whether the HNF4α protein induced by dCas9-VPR Pool 1 was localized to the nucleus of the cell, LX-2 cells were transfected with mRNA for dCas9-VPR and and pooled sgRNAs (Pool 1). In order to visualize cells, treated LX-2 cells were fixed and permeabilized. Cells were grown in 96 well plates with black walls and a clear bottom. Media was removed. All incubations were at room temperature (RT) and stationary. All solutions were made with 10×PBS stock solution. Media was removed and cells were washed 2 times with 1×PBS. To wash the cells, 100 μl of 1×PBS was added, and removed. The wash was repeated twice. One hundred microliter (100 μl) of 4% PFA in 1×PBS was added and incubated for 15 minutes at RT. Cells were washed 3 times with 1×PBS, with 5 minutes incubation between each wash. Cells were then incubaded in 100 μl of 0.1% Triton X 100 in 1×PBS for 15 minutes at RT. One hundred microliter (100 μl) of 10% normal goat serum in 1×PBS with 0.1% Triton X 100 was added and kept at 4 C until further use.

[0522] The fixed and permeabilized cells were stained with anti-HNF4α antibody and DAPI. FIG. 7 shows that the HNF4α protein induced by dCas9-VPR Pool 1 can be detected and travels to the nucleus.

TABLE 2
Site-Specific HNF4α Promoter 1 Targeting Moieties (sgRNA)- The first 20 nucleotides
in each moiety below comprise the targeting portion of the moiety.

| | SEQ | |
|---|---|---|
| | ID | |
| Identifier | NO. | Modified Nucleotide Sequence 5′ to 3′ |
| GD-28431 | 68 | mAs; mUs; mUs; rG; rA; rA; rU; rU; rA; rG; rG; rG; rG; rA; rU; rC; rU; rC; rG; rG; |
| | | rG; rU; rU; rU; rU; rA; rG; rA; rG; rC; rU; rA; rG; rA; rA; rA; rU; rA; rG; rC; rA; |
| | | rA; rG; rU; rU; rA; rA; rA; rA; rU; rA; rA; rG; rG; rC; rU; rA; rG; rU; rC; rC; rG; |
| | | rU; rU; rA; rU; rC; rA; rA; rC; rU; rU; rG; rA; rA; rA; rA; rA; rG; rU; rG; rG; rC; |
| | | rA; rC; rC; rG; rA; rG; rU; rC; rG; rG; rU; rG; rC; rUs; mUs; mUs; mU |
| GD-28432 | 69 | mGs; mAs; mCs; rU; rU; rG; rG; rG; rG; rU; rG; rA; rC; rA; rA; rU; rG; rG; rC; rU; |
| | | rG; rU; rU; rU; rU; rA; rG; rA; rG; rC; rU; rA; rG; rA; rA; rA; rU; rA; rG; rC; |
| | | rA; rA; rG; rU; rU; rA; rA; rA; rA; rU; rA; rA; rG; rG; rC; rU; rA; rG; rU; rC; |
| | | rC; rG; rU; rU; rA; rU; rC; rA; rA; rC; rU; rU; rG; rA; rA; rA; rA; rA; rG; rU; |
| | | rG; rG; rC; rA; rC; rC; rG; rA; rG; rU; rC; rG; rG; rU; rG; rC; rUs; mUs; mUs; mU |
| GD-28433 | 70 | mAs; mAs; mCs; rU; rG; rA; rA; rC; rA; rU; rC; rG; rG; rU; rG; rA; rG; rU; rU; rA; |
| | | rG; rU; rU; rU; rU; rA; rG; rA; rG; rC; rU; rA; rG; rA; rA; rA; rU; rA; rG; rC; rA; |
| | | rA; rG; rU; rU; rA; rA; rA; rA; rU; rA; rA; rG; rG; rC; rU; rA; rG; rU; rC; rC; rG; |
| | | rU; rU; rA; rU; rC; rA; rA; rC; rU; rU; rG; rA; rA; rA; rA; rA; rG; rU; rG; rG; rC; |
| | | rA; rC; rC; rG; rA; rG; rU; rC; rG; rG; rU; rG; rC; rUs; mUs; mUs; mU |
| GD-28434 | 71 | mUs; mGs; mGs; rU; rU; rU; rC; rU; rG; rG; rC; rU; rG; rA; rC; rA; rC; rC; rC; rG; |
| | | rG; rU; rU; rU; rU; rA; rG; rA; rG; rC; rU; rA; rG; rA; rA; rA; rU; rA; rG; rC; rA; |
| | | rA; rG; rU; rU; rA; rA; rA; rA; rU; rA; rA; rG; rG; rC; rU; rA; rG; rU; rC; rC; rG; |
| | | rU; rU; rA; rU; rC; rA; rA; rC; rU; rU; rG; rA; rA; rA; rA; rA; rG; rU; rG; rG; rC; |
| | | rA; rC; rC; rG; rA; rG; rU; rC; rG; rG; rU; rG; rC; rUs; mUs; mUs; mU |
| GD-28435 | 72 | mAs; mUs; mGs; rG; rU; rU; rA; rA; rU; rC; rG; rG; rU; rC; rC; rC; rC; rC; rG; rC; |
| | | rG; rU; rU; rU; rU; rA; rG; rA; rG; rC; rU; rA; rG; rA; rA; rA; rU; rA; rG; rC; rA; |
| | | rA; rG; rU; rU; rA; rA; rA; rA; rU; rA; rA; rG; rG; rC; rU; rA; rG; rU; rC; rC; rG; |
| | | rU; rU; rA; rU; rC; rA; rA; rC; rU; rU; rG; rA; rA; rA; rA; rA; rG; rU; rG; rG; rC; |
| | | rA; rC; rC; rG; rA; rG; rU; rC; rG; rG; rU; rG; rC; rUs; mUs; mUs; mU |
| GD-28436 | 73 | mGs; mUs; mCs; rC; rU; rC; rU; rG; rG; rG; rA; rA; rG; rA; rU; rC; rU; rG; rC; rU; |
| | | rG; rU; rU; rU; rU; rA; rG; rA; rG; rC; rU; rA; rG; rA; rA; rA; rU; rA; rG; rC; rA; |
| | | rA; rG; rU; rU; rA; rA; rA; rA; rU; rA; rA; rG; rG; rC; rU; rA; rG; rU; rC; rC; rG; |
| | | rU; rU; rA; rU; rC; rA; rA; rC; rU; rU; rG; rA; rA; rA; rA; rA; rG; rU; rG; rG; rC; |
| | | rA; rC; rC; rG; rA; rG; rU; rC; rG; rG; rU; rG; rC; rUs; mUs; mUs; mU |
| GD-28437 | 74 | mGs; mGs; mUs; rU; rU; rG; rA; rA; rA; rG; rG; rA; rA; rG; rG; rC; rA; rG; rA; rG; |
| | | rG; rU; rU; rU; rU; rA; rG; rA; rG; rC; rU; rA; rG; rA; rA; rA; rU; rA; rG; rC; rA; |
| | | rA; rG; rU; rU; rA; rA; rA; rA; rU; rA; rA; rG; rG; rC; rU; rA; rG; rU; rC; rC; rG; |
| | | rU; rU; rA; rU; rC; rA; rA; rC; rU; rU; rG; rA; rA; rA; rA; rA; rG; rU; rG; rG; rC; |
| | | rA; rC; rC; rG; rA; rG; rU; rC; rG; rG; rU; rG; rC; rUs; mUs; mUs; mU |
| GD-28438 | 75 | mAs; mCs; mCs; rC; rU; rG; rG; rG; rC; rG; rC; rC; rC; rA; rC; rC; rC; rC; rG; rA; |
| | | rG; rU; rU; rU; rU; rA; rG; rA; rG; rC; rU; rA; rG; rA; rA; rA; rU; rA; rG; rC; rA; |
| | | rA; rG; rU; rU; rA; rA; rA; rA; rU; rA; rA; rG; rG; rC; rU; rA; rG; rU; rC; rC; rG; |
| | | rU; rU; rA; rU; rC; rA; rA; rC; rU; rU; rG; rA; rA; rA; rA; rA; rG; rU; rG; rG; rC; |
| | | rA; rC; rC; rG; rA; rG; rU; rC; rG; rG; rU; rG; rC; rUs; mUs; mUs; mU |
| GD-28439 | 76 | mUs; mUs; mCs; rU; rC; rC; rC; rU; rG; rC; rC; rU; rC; rC; rA; rC; rG; rC; rC; rG; |
| | | rG; rU; rU; rU; rU; rA; rG; rA; rG; rC; rU; rA; rG; rA; rA; rA; rU; rA; rG; rC; rA; |
| | | rA; rG; rU; rU; rA; rA; rA; rA; rU; rA; rA; rG; rG; rC; rU; rA; rG; rU; rC; rC; rG; |
| | | rU; rU; rA; rU; rC; rA; rA; rC; rU; rU; rG; rA; rA; rA; rA; rA; rG; rU; rG; rG; rC; |
| | | rA; rC; rC; rG; rA; rG; rU; rC; rG; rG; rU; rG; rC; rUs; mUs; mUs; mU |

TABLE 3
Site-Specific HNF4α Promoter 2 Targeting Moieties (sgRNA) - The first 20
nucleotides in each moiety below comprise the targeting portion of the moiety.

| | SEQ | |
|---|---|---|
| | ID | |
| Identifier | NO. | Modified Nucleotide Sequence 5′ to 3′ |
| GD28427 | 77 | mAs; mUs; mGs; rC; rC; rC; rC; rC; rA; rG; rC; rU; rC; rU; rC; rC; rG; rG; rC; rU; |
| | | rG; rU; rU; rU; rU; rA; rG; rA; rG; rC; rU; rA; rG; rA; rA; rA; rU; rA; rG; rC; rA; |
| | | rA; rG; rU; rU; rA; rA; rA; rA; rU; rA; rA; rG; rG; rC; rU; rA; rG; rU; rC; rC; rG; |
| | | rU; rU; rA; rU; rC; rA; rA; rC; rU; rU; rG; rA; rA; rA; rA; rA; rG; rU; rG; rG; rC; |
| | | rA; rC; rC; rG; rA; rG; rU; rC; rG; rG; rU; rG; rC; rUs; mUs; mUs; mU |
| GD28428 | 78 | mCs; mAs; mGs; rC; rG; rU; rG; rA; rA; rC; rG; rC; rG; rC; rC; rC; rC; rU; rC; rG; |
| | | rG; rU; rU; rU; rU; rA; rG; rA; rG; rC; rU; rA; rG; rA; rA; rA; rU; rA; rG; rC; rA; |
| | | rA; rG; rU; rU; rA; rA; rA; rA; rU; rA; rA; rG; rG; rC; rU; rA; rG; rU; rC; rC; rG; |
| | | rU; rU; rA; rU; rC; rA; rA; rC; rU; rU; rG; rA; rA; rA; rA; rA; rG; rU; rG; rG; rC; |
| | | rA; rC; rC; rG; rA; rG; rU; rC; rG; rG; rU; rG; rC; rUs; mUs; mUs; mU |
| GD28429 | 79 | mCs; mUs; mUs; rA; rC; rG; rG; rU; rA; rA; rG; rU; rG; rG; rG; rG; rC; rU; rG; rG; |
| | | rG; rU; rU; rU; rU; rA; rG; rA; rG; rC; rU; rA; rG; rA; rA; rA; rU; rA; rG; rC; rA; |
| | | rA; rG; rU; rU; rA; rA; rA; rA; rU; rA; rA; rG; rG; rC; rU; rA; rG; rU; rC; rC; rG; |
| | | rU; rU; rA; rU; rC; rA; rA; rC; rU; rU; rG; rA; rA; rA; rA; rA; rG; rU; rG; rG; rC; |
| | | rA; rC; rC; rG; rA; rG; rU; rC; rG; rG; rU; rG; rC; rUs; mUs; mUs; mU |
| GD28430 | 80 | mCs; mCs; mCs; rG; rU; rA; rA; rG; rA; rA; rA; rC; rA; rC; rA; rC; rG; rG; rG; rG; rG; |
| | | rU; rU; rU; rU; rA; rG; rA; rG; rC; rU; rA; rG; rA; rA; rA; rU; rA; rG; rC; rA; rA; |
| | | rG; rU; rU; rA; rA; rA; rA; rU; rA; rA; rG; rG; rC; rU; rA; rG; rU; rC; rC; rG; rU; |
| | | rU; rA; rU; rC; rA; rA; rC; rU; rU; rG; rA; rA; rA; rA; rA; rG; rU; rG; rG; rC; rA; |
| | | rC; rC; rG; rA; rG; rU; rC; rG; rG; rU; rG; rC; rUs; mUs; mUs; mU |
| GD28431 | 68 | mAs; mUs; mUs; rG; rA; rA; rU; rU; rA; rG; rG; rG; rG; rA; |
| | | rU; rC; rU; rC; rG; rG; rG; rU; rU; rU; rU; rA; rG; rA; rG; rC; rU; rA; rG; rA; rA; |
| | | rA; rU; rA; rG; rC; rA; rA; rG; rU; rU; rA; rA; rA; rA; rU; rA; rA; rG; rG; rC; rU; |
| | | rA; rG; rU; rC; rC; rG; rU; rU; rA; rU; rC; rA; rA; rC; rU; rU; rG; rA; rA; rA; rA; |
| | | rA; rG; rU; rG; rG; rC; rA; rC; rC; rG; rA; rG; rU; rC; rG; rG; rU; rG; rC; rUs; |
| | | mUs; mUs; mU |

TABLE 4
Unmodified Nucleotide Sequences of the Targeting Portion of the Site-Specific HNF4α
Targeting Moieties in Tables 2 and 3.

| | SEQ | | SEQ | | |
|---|---|---|---|---|---|
| | ID | Unmodified Nucleotide Sequence | ID | Reverse Complement Nucleotide | Chromosomal |
| Identifier | NO. | 5′ to 3′ | NO. | Sequence 5′ to 3′ | Coordinates |
| GD-28427 | 329 | ATGCCCCCAGCTCTCCGGCT | 335 | AGCCGGAGAGCTGGGGGCAT | chr20: 42984411- |
| | | | | | 42984433 |
| GD-28428 | 330 | CAGCGTGAACGCGCCCCTCG | 336 | CGAGGGGCGCGTTCACGCTG | chr20: 42984450- |
| | | | | | 42984472 |
| GD-28429 | 331 | CTTACGGTAAGTGGGGCTGG | 337 | CCAGCCCCACTTACCGTAAG | chr20: 42984488- |
| | | | | | 42984510 |
| GD-28430 | 332 | CCCGTAAGAAACACACGGGG | 338 | CCCCGTGTGTTTCTTACGGG | chr20: 42984560- |
| | | | | | 42984582 |
| GD-28431 | 333 | ATTGAATTAGGGGATCTCGG | 339 | CCGAGATCCCCTAATTCAAT | chr20: 43029535- |
| | | | | | 43029557 |
| GD-28432 | 334 | GACTTGGGGTGACAATGGCT | 340 | AGCCATTGTCACCCCAAGTC | chr20: 43029596- |
| | | | | | 43029618 |
| GD-28433 | 81 | AACTGAACATCGGTGAGTTA | 82 | TAACTCACCGATGTTCAGTT | chr20: 43029685- |
| | | | | | 43029707 |
| GD-28434 | 83 | TGGTTTCTGGCTGACACCCG | 84 | CGGGTGTCAGCCAGAAACCA | chr20: 43029729- |
| | | | | | 43029751 |
| GD-28435 | 85 | ATGGTTAATCGGTCCCCCGC | 86 | GCGGGGGACCGATTAACCAT | chr20: 43029792- |
| | | | | | 43029814 |
| GD-28436 | 87 | GTCCTCTGGGAAGATCTGCT | 88 | AGCAGATCTTCCCAGAGGAC | chr20: 43029873- |
| | | | | | 43029895 |
| GD-28437 | 89 | GGTTTGAAAGGAAGGCAGAG | 90 | CTCTGCCTTCCTTTCAAACC | chr20: 43029896- |
| | | | | | 43029918 |
| GD-28438 | 91 | ACCCTGGGCGCCCACCCCGA | 92 | TCGGGGTGGGCGCCCAGGGT | chr20: 43029957- |
| | | | | | 43029979 |
| GD-28439 | 93 | TTCTCCCTGCCTCCACGCCG | 94 | CGGCGTGGAGGCAGGGAGAA | chr20: 43029991- |
| | | | | | 43030013 |

TABLE 5
Abbreviations of nucleotide monomers used in nucleic
acid sequence representation. It will be understood
that these monomers, when present in an oligonucleotide,
are mutually linked by 5′-3′- phosphodiester bonds.

| Abbreviation | Nucleotide(s) |
|---|---|
| A | Adenosine-3′-phosphate |
| As | adenosine-3′-phosphorothioate |
| C | cytidine-3′-phosphate |
| Cs | cytidine-3′-phosphorothioate |
| G | guanosine-3′-phosphate |
| Gs | guanosine-3′-phosphorothioate |
| U | Uridine-3′-phosphate |
| Us | uridine-3′-phosphorothioate |
| N | any nucleotide, modified or unmodified |
| mA | 2′-O-methyladenosine-3′-phosphate |
| mAs | 2′-O-methyladenosine-3′-phosphorothioate |
| mC | 2′-O-methylcytidine-3′-phosphate |
| mCs | 2′-O-methylcytidine-3′- phosphorothioate |
| mG | 2′-O-methylguanosine-3′-phosphate |
| mGs | 2′-O-methylguanosine-3′- phosphorothioate |
| mU | 2′-O-methyluridine-3′-phosphate |
| mUs | 2′-O-methyluridine-3′-phosphorothioate |
| s | phosphorothioate linkage |
| r | ribonucleotide |

### Example 3. Design of Zinc Finger DNA Binding Domain and TALE Fusion Protein

[0523] As described in Examples 1 and 2, the sites of effective activation of HNF4α gene expression were identified using dCas9 fusion proteins and guides directed to specific nucleotide regions 5′ of promoter 1 of the HNF4α gene. Based on these data, Zinc Finger DNA binding domain polypeptides (ZF) and TALE polypeptides were designed to target the same or similar sequence regions 5′ of promoter 1 of the HNF4α gene. FIG. 9 depicts the target areas for design of the exemplary ZF proteins and TALE proteins of the inventions.

[0524] FIG. 10 depicts the structure of the exemplary site-specific HNF4α disrupting agent, comprising a site-specific HNF4α targeting moiety which targets an HNF4α expression control region, e.g., a zing finger (ZF) or a TALE, and an effector comprising, e.g., VPR (e.g., ZF-VPR or TALE-VPR fusion proteins) of the invention. As shown in FIG. 10, an exemplary ZF-VPR protein may include one or more nuclear localization signals (NLS), such as SV40 NLS or nucleoplasmin NLS. In some embodiments, the NLSs are located at the N-terminus, between the VP64 and RelA (p65) activation domain (VPR), and at the C-terminus.

[0525] In some embodiments, the mRNAs encoding the ZF fusion protein or the TAL fusion proteins, may contain a “natural cap” structure at the 5′-terminus, e.g., the mRNAs may be cap0 (no methyl), cap1 (methyl on first ribose), cap2 (methyl on second ribose).

[0526] Downstream of the cap is a 5′ untranslated region (UTR), a sequence which is designed to promote high levels of protein translation. Downstream of the 5′ UTR is the coding sequence, 3′ UTR and the polyA tail.

[0527] An exemplary nucleotide sequence of a 5′ UTR for use in the constructs is

(SEQ ID NO.: 341)
AGGAAAUAAGAGAGAAAAGAAGAGUAAGAAGAAAUAUAAGAGCCACC.

[0528] An exemplary nucleotide sequence of a 3′ UTR for use in the constructs is

(SEQ ID NO.: 342)
CUCUCCCUUGCACCUGUACCUCUUGGUCUUUGAAUAAAGCCUGAGUAGGA
AGUCUAG

[0529] An exemplary nucleotide sequence of a poly-A tail for use in the constructs is

(SEQ ID NO.: 343)
AAAAAAAAAAAAAAAAAAAAAAAAAAAAAAAAAAAAAAAAAAAAAAAAAA
AAAAAAAAAAAAAAAAAAAAAAAAAAAA

[0530] The mRNAs encoding the ZF fusion proteins or the TALE fusion proteins may be complexed with a lipid nanoparticle (e.g., MC3). The ZF domains of the fusion proteins are targeted to P1 of HNF4α, which controls the transcription of the isoforms of HNF4α expressed primarily in the liver.

[0531] Tables 6A and 6B below provide the amino acid sequences of various exemplary fusion protein constructs, the corresponding encoding mRNA sequences, the target genomic sequences thereof, and the amino acid sequences of the DNA binding domains for use in the disrupting agents of the constructs.

TABLE 6A

| | | | | | Column 6 | Column 7 |
|---|---|---|---|---|---|---|
| | | | Column 4 | Column 5 | Nucleotide | Genomic Coordinates of |
| | | | Sequence of | Amino Acid | Sequence | the Target Site in the |
| Column 1 | Column 2 | Column 3 | Target | Sequence of the | of the | HNF4α Expression |
| Exemplary HNF4α | Amino Acid | Nucleotide | Site in HNF4α | DNA Binding | DNA Binding | Control Region |
| Disrupting Agents | Sequence of the | Sequence of | Expression Control | Domain of the | Domain of the | (Genome Reference |
| Comprising a Zinc | Disrupting | the Disrupting | Region Targeted by | Disrupting | Disrupting | Consortium |
| Finger DNA Binding | Agent in | Agents in | the Disrupting | Agent in | Agent in | Human Build |
| Domain and an Effector | Column 1 | Column 1 | Agents in Column 1 | Column 1 | Column 1 | 37 (GRCh37): |
| Name | (SEQ ID NO:) | (SEQ ID NO). | (SEQ ID NO.) | (SEQ ID NO.) | (SEQ ID NO.) | Chromosome 20) |
| ZF1-VPR | 100 | 101 | 102 | 103 | 211 | GrCh37: chr20:43029991- |
| | | | | | | 43030011 |
| ZF2-VPR | 104 | 105 | 106 | 107 | 212 | GrCh37: chr20:43029959- |
| | | | | | | 43029979 |
| ZF3-VPR | 108 | 109 | 110 | 111 | 213 | GrCh37: chr20:43029897- |
| | | | | | | 43029917 |
| ZF4-VPR | 112 | 113 | 114 | 115 | 214 | GrCh37: chr20:43029874- |
| | | | | | | 43029894 |
| ZF5-VPR | 116 | 117 | 118 | 119 | 215 | GRCh37: chr20:43029794- |
| | | | | | | 43029814 |
| ZF6-VPR | 120 | 121 | 122 | 123 | 216 | CRCh37: chr20:43029731- |
| | | | | | | 43029751 |
| ZF7-VPR | 124 | 125 | 126 | 127 | 217 | GRCh37: chr20:43029686- |
| | | | | | | 43029706 |
| ZF8-VPR | 128 | 129 | 130 | 131 | 218 | GrCh37: chr20:43029598- |
| | | | | | | 43029618 |
| ZF9-VPR | 132 | 133 | 134 | 135 | 219 | GrCh37: chr20:43029536- |
| | | | | | | 43029558 |
| ZF10-VPR | 136 | 137 | 138 | 139 | 220 | GrCh37: chr20:43029767- |
| | | | | | | 43029787 |
| ZF11-VPR | 140 | 141 | 142 | 143 | 221 | GrCh37: chr20:43029820- |
| | | | | | | 43029840 |
| ZF12-VPR | 144 | 145 | 146 | 147 | 222 | GrCh37: chr20:43029855- |
| | | | | | | 43029875 |
| ZF13-VPR | 148 | 149 | 150 | 151 | 223 | GrCh37: chr20:43029766- |
| | | | | | | 43029786 |
| ZF14-VPR | 152 | 153 | 154 | 155 | 224 | GRCh37: chr20:43029810- |
| | | | | | | 43029830 |
| ZF15-VPR | 156 | 157 | 158 | 159 | 225 | GRCh37: chr20:43029832- |
| | | | | | | 43029852 |
| ZF5-VPR ATUM Opt_1 | 116 | 160 | 118 | 119 | 226 | GRCh37: chr20:43029794- |
| (ZF5.1-VPR) | | | | | | 43029814 |
| ZF5-VPR ATUM Opt_2 | 116 | 161 | 118 | 119 | 227 | GRCh37: chr20:43029794- |
| (ZF5.2-VPR) | | | | | | 43029814 |
| ZF5-VPR ATUM Opt_3 | 116 | 162 | 118 | 119 | 228 | GRCh37: chr20:43029794- |
| (ZF5.3-VPR) | | | | | | 43029814 |
| ZF5-VPR ATUM Opt_4 | 116 | 163 | 118 | 119 | 229 | GRCh37: chr20:43029794- |
| (ZF5.4-VPR) | | | | | | 43029814 |
| ZF5-VPR ATUM Opt_5 | 116 | 164 | 118 | 119 | 230 | GRCh37: chr20:43029794- |
| (ZF5.5-VPR) | | | | | | 43029814 |
| ZF5-VPR ATUM Opt_6 | 116 | 165 | 118 | 119 | 231 | GRCh37: chr20:43029794- |
| (ZF5.6-VPR) | | | | | | 43029814 |
| ZF5-P300 | 166 | 167 | 118 | 119 | 232 | GRCh37: chr20:43029794- |
| | | | | | | 43029814 |
| ZF5-VPR + ZF7-VPR | 116 + 124 | 117 + 125 | 118 + 126 | 119 + 127 | 215 + 217 | GRCh37: chr20:43029794- |
| | | | | | | 43029814 |
| | | | | | | GRCh37: chr20:43029686- |
| | | | | | | 43029706 |
| ZF5-VPR ATUMOpt_3 + | 116 + 124 | 162 + 125 | 118 + 126 | 119 + 127 | 228 + 217 | GRCh37: chr20:43029794- |
| ZF7-VPR | | | | | | 43029814 |
| | | | | | | GRCh37: chr20:43029686- |
| | | | | | | 43029706 |
| ZF7-P300 | 168 | 169 | 126 | 127 | 233 | GRCh37: chr20:43029686- |
| | | | | | | 43029706 |
| ZF5.3-VPR3 | 170 | 171 | 118 | 119 | 234 | GRCh37: chr20:43029794- |
| | | | | | | 43029814 |
| ZF5-no effector | 174 | 175 | 118 | 119 | 235 | GRCh37: chr20:43029794- |
| | | | | | | 43029814 |
| ZF5.3-VPR-tPT2a-ZF7- | 176 | 177 | 118 + 126 | 119 + 127 | 236 + 237 | GRCh37: chr20:43029794- |
| VPR | | | | | | 43029814 |
| | | | | | | GRCh37: chr20:43029686- |
| | | | | | | 43029706 |
| ZF7-VPR-tPT2a-ZF5.3- | 178 | 179 | 126 + 118 | 127 + 119 | 238 + 239 | GRCh37: chr20:43029686- |
| VPR | | | | | | 43029706 |
| | | | | | | GRCh37: chr20:43029794- |
| | | | | | | 43029814 |
| ZF5.3-VPR-tPT2a-ZF7- | 180 | 181 | 118 + 126 | 119 + 127 | 240 + 241 | GRCh37: chr20:43029794- |
| p300 | | | | | | 43029814 |
| | | | | | | GRCh37: chr20:43029686- |
| | | | | | | 43029706 |
| ZF7-p300-tPT2a-ZF5.3- | 182 | 183 | 126 + 118 | 127 + 119 | 242 + 243 | GRCh37: chr20:43029686- |
| VPR | | | | | | 43029706 |
| | | | | | | GRCh37: chr20:43029794- |
| | | | | | | 43029814 |
| TAL1-VPR | 184 | 185 | 102 | 186 | 244 | GrCh37: chr20:43029991- |
| | | | | | | 43030011 |
| TAL2-VPR | 187 | 188 | 106 | 189 | 245 | GrCh37: chr20:43029959- |
| | | | | | | 43029979 |
| TAL3-VPR | 190 | 191 | 110 | 192 | 246 | GrCh37: chr20:43029897- |
| | | | | | | 43029917 |
| TAL4-VPR | 193 | 194 | 114 | 195 | 247 | GrCh37: chr20:43029874- |
| | | | | | | 43029894 |
| TAL5-VPR | 196 | 197 | 118 | 198 | 248 | GRCh37: chr20:43029794- |
| | | | | | | 43029814 |
| TAL6-VPR | 199 | 200 | 122 | 201 | 249 | CRCh37: chr20:43029731- |
| | | | | | | 43029751 |
| TAL7-VPR | 202 | 203 | 126 | 204 | 250 | GRCh37: chr20:43029686- |
| | | | | | | 43029706 |
| TAL8-VPR | 205 | 206 | 130 | 207 | 251 | GrCh37: chr20:43029598- |
| | | | | | | 43029618 |
| TAL9-VPR | 208 | 209 | 134 | 210 | 252 | GrCh37: chr20:43029536- |
| | | | | | | 43029558 |

TABLE 6B

| Column 1 | | | Column 4 |
|---|---|---|---|
| Exemplary Effector | Column 2 | Column 3 | Amino acid Sequence of |
| Fusion Protein of | Amino acid sequence of | Nucleotide sequence of | DNA Binding Domain |
| Exemplary HNF4α | the Effector Fusion | the Effector Fusion | of the Effector Fusion |
| Disrupting Agents | Protein in Column 1 | Protein in Column 1 | Protein in Column 1 |
| Name | (SEQ ID NO:) | (SEQ ID NO:) | (SEQ ID NO:) |
| dCas9-VPR | 95 | 96 | 97 |
| dCas9-P300 | 98 | 99 | 97 |
| dCas9-VPR3 | 172 | 173 | 97 |

### Example 4. Modulation of HNF4α Expression by ZF-Fusion Proteins

[0532] In order to test a single mRNA encoding a site-specific HNF4α disrupting agent, comprising a site-specific HNF4α targeting moiety which targets an HNF4α expression control region, e.g., a zing finger (ZF), and an effector comprising, e.g., VPR, (ZF-VPR fusion proteins), rather than dCas9-effector fusions with pooled sgRNAs, Zinc Finger DNA Binding Domain (DBD)-VPR (ZF-VPR) fusion proteins were designed as described above. Such fusion proteins which bind sites similar to or identical to the P1 targeting guide RNAs described in Examples 1 and 2 were evaluated for their ability to effect expression of HNF4α in vitro.

[0533] Several mRNAs encoding fusion proteins comprising a ZF DBD and a VPR domain were constructed (see Table 6A). Individual and pooled fusion protein encoding mRNAs were delivered to LX-2 cells as MC3 LNP formulations as described above. Expression of HNF4α was measured by qPCR as described above. Untreated HepG2 and dCas9-VPR-Pool 1 were included as positive controls.

[0534] As shown in FIG. 11, it was found that ZF005-VPR (also referred to as ZF5-VPR) showed robust upregulation of HNF4α. ZF007-VPR (also referred to as ZF7-VPR) also showed a quantifiable upregulation.

### Example 5. Modulation of HNF4α Expression by TALE-Fusion Proteins

[0535] In a further effort to use a single mRNA coding a site-specific HNF4α disrupting agent, comprising a site-specific HNF4α targeting moiety which targets an HNF4α expression control region, e.g., a Talen based DNA Binding Domain (DBD), and an effector comprising, e.g., VPR, (TAL-VPR fusion proteins), were designed. Such fusion proteins which bind sites similar to or identical to the P1 targeting guide RNAs described in Examples 1 and 2 were evaluated for their ability to effect expression of HNF4α in vitro.

[0536] Several mRNAs encoding fusion proteins of a TALEN DBD with a VPR domain were constructed (see Table 6A). Individual and pooled fusion protein encoding mRNAs were delivered to LX-2 cells as MC3 LNP formulations as described above. Expression of HNF4α was measured by qPCR as described above. Untreated HepG2 and dCas9-VPR-Pool 1 were included a positive controls. ZF5-VPR and ZF7-VPR were also included in the study as comparators.

[0537] Table 7 below shows the experiment design for the pooled TAL-VPR experiments.

TABLE 7

| | | |
|---|---|---|
| TAL1-VPR | Pool X | Pools are made by mixing 1:1:1 |
| TAL2-VPR | | of each TAL fusion protein. |
| TAL3-VPR | | |
| TAL4-VPR | Pool Y | |
| TAL5-VPR | | |
| TAL6-VPR | | |
| TAL7-VPR | Pool Z | |
| TAL8-VPR | | |
| Unrelated domain-VPR | | |

[0538] As shown in FIG. 12, it was found that pooled TALE based-VPR fusion proteins showed strong up-regulation of HNF4α expression Individually, each TAL-VPR fusion protein did not have significant activity to up-regulate the expression of HNF4α (data not shown). This Figure also demonstrates that the results described above for ZF5-VPR and Z7-VPR were reproducible.

### Example 6. Modulation of HNF4α Expression with Codon Optimized ZF5-VPR and Synergy of the Combination of ZF5-VPR and ZF7-VPR in LX-2 Cells

[0539] In this example, activation of HNF4α in LX-2 cells with codon optimized ZF5-VPR fusion proteins was evaluated. The objective was to analyze whether codon optimization of ZF5-VPR would improve activity of the ZF5-VPR fusion proteins at the HNF4α promoter. Another objective was to analyze whether the combination of ZF5-VPR and ZF7-VPR fusion proteins was synergistic in activating HNF4α expression.

[0540] The sequence for ZF5-VPR fusion proteins were sent to ATUM for codon optimization, a process that uses al algorithm to re-design ideal codon frequency and context to optimize translational efficiency. ATUM returned 6 new variants which all encode the same protein, each with different RNA sequences. (see Table 6A).

[0541] mRNAs for all five ATUM codon optimized ZF5-VPR, unaltered ZF5-VPR and ZF7-VPR were transfected into LX-2 cells as MC3 LNPs. Expression of HNF4α was measured by qPCR 48 hours after transfection.

[0542] As shown in FIG. 13, ZF-5-VPR ATUM codon otpimized variant 3 (ZF5.3-VPR) showed stronger upregulation of HNF4α expression as compared to the other codon-optimized variants. Co-transfecting ZF5-VPR and ZF7-VPR led to a supraphysiological (>200%) increase in expression of HNF4α, demonstrating synergy of the combination of these two fusion proteins. (In FIG. 13, Pool 1 is dCas9-VPR+GD-28431+GD-28432+GD-28433; Pool 2 is dCas9-VPR+GD-28434+GD-28435+GD-28436).

### Example 7. Durability of Modulation of HNF4α Expression in K562 Cells

[0543] This example identified the effectors (VPR and/or P300) that was able to induce the longest lasting up-regulation of HNF4α expression. The example also measures how long the up-regulation of HNF4α in K562 could last when treated with various ZF-effector fusion proteins and various combinations of ZF-effector fusion proteins.

[0544] Various individual mRNAs encoding ZF-effector fusion proteins and combinations of the mRNAs were transfected into K562 cells and allowed to grow for 10 days in culture.

[0545] The following individual fusion proteins and combinations were tested in K562 cells, transfected with MC3 LNPs: ZF5-VPR, ZF5-P300, a combination of ZF5-VPR and ZF5-P300, or a combination of ZF5-VPR and ZF7-VPR (see Table 6A).

[0546] Transfections and quantifications were performed as described above. Briefly, untreated K562 cells were included as an assay control. K562 cells were treated with individual and different combination of effectors (2.5 μg/mL) in triplicate. Data points were collected over a period of 10 days. qPCR readout was used to measure mRNA expression. K562 cells were seeded at 100 k/well in triplicates: Time points were collected every 2 days for a total of 10 days. Three wells of untreated K562 were included as a control. RT qPCR for HNF4α was performed to measure the expression of HNF4α at each time point for similarly treated LX-2 cells.

[0547] As shown in FIGS. 14 and 15, HNF4α expression upregulation was observed in K562 cell until day 6 when any of the single fusion proteins or combinations of the fusion proteins were transfected. Co-transfection with mRNAs encoding ZF5-VPR and ZF7-VPR led to the highest and most durable increase of HNF4α expression in cultured cells, with detectable expression out to 10 days.

[0548] In another experiment, the durability of up-regulation of HNF4α expression in K562 when treated with ZF-5-VPR, ZF-5-P300, a combination of ZF5-VPR-ATUM 3 and ZF7-VPR (also referred to as ZF (5.3+7) or a combination of ZF5-PR and ZF7-VPR (also referred to as ZF-(5+7)-VPR) was determined.

[0549] K562 cells were treated with individual and different combination of effectors (2.5 ug/mL) in triplicate. Time points were collected over a period of 10 days. qPCR readout was used to measure mRNA expression. K562 cells were seeded at 100 k/well in triplicates: Time points were collected every 2 days for a total of 10 days. Three wells of untreated K562 were included as a control. RT qPCR was performed to measure the expression of HNF4α at each time point. Fusion protein were formulated in MC3 LNPs.

[0550] As shown in FIG. 16, HNF4α upregulation was observed in K562 cell until day 6 using both combinations of ZF5-VPR and ZF7-VPR and ZF5.3-VPR and ZF7-VPR. Both combinations of ZF5-VPR and ZF7-VPR and ZF5.3-VPR and ZF7-VPR showed slight upregulation at day 8 and 10.

### Example 8. Modulation of Biomarker Genes Expression Following Activation of HNF4α in LX-2 Cells

[0551] The first experiment of this example demonstrates the change in expression level of downstream biomarker genes following activation of HNF4α in LX-2 Cells. The objective of this experiment was to demonstrate that the HNF4α induced by dCas9-VPR in LX-2 cells is an active transcription factor by examining the effect of upregulating HNF4α expression on the expression of two downstream gene Cola1 and aSMA. Collagen 1a1 (Col1a1), and alpha-Smooth Muscle Actin (aSMA) are 2 proteins highly expressed in damaged liver cells and are key drivers of fibrosis in end-stage liver disease. Both of these genes are negatively-regulated by HNF4α.

[0552] LX-2 cells, which highly express Col1a1 and aSMA, were transfected with dCas-VPR-Pool 1 as described above, followed by qPCR measurement of HNF4A, Col1a1, and aSMA.

[0553] As shown in FIG. 17, upregulation of HNF4α significantly down-regulated expression of Col1a1 and aSMA.

[0554] The second experiment of this example demonstrates that the ZF-VPR fusion proteins also down-regulate expression of Col1a1 and aSMA, biomarkers of fibrotic liver disease.

[0555] As shown in FIG. 18, biomarkers of fibrotic liver disease. Cola1 and aSMA, were down-regulated in LX-2 cells following up-regulation of HNF4α with ZF5.3-VPR, a combination of ZF5-VPR and ZF7-VPR or a combination of ZF5.3-VPR and ZF7-VPR.

### Example 9. Screening of Additional ZF-VPR Fusion Proteins and Combinations Thereof and Assessment of dCas9-VPR3

[0556] This example demonstrates that, in addition to the nine ZF-VPR proteins tested in Example 4, other ZF-VPR fusion proteins and various combinations thereof can upregulate the expression of HNF4α in LX-2 cells.

[0557] In the first experiment, fusion proteins were screened in LX-2 cells. Untreated Hep G2 cells were included as an assay control. LX-2 cells was treated with a single concentration of effector (2.5 μg/mL) in triplicate and incubated for 48 hours. ZF-5-VPR was used as a positive control for qPCR readout. LX-2 cells were transfected as described above using MC3-LNP formulations. The mRNAs encoding the following ZF-VPR fusion proteins and various combinations were transferred: ZF5-VPR, ZF5-VPR-ATUM3 (ZF5.3-VPR), ZF-7-VPR, ZF-11-VPR, ZF-13-VPR, and ZF-15-VPR, or combinations thereof.

[0558] As shown in FIG. 19, stronger upregulation was observed when ZF5-VPR or ZF5.3-VPR were combined with ZF7-VPR. ZF7-VPR alone upregulated HNF4α in LX-2 cells to a low level.

[0559] In the second experiment, activation of HNF4α using dCas9-VPR3-Pool 1 or ZF-VPR fusion protein combinations was assessed. The objective was to evaluate the effects of various ZF-VPR fusion proteins in combinations in LX-2 Cells and test the new effector dCas9-VPR3 on LX-2 cells. VPR3 is a dCas9 DNA binding domain fused to 3 consecutive VPR domains in a row, expressed as a single protein. The combinations of ZF5.3-VPR and other ZF-VPRs that slightly upregulated the expression of HNF4α in LX-2 cells were tested for possible synergy. LX-2 cells were treated with a single concentration of effectors (2.5 ag/mL) in MC3 LNP formulations in triplicate for 48 hours. ZF-5-VPR was used as a positive control qPCR readout was used. The following combinations were tested: ZF5.3-VPR and ZF10-VPR, ZF5.3-VPR and ZF14-VPR, and ZF5.3-VPR and ZF15-VPR.

[0560] As shown in FIG. 20, dCas9-VPR3 Pool 1 upregulates HNF4α in LX-2 cells. ZF14-VPR and ZF15-VPR caused low upregulation of HNF4α when transfected individually. A strong synergistic upregulation (similar to the synergistic upregulation observed with ZF5.3-VPR+ZF7-VPR) was observed when ZF14-VPR or ZF15-VPR were in combination with ZF5.3-VPR.

### Example 10. HNF4α Activation in FRG-KO Mouse Liver Humanized Hepatocytes (Yecuris Human Hepatocytes)

[0561] Yecuris human hepatocytes are primary human hepatocytes ex-planted into an immunocompromised mouse, allowed to proliferate, and then harvested for in vitro tissue culture. Yecuris hepatocytes were obtained as a cell suspension and plated in 96-well format at 40K cells/well. Cells were treated with ZF fusion protein-MC3 LNPs for 24 hrs at two concentrations, 2.5 μg/ml and 1.25 μg/ml. HNF4α gene expression was measured at 48 hrs post treatment. ZF7.4-VPR was used instead of ZF7-VPR.

[0562] Yecuris cells were transfected with mRNAs encoding ZF5-VPR, ZF5.3-VPR, ZF7.4-VPR, ZF5.3-VPR3 (a ZF5.3 protein fused to 3 consecutive VPR domains in a row, expressed as a single protein), ZF7.4-VPR3, and ZF5-alone (with no VPR fused to ZF5).

[0563] As shown in FIG. 21, ZF5.3-VPR3 does not increase HNF4α gene expression compared to ZF5.3-VPR. An increase in HNF4α gene expression was observed with ZF7-VPR3 as compared to ZF7.4-VPR. As compared to the LX-2 cells, the ZF7-VPR constructs upregulate HNF4α to a greater level.

### Example 11. Activation of LX-2 Cells with Bicistronic ZF5.3-VPR and ZF7-VPR

[0564] This example evaluates whether ZF5.3-VPR (ZF5-VPR ATUM variant 3) and ZF7-VPR bicistronic constructs upregulate HNF4α in LX-2 cells to the same level as ZF5.3-VPR and ZF7-VPR when individually combined.

[0565] Untreated Hep G2 cells were included as an assay control. LX-2 cells were treated with a single concentration of the mRNAs encoding the fusion proteins (2.5 μg/mL) in triplicate. The combination of ZF5.3-VPR and ZF7-VPR was used as a positive control. qPCR readout was used to measure mRNA expression.

[0566] The following bicistronic mRNA constructs were tested: ZF5.3-VPR-tPT2A-ZF7-VPR, ZF7-ZF5.3-VPR-tPT2A-ZF7-p300, and ZF7-p300-tPT2A-ZF5.3-VPR (see Table 6A). tPT2A is a linker that covalently links a first fusion protein to a second fusion protein to generate a bicistronic fusion protein.

[0567] As shown in FIG. 22, the bicistronic mRNA ZF5.3-VPR-tPT2A-ZF7-VPR induced stronger upregulation of HNF4α in LX-2 cells than the other 3 bicistronic mRNAs tested.

### Example 12. Effect of Repeat Dosing of Yecuris Hepatocytes with VPR and p300 on HNF4α Gene Expression

[0568] This example describes the effect of delivering multiple doses of mRNA encoding ZF-effector fusion proteins to cells. The objective was to evaluate whether additive or synergistic upregulation of HNF4α can be achieved by multiple dosing.

[0569] Yecuris hepatocytes were plated at 64K cells/well. Cells were treated with the combination of ZF5.3-VPR and ZF7-VPR or ZF7-p300 via MC3 LNP formulations at a final concentration of 1.25 μg/ml. Bicistronic mRNAs ZF5.3-VPR-tPT2A-ZF7-VPR, ZF7-VPR-tPT2A-ZF5.3-VPR, ZF5.3-VPR-tPT2A-ZF7-p300, ZF7-p300-tPT2A-ZF5.3-VPR in MC3 LNP formulations were used to treat cells at a final concentration of 1.25 μg/ml.

[0570] The expression level of the HNF4α was measured at 48 hrs post last dose. The dosing and harvesting schedule followed in this experiment is provided in Table 8, below.

TABLE 8

| | Dose | Harvest |
|---|---|---|
| Day 0 | Dose 1 | |
| Day 1 | Media change | |
| Day 2 | | Harvest |
| Day 3 | Dose 2 | |
| Day 4 | Media change | |
| Day 5 | | Harvest |
| Day 6 | Dose 3 | |
| Day 7 | Media change | |
| Day 8 | | Harvest |

[0571] As shown in FIG. 23, repeated dosing of cells with MC3 LNP formulations containing mRNAs encoding ZF-effector fusion proteins resulted in an additive increase of expression of HNF4α. The combination of ZF5.3-VPR and ZF7-VPR was stronger than ZF7-p300 in its activation potential. In addition, and as shown in FIG. 24, bicistronic constructs increased HNF4α in Yecuris hepatocytes, with ZF7-p300-tPT2A-ZF5.3-VPR providing the strongest upregulation.

### Example 13: Activation of HNF4α in K562 Cells with Bi-Cistronic mRNA-10 Day Durability Study

[0572] This example describes the durability of the bicistronic constructs in K562 cells. K562 cells were treated with a single concentration of mRNAs encoding the fusion proteins in MC3 LNPs (2.5 μg/mL) in triplicate as described above.

[0573] The bicistronic mRNAs encoding the following constructs were tested: ZF5.3-VPR-tPT2A-ZF7-VPR, ZF7-VPR-tPT2A-ZF5.3-VPR, ZF5.3-VPR-tPT2A-ZF7-p300, ZF7-p300-tPT2A-ZF5.3-VPR.

[0574] As shown in FIG. 25, ZF7-p300-tPT2A-ZF5 (v3)-VPR showed better durability in K562 at later days as compared to other bicistronic constructs.

[0575] Table 9 below provides exemplary target nucleotide sequences and corresponding sgRNA nucleotide sequences suitable for use in the present invention.

TABLE 9

| Genomic Coordinates of | | | | | | |
|---|---|---|---|---|---|---|
| the Target Start Site in | | | | | | |
| Genome Reference Consortium | | | | | | |
| Human Build 37 (GRCh37): | | | | | sgRNA sequence | |
| Chromosome 20) | Strand | Target sequence | SEQ ID NO | PAM | [PLEASE ADVISE, NO “Us”] | SEQ ID NO |
| 43029193 | −1 | CCCTCACCCCCACCCCCTCC | 344 | CGG | CCCTCACCCCCACCCCCTCCGTTTTAGAGCTAGAAATAGCAAGTTA | 596 |
| | | | | | AAATAAGGCTAGTCCGTTATCAACTTGAAAAAGTGGCACCGAGTCG | |
| | | | | | GTGCTTTT | |
| 43029203 | 1 | TCCGGGAGGGGGTGGGGGTG | 345 | AGG | TCCGGGAGGGGGTGGGGGTGGTTTTAGAGCTAGAAATAGCAAGTTA | 597 |
| | | | | | AAATAAGGCTAGTCCGTTATCAACTTGAAAAAGTGGCACCGAGTCG | |
| | | | | | GTGCTTTT | |
| 43029204 | 1 | CCGGGAGGGGGTGGG | 346 | GGG | CCGGGAGGGGGTGGGGGTGAGTTTTAGAGCTAGAAATAGCAAGTTA | 598 |
| | | GGTGA | | | AAATAAGGCTAGTCCGTTATCAACTTGAAAAAGTGGCACCGAGTCG | |
| | | | | | GTGCTTTT | |
| 43029211 | 1 | GGGGTGGGGGTGAGG | 347 | AGG | GGGGTGGGGGTGAGGGAAACGTTTTAGAGCTAGAAATAGCAAGTTA | 599 |
| | | GAAAC | | | AAATAAGGCTAGTCCGTTATCAACTTGAAAAAGTGGCACCGAGTCG | |
| | | | | | GTGCTTTT | |
| 43029223 | 1 | AGGGAAACAGGAGAA | 348 | TGG | AGGGAAACAGGAGAATGTGAGTTTTAGAGCTAGAAATAGCAAGTTA | 600 |
| | | TGTGA | | | AAATAAGGCTAGTCCGTTATCAACTTGAAAAAGTGGCACCGAGTCG | |
| | | | | | GTGCTTTT | |
| 43029224 | 1 | GGGAAACAGGAGAAT | 349 | GGG | GGGAAACAGGAGAATGTGATGTTTTAGAGCTAGAAATAGCAAGTTA | 601 |
| | | GTGAT | | | AAATAAGGCTAGTCCGTTATCAACTTGAAAAAGTGGCACCGAGTCG | |
| | | | | | GTGCTTTT | |
| 43029238 | 1 | TGTGATGGGAAAATC | 350 | TGG | TGTGATGGGAAAATCCGAGAGTTTTAGAGCTAGAAATAGCAAGTTA | 602 |
| | | CGAGA | | | AAATAAGGCTAGTCCGTTATCAACTTGAAAAAGTGGCACCGAGTCG | |
| | | | | | GTGCTTTT | |
| 43029241 | −1 | GGCCCAGGCTGGCTC | 351 | CGG | GGCCCAGGCTGGCTCCATCTGTTTTAGAGCTAGAAATAGCAAGTTA | 603 |
| | | CATCT | | | AAATAAGGCTAGTCCGTTATCAACTTGAAAAAGTGGCACCGAGTCG | |
| | | | | | GTGCTTTT | |
| 43029249 | 1 | AATCCGAGATGGAGC | 352 | TGG | AATCCGAGATGGAGCCAGCCGTTTTAGAGCTAGAAATAGCAAGTTA | 604 |
| | | CAGCC | | | AAATAAGGCTAGTCCGTTATCAACTTGAAAAAGTGGCACCGAGTCG | |
| | | | | | GTGCTTTT | |
| 43029250 | 1 | ATCCGAGATGGAGCC | 353 | GGG | ATCCGAGATGGAGCCAGCCTGTTTTAGAGCTAGAAATAGCAAGTTA | 605 |
| | | AGCCT | | | AAATAAGGCTAGTCCGTTATCAACTTGAAAAAGTGGCACCGAGTCG | |
| | | | | | GTGCTTTT | |
| 43029252 | −1 | CCAGTGTTTCTGGCC | 354 | TGG | CCAGTGTTTCTGGCCCAGGCGTTTTAGAGCTAGAAATAGCAAGTTA | 606 |
| | | CAGGC | | | AAATAAGGCTAGTCCGTTATCAACTTGAAAAAGTGGCACCGAGTCG | |
| | | | | | GTGCTTTT | |
| 43029256 | −1 | GCTCCCAGTGTTTCT | 355 | AGG | GCTCCCAGTGTTTCTGGCCCGTTTTAGAGCTAGAAATAGCAAGTTA | 607 |
| | | GGCCC | | | AAATAAGGCTAGTCCGTTATCAACTTGAAAAAGTGGCACCGAGTCG | |
| | | | | | GTGCTTTT | |
| 43029262 | −1 | CCCACAGCTCCCAGT | 356 | TGG | CCCACAGCTCCCAGTGTTTCGTTTTAGAGCTAGAAATAGCAAGTTA | 608 |
| | | GTTTC | | | AAATAAGGCTAGTCCGTTATCAACTTGAAAAAGTGGCACCGAGTCG | |
| | | | | | GTGCTTTT | |
| 43029263 | 1 | CCAGCCTGGGCCAGA | 357 | TGG | CCAGCCTGGGCCAGAAACACGTTTTAGAGCTAGAAATAGCAAGTTA | 609 |
| | | AACAC | | | AAATAAGGCTAGTCCGTTATCAACTTGAAAAAGTGGCACCGAGTCG | |
| | | | | | GTGCTTTT | |
| 43029264 | 1 | CAGCCTGGGCCAGAA | 358 | GGG | CAGCCTGGGCCAGAAACACTGTTTTAGAGCTAGAAATAGCAAGTTA | 610 |
| | | ACACT | | | AAATAAGGCTAGTCCGTTATCAACTTGAAAAAGTGGCACCGAGTCG | |
| | | | | | GTGCTTTT | |
| 43029272 | 1 | GCCAGAAACACTGGG | 359 | TGG | GCCAGAAACACTGGGAGCTGGTTTTAGAGCTAGAAATAGCAAGTTA | 611 |
| | | AGCTG | | | AAATAAGGCTAGTCCGTTATCAACTTGAAAAAGTGGCACCGAGTCG | |
| | | | | | GTGCTTTT | |
| 43029273 | 1 | CCAGAAACACTGGGA | 360 | GGG | CCAGAAACACTGGGAGCTGTGTTTTAGAGCTAGAAATAGCAAGTTA | 612 |
| | | GCTGT | | | AAATAAGGCTAGTCCGTTATCAACTTGAAAAAGTGGCACCGAGTCG | |
| | | | | | GTGCTTTT | |
| 43029279 | 1 | ACACTGGGAGCTGTGGGAGA | 361 | CGG | ACACTGGGAGCTGTGGGAGAGTTTTAGAGCTAGAAATAGCAAGTTA | 613 |
| | | | | | AAATAAGGCTAGTCCGTTATCAACTTGAAAAAGTGGCACCGAGTCG | |
| | | | | | GTGCTTTT | |
| 43029284 | 1 | GGGAGCTGTGGGAGA | 362 | AGG | GGGAGCTGTGGGAGACGGAGGTTTTAGAGCTAGAAATAGCAAGTTA | 614 |
| | | CGGAG | | | AAATAAGGCTAGTCCGTTATCAACTTGAAAAAGTGGCACCGAGTCG | |
| | | | | | GTGCTTTT | |
| 43029285 | 1 | GGAGCTGTGGGAGAC | 363 | GGG | GGAGCTGTGGGAGACGGAGAGTTTTAGAGCTAGAAATAGCAAGTTA | 615 |
| | | GGAGA | | | AAATAAGGCTAGTCCGTTATCAACTTGAAAAAGTGGCACCGAGTCG | |
| | | | | | GTGCTTTT | |
| 43029286 | 1 | GAGCTGTGGGAGACG | 364 | GGG | GAGCTGTGGGAGACGGAGAGGTTTTAGAGCTAGAAATAGCAAGTTA | 616 |
| | | GAGAG | | | AAATAAGGCTAGTCCGTTATCAACTTGAAAAAGTGGCACCGAGTCG | |
| | | | | | GTGCTTTT | |
| 43029290 | 1 | TGTGGGAGACGGAGA | 365 | AGG | TGTGGGAGACGGAGAGGGGCGTTTTAGAGCTAGAAATAGCAAGTTA | 617 |
| | | GGGGC | | | AAATAAGGCTAGTCCGTTATCAACTTGAAAAAGTGGCACCGAGTCG | |
| | | | | | GTGCTTTT | |
| 43029291 | 1 | GTGGGAGACGGAGAG | 366 | GGG | GTGGGAGACGGAGAGGGGCAGTTTTAGAGCTAGAAATAGCAAGTTA | 618 |
| | | GGGCA | | | AAATAAGGCTAGTCCGTTATCAACTTGAAAAAGTGGCACCGAGTCG | |
| | | | | | GTGCTTTT | |
| 43029294 | 1 | GGAGACGGAGAGGGG | 367 | TGG | GGAGACGGAGAGGGGCAGGGGTTTTAGAGCTAGAAATAGCAAGTTA | 619 |
| | | CAGGG | | | AAATAAGGCTAGTCCGTTATCAACTTGAAAAAGTGGCACCGAGTCG | |
| | | | | | GTGCTTTT | |
| 43029295 | 1 | GAGACGGAGAGGGGC | 368 | GGG | GAGACGGAGAGGGGCAGGGTGTTTTAGAGCTAGAAATAGCAAGTTA | 620 |
| | | AGGGT | | | AAATAAGGCTAGTCCGTTATCAACTTGAAAAAGTGGCACCGAGTCG | |
| | | | | | GTGCTTTT | |
| 43029303 | 1 | GAGGGGCAGGGTGGG | 369 | AGG | GAGGGGCAGGGTGGGATCACGTTTTAGAGCTAGAAATAGCAAGTTA | 621 |
| | | ATCAC | | | AAATAAGGCTAGTCCGTTATCAACTTGAAAAAGTGGCACCGAGTCG | |
| | | | | | GTGCTTTT | |
| 43029304 | 1 | AGGGGCAGGGTGGGA | 370 | GGG | AGGGGCAGGGTGGGATCACAGTTTTAGAGCTAGAAATAGCAAGTTA | 622 |
| | | TCACA | | | AAATAAGGCTAGTCCGTTATCAACTTGAAAAAGTGGCACCGAGTCG | |
| | | | | | GTGCTTTT | |
| 43029310 | 1 | AGGGTGGGATCACAGGGAGC | 371 | AGG | AGGGTGGGATCACAGGGAGCGTTTTAGAGCTAGAAATAGCAAGTTA | 623 |
| | | | | | AAATAAGGCTAGTCCGTTATCAACTTGAAAAAGTGGCACCGAGTCG | |
| | | | | | GTGCTTTT | |
| 43029315 | 1 | GGGATCACAGGGAGC | 372 | CGG | GGGATCACAGGGAGCAGGAGGTTTTAGAGCTAGAAATAGCAAGTTA | 624 |
| | | AGGAG | | | AAATAAGGCTAGTCCGTTATCAACTTGAAAAAGTGGCACCGAGTCG | |
| | | | | | GTGCTTTT | |
| 43029316 | 1 | GGATCACAGGGAGCA | 373 | GGG | GGATCACAGGGAGCAGGAGCGTTTTAGAGCTAGAAATAGCAAGTTA | 625 |
| | | GGAGC | | | AAATAAGGCTAGTCCGTTATCAACTTGAAAAAGTGGCACCGAGTCG | |
| | | | | | GTGCTTTT | |
| 43029317 | 1 | GATCACAGGGAGCAG | 374 | GGG | GATCACAGGGAGCAGGAGCGGTTTTAGAGCTAGAAATAGCAAGTTA | 626 |
| | | GAGCG | | | AAATAAGGCTAGTCCGTTATCAACTTGAAAAAGTGGCACCGAGTCG | |
| | | | | | GTGCTTTT | |
| 43029323 | 1 | AGGGAGCAGGAGCGG | 375 | TGG | AGGGAGCAGGAGCGGGGAATGTTTTAGAGCTAGAAATAGCAAGTTA | 627 |
| | | GGAAT | | | AAATAAGGCTAGTCCGTTATCAACTTGAAAAAGTGGCACCGAGTCG | |
| | | | | | GTGCTTTT | |
| 43029326 | 1 | GAGCAGGAGCGGGGA | 376 | AGG | GAGCAGGAGCGGGGAATTGGGTTTTAGAGCTAGAAATAGCAAGTTA | 628 |
| | | ATTGG | | | AAATAAGGCTAGTCCGTTATCAACTTGAAAAAGTGGCACCGAGTCG | |
| | | | | | GTGCTTTT | |
| 43029335 | 1 | CGGGGAATTGGAGGT | 377 | TGG | CGGGGAATTGGAGGTGAATCGTTTTAGAGCTAGAAATAGCAAGTTA | 629 |
| | | | | | AAATAAGGCTAGTCCGTTATCAACTTGAAAAAGTGGCACCGAGTCG | |
| | | GAATC | | | GTGCTTTT | |
| 43029347 | −1 | AATGGACTGGAAGTT | 378 | GGG | AATGGACTGGAAGTTTGGGAGTTTTAGAGCTAGAAATAGCAAGTTA | 630 |
| | | TGGGA | | | AAATAAGGCTAGTCCGTTATCAACTTGAAAAAGTGGCACCGAGTCG | |
| | | | | | GTGCTTTT | |
| 43029348 | −1 | GAATGGACTGGAAGT | 379 | AGG | GAATGGACTGGAAGTTTGGGGTTTTAGAGCTAGAAATAGCAAGTTA | 631 |
| | | TTGGG | | | AAATAAGGCTAGTCCGTTATCAACTTGAAAAAGTGGCACCGAGTCG | |
| | | | | | GTGCTTTT | |
| 43029351 | −1 | GCAGAATGGACTGGA | 380 | GGG | GCAGAATGGACTGGAAGTTTGTTTTAGAGCTAGAAATAGCAAGTTA | 632 |
| | | AGTTT | | | AAATAAGGCTAGTCCGTTATCAACTTGAAAAAGTGGCACCGAGTCG | |
| | | | | | GTGCTTTT | |
| 43029352 | −1 | AGCAGAATGGACTGGAAGTT | 381 | TGG | AGCAGAATGGACTGGAAGTTGTTTTAGAGCTAGAAATAGCAAGTTA | 633 |
| | | | | | AAATAAGGCTAGTCCGTTATCAACTTGAAAAAGTGGCACCGAGTCG | |
| | | | | | GTGCTTTT | |
| 43029360 | −1 | CCCCTGGGAGCAGAA | 382 | TGG | CCCCTGGGAGCAGAATGGACGTTTTAGAGCTAGAAATAGCAAGTTA | 634 |
| | | TGGAC | | | AAATAAGGCTAGTCCGTTATCAACTTGAAAAAGTGGCACCGAGTCG | |
| | | | | | GTGCTTTT | |
| 43029365 | −1 | CGGTTCCCCTGGGAG | 383 | TGG | CGGTTCCCCTGGGAGCAGAAGTTTTAGAGCTAGAAATAGCAAGTTA | 635 |
| | | CAGAA | | | AAATAAGGCTAGTCCGTTATCAACTTGAAAAAGTGGCACCGAGTCG | |
| | | | | | GTGCTTTT | |
| 43029369 | 1 | TTCCAGTCCATTCTG | 384 | AGG | TTCCAGTCCATTCTGCTCCCGTTTTAGAGCTAGAAATAGCAAGTTA | 636 |
| | | CTCCC | | | AAATAAGGCTAGTCCGTTATCAACTTGAAAAAGTGGCACCGAGTCG | |
| | | | | | GTGCTTTT | |
| 43029370 | 1 | TCCAGTCCATTCTGC | 385 | GGG | TCCAGTCCATTCTGCTCCCAGTTTTAGAGCTAGAAATAGCAAGTTA | 637 |
| | | TCCCA | | | AAATAAGGCTAGTCCGTTATCAACTTGAAAAAGTGGCACCGAGTCG | |
| | | | | | GTGCTTTT | |
| 43029371 | 1 | CCAGTCCATTCTGCT | 386 | GGG | CCAGTCCATTCTGCTCCCAGGTTTTAGAGCTAGAAATAGCAAGTTA | 638 |
| | | CCCAG | | | AAATAAGGCTAGTCCGTTATCAACTTGAAAAAGTGGCACCGAGTCG | |
| | | | | | GTGCTTTT | |
| 43029375 | −1 | CGCAGTTTCCCGGTT | 387 | GGG | CGCAGTTTCCCGGTTCCCCTGTTTTAGAGCTAGAAATAGCAAGTTA | 639 |
| | | CCCCT | | | AAATAAGGCTAGTCCGTTATCAACTTGAAAAAGTGGCACCGAGTCG | |
| | | | | | GTGCTTTT | |
| 43029376 | −1 | CCGCAGTTTCCCGGT | 388 | TGG | CCGCAGTTTCCCGGTTCCCCGTTTTAGAGCTAGAAATAGCAAGTTA | 640 |
| | | TCCCC | | | AAATAAGGCTAGTCCGTTATCAACTTGAAAAAGTGGCACCGAGTCG | |
| | | | | | GTGCTTTT | |
| 43029377 | 1 | CATTCTGCTCCCAGG | 389 | CGG | CATTCTGCTCCCAGGGGAACGTTTTAGAGCTAGAAATAGCAAGTTA | 641 |
| | | GGAAC | | | AAATAAGGCTAGTCCGTTATCAACTTGAAAAAGTGGCACCGAGTCG | |
| | | | | | GTGCTTTT | |
| 43029378 | 1 | ATTCTGCTCCCAGGG | 390 | GGG | ATTCTGCTCCCAGGGGAACCGTTTTAGAGCTAGAAATAGCAAGTTA | 642 |
| | | GAACC | | | AAATAAGGCTAGTCCGTTATCAACTTGAAAAAGTGGCACCGAGTCG | |
| | | | | | GTGCTTTT | |
| 43029385 | −1 | CCAGTTCCCCCGCAG | 391 | CGG | CCAGTTCCCCCGCAGTTTCCGTTTTAGAGCTAGAAATAGCAAGTTA | 643 |
| | | TTTCC | | | AAATAAGGCTAGTCCGTTATCAACTTGAAAAAGTGGCACCGAGTCG | |
| | | | | | GTGCTTTT | |
| 43029387 | 1 | CCAGGGGAACCGGGA | 392 | CGG | CCAGGGGAACCGGGAAACTGGTTTTAGAGCTAGAAATAGCAAGTTA | 644 |
| | | AACTG | | | AAATAAGGCTAGTCCGTTATCAACTTGAAAAAGTGGCACCGAGTCG | |
| | | | | | GTGCTTTT | |
| 43029388 | 1 | CAGGGGAACCGGGAA | 393 | GGG | CAGGGGAACCGGGAAACTGCGTTTTAGAGCTAGAAATAGCAAGTTA | 645 |
| | | ACTGC | | | AAATAAGGCTAGTCCGTTATCAACTTGAAAAAGTGGCACCGAGTCG | |
| | | | | | GTGCTTTT | |
| 43029389 | 1 | AGGGGAACCGGGAAA | 394 | GGG | AGGGGAACCGGGAAACTGCGGTTTTAGAGCTAGAAATAGCAAGTTA | 646 |
| | | CTGCG | | | AAATAAGGCTAGTCCGTTATCAACTTGAAAAAGTGGCACCGAGTCG | |
| | | | | | GTGCTTTT | |
| 43029390 | 1 | GGGGAACCGGGAAAC | 395 | GGG | GGGGAACCGGGAAACTGCGGGTTTTAGAGCTAGAAATAGCAAGTTA | 647 |
| | | TGCGG | | | AAATAAGGCTAGTCCGTTATCAACTTGAAAAAGTGGCACCGAGTCG | |
| | | | | | GTGCTTTT | |
| 43029396 | 1 | CCGGGAAACTGCGGG | 396 | TGG | CCGGGAAACTGCGGGGGAACGTTTTAGAGCTAGAAATAGCAAGTTA | 648 |
| | | GGAAC | | | AAATAAGGCTAGTCCGTTATCAACTTGAAAAAGTGGCACCGAGTCG | |
| | | | | | GTGCTTTT | |
| 43029400 | 1 | GAAACTGCGGGGGAA | 397 | AGG | GAAACTGCGGGGGAACTGGAGTTTTAGAGCTAGAAATAGCAAGTTA | 649 |
| | | CTGGA | | | AAATAAGGCTAGTCCGTTATCAACTTGAAAAAGTGGCACCGAGTCG | |
| | | | | | GTGCTTTT | |
| 43029401 | 1 | AAACTGCGGGGGAAC | 398 | GGG | AAACTGCGGGGGAACTGGAAGTTTTAGAGCTAGAAATAGCAAGTTA | 650 |
| | | TGGAA | | | AAATAAGGCTAGTCCGTTATCAACTTGAAAAAGTGGCACCGAGTCG | |
| | | | | | GTGCTTTT | |
| 43029417 | 1 | GGAAGGGAGCTCCCA | 399 | AGG | GGAAGGGAGCTCCCAGAACAGTTTTAGAGCTAGAAATAGCAAGTTA | 651 |
| | | GAACA | | | AAATAAGGCTAGTCCGTTATCAACTTGAAAAAGTGGCACCGAGTCG | |
| | | | | | GTGCTTTT | |
| 43029417 | −1 | ATCTTCTGGATCCTT | 400 | GGG | ATCTTCTGGATCCTTGTTCTGTTTTAGAGCTAGAAATAGCAAGTTA | 652 |
| | | GTTCT | | | AAATAAGGCTAGTCCGTTATCAACTTGAAAAAGTGGCACCGAGTCG | |
| | | | | | GTGCTTTT | |
| 43029418 | −1 | AATCTTCTGGATCCTTGTTC | 401 | TGG | AATCTTCTGGATCCTTGTTCGTTTTAGAGCTAGAAATAGCAAGTTA | 653 |
| | | | | | AAATAAGGCTAGTCCGTTATCAACTTGAAAAAGTGGCACCGAGTCG | |
| | | | | | GTGCTTTT | |
| 43029431 | 1 | AGAACAAGGATCCAG | 402 | TGG | AGAACAAGGATCCAGAAGATGTTTTAGAGCTAGAAATAGCAAGTTA | 654 |
| | | AAGAT | | | AAATAAGGCTAGTCCGTTATCAACTTGAAAAAGTGGCACCGAGTCG | |
| | | | | | GTGCTTTT | |
| 43029431 | −1 | GGCCCCAGATGCCAA | 403 | TGG | GGCCCCAGATGCCAATCTTCGTTTTAGAGCTAGAAATAGCAAGTTA | 655 |
| | | TCTTC | | | AAATAAGGCTAGTCCGTTATCAACTTGAAAAAGTGGCACCGAGTCG | |
| | | | | | GTGCTTTT | |
| 43029438 | 1 | GGATCCAGAAGATTG | 404 | TGG | GGATCCAGAAGATTGGCATCGTTTTAGAGCTAGAAATAGCAAGTTA | 656 |
| | | GCATC | | | AAATAAGGCTAGTCCGTTATCAACTTGAAAAAGTGGCACCGAGTCG | |
| | | | | | GTGCTTTT | |
| 43029439 | 1 | GATCCAGAAGATTGG | 405 | GGG | GATCCAGAAGATTGGCATCTGTTTTAGAGCTAGAAATAGCAAGTTA | 657 |
| | | CATCT | | | AAATAAGGCTAGTCCGTTATCAACTTGAAAAAGTGGCACCGAGTCG | |
| | | | | | GTGCTTTT | |
| 43029440 | 1 | ATCCAGAAGATTGGC | 406 | GGG | ATCCAGAAGATTGGCATCTGGTTTTAGAGCTAGAAATAGCAAGTTA | 658 |
| | | ATCTG | | | AAATAAGGCTAGTCCGTTATCAACTTGAAAAAGTGGCACCGAGTCG | |
| | | | | | GTGCTTTT | |
| 43029445 | 1 | GAAGATTGGCATCTG | 407 | TGG | GAAGATTGGCATCTGGGGCCGTTTTAGAGCTAGAAATAGCAAGTTA | 659 |
| | | GGGCC | | | AAATAAGGCTAGTCCGTTATCAACTTGAAAAAGTGGCACCGAGTCG | |
| | | | | | GTGCTTTT | |
| 43029446 | 1 | AAGATTGGCATCTGG | 408 | GGG | AAGATTGGCATCTGGGGCCTGTTTTAGAGCTAGAAATAGCAAGTTA | 660 |
| | | GGCCT | | | AAATAAGGCTAGTCCGTTATCAACTTGAAAAAGTGGCACCGAGTCG | |
| | | | | | GTGCTTTT | |
| 43029452 | −1 | GATTTAGAAACCTAA | 409 | AGG | GATTTAGAAACCTAAATCCCGTTTTAGAGCTAGAAATAGCAAGTTA | 661 |
| | | ATCCC | | | AAATAAGGCTAGTCCGTTATCAACTTGAAAAAGTGGCACCGAGTCG | |
| | | | | | GTGCTTTT | |
| 43029453 | 1 | GCATCTGGGGCCTGG | 410 | AGG | GCATCTGGGGCCTGGGATTTGTTTTAGAGCTAGAAATAGCAAGTTA | 662 |
| | | GATTT | | | AAATAAGGCTAGTCCGTTATCAACTTGAAAAAGTGGCACCGAGTCG | |
| | | | | | GTGCTTTT | |
| 43029467 | 1 | GGATTTAGGTTTCTA | 411 | TGG | GGATTTAGGTTTCTAAATCGGTTTTAGAGCTAGAAATAGCAAGTTA | 663 |
| | | AATCG | | | AAATAAGGCTAGTCCGTTATCAACTTGAAAAAGTGGCACCGAGTCG | |
| | | | | | GTGCTTTT | |
| 43029468 | 1 | GATTTAGGTTTCTAA | 412 | GGG | GATTTAGGTTTCTAAATCGTGTTTTAGAGCTAGAAATAGCAAGTTA | 664 |
| | | ATCGT | | | AAATAAGGCTAGTCCGTTATCAACTTGAAAAAGTGGCACCGAGTCG | |
| | | | | | GTGCTTTT | |
| 43029474 | 1 | GGTTTCTAAATCGTG | 413 | TGG | GGTTTCTAAATCGTGGGCCAGTTTTAGAGCTAGAAATAGCAAGTTA | 665 |
| | | GGCCA | | | AAATAAGGCTAGTCCGTTATCAACTTGAAAAAGTGGCACCGAGTCG | |
| | | | | | GTGCTTTT | |
| 43029475 | 1 | GTTTCTAAATCGTGG | 414 | GGG | GTTTCTAAATCGTGGGCCATGTTTTAGAGCTAGAAATAGCAAGTTA | 666 |
| | | GCCAT | | | AAATAAGGCTAGTCCGTTATCAACTTGAAAAAGTGGCACCGAGTCG | |
| | | | | | GTGCTTTT | |
| 43029476 | 1 | TTTCTAAATCGTGGG | 415 | GGG | TTTCTAAATCGTGGGCCATGGTTTTAGAGCTAGAAATAGCAAGTTA | 667 |
| | | CCATG | | | AAATAAGGCTAGTCCGTTATCAACTTGAAAAAGTGGCACCGAGTCG | |
| | | | | | GTGCTTTT | |
| 43029480 | −1 | GCAGAGATAAGGCTG | 416 | TGG | GCAGAGATAAGGCTGCCCCAGTTTTAGAGCTAGAAATAGCAAGTTA | 668 |
| | | CCCCA | | | AAATAAGGCTAGTCCGTTATCAACTTGAAAAAGTGGCACCGAGTCG | |
| | | | | | GTGCTTTT | |
| 43029491 | −1 | TCAATGCTTTTGCAG | 417 | AGG | TCAATGCTTTTGCAGAGATAGTTTTAGAGCTAGAAATAGCAAGTTA | 669 |
| | | AGATA | | | AAATAAGGCTAGTCCGTTATCAACTTGAAAAAGTGGCACCGAGTCG | |
| | | | | | GTGCTTTT | |
| 43029504 | 1 | TTATCTCTGCAAAAG | 418 | AGG | TTATCTCTGCAAAAGCATTGGTTTTAGAGCTAGAAATAGCAAGTTA | 670 |
| | | CATTG | | | AAATAAGGCTAGTCCGTTATCAACTTGAAAAAGTGGCACCGAGTCG | |
| | | | | | GTGCTTTT | |
| 43029505 | 1 | TATCTCTGCAAAAGC | 419 | GGG | TATCTCTGCAAAAGCATTGAGTTTTAGAGCTAGAAATAGCAAGTTA | 671 |
| | | ATTGA | | | AAATAAGGCTAGTCCGTTATCAACTTGAAAAAGTGGCACCGAGTCG | |
| | | | | | GTGCTTTT | |
| 43029523 | 1 | GAGGGTAGAAGTCAA | 420 | TGG | GAGGGTAGAAGTCAATGATTGTTTTAGAGCTAGAAATAGCAAGTTA | 672 |
| | | TGATT | | | AAATAAGGCTAGTCCGTTATCAACTTGAAAAAGTGGCACCGAGTCG | |
| | | | | | GTGCTTTT | |
| 43029524 | 1 | AGGGTAGAAGTCAATGATTT | 421 | GGG | AGGGTAGAAGTCAATGATTTGTTTTAGAGCTAGAAATAGCAAGTTA | 673 |
| | | | | | AAATAAGGCTAGTCCGTTATCAACTTGAAAAAGTGGCACCGAGTCG | |
| | | | | | GTGCTTTT | |
| 43029540 | 1 | ATTTGGGAAGTTATT | 422 | AGG | ATTTGGGAAGTTATTGAATTGTTTTAGAGCTAGAAATAGCAAGTTA | 674 |
| | | GAATT | | | AAATAAGGCTAGTCCGTTATCAACTTGAAAAAGTGGCACCGAGTCG | |
| | | | | | GTGCTTTT | |
| 43029541 | 1 | TTTGGGAAGTTATTG | 423 | GGG | TTTGGGAAGTTATTGAATTAGTTTTAGAGCTAGAAATAGCAAGTTA | 675 |
| | | AATTA | | | AAATAAGGCTAGTCCGTTATCAACTTGAAAAAGTGGCACCGAGTCG | |
| | | | | | GTGCTTTT | |
| 43029542 | 1 | TTGGGAAGTTATTGA | 424 | GGG | TTGGGAAGTTATTGAATTAGGTTTTAGAGCTAGAAATAGCAAGTTA | 676 |
| | | ATTAG | | | AAATAAGGCTAGTCCGTTATCAACTTGAAAAAGTGGCACCGAGTCG | |
| | | | | | GTGCTTTT | |
| 43029549 | 1 | GTTATTGAATTAGGG | 425 | CGG | GTTATTGAATTAGGGGATCTGTTTTAGAGCTAGAAATAGCAAGTTA | 677 |
| | | GATCT | | | AAATAAGGCTAGTCCGTTATCAACTTGAAAAAGTGGCACCGAGTCG | |
| | | | | | GTGCTTTT | |
| 43029552 | 1 | ATTGAATTAGGGGAT | 333 | AGG | ATTGAATTAGGGGATCTCGGGTTTTAGAGCTAGAAATAGCAAGTTA | 678 |
| | | CTCGG | | | AAATAAGGCTAGTCCGTTATCAACTTGAAAAAGTGGCACCGAGTCG | |
| | | | | | GTGCTTTT | |
| 43029556 | 1 | AATTAGGGGATCTCG | 426 | AGG | AATTAGGGGATCTCGGAGGTGTTTTAGAGCTAGAAATAGCAAGTTA | 679 |
| | | GAGGT | | | AAATAAGGCTAGTCCGTTATCAACTTGAAAAAGTGGCACCGAGTCG | |
| | | | | | GTGCTTTT | |
| 43029577 | −1 | GCATTCTAACTGATA | 427 | AGG | GCATTCTAACTGATACTATCGTTTTAGAGCTAGAAATAGCAAGTTA | 680 |
| | | CTATC | | | AAATAAGGCTAGTCCGTTATCAACTTGAAAAAGTGGCACCGAGTCG | |
| | | | | | GTGCTTTT | |
| 43029597 | 1 | ATCAGTTAGAATGCC | 428 | TGG | ATCAGTTAGAATGCCTGACTGTTTTAGAGCTAGAAATAGCAAGTTA | 681 |
| | | TGACT | | | AAATAAGGCTAGTCCGTTATCAACTTGAAAAAGTGGCACCGAGTCG | |
| | | | | | GTGCTTTT | |
| 43029598 | 1 | TCAGTTAGAATGCCT | 429 | GGG | TCAGTTAGAATGCCTGACTTGTTTTAGAGCTAGAAATAGCAAGTTA | 682 |
| | | GACTT | | | AAATAAGGCTAGTCCGTTATCAACTTGAAAAAGTGGCACCGAGTCG | |
| | | | | | GTGCTTTT | |
| 43029599 | 1 | CAGTTAGAATGCCTG | 430 | GGG | CAGTTAGAATGCCTGACTTGGTTTTAGAGCTAGAAATAGCAAGTTA | 683 |
| | | ACTTG | | | AAATAAGGCTAGTCCGTTATCAACTTGAAAAAGTGGCACCGAGTCG | |
| | | | | | GTGCTTTT | |
| 43029599 | −1 | AGCCATTGTCACCCC | 340 | AGG | AGCCATTGTCACCCCAAGTCGTTTTAGAGCTAGAAATAGCAAGTTA | 684 |
| | | AAGTC | | | AAATAAGGCTAGTCCGTTATCAACTTGAAAAAGTGGCACCGAGTCG | |
| | | | | | GTGCTTTT | |
| 43029608 | 1 | TGCCTGACTTGGGGT | 431 | TGG | TGCCTGACTTGGGGTGACAAGTTTTAGAGCTAGAAATAGCAAGTTA | 685 |
| | | GACAA | | | AAATAAGGCTAGTCCGTTATCAACTTGAAAAAGTGGCACCGAGTCG | |
| | | | | | GTGCTTTT | |
| 43029613 | 1 | GACTTGGGGTGACAA | 334 | TGG | GACTTGGGGTGACAATGGCTGTTTTAGAGCTAGAAATAGCAAGTTA | 686 |
| | | TGGCT | | | AAATAAGGCTAGTCCGTTATCAACTTGAAAAAGTGGCACCGAGTCG | |
| | | | | | GTGCTTTT | |
| 43029616 | 1 | TTGGGGTGACAATGG | 432 | AGG | TTGGGGTGACAATGGCTTGGGTTTTAGAGCTAGAAATAGCAAGTTA | 687 |
| | | CTTGG | | | AAATAAGGCTAGTCCGTTATCAACTTGAAAAAGTGGCACCGAGTCG | |
| | | | | | GTGCTTTT | |
| 43029617 | 1 | TGGGGTGACAATGGC | 433 | GGG | TGGGGTGACAATGGCTTGGAGTTTTAGAGCTAGAAATAGCAAGTTA | 688 |
| | | TTGGA | | | AAATAAGGCTAGTCCGTTATCAACTTGAAAAAGTGGCACCGAGTCG | |
| | | | | | GTGCTTTT | |
| 43029618 | 1 | GGGGTGACAATGGCT | 434 | GGG | GGGGTGACAATGGCTTGGAGGTTTTAGAGCTAGAAATAGCAAGTTA | 689 |
| | | TGGAG | | | AAATAAGGCTAGTCCGTTATCAACTTGAAAAAGTGGCACCGAGTCG | |
| | | | | | GTGCTTTT | |
| 43029621 | 1 | GTGACAATGGCTTGG | 435 | TGG | GTGACAATGGCTTGGAGGGGGTTTTAGAGCTAGAAATAGCAAGTTA | 690 |
| | | AGGGG | | | AAATAAGGCTAGTCCGTTATCAACTTGAAAAAGTGGCACCGAGTCG | |
| | | | | | GTGCTTTT | |
| 43029622 | 1 | TGACAATGGCTTGGA | 436 | GGG | TGACAATGGCTTGGAGGGGTGTTTTAGAGCTAGAAATAGCAAGTTA | 691 |
| | | GGGGT | | | AAATAAGGCTAGTCCGTTATCAACTTGAAAAAGTGGCACCGAGTCG | |
| | | | | | GTGCTTTT | |
| 43029632 | 1 | TTGGAGGGGTGGGTG | 437 | AGG | TTGGAGGGGTGGGTGAGTCAGTTTTAGAGCTAGAAATAGCAAGTTA | 692 |
| | | AGTCA | | | AAATAAGGCTAGTCCGTTATCAACTTGAAAAAGTGGCACCGAGTCG | |
| | | | | | GTGCTTTT | |
| 43029633 | 1 | TGGAGGGGTGGGTGA | 438 | GGG | TGGAGGGGTGGGTGAGTCAAGTTTTAGAGCTAGAAATAGCAAGTTA | 693 |
| | | GTCAA | | | AAATAAGGCTAGTCCGTTATCAACTTGAAAAAGTGGCACCGAGTCG | |
| | | | | | GTGCTTTT | |
| 43029656 | −1 | AGGCAGGCATCATGA | 439 | GGG | AGGCAGGCATCATGACTCACGTTTTAGAGCTAGAAATAGCAAGTTA | 694 |
| | | CTCAC | | | AAATAAGGCTAGTCCGTTATCAACTTGAAAAAGTGGCACCGAGTCG | |
| | | | | | GTGCTTTT | |
| 43029657 | −1 | AAGGCAGGCATCATG | 440 | CGG | AAGGCAGGCATCATGACTCAGTTTTAGAGCTAGAAATAGCAAGTTA | 695 |
| | | ACTCA | | | AAATAAGGCTAGTCCGTTATCAACTTGAAAAAGTGGCACCGAGTCG | |
| | | | | | GTGCTTTT | |
| 43029672 | −1 | AGTTATCAATTGTAC | 441 | AGG | AGTTATCAATTGTACAAGGCGTTTTAGAGCTAGAAATAGCAAGTTA | 696 |
| | | AAGGC | | | AAATAAGGCTAGTCCGTTATCAACTTGAAAAAGTGGCACCGAGTCG | |
| | | | | | GTGCTTTT | |
| 43029676 | −1 | GTTCAGTTATCAATT | 442 | AGG | GTTCAGTTATCAATTGTACAGTTTTAGAGCTAGAAATAGCAAGTTA | 697 |
| | | GTACA | | | AAATAAGGCTAGTCCGTTATCAACTTGAAAAAGTGGCACCGAGTCG | |
| | | | | | GTGCTTTT | |
| 43029692 | 1 | TACAATTGATAACTG | 443 | CGG | TACAATTGATAACTGAACATGTTTTAGAGCTAGAAATAGCAAGTTA | 698 |
| | | AACAT | | | AAATAAGGCTAGTCCGTTATCAACTTGAAAAAGTGGCACCGAGTCG | |
| | | | | | GTGCTTTT | |
| 43029701 | 1 | TAACTGAACATCGGT | 444 | AGG | TAACTGAACATCGGTGAGTTGTTTTAGAGCTAGAAATAGCAAGTTA | 699 |
| | | GAGTT | | | AAATAAGGCTAGTCCGTTATCAACTTGAAAAAGTGGCACCGAGTCG | |
| | | | | | GTGCTTTT | |
| 43029702 | 1 | AACTGAACATCGGTG | 2511 | GGG | AACTGAACATCGGTGAGTTAGTTTTAGAGCTAGAAATAGCAAGTTA | 700 |
| | | AGTTA | | | AAATAAGGCTAGTCCGTTATCAACTTGAAAAAGTGGCACCGAGTCG | |
| | | | | | GTGCTTTT | |
| 43029714 | −1 | GGTGCTAATTACAAC | 445 | GGG | GGTGCTAATTACAACTGCTGGTTTTAGAGCTAGAAATAGCAAGTTA | 701 |
| | | TGCTG | | | AAATAAGGCTAGTCCGTTATCAACTTGAAAAAGTGGCACCGAGTCG | |
| | | | | | GTGCTTTT | |
| 43029715 | −1 | GGGTGCTAATTACAA | 446 | GGG | GGGTGCTAATTACAACTGCTGTTTTAGAGCTAGAAATAGCAAGTTA | 702 |
| | | CTGCT | | | AAATAAGGCTAGTCCGTTATCAACTTGAAAAAGTGGCACCGAGTCG | |
| | | | | | GTGCTTTT | |
| 43029716 | −1 | GGGGTGCTAATTACA | 447 | TGG | GGGGTGCTAATTACAACTGCGTTTTAGAGCTAGAAATAGCAAGTTA | 703 |
| | | ACTGC | | | AAATAAGGCTAGTCCGTTATCAACTTGAAAAAGTGGCACCGAGTCG | |
| | | | | | GTGCTTTT | |
| 43029729 | 1 | AGCAGTTGTAATTAG | 448 | CGG | AGCAGTTGTAATTAGCACCCGTTTTAGAGCTAGAAATAGCAAGTTA | 704 |
| | | CACCC | | | AAATAAGGCTAGTCCGTTATCAACTTGAAAAAGTGGCACCGAGTCG | |
| | | | | | GTGCTTTT | |
| 43029730 | 1 | GCAGTTGTAATTAGC | 449 | GGG | GCAGTTGTAATTAGCACCCCGTTTTAGAGCTAGAAATAGCAAGTTA | 705 |
| | | ACCCC | | | AAATAAGGCTAGTCCGTTATCAACTTGAAAAAGTGGCACCGAGTCG | |
| | | | | | GTGCTTTT | |
| 43029735 | −1 | TGGTTTCTGGCTGAC | 2512 | GGG | TGGTTTCTGGCTGACACCCGGTTTTAGAGCTAGAAATAGCAAGTTA | 706 |
| | | ACCCG | | | AAATAAGGCTAGTCCGTTATCAACTTGAAAAAGTGGCACCGAGTCG | |
| | | | | | GTGCTTTT | |
| 43029736 | −1 | TTGGTTTCTGGCTGA | 450 | GGG | TTGGTTTCTGGCTGACACCCGTTTTAGAGCTAGAAATAGCAAGTTA | 707 |
| | | CACCC | | | AAATAAGGCTAGTCCGTTATCAACTTGAAAAAGTGGCACCGAGTCG | |
| | | | | | GTGCTTTT | |
| 43029737 | −1 | GTTGGTTTCTGGCTG | 451 | CGG | GTTGGTTTCTGGCTGACACCGTTTTAGAGCTAGAAATAGCAAGTTA | 708 |
| | | ACACC | | | AAATAAGGCTAGTCCGTTATCAACTTGAAAAAGTGGCACCGAGTCG | |
| | | | | | GTGCTTTT | |
| 43029748 | −1 | TTTGGCTGTTTGTTG | 452 | TGG | TTTGGCTGTTTGTTGGTTTCGTTTTAGAGCTAGAAATAGCAAGTTA | 709 |
| | | GTTTC | | | AAATAAGGCTAGTCCGTTATCAACTTGAAAAAGTGGCACCGAGTCG | |
| | | | | | GTGCTTTT | |
| 43029755 | −1 | GCAGGGATTTGGCTG | 453 | TGG | GCAGGGATTTGGCTGTTTGTGTTTTAGAGCTAGAAATAGCAAGTTA | 710 |
| | | TTTGT | | | AAATAAGGCTAGTCCGTTATCAACTTGAAAAAGTGGCACCGAGTCG | |
| | | | | | GTGCTTTT | |
| 43029766 | -1 | TGGGCGGGGCTGCAG | 454 | TGG | TGGGCGGGGCTGCAGGGATTGTTTTAGAGCTAGAAATAGCAAGTTA | 711 |
| | | GGATT | | | AAATAAGGCTAGTCCGTTATCAACTTGAAAAAGTGGCACCGAGTCG | |
| | | | | | GTGCTTTT | |
| 43029772 | −1 | ATAGGCTGGGCGGGG | 455 | GGG | ATAGGCTGGGCGGGGCTGCAGTTTTAGAGCTAGAAATAGCAAGTTA | 712 |
| | | CTGCA | | | AAATAAGGCTAGTCCGTTATCAACTTGAAAAAGTGGCACCGAGTCG | |
| | | | | | GTGCTTTT | |
| 43029773 | −1 | GATAGGCTGGGCGGG | 456 | AGG | GATAGGCTGGGCGGGGCTGCGTTTTAGAGCTAGAAATAGCAAGTTA | 713 |
| | | GCTGC | | | AAATAAGGCTAGTCCGTTATCAACTTGAAAAAGTGGCACCGAGTCG | |
| | | | | | GTGCTTTT | |
| 43029780 | −1 | GCCGGTGGATAGGCT | 457 | GGG | GCCGGTGGATAGGCTGGGCGGTTTTAGAGCTAGAAATAGCAAGTTA | 714 |
| | | GGGCG | | | AAATAAGGCTAGTCCGTTATCAACTTGAAAAAGTGGCACCGAGTCG | |
| | | | | | GTGCTTTT | |
| 43029781 | −1 | CGCCGGTGGATAGGC | 458 | GGG | CGCCGGTGGATAGGCTGGGCGTTTTAGAGCTAGAAATAGCAAGTTA | 715 |
| | | TGGGC | | | AAATAAGGCTAGTCCGTTATCAACTTGAAAAAGTGGCACCGAGTCG | |
| | | | | | GTGCTTTT | |
| 43029782 | −1 | CCGCCGGTGGATAGG | 459 | CGG | CCGCCGGTGGATAGGCTGGGGTTTTAGAGCTAGAAATAGCAAGTTA | 716 |
| | | CTGGG | | | AAATAAGGCTAGTCCGTTATCAACTTGAAAAAGTGGCACCGAGTCG | |
| | | | | | GTGCTTTT | |
| 43029785 | −1 | CCCCCGCCGGTGGAT | 460 | GGG | CCCCCGCCGGTGGATAGGCTGTTTTAGAGCTAGAAATAGCAAGTTA | 717 |
| | | AGGCT | | | AAATAAGGCTAGTCCGTTATCAACTTGAAAAAGTGGCACCGAGTCG | |
| | | | | | GTGCTTTT | |
| 43029786 | −1 | TCCCCCGCCGGTGGA | 461 | TGG | TCCCCCGCCGGTGGATAGGCGTTTTAGAGCTAGAAATAGCAAGTTA | 718 |
| | | TAGGC | | | AAATAAGGCTAGTCCGTTATCAACTTGAAAAAGTGGCACCGAGTCG | |
| | | | | | GTGCTTTT | |
| 43029790 | 1 | GCCCCGCCCAGCCTA | 462 | CGG | GCCCCGCCCAGCCTATCCACGTTTTAGAGCTAGAAATAGCAAGTTA | 719 |
| | | TCCAC | | | AAATAAGGCTAGTCCGTTATCAACTTGAAAAAGTGGCACCGAGTCG | |
| | | | | | GTGCTTTT | |
| 43029790 | −1 | TCGGTCCCCCGCCGG | 463 | AGG | TCGGTCCCCCGCCGGTGGATGTTTTAGAGCTAGAAATAGCAAGTTA | 720 |
| | | TGGAT | | | AAATAAGGCTAGTCCGTTATCAACTTGAAAAAGTGGCACCGAGTCG | |
| | | | | | GTGCTTTT | |
| 43029793 | 1 | CCGCCCAGCCTATCC | 464 | CGG | CCGCCCAGCCTATCCACCGGGTTTTAGAGCTAGAAATAGCAAGTTA | 721 |
| | | ACCGG | | | AAATAAGGCTAGTCCGTTATCAACTTGAAAAAGTGGCACCGAGTCG | |
| | | | | | GTGCTTTT | |
| 43029794 | 1 | CGCCCAGCCTATCCA | 465 | GGG | CGCCCAGCCTATCCACCGGCGTTTTAGAGCTAGAAATAGCAAGTTA | 722 |
| | | CCGGC | | | AAATAAGGCTAGTCCGTTATCAACTTGAAAAAGTGGCACCGAGTCG | |
| | | | | | GTGCTTTT | |
| 43029795 | 1 | GCCCAGCCTATCCAC | 466 | GGG | GCCCAGCCTATCCACCGGCGGTTTTAGAGCTAGAAATAGCAAGTTA | 723 |
| | | CGGCG | | | AAATAAGGCTAGTCCGTTATCAACTTGAAAAAGTGGCACCGAGTCG | |
| | | | | | GTGCTTTT | |
| 43029795 | −1 | GTTAATCGGTCCCCC | 467 | TGG | GTTAATCGGTCCCCCGCCGGGTTTTAGAGCTAGAAATAGCAAGTTA | 724 |
| | | GCCGG | | | AAATAAGGCTAGTCCGTTATCAACTTGAAAAAGTGGCACCGAGTCG | |
| | | | | | GTGCTTTT | |
| 43029796 | 1 | CCCAGCCTATCCACC | 468 | GGG | CCCAGCCTATCCACCGGCGGGTTTTAGAGCTAGAAATAGCAAGTTA | 725 |
| | | GGCGG | | | AAATAAGGCTAGTCCGTTATCAACTTGAAAAAGTGGCACCGAGTCG | |
| | | | | | GTGCTTTT | |
| 43029798 | −1 | ATGGTTAATCGGTCC | 2513 | CGG | ATGGTTAATCGGTCCCCCGCGTTTTAGAGCTAGAAATAGCAAGTTA | 726 |
| | | CCCGC | | | AAATAAGGCTAGTCCGTTATCAACTTGAAAAAGTGGCACCGAGTCG | |
| | | | | | GTGCTTTT | |
| 43029809 | −1 | GGTGGGGGTTAATGG | 469 | CGG | GGTGGGGGTTAATGGTTAATGTTTTAGAGCTAGAAATAGCAAGTTA | 727 |
| | | TTAAT | | | AAATAAGGCTAGTCCGTTATCAACTTGAAAAAGTGGCACCGAGTCG | |
| | | | | | GTGCTTTT | |
| 43029817 | −1 | CGGGGAGGGGTGGGG | 470 | TGG | CGGGGAGGGGTGGGGGTTAAGTTTTAGAGCTAGAAATAGCAAGTTA | 728 |
| | | GTTAA | | | AAATAAGGCTAGTCCGTTATCAACTTGAAAAAGTGGCACCGAGTCG | |
| | | | | | GTGCTTTT | |
| 43029824 | −1 | GCTCTGCCGGGGAGG | 471 | GGG | GCTCTGCCGGGGAGGGGTGGGTTTTAGAGCTAGAAATAGCAAGTTA | 729 |
| | | GGTGG | | | AAATAAGGCTAGTCCGTTATCAACTTGAAAAAGTGGCACCGAGTCG | |
| | | | | | GTGCTTTT | |
| 43029825 | −1 | GGCTCTGCCGGGGAG | 472 | GGG | GGCTCTGCCGGGGAGGGGTGGTTTTAGAGCTAGAAATAGCAAGTTA | 730 |
| | | GGGTG | | | AAATAAGGCTAGTCCGTTATCAACTTGAAAAAGTGGCACCGAGTCG | |
| | | | | | GTGCTTTT | |
| 43029826 | −1 | AGGCTCTGCCGGGGA | 473 | GGG | AGGCTCTGCCGGGGAGGGGTGTTTTAGAGCTAGAAATAGCAAGTTA | 731 |
| | | GGGGT | | | AAATAAGGCTAGTCCGTTATCAACTTGAAAAAGTGGCACCGAGTCG | |
| | | | | | GTGCTTTT | |
| 43029827 | −1 | GAGGCTCTGCCGGGG | 474 | TGG | GAGGCTCTGCCGGGGAGGGGGTTTTAGAGCTAGAAATAGCAAGTTA | 732 |
| | | AGGGG | | | AAATAAGGCTAGTCCGTTATCAACTTGAAAAAGTGGCACCGAGTCG | |
| | | | | | GTGCTTTT | |
| 43029829 | 1 | CATTAACCCCCACCC | 475 | CGG | CATTAACCCCCACCCCTCCCGTTTTAGAGCTAGAAATAGCAAGTTA | 733 |
| | | CTCCC | | | AAATAAGGCTAGTCCGTTATCAACTTGAAAAAGTGGCACCGAGTCG | |
| | | | | | GTGCTTTT | |
| 43029830 | −1 | GTGGAGGCTCTGCCG | 476 | GGG | GTGGAGGCTCTGCCGGGGAGGTTTTAGAGCTAGAAATAGCAAGTTA | 734 |
| | | GGGAG | | | AAATAAGGCTAGTCCGTTATCAACTTGAAAAAGTGGCACCGAGTCG | |
| | | | | | GTGCTTTT | |
| 43029831 | −1 | GGTGGAGGCTCTGCC | 477 | GGG | GGTGGAGGCTCTGCCGGGGAGTTTTAGAGCTAGAAATAGCAAGTTA | 735 |
| | | GGGGA | | | AAATAAGGCTAGTCCGTTATCAACTTGAAAAAGTGGCACCGAGTCG | |
| | | | | | GTGCTTTT | |
| 43029832 | −1 | GGGTGGAGGCTCTGC | 478 | AGG | GGGTGGAGGCTCTGCCGGGGGTTTTAGAGCTAGAAATAGCAAGTTA | 736 |
| | | CGGGG | | | AAATAAGGCTAGTCCGTTATCAACTTGAAAAAGTGGCACCGAGTCG | |
| | | | | | GTGCTTTT | |
| 43029835 | −1 | AAGGGGTGGAGGCTC | 479 | GGG | AAGGGGTGGAGGCTCTGCCGGTTTTAGAGCTAGAAATAGCAAGTTA | 737 |
| | | TGCCG | | | AAATAAGGCTAGTCCGTTATCAACTTGAAAAAGTGGCACCGAGTCG | |
| | | | | | GTGCTTTT | |
| 43029836 | −1 | GAAGGGGTGGAGGCT | 480 | GGG | GAAGGGGTGGAGGCTCTGCCGTTTTAGAGCTAGAAATAGCAAGTTA | 738 |
| | | CTGCC | | | AAATAAGGCTAGTCCGTTATCAACTTGAAAAAGTGGCACCGAGTCG | |
| | | | | | GTGCTTTT | |
| 43029837 | −1 | TGAAGGGGTGGAGGC | 481 | CGG | TGAAGGGGTGGAGGCTCTGCGTTTTAGAGCTAGAAATAGCAAGTTA | 739 |
| | | TCTGC | | | AAATAAGGCTAGTCCGTTATCAACTTGAAAAAGTGGCACCGAGTCG | |
| | | | | | GTGCTTTT | |
| 43029846 | −1 | TAGCCTCTGTGAAGG | 482 | AGG | TAGCCTCTGTGAAGGGGTGGGTTTTAGAGCTAGAAATAGCAAGTTA | 740 |
| | | GGTGG | | | AAATAAGGCTAGTCCGTTATCAACTTGAAAAAGTGGCACCGAGTCG | |
| | | | | | GTGCTTTT | |
| 43029849 | −1 | GCCTAGCCTCTGTGA | 483 | TGG | GCCTAGCCTCTGTGAAGGGGGTTTTAGAGCTAGAAATAGCAAGTTA | 741 |
| | | AGGGG | | | AAATAAGGCTAGTCCGTTATCAACTTGAAAAAGTGGCACCGAGTCG | |
| | | | | | GTGCTTTT | |
| 43029852 | −1 | TTGGCCTAGCCTCTG | 484 | GGG | TTGGCCTAGCCTCTGTGAAGGTTTTAGAGCTAGAAATAGCAAGTTA | 742 |
| | | TGAAG | | | AAATAAGGCTAGTCCGTTATCAACTTGAAAAAGTGGCACCGAGTCG | |
| | | | | | GTGCTTTT | |
| 43029853 | −1 | CTTGGCCTAGCCTCT | 485 | GGG | CTTGGCCTAGCCTCTGTGAAGTTTTAGAGCTAGAAATAGCAAGTTA | 743 |
| | | GTGAA | | | AAATAAGGCTAGTCCGTTATCAACTTGAAAAAGTGGCACCGAGTCG | |
| | | | | | GTGCTTTT | |
| 43029854 | 1 | GAGCCTCCACCCCTT | 486 | AGG | GAGCCTCCACCCCTTCACAGGTTTTAGAGCTAGAAATAGCAAGTTA | 744 |
| | | CACAG | | | AAATAAGGCTAGTCCGTTATCAACTTGAAAAAGTGGCACCGAGTCG | |
| | | | | | GTGCTTTT | |
| 43029854 | −1 | TCTTGGCCTAGCCTC | 487 | AGG | TCTTGGCCTAGCCTCTGTGAGTTTTAGAGCTAGAAATAGCAAGTTA | 745 |
| | | TGTGA | | | AAATAAGGCTAGTCCGTTATCAACTTGAAAAAGTGGCACCGAGTCG | |
| | | | | | GTGCTTTT | |
| 43029859 | 1 | TCCACCCCTTCACAG | 488 | AGG | TCCACCCCTTCACAGAGGCTGTTTTAGAGCTAGAAATAGCAAGTTA | 746 |
| | | AGGCT | | | AAATAAGGCTAGTCCGTTATCAACTTGAAAAAGTGGCACCGAGTCG | |
| | | | | | GTGCTTTT | |
| 43029871 | −1 | GGAAGATCTGCTGGG | 489 | TGG | GGAAGATCTGCTGGGAGTCTGTTTTAGAGCTAGAAATAGCAAGTTA | 747 |
| | | AGTCT | | | AAATAAGGCTAGTCCGTTATCAACTTGAAAAAGTGGCACCGAGTCG | |
| | | | | | GTGCTTTT | |
| 43029879 | −1 | GTCCTCTGGGAAGAT | 2514 | GGG | GTCCTCTGGGAAGATCTGCTGTTTTAGAGCTAGAAATAGCAAGTTA | 748 |
| | | CTGCT | | | AAATAAGGCTAGTCCGTTATCAACTTGAAAAAGTGGCACCGAGTCG | |
| | | | | | GTGCTTTT | |
| 43029880 | −1 | CGTCCTCTGGGAAGA | 490 | TGG | CGTCCTCTGGGAAGATCTGCGTTTTAGAGCTAGAAATAGCAAGTTA | 749 |
| | | TCTGC | | | AAATAAGGCTAGTCCGTTATCAACTTGAAAAAGTGGCACCGAGTCG | |
| | | | | | GTGCTTTT | |
| 43029888 | 1 | CTCCCAGCAGATCTT | 491 | AGG | CTCCCAGCAGATCTTCCCAGGTTTTAGAGCTAGAAATAGCAAGTTA | 750 |
| | | CCCAG | | | AAATAAGGCTAGTCCGTTATCAACTTGAAAAAGTGGCACCGAGTCG | |
| | | | | | GTGCTTTT | |
| 43029892 | 1 | CAGCAGATCTTCCCA | 492 | CGG | CAGCAGATCTTCCCAGAGGAGTTTTAGAGCTAGAAATAGCAAGTTA | 751 |
| | | GAGGA | | | AAATAAGGCTAGTCCGTTATCAACTTGAAAAAGTGGCACCGAGTCG | |
| | | | | | GTGCTTTT | |
| 43029892 | −1 | TTCCTTTCAAACCGT | 493 | GGG | TTCCTTTCAAACCGTCCTCTGTTTTAGAGCTAGAAATAGCAAGTTA | 752 |
| | | CCTCT | | | AAATAAGGCTAGTCCGTTATCAACTTGAAAAAGTGGCACCGAGTCG | |
| | | | | | GTGCTTTT | |
| 43029893 | −1 | CTTCCTTTCAAACCG | 494 | TGG | CTTCCTTTCAAACCGTCCTCGTTTTAGAGCTAGAAATAGCAAGTTA | 753 |
| | | TCCTC | | | AAATAAGGCTAGTCCGTTATCAACTTGAAAAAGTGGCACCGAGTCG | |
| | | | | | GTGCTTTT | |
| 43029901 | 1 | TTCCCAGAGGACGGT | 495 | AGG | TTCCCAGAGGACGGTTTGAAGTTTTAGAGCTAGAAATAGCAAGTTA | 754 |
| | | TTGAA | | | AAATAAGGCTAGTCCGTTATCAACTTGAAAAAGTGGCACCGAGTCG | |
| | | | | | GTGCTTTT | |
| 43029905 | 1 | CAGAGGACGGTTTGA | 496 | AGG | CAGAGGACGGTTTGAAAGGAGTTTTAGAGCTAGAAATAGCAAGTTA | 755 |
| | | AAGGA | | | AAATAAGGCTAGTCCGTTATCAACTTGAAAAAGTGGCACCGAGTCG | |
| | | | | | GTGCTTTT | |
| 43029913 | 1 | GGTTTGAAAGGAAGG | 2515 | AGG | GGTTTGAAAGGAAGGCAGAGGTTTTAGAGCTAGAAATAGCAAGTTA | 756 |
| | | CAGAG | | | AAATAAGGCTAGTCCGTTATCAACTTGAAAAAGTGGCACCGAGTCG | |
| | | | | | GTGCTTTT | |
| 43029914 | 1 | GTTTGAAAGGAAGGC | 497 | GGG | GTTTGAAAGGAAGGCAGAGAGTTTTAGAGCTAGAAATAGCAAGTTA | 757 |
| | | AGAGA | | | AAATAAGGCTAGTCCGTTATCAACTTGAAAAAGTGGCACCGAGTCG | |
| | | | | | GTGCTTTT | |
| 43029920 | 1 | AAGGAAGGCAGAGAG | 498 | TGG | AAGGAAGGCAGAGAGGGCACGTTTTAGAGCTAGAAATAGCAAGTTA | 758 |
| | | GGCAC | | | AAATAAGGCTAGTCCGTTATCAACTTGAAAAAGTGGCACCGAGTCG | |
| | | | | | GTGCTTTT | |
| 43029921 | 1 | AGGAAGGCAGAGAGG | 499 | GGG | AGGAAGGCAGAGAGGGCACTGTTTTAGAGCTAGAAATAGCAAGTTA | 759 |
| | | GCACT | | | AAATAAGGCTAGTCCGTTATCAACTTGAAAAAGTGGCACCGAGTCG | |
| | | | | | GTGCTTTT | |
| 43029924 | 1 | AAGGCAGAGAGGGCA | 500 | AGG | AAGGCAGAGAGGGCACTGGGGTTTTAGAGCTAGAAATAGCAAGTTA | 760 |
| | | CTGGG | | | AAATAAGGCTAGTCCGTTATCAACTTGAAAAAGTGGCACCGAGTCG | |
| | | | | | GTGCTTTT | |
| 43029927 | 1 | GCAGAGAGGGCACTG | 501 | AGG | GCAGAGAGGGCACTGGGAGGGTTTTAGAGCTAGAAATAGCAAGTTA | 761 |
| | | GGAGG | | | AAATAAGGCTAGTCCGTTATCAACTTGAAAAAGTGGCACCGAGTCG | |
| | | | | | GTGCTTTT | |
| 43029933 | 1 | AGGGCACTGGGAGGA | 502 | TGG | AGGGCACTGGGAGGAGGCAGGTTTTAGAGCTAGAAATAGCAAGTTA | 762 |
| | | GGCAG | | | AAATAAGGCTAGTCCGTTATCAACTTGAAAAAGTGGCACCGAGTCG | |
| | | | | | GTGCTTTT | |
| 43029934 | 1 | GGGCACTGGGAGGAGGCAGT | 503 | GGG | GGGCACTGGGAGGAGGCAGTGTTTTAGAGCTAGAAATAGCAAGTTA | 763 |
| | | | | | AAATAAGGCTAGTCCGTTATCAACTTGAAAAAGTGGCACCGAGTCG | |
| | | | | | GTGCTTTT | |
| 43029937 | 1 | CACTGGGAGGAGGCA | 504 | AGG | CACTGGGAGGAGGCAGTGGGGTTTTAGAGCTAGAAATAGCAAGTTA | 764 |
| | | GTGGG | | | AAATAAGGCTAGTCCGTTATCAACTTGAAAAAGTGGCACCGAGTCG | |
| | | | | | GTGCTTTT | |
| 43029938 | 1 | ACTGGGAGGAGGCAG | 505 | GGG | ACTGGGAGGAGGCAGTGGGAGTTTTAGAGCTAGAAATAGCAAGTTA | 765 |
| | | TGGGA | | | AAATAAGGCTAGTCCGTTATCAACTTGAAAAAGTGGCACCGAGTCG | |
| | | | | | GTGCTTTT | |
| 43029941 | 1 | GGGAGGAGGCAGTGG | 506 | CGG | GGGAGGAGGCAGTGGGAGGGGTTTTAGAGCTAGAAATAGCAAGTTA | 766 |
| | | GAGGG | | | AAATAAGGCTAGTCCGTTATCAACTTGAAAAAGTGGCACCGAGTCG | |
| | | | | | GTGCTTTT | |
| 43029944 | 1 | AGGAGGCAGTGGGAG | 507 | AGG | AGGAGGCAGTGGGAGGGCGGGTTTTAGAGCTAGAAATAGCAAGTTA | 767 |
| | | GGCGG | | | AAATAAGGCTAGTCCGTTATCAACTTGAAAAAGTGGCACCGAGTCG | |
| | | | | | GTGCTTTT | |
| 43029945 | 1 | GGAGGCAGTGGGAGG | 508 | GGG | GGAGGCAGTGGGAGGGCGGAGTTTTAGAGCTAGAAATAGCAAGTTA | 768 |
| | | GCGGA | | | AAATAAGGCTAGTCCGTTATCAACTTGAAAAAGTGGCACCGAGTCG | |
| | | | | | GTGCTTTT | |
| 43029948 | 1 | GGCAGTGGGAGGGCG | 509 | CGG | GGCAGTGGGAGGGCGGAGGGGTTTTAGAGCTAGAAATAGCAAGTTA | 769 |
| | | GAGGG | | | AAATAAGGCTAGTCCGTTATCAACTTGAAAAAGTGGCACCGAGTCG | |
| | | | | | GTGCTTTT | |
| 43029949 | 1 | GCAGTGGGAGGGCGG | 510 | GGG | GCAGTGGGAGGGCGGAGGGCGTTTTAGAGCTAGAAATAGCAAGTTA | 770 |
| | | AGGGC | | | AAATAAGGCTAGTCCGTTATCAACTTGAAAAAGTGGCACCGAGTCG | |
| | | | | | GTGCTTTT | |
| 43029950 | 1 | CAGTGGGAGGGCGGA | 511 | GGG | CAGTGGGAGGGCGGAGGGCGGTTTTAGAGCTAGAAATAGCAAGTTA | 771 |
| | | GGGCG | | | AAATAAGGCTAGTCCGTTATCAACTTGAAAAAGTGGCACCGAGTCG | |
| | | | | | GTGCTTTT | |
| 43029951 | 1 | AGTGGGAGGGCGGAG | 512 | GGG | AGTGGGAGGGCGGAGGGCGGGTTTTAGAGCTAGAAATAGCAAGTTA | 772 |
| | | GGCGG | | | AAATAAGGCTAGTCCGTTATCAACTTGAAAAAGTGGCACCGAGTCG | |
| | | | | | GTGCTTTT | |
| 43029958 | 1 | GGGCGGAGGGCGGGG | 513 | CGG | GGGCGGAGGGCGGGGGCCTTGTTTTAGAGCTAGAAATAGCAAGTTA | 773 |
| | | GCCTT | | | AAATAAGGCTAGTCCGTTATCAACTTGAAAAAGTGGCACCGAGTCG | |
| | | | | | GTGCTTTT | |
| 43029959 | 1 | GGCGGAGGGCGGGGG | 514 | GGG | GGCGGAGGGCGGGGGCCTTCGTTTTAGAGCTAGAAATAGCAAGTTA | 774 |
| | | CCTTC | | | AAATAAGGCTAGTCCGTTATCAACTTGAAAAAGTGGCACCGAGTCG | |
| | | | | | GTGCTTTT | |
| 43029960 | 1 | GCGGAGGGCGGGGGC | 515 | GGG | GCGGAGGGCGGGGGCCTTCGGTTTTAGAGCTAGAAATAGCAAGTTA | 775 |
| | | CTTCG | | | AAATAAGGCTAGTCCGTTATCAACTTGAAAAAGTGGCACCGAGTCG | |
| | | | | | GTGCTTTT | |
| 43029963 | 1 | GAGGGCGGGGGCCTT | 516 | TGG | GAGGGCGGGGGCCTTCGGGGGTTTTAGAGCTAGAAATAGCAAGTTA | 776 |
| | | CGGGG | | | AAATAAGGCTAGTCCGTTATCAACTTGAAAAAGTGGCACCGAGTCG | |
| | | | | | GTGCTTTT | |
| 43029963 | −1 | ACCCTGGGCGCCCAC | 2516 | AGG | ACCCTGGGCGCCCACCCCGAGTTTTAGAGCTAGAAATAGCAAGTTA | 777 |
| | | CCCGA | | | AAATAAGGCTAGTCCGTTATCAACTTGAAAAAGTGGCACCGAGTCG | |
| | | | | | GTGCTTTT | |
| 43029964 | 1 | AGGGCGGGGGCCTTC | 517 | GGG | AGGGCGGGGGCCTTCGGGGTGTTTTAGAGCTAGAAATAGCAAGTTA | 778 |
| | | GGGGT | | | AAATAAGGCTAGTCCGTTATCAACTTGAAAAAGTGGCACCGAGTCG | |
| | | | | | GTGCTTTT | |
| 43029972 | 1 | GGCCTTCGGGGTGGG | 518 | AGG | GGCCTTCGGGGTGGGCGCCCGTTTTAGAGCTAGAAATAGCAAGTTA | 779 |
| | | CGCCC | | | AAATAAGGCTAGTCCGTTATCAACTTGAAAAAGTGGCACCGAGTCG | |
| | | | | | GTGCTTTT | |
| 43029973 | 1 | GCCTTCGGGGTGGGC | 519 | GGG | GCCTTCGGGGTGGGCGCCCAGTTTTAGAGCTAGAAATAGCAAGTTA | 780 |
| | | GCCCA | | | AAATAAGGCTAGTCCGTTATCAACTTGAAAAAGTGGCACCGAGTCG | |
| | | | | | GTGCTTTT | |
| 43029977 | 1 | TCGGGGTGGGCGCCC | 2517 | AGG | TCGGGGTGGGCGCCCAGGGTGTTTTAGAGCTAGAAATAGCAAGTTA | 781 |
| | | AGGGT | | | AAATAAGGCTAGTCCGTTATCAACTTGAAAAAGTGGCACCGAGTCG | |
| | | | | | GTGCTTTT | |
| 43029978 | 1 | CGGGGTGGGCGCCCA | 520 | GGG | CGGGGTGGGCGCCCAGGGTAGTTTTAGAGCTAGAAATAGCAAGTTA | 782 |
| | | GGGTA | | | AAATAAGGCTAGTCCGTTATCAACTTGAAAAAGTGGCACCGAGTCG | |
| | | | | | GTGCTTTT | |
| 43029978 | −1 | GCGGCCACCTGCCCT | 521 | GGG | GCGGCCACCTGCCCTACCCTGTTTTAGAGCTAGAAATAGCAAGTTA | 783 |
| | | ACCCT | | | AAATAAGGCTAGTCCGTTATCAACTTGAAAAAGTGGCACCGAGTCG | |
| | | | | | GTGCTTTT | |
| 43029979 | −1 | CGCGGCCACCTGCCC | 522 | TGG | CGCGGCCACCTGCCCTACCCGTTTTAGAGCTAGAAATAGCAAGTTA | 784 |
| | | TACCC | | | AAATAAGGCTAGTCCGTTATCAACTTGAAAAAGTGGCACCGAGTCG | |
| | | | | | GTGCTTTT | |
| 43029982 | 1 | GTGGGCGCCCAGGGT | 523 | AGG | GTGGGCGCCCAGGGTAGGGCGTTTTAGAGCTAGAAATAGCAAGTTA | 785 |
| | | AGGGC | | | AAATAAGGCTAGTCCGTTATCAACTTGAAAAAGTGGCACCGAGTCG | |
| | | | | | GTGCTTTT | |
| 43029985 | 1 | GGCGCCCAGGGTAGG | 524 | TGG | GGCGCCCAGGGTAGGGCAGGGTTTTAGAGCTAGAAATAGCAAGTTA | 786 |
| | | GCAGG | | | AAATAAGGCTAGTCCGTTATCAACTTGAAAAAGTGGCACCGAGTCG | |
| | | | | | GTGCTTTT | |
| 43029991 | 1 | CAGGGTAGGGCAGGT | 525 | CGG | CAGGGTAGGGCAGGTGGCCGGTTTTAGAGCTAGAAATAGCAAGTTA | 787 |
| | | GGCCG | | | AAATAAGGCTAGTCCGTTATCAACTTGAAAAAGTGGCACCGAGTCG | |
| | | | | | GTGCTTTT | |
| 43029996 | 1 | TAGGGCAGGTGGCCG | 526 | TGG | TAGGGCAGGTGGCCGCGGCGGTTTTAGAGCTAGAAATAGCAAGTTA | 788 |
| | | CGGCG | | | AAATAAGGCTAGTCCGTTATCAACTTGAAAAAGTGGCACCGAGTCG | |
| | | | | | GTGCTTTT | |
| 43029997 | −1 | TTCTCCCTGCCTCCA | 2518 | CGG | TTCTCCCTGCCTCCACGCCGGTTTTAGAGCTAGAAATAGCAAGTTA | 789 |
| | | CGCCG | | | AAATAAGGCTAGTCCGTTATCAACTTGAAAAAGTGGCACCGAGTCG | |
| | | | | | GTGCTTTT | |
| 43029999 | 1 | GGCAGGTGGCCGCGG | 527 | AGG | GGCAGGTGGCCGCGGCGTGGGTTTTAGAGCTAGAAATAGCAAGTTA | 790 |
| | | CGTGG | | | AAATAAGGCTAGTCCGTTATCAACTTGAAAAAGTGGCACCGAGTCG | |
| | | | | | GTGCTTTT | |
| 43030003 | 1 | GGTGGCCGCGGCGTG | 528 | AGG | GGTGGCCGCGGCGTGGAGGCGTTTTAGAGCTAGAAATAGCAAGTTA | 791 |
| | | GAGGC | | | AAATAAGGCTAGTCCGTTATCAACTTGAAAAAGTGGCACCGAGTCG | |
| | | | | | GTGCTTTT | |
| 43030004 | 1 | GTGGCCGCGGCGTGG | 529 | GGG | GTGGCCGCGGCGTGGAGGCAGTTTTAGAGCTAGAAATAGCAAGTTA | 792 |
| | | AGGCA | | | AAATAAGGCTAGTCCGTTATCAACTTGAAAAAGTGGCACCGAGTCG | |
| | | | | | GTGCTTTT | |
| 43030029 | −1 | GTCCATGTCGACGAG | 530 | TGG | GTCCATGTCGACGAGGGTTTGTTTTAGAGCTAGAAATAGCAAGTTA | 793 |
| | | GGTTT | | | AAATAAGGCTAGTCCGTTATCAACTTGAAAAAGTGGCACCGAGTCG | |
| | | | | | GTGCTTTT | |
| 43030035 | −1 | GGCCATGTCCATGTC | 531 | GGG | GGCCATGTCCATGTCGACGAGTTTTAGAGCTAGAAATAGCAAGTTA | 794 |
| | | GACGA | | | AAATAAGGCTAGTCCGTTATCAACTTGAAAAAGTGGCACCGAGTCG | |
| | | | | | GTGCTTTT | |
| 43030036 | −1 | CGGCCATGTCCATGT | 532 | AGG | CGGCCATGTCCATGTCGACGGTTTTAGAGCTAGAAATAGCAAGTTA | 795 |
| | | CGACG | | | AAATAAGGCTAGTCCGTTATCAACTTGAAAAAGTGGCACCGAGTCG | |
| | | | | | GTGCTTTT | |
| 43030038 | 1 | CTCCAAAACCCTCGT | 533 | TGG | CTCCAAAACCCTCGTCGACAGTTTTAGAGCTAGAAATAGCAAGTTA | 796 |
| | | CGACA | | | AAATAAGGCTAGTCCGTTATCAACTTGAAAAAGTGGCACCGAGTCG | |
| | | | | | GTGCTTTT | |
| 43030044 | 1 | AACCCTCGTCGACAT | 534 | TGG | AACCCTCGTCGACATGGACAGTTTTAGAGCTAGAAATAGCAAGTTA | 797 |
| | | GGACA | | | AAATAAGGCTAGTCCGTTATCAACTTGAAAAAGTGGCACCGAGTCG | |
| | | | | | GTGCTTTT | |
| 43030056 | −1 | GTCCAGTGCAGCACT | 535 | CGG | GTCCAGTGCAGCACTGTAGTGTTTTAGAGCTAGAAATAGCAAGTTA | 798 |
| | | GTAGT | | | AAATAAGGCTAGTCCGTTATCAACTTGAAAAAGTGGCACCGAGTCG | |
| | | | | | GTGCTTTT | |
| 43030065 | 1 | GGCCGACTACAGTGC | 536 | TGG | GGCCGACTACAGTGCTGCACGTTTTAGAGCTAGAAATAGCAAGTTA | 799 |
| | | TGCAC | | | AAATAAGGCTAGTCCGTTATCAACTTGAAAAAGTGGCACCGAGTCG | |
| | | | | | GTGCTTTT | |
| 43030078 | −1 | ATTCCAGGGTGGTGT | 537 | GGG | ATTCCAGGGTGGTGTAGGCTGTTTTAGAGCTAGAAATAGCAAGTTA | 800 |
| | | AGGCT | | | AAATAAGGCTAGTCCGTTATCAACTTGAAAAAGTGGCACCGAGTCG | |
| | | | | | GTGCTTTT | |
| 43030079 | −1 | AATTCCAGGGTGGTG | 538 | TGG | AATTCCAGGGTGGTGTAGGCGTTTTAGAGCTAGAAATAGCAAGTTA | 801 |
| | | TAGGC | | | AAATAAGGCTAGTCCGTTATCAACTTGAAAAAGTGGCACCGAGTCG | |
| | | | | | GTGCTTTT | |
| 43030083 | −1 | CTCAAATTCCAGGGT | 539 | AGG | CTCAAATTCCAGGGTGGTGTGTTTTAGAGCTAGAAATAGCAAGTTA | 802 |
| | | GGTGT | | | AAATAAGGCTAGTCCGTTATCAACTTGAAAAAGTGGCACCGAGTCG | |
| | | | | | GTGCTTTT | |
| 43030086 | 1 | GGACCCAGCCTACACCACCC | 540 | TGG | GGACCCAGCCTACACCACCCGTTTTAGAGCTAGAAATAGCAAGTTA | 803 |
| | | | | | AAATAAGGCTAGTCCGTTATCAACTTGAAAAAGTGGCACCGAGTCG | |
| | | | | | GTGCTTTT | |
| 43030089 | −1 | CACATTCTCAAATTC | 541 | TGG | CACATTCTCAAATTCCAGGGGTTTTAGAGCTAGAAATAGCAAGTTA | 804 |
| | | CAGGG | | | AAATAAGGCTAGTCCGTTATCAACTTGAAAAAGTGGCACCGAGTCG | |
| | | | | | GTGCTTTT | |
| 43030092 | −1 | CTGCACATTCTCAAA | 542 | GGG | CTGCACATTCTCAAATTCCAGTTTTAGAGCTAGAAATAGCAAGTTA | 805 |
| | | TTCCA | | | AAATAAGGCTAGTCCGTTATCAACTTGAAAAAGTGGCACCGAGTCG | |
| | | | | | GTGCTTTT | |
| 43030093 | −1 | CCTGCACATTCTCAA | 543 | AGG | CCTGCACATTCTCAAATTCCGTTTTAGAGCTAGAAATAGCAAGTTA | 806 |
| | | ATTCC | | | AAATAAGGCTAGTCCGTTATCAACTTGAAAAAGTGGCACCGAGTCG | |
| | | | | | GTGCTTTT | |
| 43030104 | 1 | CCTGGAATTTGAGAA | 544 | AGG | CCTGGAATTTGAGAATGTGCGTTTTAGAGCTAGAAATAGCAAGTTA | 807 |
| | | TGTGC | | | AAATAAGGCTAGTCCGTTATCAACTTGAAAAAGTGGCACCGAGTCG | |
| | | | | | GTGCTTTT | |
| 43030116 | 1 | GAATGTGCAGGTGTT | 545 | TGG | GAATGTGCAGGTGTTGACGAGTTTTAGAGCTAGAAATAGCAAGTTA | 808 |
| | | GACGA | | | AAATAAGGCTAGTCCGTTATCAACTTGAAAAAGTGGCACCGAGTCG | |
| | | | | | GTGCTTTT | |
| 43030117 | 1 | AATGTGCAGGTGTTG | 546 | GGG | AATGTGCAGGTGTTGACGATGTTTTAGAGCTAGAAATAGCAAGTTA | 809 |
| | | ACGAT | | | AAATAAGGCTAGTCCGTTATCAACTTGAAAAAGTGGCACCGAGTCG | |
| | | | | | GTGCTTTT | |
| 43030123 | 1 | CAGGTGTTGACGATG | 547 | TGG | CAGGTGTTGACGATGGGCAAGTTTTAGAGCTAGAAATAGCAAGTTA | 810 |
| | | GGCAA | | | AAATAAGGCTAGTCCGTTATCAACTTGAAAAAGTGGCACCGAGTCG | |
| | | | | | GTGCTTTT | |
| 43030127 | 1 | TGTTGACGATGGGCA | 548 | AGG | TGTTGACGATGGGCAATGGTGTTTTAGAGCTAGAAATAGCAAGTTA | 811 |
| | | ATGGT | | | AAATAAGGCTAGTCCGTTATCAACTTGAAAAAGTGGCACCGAGTCG | |
| | | | | | GTGCTTTT | |
| 43030130 | 1 | TGACGATGGGCAATG | 549 | TGG | TGACGATGGGCAATGGTAGGGTTTTAGAGCTAGAAATAGCAAGTTA | 812 |
| | | GTAGG | | | AAATAAGGCTAGTCCGTTATCAACTTGAAAAAGTGGCACCGAGTCG | |
| | | | | | GTGCTTTT | |
| 43030131 | 1 | GACGATGGGCAATGGTAGGT | 550 | GGG | GACGATGGGCAATGGTAGGTGTTTTAGAGCTAGAAATAGCAAGTTA | 813 |
| | | | | | AAATAAGGCTAGTCCGTTATCAACTTGAAAAAGTGGCACCGAGTCG | |
| | | | | | GTGCTTTT | |
| 43030132 | 1 | ACGATGGGCAATGGT | 551 | GGG | ACGATGGGCAATGGTAGGTGGTTTTAGAGCTAGAAATAGCAAGTTA | 814 |
| | | AGGTG | | | AAATAAGGCTAGTCCGTTATCAACTTGAAAAAGTGGCACCGAGTCG | |
| | | | | | GTGCTTTT | |
| 43030133 | 1 | CGATGGGCAATGGTA | 552 | GGG | CGATGGGCAATGGTAGGTGGGTTTTAGAGCTAGAAATAGCAAGTTA | 815 |
| | | GGTGG | | | AAATAAGGCTAGTCCGTTATCAACTTGAAAAAGTGGCACCGAGTCG | |
| | | | | | GTGCTTTT | |
| 43030147 | 1 | AGGTGGGGGCAGATG | 553 | AGG | AGGTGGGGGCAGATGTGCCCGTTTTAGAGCTAGAAATAGCAAGTTA | 816 |
| | | TGCCC | | | AAATAAGGCTAGTCCGTTATCAACTTGAAAAAGTGGCACCGAGTCG | |
| | | | | | GTGCTTTT | |
| 43030153 | −1 | CTGCCCCCACTGGCA | 554 | GGG | CTGCCCCCACTGGCACACCTGTTTTAGAGCTAGAAATAGCAAGTTA | 817 |
| | | CACCT | | | AAATAAGGCTAGTCCGTTATCAACTTGAAAAAGTGGCACCGAGTCG | |
| | | | | | GTGCTTTT | |
| 43030154 | −1 | CCTGCCCCCACTGGC | 555 | TGG | CCTGCCCCCACTGGCACACCGTTTTAGAGCTAGAAATAGCAAGTTA | 818 |
| | | ACACC | | | AAATAAGGCTAGTCCGTTATCAACTTGAAAAAGTGGCACCGAGTCG | |
| | | | | | GTGCTTTT | |
| 43030158 | 1 | GATGTGCCCAGGTGT | 556 | TGG | GATGTGCCCAGGTGTGCCAGGTTTTAGAGCTAGAAATAGCAAGTTA | 819 |
| | | GCCAG | | | AAATAAGGCTAGTCCGTTATCAACTTGAAAAAGTGGCACCGAGTCG | |
| | | | | | GTGCTTTT | |
| 43030159 | 1 | ATGTGCCCAGGTGTG | 557 | GGG | ATGTGCCCAGGTGTGCCAGTGTTTTAGAGCTAGAAATAGCAAGTTA | 820 |
| | | CCAGT | | | AAATAAGGCTAGTCCGTTATCAACTTGAAAAAGTGGCACCGAGTCG | |
| | | | | | GTGCTTTT | |
| 43030160 | 1 | TGTGCCCAGGTGTGC | 558 | GGG | TGTGCCCAGGTGTGCCAGTGGTTTTAGAGCTAGAAATAGCAAGTTA | 821 |
| | | CAGTG | | | AAATAAGGCTAGTCCGTTATCAACTTGAAAAAGTGGCACCGAGTCG | |
| | | | | | GTGCTTTT | |
| 43030161 | 1 | GTGCCCAGGTGTGCC | 559 | GGG | GTGCCCAGGTGTGCCAGTGGGTTTTAGAGCTAGAAATAGCAAGTTA | 822 |
| | | AGTGG | | | AAATAAGGCTAGTCCGTTATCAACTTGAAAAAGTGGCACCGAGTCG | |
| | | | | | GTGCTTTT | |
| 43030163 | −1 | CCAGGCACACCTGCC | 560 | TGG | CCAGGCACACCTGCCCCCACGTTTTAGAGCTAGAAATAGCAAGTTA | 823 |
| | | CCCAC | | | AAATAAGGCTAGTCCGTTATCAACTTGAAAAAGTGGCACCGAGTCG | |
| | | | | | GTGCTTTT | |
| 43030165 | 1 | CCAGGTGTGCCAGTG | 561 | AGG | CCAGGTGTGCCAGTGGGGGCGTTTTAGAGCTAGAAATAGCAAGTTA | 824 |
| | | GGGGC | | | AAATAAGGCTAGTCCGTTATCAACTTGAAAAAGTGGCACCGAGTCG | |
| | | | | | GTGCTTTT | |
| 43030174 | 1 | CCAGTGGGGGCAGGT | 562 | TGG | CCAGTGGGGGCAGGTGTGCCGTTTTAGAGCTAGAAATAGCAAGTTA | 825 |
| | | GTGCC | | | AAATAAGGCTAGTCCGTTATCAACTTGAAAAAGTGGCACCGAGTCG | |
| | | | | | GTGCTTTT | |
| 43030175 | 1 | CAGTGGGGGCAGGTG | 563 | GGG | CAGTGGGGGCAGGTGTGCCTGTTTTAGAGCTAGAAATAGCAAGTTA | 826 |
| | | TGCCT | | | AAATAAGGCTAGTCCGTTATCAACTTGAAAAAGTGGCACCGAGTCG | |
| | | | | | GTGCTTTT | |
| 43030181 | 1 | GGGCAGGTGTGCCTG | 564 | AGG | GGGCAGGTGTGCCTGGGTCCGTTTTAGAGCTAGAAATAGCAAGTTA | 827 |
| | | GGTCC | | | AAATAAGGCTAGTCCGTTATCAACTTGAAAAAGTGGCACCGAGTCG | |
| | | | | | GTGCTTTT | |
| 43030181 | −1 | AAAGATCTGCTCCTG | 565 | AGG | AAAGATCTGCTCCTGGACCCGTTTTAGAGCTAGAAATAGCAAGTTA | 828 |
| | | GACCC | | | AAATAAGGCTAGTCCGTTATCAACTTGAAAAAGTGGCACCGAGTCG | |
| | | | | | GTGCTTTT | |
| 43030188 | −1 | GAGTGCCAAAGATCT | 566 | TGG | GAGTGCCAAAGATCTGCTCCGTTTTAGAGCTAGAAATAGCAAGTTA | 829 |
| | | GCTCC | | | AAATAAGGCTAGTCCGTTATCAACTTGAAAAAGTGGCACCGAGTCG | |
| | | | | | GTGCTTTT | |
| 43030194 | 1 | TGGGTCCAGGAGCAG | 567 | TGG | TGGGTCCAGGAGCAGATCTTGTTTTAGAGCTAGAAATAGCAAGTTA | 830 |
| | | ATCTT | | | AAATAAGGCTAGTCCGTTATCAACTTGAAAAAGTGGCACCGAGTCG | |
| | | | | | GTGCTTTT | |
| 43030207 | 1 | AGATCTTTGGCACTC | 568 | TGG | AGATCTTTGGCACTCAACTTGTTTTAGAGCTAGAAATAGCAAGTTA | 831 |
| | | AACTT | | | AAATAAGGCTAGTCCGTTATCAACTTGAAAAAGTGGCACCGAGTCG | |
| | | | | | GTGCTTTT | |
| 43030208 | 1 | GATCTTTGGCACTCA | 569 | GGG | GATCTTTGGCACTCAACTTTGTTTTAGAGCTAGAAATAGCAAGTTA | 832 |
| | | ACTTT | | | AAATAAGGCTAGTCCGTTATCAACTTGAAAAAGTGGCACCGAGTCG | |
| | | | | | GTGCTTTT | |
| 43030209 | 1 | ATCTTTGGCACTCAACTTTG | 570 | GGG | ATCTTTGGCACTCAACTTTGGTTTTAGAGCTAGAAATAGCAAGTTA | 833 |
| | | | | | AAATAAGGCTAGTCCGTTATCAACTTGAAAAAGTGGCACCGAGTCG | |
| | | | | | GTGCTTTT | |
| 43030212 | 1 | TTTGGCACTCAACTT | 571 | TGG | TTTGGCACTCAACTTTGGGGGTTTTAGAGCTAGAAATAGCAAGTTA | 834 |
| | | TGGGG | | | AAATAAGGCTAGTCCGTTATCAACTTGAAAAAGTGGCACCGAGTCG | |
| | | | | | GTGCTTTT | |
| 43030213 | 1 | TTGGCACTCAACTTT | 572 | GGG | TTGGCACTCAACTTTGGGGTGTTTTAGAGCTAGAAATAGCAAGTTA | 835 |
| | | GGGGT | | | AAATAAGGCTAGTCCGTTATCAACTTGAAAAAGTGGCACCGAGTCG | |
| | | | | | GTGCTTTT | |
| 43030216 | 1 | GCACTCAACTTTGGG | 573 | AGG | GCACTCAACTTTGGGGTGGGGTTTTAGAGCTAGAAATAGCAAGTTA | 836 |
| | | GTGGG | | | AAATAAGGCTAGTCCGTTATCAACTTGAAAAAGTGGCACCGAGTCG | |
| | | | | | GTGCTTTT | |
| 43030233 | 1 | GGGAGGAGAATGATA | 574 | TGG | GGGAGGAGAATGATACAAAAGTTTTAGAGCTAGAAATAGCAAGTTA | 837 |
| | | CAAAA | | | AAATAAGGCTAGTCCGTTATCAACTTGAAAAAGTGGCACCGAGTCG | |
| | | | | | GTGCTTTT | |
| 43030237 | 1 | GGAGAATGATACAAA | 575 | AGG | GGAGAATGATACAAAATGGTGTTTTAGAGCTAGAAATAGCAAGTTA | 838 |
| | | ATGGT | | | AAATAAGGCTAGTCCGTTATCAACTTGAAAAAGTGGCACCGAGTCG | |
| | | | | | GTGCTTTT | |
| 43030241 | 1 | AATGATACAAAATGG | 576 | TGG | AATGATACAAAATGGTAGGTGTTTTAGAGCTAGAAATAGCAAGTTA | 839 |
| | | TAGGT | | | AAATAAGGCTAGTCCGTTATCAACTTGAAAAAGTGGCACCGAGTCG | |
| | | | | | GTGCTTTT | |
| 43030250 | 1 | AAATGGTAGGTTGGT | 577 | AGG | AAATGGTAGGTTGGTCCTACGTTTTAGAGCTAGAAATAGCAAGTTA | 840 |
| | | CCTAC | | | AAATAAGGCTAGTCCGTTATCAACTTGAAAAAGTGGCACCGAGTCG | |
| | | | | | GTGCTTTT | |
| 43030254 | −1 | CAACACCTGTGCTGG | 578 | AGG | CAACACCTGTGCTGGCCTGTGTTTTAGAGCTAGAAATAGCAAGTTA | 841 |
| | | CCTGT | | | AAATAAGGCTAGTCCGTTATCAACTTGAAAAAGTGGCACCGAGTCG | |
| | | | | | GTGCTTTT | |
| 43030260 | 1 | TTGGTCCTACAGGCC | 579 | AGG | TTGGTCCTACAGGCCAGCACGTTTTAGAGCTAGAAATAGCAAGTTA | 842 |
| | | AGCAC | | | AAATAAGGCTAGTCCGTTATCAACTTGAAAAAGTGGCACCGAGTCG | |
| | | | | | GTGCTTTT | |
| 43030262 | −1 | TCACTTGGCAACACC | 580 | TGG | TCACTTGGCAACACCTGTGCGTTTTAGAGCTAGAAATAGCAAGTTA | 843 |
| | | TGTGC | | | AAATAAGGCTAGTCCGTTATCAACTTGAAAAAGTGGCACCGAGTCG | |
| | | | | | GTGCTTTT | |
| 43030277 | −1 | CTGGGCACATGGGCT | 581 | TGG | CTGGGCACATGGGCTTCACTGTTTTAGAGCTAGAAATAGCAAGTTA | 844 |
| | | TCACT | | | AAATAAGGCTAGTCCGTTATCAACTTGAAAAAGTGGCACCGAGTCG | |
| | | | | | GTGCTTTT | |
| 43030287 | −1 | ATCACTGTGCCTGGG | 582 | GGG | ATCACTGTGCCTGGGCACATGTTTTAGAGCTAGAAATAGCAAGTTA | 845 |
| | | CACAT | | | AAATAAGGCTAGTCCGTTATCAACTTGAAAAAGTGGCACCGAGTCG | |
| | | | | | GTGCTTTT | |
| 43030288 | −1 | GATCACTGTGCCTGG | 583 | TGG | GATCACTGTGCCTGGGCACAGTTTTAGAGCTAGAAATAGCAAGTTA | 846 |
| | | GCACA | | | AAATAAGGCTAGTCCGTTATCAACTTGAAAAAGTGGCACCGAGTCG | |
| | | | | | GTGCTTTT | |
| 43030289 | 1 | CAAGTGAAGCCCATG | 584 | AGG | CAAGTGAAGCCCATGTGCCCGTTTTAGAGCTAGAAATAGCAAGTTA | 847 |
| | | TGCCC | | | AAATAAGGCTAGTCCGTTATCAACTTGAAAAAGTGGCACCGAGTCG | |
| | | | | | GTGCTTTT | |
| 43030295 | −1 | TGCCTGTGATCACTG | 585 | GGG | TGCCTGTGATCACTGTGCCTGTTTTAGAGCTAGAAATAGCAAGTTA | 848 |
| | | TGCCT | | | AAATAAGGCTAGTCCGTTATCAACTTGAAAAAGTGGCACCGAGTCG | |
| | | | | | GTGCTTTT | |
| 43030296 | −1 | ATGCCTGTGATCACT | 586 | TGG | ATGCCTGTGATCACTGTGCCGTTTTAGAGCTAGAAATAGCAAGTTA | 849 |
| | | GTGCC | | | AAATAAGGCTAGTCCGTTATCAACTTGAAAAAGTGGCACCGAGTCG | |
| | | | | | GTGCTTTT | |
| 43030304 | 1 | TGCCCAGGCACAGTG | 587 | AGG | TGCCCAGGCACAGTGATCACGTTTTAGAGCTAGAAATAGCAAGTTA | 850 |
| | | ATCAC | | | AAATAAGGCTAGTCCGTTATCAACTTGAAAAAGTGGCACCGAGTCG | |
| | | | | | GTGCTTTT | |
| 43030312 | 1 | CACAGTGATCACAGG | 588 | TGG | CACAGTGATCACAGGCATTCGTTTTAGAGCTAGAAATAGCAAGTTA | 851 |
| | | CATTC | | | AAATAAGGCTAGTCCGTTATCAACTTGAAAAAGTGGCACCGAGTCG | |
| | | | | | GTGCTTTT | |
| 43030313 | 1 | ACAGTGATCACAGGC | 589 | GGG | ACAGTGATCACAGGCATTCTGTTTTAGAGCTAGAAATAGCAAGTTA | 852 |
| | | ATTCT | | | AAATAAGGCTAGTCCGTTATCAACTTGAAAAAGTGGCACCGAGTCG | |
| | | | | | GTGCTTTT | |
| 43030319 | 1 | ATCACAGGCATTCTGGGTGA | 590 | AGG | ATCACAGGCATTCTGGGTGAGTTTTAGAGCTAGAAATAGCAAGTTA | 853 |
| | | | | | AAATAAGGCTAGTCCGTTATCAACTTGAAAAAGTGGCACCGAGTCG | |
| | | | | | GTGCTTTT | |
| 43030320 | 1 | TCACAGGCATTCTGG | 591 | GGG | TCACAGGCATTCTGGGTGAAGTTTTAGAGCTAGAAATAGCAAGTTA | 854 |
| | | GTGAA | | | AAATAAGGCTAGTCCGTTATCAACTTGAAAAAGTGGCACCGAGTCG | |
| | | | | | GTGCTTTT | |
| 43030323 | 1 | CAGGCATTCTGGGTG | 592 | AGG | CAGGCATTCTGGGTGAAGGGGTTTTAGAGCTAGAAATAGCAAGTTA | 855 |
| | | AAGGG | | | AAATAAGGCTAGTCCGTTATCAACTTGAAAAAGTGGCACCGAGTCG | |
| | | | | | GTGCTTTT | |
| 43030332 | 1 | TGGGTGAAGGGAGGC | 593 | AGG | TGGGTGAAGGGAGGCCTGCAGTTTTAGAGCTAGAAATAGCAAGTTA | 856 |
| | | CTGCA | | | AAATAAGGCTAGTCCGTTATCAACTTGAAAAAGTGGCACCGAGTCG | |
| | | | | | GTGCTTTT | |
| 43030333 | 1 | GGGTGAAGGGAGGCC | 594 | GGG | GGGTGAAGGGAGGCCTGCAAGTTTTAGAGCTAGAAATAGCAAGTTA | 857 |
| | | TGCAA | | | AAATAAGGCTAGTCCGTTATCAACTTGAAAAAGTGGCACCGAGTCG | |
| | | | | | GTGCTTTT | |
| 43030335 | −1 | TGCTGGAAATTGGCC | 595 | AGG | TGCTGGAAATTGGCCCTTGCGTTTTAGAGCTAGAAATAGCAAGTTA | 858 |
| | | CTTGC | | | AAATAAGGCTAGTCCGTTATCAACTTGAAAAAGTGGCACCGAGTCG | |
| | | | | | GTGCTTTT | |

[0576] Table 10 below provides exemplary target nucleotide sequences of an HNF4α expression control genomic region and the corresponding zinc finger DNA binding domain amino acid sequences and amino acid structures of disrupting agent fusion proteins comprising a zing finger polypeptide and an effector suitable for use in the present invention.

[0577] The forward strand of the HNF4α expression control region targeted by the exemplary target nucleotide sequence in Table 10 comprises the nucleotide sequence of:

(SEQ ID NO: 859)
CTCCGGGAGGGGGTGGGGGTGAGGGAAACAGGAGAATGTGATGGGAAAATC
CGAGATGGAGCCAGCCTGGGCCAGAAACACTGGGAGCTGTGGGAGACGGAG
AGGGGCAGGGTGGGATCACAGGGAGCAGGAGCGGGGAATTGGAGGTGAATC
TGGCCCTCCCAAACTTCCAGTCCATTCTGCTCCCAGGGGAACCGGGAAACT
GCGGGGGAACTGGAAGGGAGCTCCCAGAACAAGGATCCAGAAGATTGGCAT
CTGGGGCCTGGGATTTAGGTTTCTAAATCGTGGGCCATGGGGCAGCCTTAT
CTCTGCAAAAGCATTGAGGGTAGAAGTCAATGATTTGGGAAGTTATTGAAT
TAGGGGATCTCGGAGGTAGGCTGTCAGTGCCTGATAGTATCAGTTAGAATG
CCTGACTTGGGGTGACAATGGCTTGGAGGGGTGGGTGAGTCAAGGGTCAAA
TGAGTGCCCGTGAGTCATGATGCCTGCCTTGTACAATTGATAACTGAACAT
CGGTGAGTTAGGGCCCCAGCAGTTGTAATTAGCACCCCGGGTGTCAGCCAG
AAACCAACAAACAGCCAAATCCCTGCAGCCCCGCCCAGCCTATCCACCGGC
GGGGGACCGATTAACCATTAACCCCCACCCCTCCCCGGCAGAGCCTCCACC
CCTTCACAGAGGCTAGGCCAAGACTCCCAGCAGATCTTCCCAGAGGACGGT
TTGAAAGGAAGGCAGAGAGGGCACTGGGAGGAGGCAGTGGGAGGGCGGAGG
GCGGGGGCCTTCGGGGTGGGCGCCCAGGGTAGGGCAGGTGGCCGCGGCGTG
GAGGCAGGGAGAATGCGACTCTCCAAAACCCTCGTCGACATGGACATGGCC
GACTACAGTGCTGCACTGGACCCAGCCTACACCACCCTGGAATTTGAGAAT
GTGCAGGTGTTGACGATGGGCAATGGTAGGTGGGGGCAGATGTGCCCAGGT
GTGCCAGTGGGGGCAGGTGTGCCTGGGTCCAGGAGCAGATCTTTGGCACTC
AACTTTGGGGTGGGAGGAGAATGATACAAAATGGTAGGTTGGTCCTACAGG
CCAGCACAGGTGTTGCCAAGTGAAGCCCATGTGCCCAGGCACAGTGATCAC
AGGCATTCTGGGTGAAGGGAGGCCTGCAAGGGCCAATTTCCAGCAAAAGTT
GAT

[0578] The reverse strand of the HNF4α expression control region targeted by the exemplary target nucleotide sequence in Table 10 comprises the sequence of:

(SEQ ID NO: 860)
ATCGACTTTTGCTGGAAATTGGCCCTTGCAGGCCTCCCTTCACCCAGAATG
CCTGTGATCACTGTGCCTGGGCACATGGGCTTCACTTGGCAACACCTGTGC
TGGCCTGTAGGACCAACCTACCATTTTGTATCATTCTCCTCCCACCCCAAA
GTTGAGTGCCAAAGATCTGCTCCTGGACCCAGGCACACCTGCCCCCACTGG
CACACCTGGGCACATCTGCCCCCACCTACCATTGCCCATCGTCAACACCTG
CACATTCTCAAATTCCAGGGTGGTGTAGGCTGGGTCCAGTGCAGCACTGTA
GTCGGCCATGTCCATGTCGACGAGGGTTTTGGAGAGTCGCATTCTCCCTGC
CTCCACGCCGCGGCCACCTGCCCTACCCTGGGCGCCCACCCCGAAGGCCCC
CGCCCTCCGCCCTCCCACTGCCTCCTCCCAGTGCCCTCTCTGCCTTCCTTT
CAAACCGTCCTCTGGGAAGATCTGCTGGGAGTCTTGGCCTAGCCTCTGTGA
AGGGGTGGAGGCTCTGCCGGGGAGGGGTGGGGGTTAATGGTTAATCGGTCC
CCCGCCGGTGGATAGGCTGGGCGGGGCTGCAGGGATTTGGCTGTTTGTTGG
TTTCTGGCTGACACCCGGGGTGCTAATTACAACTGCTGGGGCCCTAACTCA
CCGATGTTCAGTTATCAATTGTACAAGGCAGGCATCATGACTCACGGGCAC
TCATTTGACCCTTGACTCACCCACCCCTCCAAGCCATTGTCACCCCAAGTC
AGGCATTCTAACTGATACTATCAGGCACTGACAGCCTACCTCCGAGATCCC
CTAATTCAATAACTTCCCAAATCATTGACTTCTACCCTCAATGCTTTTGCA
GAGATAAGGCTGCCCCATGGCCCACGATTTAGAAACCTAAATCCCAGGCCC
CAGATGCCAATCTTCTGGATCCTTGTTCTGGGAGCTCCCTTCCAGTTCCCC
CGCAGTTTCCCGGTTCCCCTGGGAGCAGAATGGACTGGAAGTTTGGGAGGG
CCAGATTCACCTCCAATTCCCCGCTCCTGCTCCCTGTGATCCCACCCTGCC
CCTCTCCGTCTCCCACAGCTCCCAGTGTTTCTGGCCCAGGCTGGCTCCATC
TCGGATTTTCCCATCACATTCTCCTGTTTCCCTCACCCCCACCCCCTCCCG
GAG

[0579] In some embodiments, the linker has the amino acid sequence of THPRAPIPKPFQ (SEQ ID NO: 311). In other embodiments, the linker has the amino acid sequence of TPNPHRRTDPSHKPFQ (SEQ ID NO: 312).

TABLE 10

| Column 1 | | | | | | |
|---|---|---|---|---|---|---|
| Nucleot1de | | | | | | |
| Sequence of | | Column 2 | | | | |
| Target Site | | SEQ ID NO. | Column 4 | | | |
| in HNF4α | Column 3 | (corresponds | Amino acid Sequence of Zinc | | Column 6 | |
| Expression | Target | to sequences | Finger DNA Binding Domain | Column 5 | Amino Acid Sequence Structure of Zinc Finger DNA Binding | Column 7 |
| Control | sequence | in Columns 1 | Polypeptides Targeting the | SEQ ID | Domain Polypeptides Targeting the Target Site in Column 1 | SEQ ID |
| Region | with space | and 3) | Target Site in Column 1 | NO: | (see Table 1B above and description thereof) | NO: |
| agatggagc | AGA TGG | 861 | LEPGEKPYKCPECGKSFSTSHSL | 1410 | X₁X₂X₃X₄X₅X₆X₇X₈X₉CX₁₀X₁₁CX₁₂X₁₃X₁₄X₁₅X₁₆TSHSLTEHX₁₇X₁₈X₁₉ | 1959 |
| cagcctggg | AGC CAG | | TEHQRTHTGEKPYKCPECGKSFS | | HX₂₀X₂₁X₂₂X₂₃X₂₄X₈X₉CX₁₀X₁₁CX₁₂X₁₃X₁₄X₁₅X₁₆RSDKLVRHX₁₇X₁₈ | |
| cca | CCT ggg | | RSDKLVRHQRTHTGEKPYKCPEC | | X₁₉HX₂₀X₂₁X₂₂X₂₃X₂₄X₈X₉CX₁₀X₁₁CX₁₂X₁₃X₁₄X₁₅X₁₆TKNSLTEHX₁₇ | |
| | CCA | | GKSFSTKNSLTEHQRTHTGEKPY | | X₁₈X₁₉HX₂₀X₂₁X₂₂X₂₃X₂₄X₈X₉CX₁₀X₁₁CX₁₂X₁₃X₁₄X₁₅X₁₆RADNLTEH | |
| | | | KCPECGKSFSRADNLTEHQRTHT | | X₁₇X₁₈X₁₉HX₂₀X₂₁X₂₂X₂₃X₂₄X₈X₉CX₁₀X₁₁CX₁₂X₁₃X₁₄X₁₅X₁₆ERSHLR | |
| | | | GEKPYKCPECGKSFSERSHLREH | | EHX₁₇X₁₈X₁₉HX₂₀X₂₁X₂₂X₂₃X₂₄X₈X₉CX₁₀X₁₁CX₁₂X₁₃X₁₄X₁₅X₁₆RSDH | |
| | | | QRTHTGEKPYKCPECGKSFSRSD | | LTTHX₁₇X₁₈X₁₉HX₂₀X₂₁X₂₂X₂₃X₂₄X₈X₉CX₁₀X₁₁CX₁₂X₁₃X₁₄X₁₅X₁₆QL | |
| | | | HLTTHQRTHTGEKPYKCPECGKS | | AHLRAHX₁₇X₁₈X₁₉HX₂₀X₂₁X₂₂X₂₃X₂₄X₂₅X₂₆X₂₇X₂₈X₂₉X₃₀ | |
| | | | FSQLAHLRAHQRTHTGEKPTGKK | | | |
| | | | TS | | | |
| cagcctggg | CAG CCT | 862 | LEPGEKPYKCPECGKSFSRNDAL | 1411 | X₁X₂X₃X₄X₅X₆X₇X₈X₉CX₁₀X₁₁CX₁₂X₁₃X₁₄X₁₅X₁₆RNDALTEHX₁₇X₁₈X₁₉ | 1960 |
| ccagaaaca | ggg CCA | | TEHQRTHTGEKPYKCPECGKSFS | | HX₂₀X₂₁X₂₂X₂₃X₂₄X₈X₉CX₁₀X₁₁CX₁₂X₁₃X₁₄X₁₅X₁₆SPADLTRHX₁₇X₁₈ | |
| ctg | GAA ACA | | SPADLTRHQRTHTGEKPYKCPEC | | X₁₉HX₂₀X₂₁X₂₂X₂₃X₂₄X₈X₉CX₁₀X₁₁CX₁₂X₁₃X₁₄X₁₅X₁₆QSSNLVRHX₁₇ | |
| | CTG | | GKSFSQSSNLVRHQRTHTGEKPY | | X₁₈X₁₉HX₂₀X₂₁X₂₂X₂₃X₂₄X₈X₉CX₁₀X₁₁CX₁₂X₁₃X₁₄X₁₅X₁₆TSHSLTEH | |
| | | | KCPECGKSFSTSHSLTEHQRTHT | | X₁₇X₁₈X₁₉HX₂₀X₂₁X₂₂X₂₃X₂₄X₈X₉CX₁₀X₁₁CX₁₂X₁₃X₁₄X₁₅X₁₆RSDKLV | |
| | | | GEKPYKCPECGKSFSRSDKLVRH | | RHX₁₇X₁₈X₁₉HX₂₀X₂₁X₂₂X₂₃X₂₄X₈X₉CX₁₀X₁₁CX₁₂X₁₃X₁₄X₁₅X₁₆TKNS | |
| | | | QRTHTGEKPYKCPECGKSFSTKN | | LTEHX₁₇X₁₈X₁₉HX₂₀X₂₁X₂₂X₂₃X₂₄X₈X₉CX₁₀X₁₁CX₁₂X₁₃X₁₄X₁₅X₁₆RA | |
| | | | SLTEHQRTHTGEKPYKCPECGKS | | DNLTEHX₁₇X₁₈X₁₉HX₂₀X₂₁X₂₂X₂₃X₂₄X₂₅X₂₆X₂₇X₂₈X₂₉X₃₀ | |
| | | | FSRADNLTEHQRTHTGEKPTGKK | | | |
| | | | TS | | | |
| agccagcct | AGC CAG | 863 | LEPGEKPYKCPECGKSFSSPADL | 1412 | X₁X₂X₃X₄X₅X₆X₇X₈X₉CX₁₀X₁₁CX₁₂X₁₃X₁₄X₁₅X₁₆SPADLTRHX₁₇X₁₈X₁₉ | 1961 |
| gggccagaa | CCT ggg | | TRHQRTHTGEKPYKCPECGKSFS | | HX₂₀X₂₁X₂₂X₂₃X₂₄X₈X₉CX₁₀X₁₁CX₁₂X₁₃X₁₄X₁₅X₁₆QSSNLVRHX₁₇X₁₈ | |
| aca | CCA GAA | | QSSNLVRHQRTHTGEKPYKCPEC | | X₁₉HX₂₀X₂₁X₂₂X₂₃X₂₄X₈X₉CX₁₀X₁₁CX₁₂X₁₃X₁₄X₁₅X₁₆TSHSLTEHX₁₇ | |
| | ACA | | GKSFSTSHSLTEHQRTHTGEKPY | | X₁₈X₁₉HX₂₀X₂₁X₂₂X₂₃X₂₄X₈X₉CX₁₀X₁₁CX₁₂X₁₃X₁₄X₁₅X₁₆RSDKLVRH | |
| | | | KCPECGKSFSRSDKLVRHQRTHT | | X₁₇X₁₈X₁₉HX₂₀X₂₁X₂₂X₂₃X₂₄X₈X₉CX₁₀X₁₁CX₁₂X₁₃X₁₄X₁₅X₁₆TKNSLT | |
| | | | GEKPYKCPECGKSFSTKNSLTEH | | EHX₁₇X₁₈X₁₉HX₂₀X₂₁X₂₂X₂₃X₂₄X₈X₉CX₁₀X₁₁CX₁₂X₁₃X₁₄X₁₅X₁₆RADN | |
| | | | QRTHTGEKPYKCPECGKSFSRAD | | LTEHX₁₇X₁₈X₁₉HX₂₀X₂₁X₂₂X₂₃X₂₄X₈X₉CX₁₀X₁₁CX₁₂XEX₁₄X₁₅X₁₆ER | |
| | | | NLTEHQRTHTGEKPYKCPECGKS | | SHLREHX₁₇X₁₈X₁₉HX₂₀X₂₁X₂₂X₂₃X₂₄X₂₅X₂₆X₂₇X₂₈X₂₉X₃₀ | |
| | | | FSERSHLREHQRTHTGEKPTGKK | | | |
| | | | TS | | | |
| tggagccag | TGG AGC | 864 | LEPGEKPYKCPECGKSFSQSSNL | 1413 | X₁X₂X₃X₄X₅X₆X₇X₈X₉CX₁₀X₁₁CX₁₂X₁₃X₁₄X₁₅X₁₆QSSNLVRHX₁₇X₁₈X₁₉ | 1962 |
| cctgggcca | CAG CCT | | VRHQRTHTGEKPYKCPECGKSFS | | HX₂₀X₂₁X₂₂X₂₃X₂₄X₈X₉CX₁₀X₁₁CX₁₂X₁₃X₁₄X₁₅X₁₆TSHSLTEHX₁₇X₁₈ | |
| gaa | ggg CCA | | TSHSLTEHQRTHTGEKPYKCPEC | | X₁₉HX₂₀X₂₁X₂₂X₂₃X₂₄X₈X₉CX₁₀X₁₁CX₁₂X₁₃X₁₄X₁₅X₁₆RSDKLVRHX₁₇ | |
| | GAA | | GKSFSRSDKLVRHQRTHTGEKPY | | X₁₈X₁₉HX₂₀X₂₁X₂₂X₂₃X₂₄X₈X₉CX₁₀X₁₁CX₁₂X₁₃X₁₄X₁₅X₁₆TKNSLTEH | |
| | | | KCPECGKSFSTKNSLTEHQRTHT | | X₁₇X₁₈X₁₉HX₂₀X₂₁X₂₂X₂₃X₂₄X₈X₉CX₁₀X₁₁CX₁₂X₁₃X₁₄X₁₅X₁₆RADNLT | |
| | | | GEKPYKCPECGKSFSRADNLTEH | | EHX₁₇X₁₈X₁₉HX₂₀X₂₁X₂₂X₂₃X₂₄X₈X₉CX₁₀X₁₁CX₁₂X₁₃X₁₄X₁₅X₁₆ERSH | |
| | | | QRTHTGEKPYKCPECGKSFSERS | | LREHX₁₇X₁₈X₁₉HX₂₀X₂₁X₂₂X₂₃X₂₄X₈X₉CX10X₁₁CX₁₂X₁₃X₁₄X₁₅X₁₆RS | |
| | | | HLREHQRTHTGEKPYKCPECGKS | | DHLTTHX₁₇X₁₈X₁₉HX₂₀X₂₁X₂₂X₂₃X₂₄X₂₅X₂₆X₂₇X₂₈X₂₉X₃₀ | |
| | | | FSRSDHLTTHQRTHTGEKPTGKK | | | |
| | | | TS | | | |
| ccgagatgg | CCG AGA | 865 | LEPGEKPYKCPECGKSFSRSDKL | 1414 | X₁X₂X₃X₄X₅X₆X₇X₈X₉CX₁₀X₁₁CX₁₂X₁₃X₁₄X₁₅X₁₆RSDKLVRHX₁₇X₁₈X₁₉ | 1963 |
| agccagcct | TGG AGC | | VRHQRTHTGEKPYKCPECGKSFS | | HX₂₀X₂₁X₂₂X₂₃X₂₄X₈X₉CX₁₀X₁₁CX₁₂X₁₃X₁₄X₁₅X₁₆TKNSLTEHX₁₇X₁₈ | |
| ggg | CAG CCT | | TKNSLTEHQRTHTGEKPYKCPEC | | X₁₉HX₂₀X₂₁X₂₂X₂₃X₂₄X₈X₉CX₁₀X₁₁CX₁₂X₁₃X₁₄X₁₅X₁₆RADNLTEHX₁₇ | |
| | GGG | | GKSFSRADNLTEHQRTHTGEKPY | | X₁₈X₁₉HX₂₀X₂₁X₂₂X₂₃X₂₄X₈X₉CX₁₀X₁₁CX₁₂X₁₃X₁₄X₁₅X₁₆ERSHLREH | |
| | | | KCPECGKSFSERSHLREHQRTHT | | X₁₇X₁₈X₁₉HX₂₀X₂₁X₂₂X₂₃X₂₄X₈X₉CX₁₀X₁₁CX₁₂X₁₃X₁₄X₁₅X₁₆RSDHLT | |
| | | | GEKPYKCPECGKSFSRSDHLTTH | | THX₁₇X₁₈X₁₉HX₂₀X₂₁X₂₂X₂₃X₂₄X₈X₉CX₁₀X₁₁CX₁₂X₁₃X₁₄X₁₅X₁₆QLAH | |
| | | | QRTHTGEKPYKCPECGKSFSQLA | | LRAHX₁₇X₁₈X₁₉HX₂₀X₂₁X₂₂X₂₃X₂₄X₈X₉CX₁₀X₁₁CX₁₂X₁₃X₁₄X₁₅X₁₆RN | |
| | | | HLRAHQRTHTGEKPYKCPECGKS | | DTLTEHX₁₇X₁₈X₁₉HX₂₀X₂₁X₂₂X₂₃X₂₄X₂₅X₂₆X₂₇X₂₈X₂₉X₃₀ | |
| | | | FSRNDTLTEHQRTHTGEKPTGKK | | | |
| | | | TS | | | |
| aatccgaga | AGA TGG | 866 | LEPGEKPYKCPECGKSFSTKNSL | 1415 | X₁X₂X₃X₄X₅X₆X₇X₈X₉CX₁₀X₁₁CX₁₂X₁₃X₁₄X₁₅X₁₆TKNSLTEHX₁₇X₁₈X₁₉ | 1964 |
| tggagccag | AAT CCG | | TEHQRTHTGEKPYKCPECGKSFS | | HX₂₀X₂₁X₂₂X₂₃X₂₄X₈X₉CX₁₀X₁₁CX₁₂X₁₃X₁₄X₁₅X₁₆RADNLTEHX₁₇X₁₈ | |
| cct | AGC CAG | | RADNLTEHQRTHTGEKPYKCPEC | | X₁₉HX₂₀X₂₁X₂₂X₂₃X₂₄X₈X₉CX₁₀X₁₁CX₁₂X₁₃X₁₄X₁₅X₁₆ERSHLREHX₁₇ | |
| | CCT | | GKSFSERSHLREHQRTHTGEKPY | | X₁₈X₁₉HX₂₀X₂₁X₂₂X₂₃X₂₄X₈X₉CX₁₀X₁₁CX₁₂X₁₃X₁₄X₁₅X₁₆RSDHLTTH | |
| | | | KCPECGKSFSRSDHLTTHQRTHT | | X₁₇X₁₈X₁₉HX₂₀X₂₁X₂₂X₂₃X₂₄X₈X₉CX₁₀X₁₁CX₁₂X₁₃X₁₄X₁₅X₁₆QLAHLR | |
| | | | GEKPYKCPECGKSFSQLAHLRAH | | AHX₁₇X₁₈X₁₉HX₂₀X₂₁X₂₂X₂₃X₂₄X₈X₉CX₁₀X₁₁CX₁₂X₁₃X₁₄X₁₅X₁₆RNDT | |
| | | | QRTHTGEKPYKCPECGKSFSRND | | LTEHX₁₇X₁₈X₁₉HX₂₀X₂₁X₂₂X₂₃X₂₄X₈X₉CX₁₀X₁₁CX₁₂X₁₃X₁₄X₁₅X₁₆TT | |
| | | | TLTEHQRTHTGEKPYKCPECGKS | | GNLTVHX₁₇X₁₈X₁₉HX₂₀X₂₁X₂₂X₂₃X₂₄X₂₅X₂₆X₂₇X₂₈X₂₉X₃₀ | |
| | | | FSTTGNLTVHQRTHTGEKPTGKK | | | |
| | | | TS | | | |
| aggagaatg | AGG AGA | 867 | LEPGEKPYKCPECGKSFSTTGNL | 1416 | X₁X₂X₃X₄X₅X₆X₇X₈X₉CX₁₀X₁₁CX₁₂X₁₃X₁₄X₁₅X₁₆TTGNLTVHX₁₇X₁₈X₁₉ | 1965 |
| tgatgggaa | ATG TGA | | TVHQRTHTGEKPYKCPECGKSFS | | HX₂₀X₂₁X₂₂X₂₃X₂₄X₈X₉CX₁₀X₁₁CX₁₂X₁₃X₁₄X₁₅X₁₆QSSNLVRHX₁₇X₁₈ | |
| aat | TGG GAA | | QSSNLVRHQRTHTGEKPYKCPEC | | X₁₉HX₂₀X₂₁X₂₂X₂₃X₂₄X₈X₉CX₁₀X₁₁CX₁₂X₁₃X₁₄X₁₅X₁₆RSDHLTTHX₁₇ | |
| | AAT | | GKSFSRSDHLTTHQRTHTGEKPY | | X₁₈X₁₉HX₂₀X₂₁X₂₂X₂₃X₂₄X₈X₉CX₁₀X₁₁CX₁₂X₁₃X₁₄X₁₅X₁₆QAGHLASH | |
| | | | KCPECGKSFSQAGHLASHQRTHT | | X₁₇X₁₈X₁₉HX₂₀X₂₁X₂₂X₂₃X₂₄X₈X₉CXHX₁₁CX₁₂X₁₃X₁₄X₁₅X₁₆RRDELN | |
| | | | GEKPYKCPECGKSFSRRDELNVH | | VHX₁₇X₁₈X₁₉HX₂₀X₂₁X₂₂X₂₃X₂₄X₈X₉CX₁₀X₁₁CX₁₂X₁₃X₁₄X₁₅X₁₆QLAH | |
| | | | QRTHTGEKPYKCPECGKSFSQLA | | LRAHX₁₇X₁₈X₁₉HX₂₀X₂₁X₂₂X₂₃X₂₄X₈X₉CX₁₀X₁₁CX₁₂X₁₃X₁₄X₁₅X₁₆RS | |
| | | | HLRAHQRTHTGEKPYKCPECGKS | | DHLTNHX₁₇X₁₈X₁₉HX₂₀X₂₁X₂₂X₂₃X₂₄X₂₅X₂₆X₂₇X₂₈X₂₉X₃₀ | |
| | | | FSRSDHLTNHQRTHTGEKPTGKK | | | |
| | | | TS | | | |
| aacaggaga | AAC AGG | 868 | LEPGEKPYKCPECGKSFSQSSNL | 1417 | X₁X₂X₃X₄X₅X₆X₇X₈X₉CX₁₀X₁₁CX₁₂X₁₃X₁₄X₁₅X₁₆QSSNLVRHX₁₇X₁₈X₁₉ | 1966 |
| atgtgatgg | AGA ATG | | VRHQRTHTGEKPYKCPECGKSFS | | HX₂₀X₂₁X₂₂X₂₃X₂₄X₈X₉CX₁₀X₁₁CX₁₂X₁₃X₁₄X₁₅X₁₆RDSDHLTTHX₁₇X₁₈ | |
| gaa | TGA TGG | | RSDHLTTHQRTHTGEKPYKCPEC | | X₁₉HX₂₀X₂₁X₂₂X₂₃X₂₄X₈X₉CX₁₀X₁₁CX₁₂X₁₃X₁₄HX₁₅X₁₆QAGHLASHX₁₇ | |
| | GAA | | GKSFSQAGHLASHQRTHTGEKPY | | X₁₈X₁₉HX₂₀X₂₁X₂₂X₂₃X₂₄X₈X₉CX₁₀X₁₁CX₁₂X₁₃X₁₄X₁₅X₁₆RRDELNVH | |
| | | | KCPECGKSFSRRDELNVHQRTHT | | X₁₇X₁₈X₁₉HX₂₀X₂₁X₂₂X₂₃X₂₄X₈X₉CX₁₀X₁₁CX₁₂X₁₃X₁₄X₁₅X₁₆QLAHLR | |
| | | | GEKPYKCPECGKSFSQLAHLRAH | | AHX₁₇X₁₈X₁₉HX₂₀X₂₁X₂₂X₂₃X₂₄X₈X₉CX₁₀X₁₁CX₁₂X₁₃X₁₄X₁₅X₁₆RSDH | |
| | | | QRTHTGEKPYKCPECGKSFSRSD | | LTNHX₁₇X₁₈X₁₉HX₂₀X₂₁X₂₂X₂₃X₂₄X₈X₉CX₁₀X₁₁CX₁₂X₁₃X₁₄X₁₅X₁₆DS | |
| | | | HLTNHQRTHTGEKPYKCPECGKS | | GNLRVHX₁₇X₁₈X₁₉HX₂₀X₂₁X₂₂X₂₃X₂₄X₂₅X₂₆X₂₇X₂₈X₂₉X₃₀ | |
| | | | FSDSGNLRVHQRTHTGEKPTGKK | | | |
| | | | TS | | | |
| tgatgggaa | TGA TGG | 869 | LEPGEKPYKCPECGKSFSRSDHL | 1418 | X₁X₂X₃X₄X₅X₆X₇X₈X₉CX₁₀X₁₁CX₁₂X₁₃X₁₄X₁₅X₁₆RSDHLTTHX₁₇X₁₈X₁₉ | 1967 |
| aatccgaga | GAA AAT | | TTHQRTHTGEKPYKCPECGKSFS | | HX₂₀X₂₁X₂₂X₂₃X₂₄X₈X₉CX₁₀X₁₁CX₁₂X₁₃X₁₄X₁₅X₁₆QLAHLRAHX₁₇X₁₈ | |
| tgg | CCG AGA | | QLAHLRAHQRTHTGEKPYKCPEC | | X₁₉HX₂₀X₂₁X₂₂X₂₃X₂₄X₈X₉CX₁₀X₁₁CX₁₂X₁₃X₁₄X₁₅X₁₆RNDTLTEHX₁₇ | |
| | TGG | | GKSFSRNDTLTEHQRTHTGEKPY | | X₁₈X₁₉HX₂₀X₂₁X₂₂X₂₃X₂₄X₈X₉CX₁₀X₁₁CX₁₂X₁₃X₁₄X₁₅X₁₆TTGNLTVH | |
| | | | KCPECGKSFSTTGNLTVHQRTHT | | X₁₇X₁₈X₁₉HX₂₀X₂₁X₂₂X₂₃X₂₄X₈X₉CX₁₀X₁₁CX₁₂X₁₃X₁₄X₁₅X₁₆QSSNLV | |
| | | | GEKPYKCPECGKSFSQSSNLVRH | | RHX₁₇X₁₈X₁₉HX₂₀X₂₁X₂₂X₂₃X₂₄X₈X₉CX₁₀X₁₁CX₁₂X₁₃X₁₄X₁₅X₁₆RSDH | |
| | | | QRTHTGEKPYKCPECGKSFSRSD | | LTTHX₁₇X₁₈X₁₉HX₂₀X₂₁X₂₂X₂₃X₂₄X₈X₉CX₁₀X₁₁CX₁₂X₁₃X₁₄X₁₅X₁₆QA | |
| | | | HLTTHQRTHTGEKPYKCPECGKS | | GHLASHX₁₇X₁₈X₁₉HX₂₀X₂₁X₂₂X₂₃X₂₄X₂₅X₂₆X₂₇X₂₈X₂₉X₃₀ | |
| | | | FSQAGHLASHQRTHTGEKPTGKK | | | |
| | | | TS | | | |
| gaaaatccg | GAA AAT | 870 | LEPGEKPYKCPECGKSFSRADNL | 1419 | X₁X₂X₃X₄X₅X₆X₇X₈X₉CX₁₀X₁₁CX₁₂X₁₃X₁₄X₁₅X₁₆RADNLTEHX₁₇X₁₈X₁₉ | 1968 |
| agatggagc | CCG AGA | | TEHQRTHTGEKPYKCPECGKSFS | | HX₂₀X2022X₂₃X₂₄X₈X₉CX₁₀X₁₁CX₁₂X₁₃X₁₄X₁₅X₁₆ERSHLREHX₁₇X₁₈ | |
| cag | TGG AGC | | ERSHLREHQRTHTGEKPYKCPEC | | X₁₉HX₂₀X₂₁X₂₂X₂₃X₂₄X₈X₉CX₁₀X₁₁CX₁₂X₁₃X₁₄X₁₅X₁₆RSDHLTTHX₁₇ | |
| | CAG | | GKSFSRSDHLTTHQRTHTGEKPY | | X₁₈X₁₉HX₂₀X₂₁X₂₂X₂₃X₂₄X₈X₉CX₁₀X₁₁CX₁₂X₁₃X₁₄X₁₅X₁₆QLAHLRAH | |
| | | | KCPECGKSFSQLAHLRAHQRTHT | | X₁₇X₁₈X₁₉HX₂₀X₂₁X₂₂X₂₃X₂₄X₈X₉CX₁₀X₁₁CX₁₂X₁₃X₁₄X₁₅X₁₆RNDTLT | |
| | | | GEKPYKCPECGKSFSRNDTLTEH | | EHX₁₇X₁₈X₁₉HX₂₀X₂₁X₂₂X₂₃X₂₄X₈X₉CX₁₀X₁₁CX₁₂X₁₃X₁₄X₁₅X₁₆TTGN | |
| | | | QRTHTGEKPYKCPECGKSFSTTG | | LTVHX₁₇X₁₈X₁₉HX₂₀X₂₁X₂₂X₂₃X₂₄X₈X₉CX₁₀X₁₁CX₁₂X₁₃X₁₄X₁₅X₁₆QS | |
| | | | NLTVHQRTHTGEKPYKCPECGKS | | SNLVRHX₁₇X₁₈X₁₉HX₂₀X₂₁X₂₂X₂₃X₂₄X₂₅X₂₆X₂₇X₂₈X₂₉X₃₀ | |
| | | | FSQSSNLVRHQRTHTGEKPTGKK | | | |
| | | | TS | | | |
| tgggaaaat | TGG GAA | 871 | LEPGEKPYKCPECGKSFSERSHL | 1420 | X₁X₂X₃X₄X₅X₆X₇X₈X₉CX₁₀X₁₁CX₁₂X₁₃X₁₄X₁₅X₁₆ERSHLREHX₁₇X₁₈X₁₉ | 1969 |
| ccgagatgg | AAT CCG | | REHQRTHTGEKPYKCPECGKSFS | | HX₂₀X2022X₂₃X₂₄X₈X₉C10X₁₁CX₁₂X₁₃X₁₄X₁₅X₁₆RSDHLTTHX₁₇X₁₈ | |
| agc | AGA TGG | | RSDHLTTHQRTHTGEKPYKCPEC | | X₁₉HX₂₀X₂₁X₂₂X₂₃X₂₄X₈X₉CX₁₀X₁₁CX₁₂X₁₃X₁₄X₁₅X₁₆QLAHLRAHX₁₇ | |
| | AGC | | GKSFSQLAHLRAHQRTHTGEKPY | | X₁₈X₁₉HX₂₀X₂₁X₂₂X₂₃X₂₄X₈X₉CX₁₀X₁₁CX₁₂X₁₃X₁₄X₁₅X₁₆RNDTLTEH | |
| | | | KCPECGKSFSRNDTLTEHQRTHT | | X₁₇X₁₈X₁₉HX₂₀X₂₁X₂₂X₂₃X₂₄X₈X₉CX₁₀X₁₁CX₁₂X₁₃X₁₄X₁₅X₁₆TTGNLT | |
| | | | GEKPYKCPECGKSFSTTGNLTVH | | VHX₁₇X₁₈X₁₉HX₂₀X₂₁X₂₂X₂₃X₂₄X₈X₉CX₁₀X₁₁CX₁₂X₁₃X₁₄X₁₅X₁₆QSSN | |
| | | | QRTHTGEKPYKCPECGKSFSQSS | | LVRHX₁₇X₁₈X₁₉HX₂₀X₂₁X₂₂X₂₃X₂₄X₈X₉CX₁₀X₁₁CX₁₂X₁₃X₁₄X₁₅X₁₆RS | |
| | | | NLVRHQRTHTGEKPYKCPECGKS | | DHLTTHX₁₇X₁₈X₁₉HX₂₀X₂₁X₂₂X₂₃X₂₄X₂₅X₂₆X₂₇X₂₈X₂₉X₃₀ | |
| | | | FSRSDHLTTHQRTHTGEKPTGKK | | | |
| | | | TS | | | |
| cctgggcca | CCT ggg | 872 | LEPGEKPYKCPECGKSFSQRAHL | 1421 | X₁X₂X₃X₄X₅X₆X₇X₈X₉CX₁₀X₁₁CX₁₂X₁₃X₁₄X₁₅X₁₆QRAHLERHX₁₇X₁₈X₁₉ | 1970 |
| gaaacactg | CCA GAA | | ERHQRTHTGEKPYKCPECGKSFS | | HX₂₀X₂₁X₂₂X₂₃X₂₄X₈X₉CX₁₀X₁₁CX₁₂X₁₃X₁₄X₁₅X₁₆RNDALTEHX₁₇X₁₈ | |
| gga | ACA CTG | | RNDALTEHQRTHTGEKPYKCPEC | | X₁₉HX₂₀X₂₁X₂₂X₂₃X₂₄X₈X₉CX₁₀X₁₁CX₁₂X₁₃X₁₄X₁₅X₁₆SPADLTRHX₁₇ | |
| | GGA | | GKSFSSPADLTRHQRTHTGEKPY | | X₁₈X₁₉HX₂₀X₂₁X₂₂X₂₃X₂₄X₈X₉CX₁₀X₁₁CX₁₂X₁₃X₁₄X₁₅X₁₆QSSNLVRH | |
| | | | KCPECGKSFSQSSNLVRHQRTHT | | X₁₇X₁₈X₁₉HX₂₀X₂₁X₂₂X₂₃X₂₄X₈X₉CX₁₀X₁₁CX₁₂X₁₃X₁₄X₁₅X₁₆TSHSLT | |
| | | | GEKPYKCPECGKSFSTSHSLTEH | | EHX₁₇X₁₈X₁₉HX₂₀X₂₁X₂₂X₂₃X₂₄X₈X₉CX₁₀X₁₁CX₁₂X₁₃X₁₄X₁₅X₁₆RSDK | |
| | | | QRTHTGEKPYKCPECGKSFSRSD | | LVRHX₁₇X₁₈X₁₉HX₂₀X₂₁X₂₂X₂₃X₂₄X₈X₉CX₁₀X₁₁CX₁₂X₁₃X₁₄X₁₅X₁₆TK | |
| | | | KLVRHQRTHTGEKPYKCPECGKS | | NSLTEHX₁₇X₁₈X₁₉HX₂₀X₂₁X₂₂X₂₃X₂₄X₂₅X₂₆X₂₇X₂₈X₂₉X₃₀ | |
| | | | FSTKNSLTEHQRTHTGEKPTGKK | | | |
| | | | TS | | | |
| ccagaaaca | CCA GAA | 873 | LEPGEKPYKCPECGKSFSRSDEL | 1422 | X₁X₂X₃X₄X₅X₆X₇X₈X₉CX₁₁X₁₁CX₁₂X₁₃X₁₄X₁₅X₁₆RSDELVRHX₁₇X₁₈X₁₉ | 1971 |
| ctgggagct | ACA CTG | | VRHQRTHTGEKPYKCPECGKSFS | | HX₂₀X₂₁X₂₂X₂₃X₂₄X₈X₉CX₁₀X₁₁CX₁₂X₁₃X₁₄X₁₅X₁₆TSGELVRHX₁₇X₁₈ | |
| gtg | GGA GCT | | TSGELVRHQRTHTGEKPYKCPEC | | X₁₉HX₂₀X₂₁X₂₂X₂₃X₂₄X₈X₉CX₁₀X₁₁CX₁₂X₁₃X₁₄X₁₅X₁₆QRAHLERHX₁₇ | |
| | GTG | | GKSFSQRAHLERHQRTHTGEKPY | | X₁₈X₁₉HX₂₀X₂₁X₂₂X₂₃X₂₄X₈X₉CX₁₀X₁₁CX₁₂X₁₃X₁₄X₁₅X₁₆RNDALTEH | |
| | | | KCPECGKSFSRNDALTEHQRTHT | | X₁₇X₁₈X₁₉HX₂₀X₂₁X₂₂X₂₃X₂₄X₈X₉CX₁₀X₁₁CX₁₂X₁₃X₁₄X₁₅X₁₆SPADLT | |
| | | | GEKPYKCPECGKSFSSPADLTRH | | RHX₁₇X₁₈X₁₉HX₂₀X₂₁X₂₂X₂₃X₂₄X₈X₉CX₁₀X₁₁CX₁₂X₁₃X₁₄X₁₅X₁₆QSSN | |
| | | | QRTHTGEKPYKCPECGKSFSQSS | | LVRHX₁₇X₁₈X₁₉HX₂₀X₂₁X₂₂X₂₃X₂₄X₈X₉CX₁₀X₁₁CX₁₂X₁₃X₁₄X₁₅X₁₆TS | |
| | | | NLVRHQRTHTGEKPYKCPECGKS | | HSLTEHX₁₇X₁₈X₁₉HX₂₀X₂₁X₂₂X₂₃X₂₄X₂₅X₂₆X₂₇X₂₈X₂₉X₃₀ | |
| | | | FSTSHSLTEHQRTHTGEKPTGKK | | | |
| | | | TS | | | |
| gggccagaa | ggg CCA | 874 | LEPGEKPYKCPECGKSFSTSGEL | 1423 | X₁X₂X₃X₄X₅X₆X₇X₈X₉CX₁₀X₁₁CX₁₂X₁₃X₁₄X₁₅X₁₆TSGELVRHX₁₇X₁₈X₁₉ | 1972 |
| acactggga | GAA ACA | | VRHQRTHTGEKPYKCPECGKSFS | | HX₂₀X₂₁X₂₂X₂₃X₂₄X₈X₉CX₁₀X₁₁CX₁₂X₁₃X₁₄X₁₅X₁₆QRAHLERHX₁₇X₁₈ | |
| gct | CTG GGA | | QRAHLERHQRTHTGEKPYKCPEC | | X₁₉HX₂₀X₂₁X₂₂X₂₃X₂₄X₈X₉CX₁₀X₁₁CX₁₂X₁₃X₁₄X₁₅X₁₆RNDALTEHX₁₇ | |
| | GCT | | GKSFSRNDALTEHQRTHTGEKPY | | X₁₈X₁₉HX₂₀X₂₁X₂₂X₂₃X₂₄X₈X₉CX₁₀X₁₁CX₁₂X₁₃X₁₄X₁₅X₁₆SPADLTRH | |
| | | | KCPECGKSFSSPADLTRHQRTHT | | X₁₇X₁₈X₁₉HX₂₀X₂₁X₂₂X₂₃X₂₄X₈X₉CX₁₀X₁₁CX₁₂X₁₃X₁₄X₁₅X₁₆QSSNLV | |
| | | | GEKPYKCPECGKSFSQSSNLVRH | | RHX₁₇X₁₈X₁₉HX₂₀X₂₁X₂₂X₂₃X₂₄X₈X₉CX₁₀X₁₁CX₁₂X₁₃X₁₄X₁₅X₁₆TSHS | |
| | | | QRTHTGEKPYKCPECGKSFSTSH | | LTEHX₁₇X₁₈X₁₉HX₂₀X₂₁X₂₂X₂₃X₂₄X₈X₉CX₁₀X₁₁CX₁₂X₁₃X₁₄X₁₅X₁₆RS | |
| | | | SLTEHQRTHTGEKPYKCPECGKS | | DKLVRHX₁₇X₁₈X₁₉HX₂₀X₂₁X₂₂X₂₃X₂₄X₂₅X₂₆X₂₇X₂₈X₂₉X₃₀ | |
| | | | FSRSDKLVRHQRTHTGEKPTGKK | | | |
| | | | TS | | | |
| gagggaaac | GAG GGA | 875 | LEPGEKPYKCPECGKSFSQAGHL | 1424 | X₁X₂X₃X₄X₅X₆X₇X₈X₉CX₁₀X₁₁CX₁₂X₁₃X₁₄X₁₅X₁₆QAGHLASHX₁₇X₁₈X₁₉ | 1973 |
| aggagaatg | AAC AGG | | ASHQRTHTGEKPYKCPECGKSFS | | HX₂₀X₂₁X₂₂X₂₃X₂₄X₈X₉CX₁₀X₁₁CX₁₂X₁₃X₁₄X₁₅X₁₆RRDELNVHX₁₇X₁₈ | |
| tga | AGA ATG | | RRDELNVHQRTHTGEKPYKCPEC | | X₁₉HX₂₀X₂₁X₂₂X₂₃X₂₄X₈X₉CX₁₀X₁₁CX₁₂X₁₃X₁₄X₁₅X₁₆QLAHLRAHX₁₇ | |
| | TGA | | GKSFSQLAHLRAHQRTHTGEKPY | | X₁₈X₁₉HX₂₀X₂₁X₂₂X₂₃X₂₄X₈X₉CX₁₀X₁₁CX₁₂X₁₃X₁₄X₁₅X₁₆RSDHLTNH | |
| | | | KCPECGKSFSRSDHLTNHQRTHT | | X₁₇X₁₈X₁₉HX₂₀X₂₁X₂₂X₂₃X₂₄X₈X₉CX₁₀X₁₁CX₁₂X₁₃X₁₄X₁₅X₁₆DSGNLR | |
| | | | GEKPYKCPECGKSFSDSGNLRVH | | VHX₁₇X₁₈X₁₉HX₂₀X₂₁X₂₂X₂₃X₂₄X₈X₉CX₁₀X₁₁CX₁₂X₁₃X₁₄X₁₅X₁₆QRAH | |
| | | | QRTHTGEKPYKCPECGKSFSQRA | | LERHX₁₇X₁₈X₁₉HX₂₀X₂₁X₂₂X₂₃X₂₄X₈X₉CX₁₀X₁₁CX₁₂X₁₃X₁₄X₁₅X₁₆RS | |
| | | | HLERHQRTHTGEKPYKCPECGKS | | DNLVRHX₁₇X₁₈X₁₉HX₂₀X₂₁X₂₂X₂₃X₂₄X₂₅X₂₆X₂₇X₂₈X₂₉X₃₀ | |
| | | | FSRSDNLVRHQRTHTGEKPTGKK | | | |
| | | | TS | | | |
| ggaaacagg | GGA AAC | 876 | LEPGEKPYKCPECGKSFSRSDHL | 1425 | X₁X₂X₃X₄X₅X₆X₇X₈X₉CX₁₀X₁₁CX₁₂X₁₃X₁₄X₁₅X₁₆RSDHLTTHX₁₇X₁₈X₁₉ | 1974 |
| agaatgtga | AGG AGA | | TTHQRTHTGEKPYKCPECGKSFS | | HX₂₀X₂₁X₂₂X₂₃X₂₄X₈X₉CX₁₀X₁₁CX₁₂X₁₃X₁₄X₁₅X₁₆QAGHLASHX₁₇X₁₈ | |
| tgg | ATG TGA | | QAGHLASHQRTHTGEKPYKCPEC | | X₁₉HX₂₀X₂₁X₂₂X₂₃X₂₄X₈X₉CX₁₀X₁₁CX₁₂X₁₃X₁₄X₁₅X₁₆RRDELNVHX₁₇ | |
| | TGG | | GKSFSRRDELNVHQRTHTGEKPY | | X₁₈X₁₉HX₂₀X₂₁X₂₂X₂₃X₂₄X₈X₉CX₁₀X₁₁CX₁₂X₁₃X₁₄X₁₅X₁₆QLAHLRAH | |
| | | | KCPECGKSFSQLAHLRAHQRTHT | | X₁₇X₁₈X₁₉HX₂₀X₂₁X₂₂X₂₃X₂₄X₈X₉CX₁₀X₁₁CX₁₂X₁₃X₁₄X₁₅X₁₆RSDHLT | |
| | | | GEKPYKCPECGKSFSRSDHLTNH | | NHX₁₇X₁₈X₁₉HX₂₀X₂₁X₂₂X₂₃X₂₄X₈X₉CX₁₀X₁₁CX₁₂X₁₃X₁₄X₁₅X₁₆DSGN | |
| | | | QRTHTGEKPYKCPECGKSFSDSG | | LRVHX₁₇X₁₈X₁₉HX₂₀X₂₁X₂₂X₂₃X₂₄X₈X₉CX₁₀X₁₁CX₁₂X₁₃X₁₄X₁₅X₁₆QR | |
| | | | NLRVHQRTHTGEKPYKCPECGKS | | AHLERHX₁₇X₁₈X₁₉HX₂₀X₂₁X₂₂X₂₃X₂₄X₂₅X₂₆X₂₇X₂₈X₂₉X₃₀ | |
| | | | FSQRAHLERHQRTHTGEKPTGKK | | | |
| | | | TS | | | |
| atgtgatgg | ATG TGA | 877 | LEPGEKPYKCPECGKSFSQLAHL | 1426 | X₁X₂X₃X₄X₅X₆X₇X₈X₉CX₁₀X₁₁CX₁₂X₁₃X₁₄X₁₅X₁₆QLAHLRAHX₁₇X₁₈X₁₉ | 1975 |
| gaaaatccg | TGG GAA | | RAHQRTHTGEKPYKCPECGKSFS | | HX₂₀X₂₁X₂₂X₂₃X₂₄X₈X₉CX₁₀X₁₁CX₁₂X₁₃X₁₄X₁₅X₁₆RNDTLTEHX₁₇X₁₈ | |
| aga | AAT CCG | | RNDTLTEHQRTHTGEKPYKCPEC | | X₁₉HX₂₀X₂₁X₂₂X₂₃X₂₄X₈X₉CX₁₀X₁₁CX₁₂X₁₃X₁₄X₁₅X₁₆TTGNLTVHX₁₇ | |
| | AGA | | GKSFSTTGNLTVHQRTHTGEKPY | | X₁₈X₁₉HX₂₀X₂₁X₂₂X₂₃X₂₄X₈X₉CX₁₀X₁₁CX₁₂X₁₃X₁₄X₁₅X₁₆QSSNLVRH | |
| | | | KCPECGKSFSQSSNLVRHQRTHT | | X₁₇X₁₈X₁₉HX₂₀X₂₁X₂₂X₂₃X₂₄X₈X₉CX₁₀X₁₁CX₁₂X₁₃X₁₄X₁₅X₁₆RSDHLY | |
| | | | GEKPYKCPECGKSFSRSDHLTTH | | THX₁₇X₁₈X₁₉HX₂₀X₂₁X₂₂X₂₃X₂₄X₈X₉CX₁₀X₁₁CX₁₂X₁₃X₁₄X₁₅X₁₆QAGH | |
| | | | QRTHTGEKPYKCPECGKSFSQAG | | LASHX₁₇X₁₈X₁₉HX₂₀X₂₁X₂₂X₂₃X₂₄X₈X₉CX₁₀X₁₁CX₁₂X₁₃X₁₄X₁₅X₁₆RR | |
| | | | HLASHQRTHTGEKPYKCPECGKS | | DELNVHX₁₇X₁₈X₁₉HX₂₀X₂₁X₂₂X₂₃X₂₄X₂₅X₂₆X₂₇X₂₈X₂₉X₃₀ | |
| | | | FSRRDELNVHQRTHTGEKPTGKK | | | |
| | | | TS | | | |
| agaatgtga | AGA ATG | 878 | LEPGEKPYKCPECGKSFSRNDTL | 1427 | X₁X₂X₃X₄X₅X₆X₇X₈X₉CX₁₀X₁₁CX₁₂X₁₃X₁₄X₁₅X₁₆RNDTLTEHX₁₇X₁₈X₁₉ | 1976 |
| tgggaaaat | TGA TGG | | TEHQRTHTGEKPYKCPECGKSFS | | HX₂₀X₂₁X₂₂X₂₃X₂₄X₈X₉CX₁₀X₁₁CX₁₂X₁₃X₁₄X₁₅X₁₆TTGNLTVHX₁₇X₁₈ | |
| ccg | GAA AT | | TTGNLTVHQRTHTGEKPYKCPEC | | X₁₉HX₂₀X₂₁X₂₂X₂₃X₂₄X₈X₉CX₁₀X₁₁CX₁₂X₁₃X₁₄X₁₅X₁₆QSSNLVRHX₁₇ | |
| | CCG | | GKSFSQSSNLVRHQRTHTGEKPY | | X₁₈X₁₉HX₂₀X₂₁X₂₂X₂₃X₂₄X₈X₉CX₁₀X₁₁CX₁₂X₁₃X₁₄X₁₅X₁₆RSDHLTTH | |
| | | | KCPECGKSFSRSDHLTTHQRTHT | | X₁₇X₁₈X₁₉HX₂₀X₂₁X₂₂X₂₃X₂₄X₈X₉CX₁₀X₁₁CX₁₂X₁₃X₁₄X₁₅X₁₆QAGHLA | |
| | | | GEKPYKCPECGKSFSQAGHLASH | | SHX₁₇X₁₈X₁₉HX₂₀X₂₁X₂₂X₂₃X₂₄X₈X₉CX₁₀X₁₁CX₁₂X₁₃X₁₄X₁₅X₁₆RRDE | |
| | | | QRTHTGEKPYKCPECGKSFSRRD | | LNVHX₁₇X₁₈X₁₉HX₂₀X₂₁X₂₂X₂₃X₂₄X₈X₉CX₁₀X₁₁CX₁₂X₁₃X₁₄X₁₅X₁₆QL | |
| | | | ELNVHQRTHTGEKPYKCPECGKS | | AHLRAHX₁₇X₁₈X₁₉HX₂₀X₂₁X₂₂X₂₃X₂₄X₂₅X₂₆X₂₇X₂₈X₂₉X₃₀ | |
| | | | FSQLAHLRAHQRTHTGEKPTGKK | | | |
| | | | TS | | | |
| gaaacactg | GAA ACA | 879 | LEPGEKPYKCPECGKSFSQRAHL | 1428 | X₁X₂X₃X₄X₅X₆X₇X₈X₉CX₁₀X₁₁CX₁₂X₁₃X₁₄X₁₅X₁₆QRAHLERHX₁₇X₁₈X₁₉ | 1977 |
| ggagctgtg | CTG GGA | | ERHQRTHTGEKPYKCPECGKSFS | | HX₂₀X₂₁X₂₂X₂₃X₂₄X₈X₉CX₁₀X₁₁CX₁₂X₁₃X₁₄X₁₅X₁₆RSDELVRHX₁₇X₁₈ | |
| gga | GCT GTG | | RSDELVRHQRTHTGEKPYKCPEC | | X₁₉HX₂₀X₂₁X₂₂X₂₃X₂₄X₈X₉CX₁₀X₁₁CX₁₂X₁₃X₁₄X₁₅X₁₆TSGELVRHX₁₇ | |
| | GGA | | GKSFSTSGELVRHQRTHTGEKPY | | X₁₈X₁₉HX₂₀X₂₁X₂₂X₂₃X₂₄X₈X₉CX₁₀X₁₁CX₁₂X₁₃X₁₄X₁₅X₁₆QRAHLERH | |
| | | | KCPECGKSFSQRAHLERHQRTHT | | X₁₇X₁₈X₁₉HX₂₀X₂₁X₂₂X₂₃X₂₄X₈X₉CX₁₀X₁₁CX₁₂X₁₃X₁₄X₁₅X₁₆RNDALT | |
| | | | GEKPYKCPECGKSFSRNDALTEH | | EHX₁₇X₁₈X₁₉HX₂₀X₂₁X₂₂X₂₃X₂₄X₈X₉CX₁₀X₁₁CX₁₂X₁₃X₁₄X₁₅X₁₆SPAD | |
| | | | QRTHTGEKPYKCPECGKSFSSPA | | LTRHX₁₇X₁₈X₁₉HX₂₀X₂₁X₂₂X₂₃X₂₄X₈X₉CX₁₀X₁₁CX₁₂X₁₃X₁₄X₁₅X₁₆QS | |
| | | | DLTRHQRTHTGEKPYKCPECGKS | | SNLVRHX₁₇X₁₈X₁₉HX₂₀X₂₁X₂₂X₂₃X₂₄X₂₅X₂₆X₂₇X₂₈X₂₉X₃₀ | |
| | | | FSQSSNLVRHQRTHTGEKPTGKK | | | |
| | | | TS | | | |
| gtgggagac | GTG GGA | 880 | LEPGEKPYKCPECGKSFSRADNL | 1429 | X₁X₂X₃X₄X₅X₆X₇X₈X₉CX₁₀X₁₁CX₁₂X₁₃X₁₄X₁₅X₁₆RADNLTEHX₁₇X₁₈X₁₉ | 1978 |
| ggagagggg | GAC GGA | | TEHQRTHTGEKPYKCPECGKSFS | | HX₂₀X₂₁X₂₂X₂₃X₂₄X₈X₉CX₁₀X₁₁CX₁₂X₁₃X₁₄X₁₅X₁₆RSDKLVRHX₁₇X₁₈ | |
| cag | GAG ggg | | RSDKLVRHQRTHTGEKPYKCPEC | | X₁₉HX₂₀X₂₁X₂₂X₂₃X₂₄X₈X₉CX₁₀X₁₁CX₁₂X₁₃X₁₄X₁₅X₁₆RSDNLVRHX₁₇ | |
| | CAG | | GKSFSRSDNLVRHQRTHTGEKPY | | X₁₈X₁₉HX₂₀X₂₁X₂₂X₂₃X₂₄X₈X₉CX₁₀X₁₁CX₁₂X₁₃X₁₄X₁₅X₁₆QRAHLERH | |
| | | | KCPECGKSFSQRAHLERHQRTHT | | X₁₇X₁₈X₁₉HX₂₀X₂₁X₂₂X₂₃X₂₄X₈X₉CX₁₀X₁₁CX₁₂X₁₃X₁₄X₁₅X₁₆DPGNLV | |
| | | | GEKPYKCPECGKSFSDPGNLVRH | | RHX₁₇X₁₈X₁₉HX₂₀X₂₁X₂₂X₂₃X₂₄X₈X₉CX₁₀X₁₁CX₁₂X₁₃X₁₄X₁₅X₁₆QRAH | |
| | | | QRTHTGEKPYKCPECGKSFSQRA | | LERHX₁₇X₁₈X₁₉HX₂₀X₂₁X₂₂X₂₃X₂₄X₈X₉CX₁₀X₁₁CX₁₂X₁₃X₁₄X₁₅X₁₆RS | |
| | | | HLERHQRTHTGEKPYKCPECGKS | | DELVRHX₁₇X₁₈X₁₉HX₂₀X₂₁X₂₂X₂₃X₂₄X₂₅X₂₆X₂₇X₂₈X₂₉X₃₀ | |
| | | | FSRSDELVRHQRTHTGEKPTGKK | | | |
| | | | TS | | | |
| acactggga | ACA CTG | 881 | LEPGEKPYKCPECGKSFSDPGNL | 1430 | X₁X₂X₃X₄X₅X₆X₇X₈X₉CX₁₀X₁₁CX₁₂X₁₃X₁₄X₁₅X₁₆DPGNLVRHX₁₇X₁₈X₁₉ | 1979 |
| gctgtggga | GGA GCT | | VRHQRTHTGEKPYKCPECGKSFS | | HX₂₀X₂₁X₂₂X₂₃X₂₄X₈X₉CX₁₀X₁₁CX₁₂X₁₃X₁₄X₁₅X₁₆QRAHLERHX₁₇X₁₈ | |
| gac | GTG GGA | | QRAHLERHQRTHTGEKPYKCPEC | | X₁₉HX₂₀X₂₁X₂₂X₂₃X₂₄X₈X₉CX₁₀X₁₁CX₁₂X₁₃X₁₄X₁₅X₁₆RSDELVRHX₁₇ | |
| | GAC | | GKSFSRSDELVRHQRTHTGEKPY | | X₁₈X₁₉HX₂₀X₂₁X₂₂X₂₃X₂₄X₈X₉CX₁₀X₁₁CX₁₂X₁₃X₁₄X₁₅X₁₆TSGELVRH | |
| | | | KCPECGKSFSTSGELVRHQRTHT | | X₁₇X₁₈X₁₉HX₂₀X₂₁X₂₂X₂₃X₂₄X₈X₉CX₁₀X₁₁CX₁₂X₁₃X₁₄X₁₅X₁₆QRAHLE | |
| | | | GEKPYKCPECGKSFSQRAHLERH | | RHX₁₇X₁₈X₁₉HX₂₀X₂₁X₂₂X₂₃X₂₄X₈X₉CX₁₀X₁₁CX₁₂X₁₃X₁₄X₁₅X₁₆RNDA | |
| | | | QRTHTGEKPYKCPECGKSFSRND | | LTEHX₁₇X₁₈X₁₉HX₂₀X₂₁X₂₂X₂₃X₂₄X₈X₉CX₁₀X₁₁CX₁₂X₁₃X₁₄X₁₅X₁₆SP | |
| | | | ALTEHQRTHTGEKPYKCPECGKS | | ADLTRHX₁₇X₁₈X₁₉HX₂₀X₂₁X₂₂X₂₃X₂₄X₂₅X₂₆X₂₇X₂₈X₂₉X₃₀ | |
| | | | FSSPADLTRHQRTHTGEKPTGKK | | | |
| | | | TS | | | |
| gctgtggga | GCT GTG | 882 | LEPGEKPYKCPECGKSFSRSDKL | 1431 | X₁X₂X₃X₄X₅X₆X₇X₈X₉CX₁₀X₁₁CX₁₂X₁₃X₁₄X₁₅X₁₆RSDKLVRHX₁₇X₁₈X₁₉ | 1980 |
| gacggagag | GGA GAC | | VRHQRTHTGEKPYKCPECGKSFS | | HX₂₀X₂₁X₂₂X₂₃X₂₄X₈X₉CX₁₀X₁₁CX₁₂X₁₃X₁₄X₁₅X₁₆RSDNLVRHX₁₇X₁₈ | |
| ggg | GGA GAG | | RSDNLVRHQRTHTGEKPYKCPEC | | X₁₉HX₂₀X₂₁X₂₂X₂₃X₂₄X₈X₉CX₁₀X₁₁CX₁₂X₁₃X₁₄X₁₅X₁₆QRAHLERHX₁₇ | |
| | GGG | | GKSFSQRAHLERHQRTHTGEKPY | | X₁₈X₁₉HX₂₀X₂₁X₂₂X₂₃X₂₄X₈X₉CX₁₀X₁₁CX₁₂X₁₃X₁₄X₁₅X₁₆DPGNLVRH | |
| | | | KCPECGKSFSDPGNLVRHQRTHT | | X₁₇X₁₈X₁₉HX₂₀X₂₁X₂₂X₂₃X₂₄X₈X₉CX₁₀X₁₁CX₁₂X₁₃X₁₄X₁₅X₁₆QRAHLE | |
| | | | GEKPYKCPECGKSFSQRAHLERH | | RHX₁₇X₁₈X₁₉HX₂₀X₂₁X₂₂X₂₃X₂₄X₈X₉CX₁₀X₁₁CX₁₂X₁₃X₁₄X₁₅X₁₆RSDE | |
| | | | QRTHTGEKPYKCPECGKSFSRSD | | LVRHX₁₇X₁₈X₁₉HX₂₀X₂₁X₂₂X₂₃X₂₄X₈X₉CX₁₀X₁₁CX₁₂X₁₃X₁₄X₁₅X₁₆TS | |
| | | | ELVRHQRTHTGEKPYKCPECGKS | | GELVRHX₁₇X₁₈X₁₉HX₂₀X₂₁X₂₂X₂₃X₂₄X₂₅X₂₆X₂₇X₂₈X₂₉X₃₀ | |
| | | | FSTSGELVRHQRTHTGEKPTGKK | | | |
| | | | TS | | | |
| ctgggagct | CTG GGA | 883 | LEPGEKPYKCPECGKSFSQRAHL | 1432 | X₁X₂X₃X₄X₅X₆X₇X₈X₉CX₁₀X₁₁CX₁₂X₁₃X₁₄X₁₅X₁₆QRAHLERHX₁₇X₁₈X₁₉ | 1981 |
| gtgggagac | GCT GTG | | ERHQRTHTGEKPYKCPECGKSFS | | HX₂₀X₂₁X₂₂X₂₃X₂₄X₈X₉CX₁₀X₁₁CX₁₂X₁₃X₁₄X₁₅X₁₆DPGNLVRHX₁₇X₁₈ | |
| gga | GGA GAC | | DPGNLVRHQRTHTGEKPYKCPEC | | X₁₉HX₂₀X₂₁X₂₂X₂₃X₂₄X₈X₉CX₁₀X₁₁CX₁₂X₁₃X₁₄X₁₅X₁₆QRAHLERHX₁₇ | |
| | GGA | | GKSFSQRAHLERHQRTHTGEKPY | | X₁₈X₁₉HX₂₀X₂₁X₂₂X₂₃X₂₄X₈X₉CX₁₀X₁₁CX₁₂X₁₃X₁₄X₁₅X₁₆RSDELVRH | |
| | | | KCPECGKSFSRSDELVRHQRTHT | | X₁₇X₁₈X₁₉HX₂₀X₂₁X₂₂X₂₃X₂₄X₈X₉CX₁₀X₁₁CX₁₂X₁₃X₁₄X₁₅X₁₆TSGELV | |
| | | | GEKPYKCPECGKSFSTSGELVRH | | RHX₁₇X₁₈X₁₉HX₂₀X₂₁X₂₂X₂₃X₂₄X₈X₉CX₁₀X₁₁CX₁₂X₁₃X₁₄X₁₅X₁₆QRAH | |
| | | | QRTHTGEKPYKCPECGKSFSQRA | | LERHX₁₇X₁₈X₁₉HX₂₀X₂₁X₂₂X₂₃X₂₄X₈X₉CX₁₀X₁₁CX₁₂X₁₃X₁₄X₁₅X₁₆RN | |
| | | | HLERHQRTHTGEKPYKCPECGKS | | DALTEHX₁₇X₁₃X₁₉HX₂₀X₂₁X₂₂X₂₃X₂₄X₂₅X₂₆X₂₇X₂₈X₂₉X₃₀ | |
| | | | FSRNDALTEHQRTHTGEKPTGKK | | | |
| | | | TS | | | |
| ggagctgtg | GGA GCT | 884 | LEPGEKPYKCPECGKSFSRSDNL | 1433 | X₁X₂X₃X₄X₅X₆X₇X₈X₉CX₁₀X₁₁CX₁₂X₁₃X₁₄X₁₅X₁₆RSDNLVRHX₁₇X₁₈X₁₉ | 1982 |
| ggagacgga | GTG GGA | | VRHQRTHTGEKPYKCPECGKSFS | | HX₂₀X₂₁X₂₂X₂₃X₂₄X₈X₉CX₁₀X₁₁CX₁₂X₁₃X₁₄X₁₅X₁₆QRAHLERHX₁₇X₁₈ | |
| gag | GAC GGA | | QRAHLERHQRTHTGEKPYKCPEC | | X₁₉HX₂₀X₂₁X₂₂X₂₃X₂₄X₈X₉CX₁₀X₁₁CX₁₂X₁₃X₁₄X₁₅X₁₆DPGNLVRHX₁₇ | |
| | GAG | | GKSFSDPGNLVRHQRTHTGEKPY | | X₁₈X₁₉HX₂₀X₂₁X₂₂X₂₃X₂₄X₈X₉CX₁₀X₁₁CX₁₂X₁₃X₁₄X₁₅X₁₆QRAHLERH | |
| | | | KCPECGKSFSQRAHLERHQRTHT | | X₁₇X₁₈X₁₉HX₂₀X₂₁X₂₂X₂₃X₂₄X₈X₉CX₁₀X₁₁CX₁₂X₁₃X₁₄X₁₅X₁₆RSDELV | |
| | | | GEKPYKCPECGKSFSRSDELVRH | | RHX₁₇X₁₈X₁₉HX₂₀X₂₁X₂₂X₂₃X₂₄X₈X₉CX₁₀X₁₁CX₁₂X₁₃X₁₄X₁₅X₁₆TSGE | |
| | | | QRTHTGEKPYKCPECGKSFSTSG | | LVRHX₁₇X₁₈X₁₉HX₂₀X₂₁X₂₂X₂₃X₂₄X₈X₉CX₁₀X₁₁CX₁₂X₁₃X₁₄X₁₅X₁₆QR | |
| | | | ELVRHQRTHTGEKPYKCPECGKS | | AHLERHX₁₇X₁₃X₁₉HX₂₀X₂₁X₂₂X₂₃X₂₄X₂₅X₂₆X₂₇X₂₈X₂₉X₃₀ | |
| | | | FSQRAHLERHQRTHTGEKPTGKK | | | |
| | | | TS | | | |
| gggggtgag | GGG GGT | 885 | LEPGEKPYKCPECGKSFSQLAHL | 1434 | X₁X₂X₃X₄X₅X₆X₇X₈X₉CX₁₀X₁₁CX₁₂X₁₃X₁₄X₁₅X₁₆QLAHLRAHX₁₇X₁₈X₁₉ | 1983 |
| ggaaacagg | GAG GGA | | RAHQRTHTGEKPYKCPECGKSFS | | HX₂₀X₂₁X₂₂X₂₃X₂₄X₈X₉CX₁₀X₁₁CX₁₂X₁₃X₁₄X₁₅X₁₆RSDHLTNHX₁₇X₁₈ | |
| aga | AAC AGG | | RSDHLTNHQRTHTGEKPYKCPEC | | X₁₉HX₂₀X₂₁X₂₂X₂₃X₂₄X₈X₉CX₁₀X₁₁CX₁₂X₁₃X₁₄X₁₅X₁₆DSGNLRVHX₁₇ | |
| | AGA | | GKSFSDSGNLRVHQRTHTGEKPY | | X₁₈X₁₉HX₂₀X₂₁X₂₂X₂₃X₂₄X₈X₉CX₁₀X₁₁CX₁₂X₁₃X₁₄X₁₅X₁₆QRAHLERH | |
| | | | KCPECGKSFSQRAHLERHQRTHT | | X₁₇X₁₈X₁₉HX₂₀X₂₁X₂₂X₂₃X₂₄X₈X₉CX₁₀X₁₁CX₁₂X₁₃X₁₄X₁₅X₁₆RSDNLV | |
| | | | GEKPYKCPECGKSFSRSDNLVRH | | RHX₁₇X₁₈X₁₉HX₂₀X₂₁X₂₂X₂₃X₂₄X₈X₉CX₁₀X₁₁CX₁₂X₁₃X₁₄X₁₅X₁₆TSGH | |
| | | | QRTHTGEKPYKCPECGKSFSTSG | | LVRHX₁₇X₁₈X₁₉HX₂₀X₂₁X₂₂X₂₃X₂₄X₈X₉CX₁₀X₁₁CX₁₂X₁₃X₁₄X₁₅X₁₆RS | |
| | | | HLVRHQRTHTGEKPYKCPECGKS | | DKLVRHX₁₇X₁₈X₁₉HX₂₀X₂₁X₂₂X₂₃X₂₄X₂₅X₂₆X₂₇X₂₈X₂₉X₃₀ | |
| | | | FSRSDKLVRHQRTHTGEKPTGKK | | | |
| | | | TS | | | |
| gacggagag | GAC GGA | 886 | LEPGEKPYKCPECGKSFSRSDKL | 1435 | X₁X₂X₃X₄X₅X₆X₇X₈X₉CX₁₀X₁₁CX₁₂X₁₃X₁₄X₁₅X₁₆RSDKLVRHX₁₇X₁₈X₁₉ | 1984 |
| gggcagggt | GAG ggg | | VRHQRTHTGEKPYKCPECGKSFS | | HX₂₀X₂₁X₂₂X₂₃X₂₄X₈X₉CX₁₀X₁₁CX₁₂X₁₃X₁₄X₁₅X₁₆TSGHLVRHX₁₇X₁₈ | |
| ggg | CAG GGT | | TSGHLVRHQRTHTGEKPYKCPEC | | X₁₉HX₂₀X₂₁X₂₂X₂₃X₂₄X₈X₉CX₁₀X₁₁CX₁₂X₁₃X₁₄X₁₅X₁₆RADNLTEHX₁₇ | |
| | GGG | | GKSFSRADNLTEHQRTHTGEKPY | | X₁₈X₁₉HX₂₀X₂₁X₂₂X₂₃X₂₄X₈X₉CX₁₀X₁₁CX₁₂X₁₃X₁₄X₁₅X₁₆RSDKLVRH | |
| | | | KCPECGKSFSRSDKLVRHQRTHT | | X₁₇X₁₈X₁₉HX₂₀X₂₁X₂₂X₂₃X₂₄X₈X₉CX₁₀X₁₁CX₁₂X₁₃X₁₄X₁₅X₁₆RSDNLV | |
| | | | GEKPYKCPECGKSFSRSDNLVRH | | RHX₁₇X₁₈X₁₉HX₂₀X₂₁X₂₂X₂₃X₂₄X₈X₉CX₁₀X₁₁CX₁₂X₁₃X₁₄X₁₅X₁₆QRAH | |
| | | | QRTHTGEKPYKCPECGKSFSQRA | | LERHX₁₇X₁₈X₁₉HX₂₀X₂₁X₂₂X₂₃X₂₄X₈X₉CX₁₀X₁₁CX₁₂X₁₃X₁₄X₁₅X₁₆DP | |
| | | | HLERHQRTHTGEKPYKCPECGKS | | GNLVRHX₁₇X₁₈X₁₉HX₂₀X₂₁X₂₂X₂₃X₂₄X₂₅X₂₆X₂₇X₂₈X₂₉X₃₀ | |
| | | | FSDPGNLVRHQRTHTGEKPTGKK | | | |
| | | | TS | | | |
| ggtgaggga | GGT GAG | 887 | LEPGEKPYKCPECGKSFSRRDEL | 1436 | X₁X₂X₃X₄X₅X₆X₇X₈X₉CX₁₀X₁₁CX₁₂X₁₃X₁₄X₁₅X₁₆RRDELNVHX₁₇X₁₈X₁₉ | 1985 |
| aacaggaga | GGA AAC | | NVHQRTHTGEKPYKCPECGKSFS | | HX₂₀X₂₁X₂₂X₂₃X₂₄X₈X₉CX₁₀X₁₁CX₁₂X₁₃X₁₄X₁₅X₁₆QLAHLRAHX₁₇X₁₈ | |
| atg | AGG AGA | | QLAHLRAHQRTHTGEKPYKCPEC | | X₁₉HX₂₀X₂₁X₂₂X₂₃X₂₄X₈X₉CX₁₀X₁₁CX₁₂X₁₃X₁₄X₁₅X₁₆RSDHLTNHX₁₇ | |
| | ATG | | GKSFSRSDHLTNHQRTHTGEKPY | | X₁₈X₁₉HX₂₀X₂₁X₂₂X₂₃X₂₄X₈X₉CX₁₀X₁₁CX₁₂X₁₃X₁₄X₁₅X₁₆DSGNLRVH | |
| | | | KCPECGKSFSDSGNLRVHQRTHT | | X₁₇X₁₈X₁₉HX₂₀X₂₁X₂₂X₂₃X₂₄X₈X₉CX₁₀X₁₁CX₁₂X₁₃X₁₄X₁₅X₁₆QRAHLE | |
| | | | GEKPYKCPECGKSFSQRAHLERH | | RHX₁₇X₁₈X₁₉HX₂₀X₂₁X₂₂X₂₃X₂₄X₈X₉CX₁₀X₁₁CX₁₂X₁₃X₁₄X₁₅X₁₆RSDN | |
| | | | QRTHTGEKPYKCPECGKSFSRSD | | LVRHX₁₇X₁₈X₁₉HX₂₀X₂₁X₂₂X₂₃X₂₄X₈X₉CX₁₀X₁₁CX₁₂X₁₃X₁₄X₁₅X₁₆TS | |
| | | | NLVRHQRTHTGEKPYKCPECGKS | | GHLVRHX₁₇X₁₈X₁₉HX₂₀X₂₁X₂₂X₂₃X₂₄X₂₅X₂₆X₂₇X₂₈X₂₉X₃₀ | |
| | | | FSTSGHLVRHQRTHTGEKPTGKK | | | |
| | | | TS | | | |
| ggagacgga | GGA GAC | 888 | LEPGEKPYKCPECGKSFSTSGHL | 1437 | X₁X₂X₃X₄X₅X₆X₇X₈X₉CX₁₀X₁₁CX₁₂X₁₃X₁₄X₁₅X₁₆TSGHLVRHX₁₇X₁₈X₁₉ | 1986 |
| gaggggcag | GGA GAG | | VRHQRTHTGEKPYKCPECGKSFS | | HX₂₀X₂₁X₂₂X₂₃X₂₄X₈X₉CX₁₀X₁₁CX₁₂X₁₃X₁₄X₁₅X₁₆RADNLTEHX₁₇X₁₈ | |
| ggt | ggg CAG | | RADNLTEHQRTHTGEKPYKCPEC | | X₁₉HX₂₀X₂₁X₂₂X₂₃X₂₄X₈X₉CX₁₀X₁₁CX₁₂X₁₃X₁₄X₁₅X₁₆RSDKLVRHX₁₇ | |
| | GGT | | GKSFSRSDKLVRHQRTHTGEKPY | | X₁₈X₁₉HX₂₀X₂₁X₂₂X₂₃X₂₄X₈X₉CX₁₀X₁₁CX₁₂X₁₃X₁₄X₁₅X₁₆RSDNLVRH | |
| | | | KCPECGKSFSRSDNLVRHQRTHT | | X₁₇X₁₈X₁₉HX₂₀X₂₁X₂₂X₂₃X₂₄X₈X₉CX₁₀X₁₁CX₁₂X₁₃X₁₄X₁₅X₁₆QRAHLE | |
| | | | GEKPYKCPECGKSFSQRAHLERH | | RHX₁₇X₁₈X₁₉HX₂₀X₂₁X₂₂X₂₃X₂₄X₈X₉CX₁₀X₁₁CX₁₂X₁₃X₁₄X₁₅X₁₆DPGN | |
| | | | QRTHTGEKPYKCPECGKSFSDPG | | LVRHX₁₇X₁₈X₁₉HX₂₀X₂₁X₂₂X₂₃X₂₄X₈X₉CX₁₀X₁₁CX₁₂X₁₃X₁₄X₁₅X₁₆QR | |
| | | | NLVRHQRTHTGEKPYKCPECGKS | | AHLERHX₁₇X₁₈X₁₉HX₂₀X₂₁X₂₂X₂₃X₂₄X₂₅X₂₆X₂₇X₂₈X₂₉X₃₀ | |
| | | | FSQRAHLERHQRTHTGEKPTGKK | | | |
| | | | TS | | | |
| gggggtggg | GGG GGT | 889 | LEPGEKPYKCPECGKSFSDSGNL | 1438 | X₁X₂X₃X₄X₅X₆X₇X₈X₉CX₁₀X₁₁CX₁₂X₁₃X₁₄X₁₅X₁₆DSGNLRVHX₁₇X₁₈X₁₉ | 1987 |
| ggtgaggga | GGG GGT | | RVHQRTHTGEKPYKCPECGKSFS | | HX₂₀X₂₁X₂₂X₂₃X₂₄X₈X₉CX₁₀X₁₁CX₁₂X₁₃X₁₄X₁₅X₁₆QRAHLERHX₁₇X₁₈ | |
| aac | GAG GGA | | QRAHLERHQRTHTGEKPYKCPEC | | X₁₉HX₂₀X₂₁X₂₂X₂₃X₂₄X₈X₉CX₁₀X₁₁CX₁₂X₁₃X₁₄X₁₅X₁₆RSDNLVRHX₁₇ | |
| | AAC | | GKSFSRSDNLVRHQRTHTGEKPY | | X₁₈X₁₉HX₂₀X₂₁X₂₂X₂₃X₂₄X₈X₉CX₁₀X₁₁CX₁₂X₁₃X₁₄X₁₅X₁₆TSGHLVRH | |
| | | | KCPECGKSFSTSGHLVRHQRTHT | | X₁₇X₁₈X₁₉HX₂₀X₂₁X₂₂X₂₃X₂₄X₈X₉CX₁₀X₁₁CX₁₂X₁₃X₁₄X₁₅X₁₆RSDKLV | |
| | | | GEKPYKCPECGKSFSRSDKLVRH | | RHX₁₇X₁₈X₁₉HX₂₀X₂₁X₂₂X₂₃X₂₄X₈X₉CX₁₀X₁₁CX₁₂X₁₃X₁₄X₁₅X₁₆TSGH | |
| | | | QRTHTGEKPYKCPECGKSFSTSG | | LVRHX₁₇X₁₈X₁₉HX₂₀X₂₁X₂₂X₂₃X₂₄X₈X₉CX₁₀X₁₁CX₁₂X₁₃X₁₄X₁₅X₁₆RS | |
| | | | HLVRHQRTHTGEKPYKCPECGKS | | DKLVRHX₁₇X₁₈X₁₉HX₂₀X₂₁X₂₂X₂₃X₂₄X₂₅X₂₆X₂₇X₂₈X₂₉X₃₀ | |
| | | | FSRSDKLVRHQRTHTGEKPTGKK | | | |
| | | | TS | | | |
| ggtgggggt | GGT GGG | 890 | LEPGEKPYKCPECGKSFSRSDHL | 1439 | X₁X₂X₃X₄X₅X₆X₇X₈X₉CX₁₀X₁₁CX₁₂X₁₃X₁₄X₁₅X₁₆RSDHLTNHX₁₇X₁₈X₁₉ | 1988 |
| gagggaaac | GGT GAG | | TNHQRTHTGEKPYKCPECGKSFS | | HX₂₀X₂₁X₂₂X₂₃X₂₄X₈X₉CX₁₀X₁₁CX₁₂X₁₃X₁₄X₁₅X₁₆DSGNLRVHX₁₇X₁₈ | |
| agg | GGA AAC | | DSGNLRVHQRTHTGEKPYKCPEC | | X₁₉HX₂₀X₂₁X₂₂X₂₃X₂₄X₈X₉CX₁₀X₁₁CX₁₂X₁₃X₁₄X₁₅X₁₆QRAHLERHX₁₇ | |
| | AGG | | GKSFSQRAHLERHQRTHTGEKPY | | X₁₈X₁₉HX₂₀X₂₁X₂₂X₂₃X₂₄X₈X₉CX₁₀X₁₁CX₁₂X₁₃X₁₄X₁₅X₁₆RSDNLVRH | |
| | | | KCPECGKSFSRSDNLVRHQRTHT | | X₁₇X₁₈X₁₉HX₂₀X₂₁X₂₂X₂₃X₂₄X₈X₉CX₁₀X₁₁CX₁₂X₁₃X₁₄X₁₅X₁₆TSGHLV | |
| | | | GEKPYKCPECGKSFSTSGHLVRH | | RHX₁₇X₁₈X₁₉HX₂₀X₂₁X₂₂X₂₃X₂₄X₈X₉CX₁₀X₁₁CX₁₂X₁₃X₁₄X₁₅X₁₆RSDK | |
| | | | QRTHTGEKPYKCPECGKSFSRSD | | LVRHX₁₇X₁₈X₁₉HX₂₀X₂₁X₂₂X₂₃X₂₄X₈X₉CX₁₀X₁₁CX₁₂X₁₃X₁₄X₁₅X₁₆TS | |
| | | | KLVRHQRTHTGEKPYKCPECGKS | | GHLVRHX₁₇X₁₈X₁₉HX₂₀X₂₁X₂₂X₂₃X₂₄X₂₅X₂₆X₂₇X₂₈X₂₉X₃₀ | |
| | | | FSTSGHLVRHQRTHTGEKPTGKK | | | |
| | | | TS | | | |
| ggagggggt | GGA GGG | 891 | LEPGEKPYKCPECGKSFSQRAHL | 1440 | X₁X₂X₃X₄X₅X₆X₇X₈X₉CX₁₀X₁₁CX₁₂X₁₃X₁₄X₁₅X₁₆QRAHLERHX₁₇X₁₈X₁₉ | 1989 |
| gggggtgag | GGT GGG | | ERHQRTHTGEKPYKCPECGKSFS | | HX₂₀X₂₁X₂₂X₂₃X₂₄X₈X₉CX₁₀X₁₁CX₁₂X₁₃X₁₄X₁₅X₁₆RSDNLVRHX₁₇X₁₈ | |
| gga | GGT GAG | | RSDNLVRHQRTHTGEKPYKCPEC | | X₁₉HX₂₀X₂₁X₂₂X₂₃X₂₄X₈X₉CX₁₀X₁₁CX₁₂X₁₃X₁₄X₁₅X₁₆TSGHLVRHX₁₇ | |
| | GGA | | GKSFSTSGHLVRHQRTHTGEKPY | | X₁₈X₁₉HX₂₀X₂₁X₂₂X₂₃X₂₄X₈X₉CX₁₀X₁₁CX₁₂X₁₃X₁₄X₁₅X₁₆RSDKLVRH | |
| | | | KCPECGKSFSRSDKLVRHQRTHT | | X₁₇X₁₈X₁₉HX₂₀X₂₁X₂₂X₂₃X₂₄X₈X₉CX₁₀X₁₁CX₁₂X₁₃X₁₄X₁₅X₁₆TSGHLV | |
| | | | GEKPYKCPECGKSFSTSGHLVRH | | RHX₁₇X₁₈X₁₉HX₂₀X₂₁X₂₂X₂₃X₂₄X₈X₉CX₁₀X₁₁CX₁₂X₁₃X₁₄X₁₅X₁₆RSDK | |
| | | | QRTHTGEKPYKCPECGKSFSRSD | | LVRHX₁₇X₁₈X₁₉HX₂₀X₂₁X₂₂X₂₃X₂₄X₈X₉CX₁₀X₁₁CX₁₂X₁₃X₁₄X₁₅X₁₆QR | |
| | | | KLVRHQRTHTGEKPYKCPECGKS | | AHLERHX₁₇X₁₈X₁₉HX₂₀X₂₁X₂₂X₂₃X₂₄X₂₅X₂₆X₂₇X₂₈X₂₉X₃₀ | |
| | | | FSQRAHLERHQRTHTGEKPTGKK | | | |
| | | | TS | | | |
| ccgggaggg | CCG GGA | 892 | LEPGEKPYKCPECGKSFSRSDNL | 1441 | X₁X₂X₃X₄X₅X₆X₇X₈X₉CX₁₀X₁₁CX₁₂X₁₃X₁₄X₁₅X₁₆RSDNLVRHX₁₇X₁₈X₁₉ | 1990 |
| ggtgggggt | GGG GGT | | VRHQRTHTGEKPYKCPECGKSFS | | HX₂₀X₂₁X₂₂X₂₃X₂₄X₈X₉CX₁₀X₁₁CX₁₂X₁₃X₁₄X₁₅X₁₆TSGHLVRHX₁₇X₁₈ | |
| gag | GGG GGT | | TSGHLVRHQRTHTGEKPYKCPEC | | X₁₉HX₂₀X₂₁X₂₂X₂₃X₂₄X₈X₉CX₁₀X₁₁CX₁₂X₁₃X₁₄X₁₅X₁₆RSDKLVRHX₁₇ | |
| | GAG | | GKSFSRSDKLVRHQRTHTGEKPY | | X₁₈X₁₉HX₂₀X₂₁X₂₂X₂₃X₂₄X₈X₉CX₁₀X₁₁CX₁₂X₁₃X₁₄X₁₅X₁₆TSGHLVRH | |
| | | | KCPECGKSFSTSGHLVRHQRTHT | | X₁₇X₁₈X₁₉HX₂₀X₂₁X₂₂X₂₃X₂₄X₈X₉CX₁₀X₁₁CX₁₂X₁₃X₁₄X₁₅X₁₆RSDKLV | |
| | | | GEKPYKCPECGKSFSRSDKLVRH | | RHX₁₇X₁₈X₁₉HX₂₀X₂₁X₂₂X₂₃X₂₄X₈X₉CX₁₀X₁₁CX₁₂X₁₃X₁₄X₁₅X₁₆QRAH | |
| | | | QRTHTGEKPYKCPECGKSFSQRA | | LERHX₁₇X₁₈X₁₉HX₂₀X₂₁X₂₂X₂₃X₂₄X₈X₉CX₁₀X₁₁CX₁₂X₁₃X₁₄X₁₅X₁₆RN | |
| | | | HLERHQRTHTGEKPYKCPECGKS | | DTLTEHX₁₇X₁₈X₁₉HX₂₀X₂₁X₂₂X₂₃X₂₄X₂₅X₂₆X₂₇X₂₈X₂₉X₃₀ | |
| | | | FSRNDTLTEHQRTHTGEKPTGKK | | | |
| | | | TS | | | |
| cgggagggg | CGG GAG | 893 | LEPGEKPYKCPECGKSFSRSDHL | 1442 | X₁X₂X₃X₄X₅X₆X₇X₈X₉CX₁₀X₁₁CX₁₂X₁₃X₁₄X₁₅X₁₆RSDHLTNHX₁₇X₁₈X₁₉ | 1991 |
| gtgggggtg | GGG GTG | | TNHQRTHTGEKPYKCPECGKSFS | | HX₂₀X₂₁X₂₂X₂₃X₂₄X₈X₉CX₁₀X₁₁CX₁₂X₁₃X₁₄X₁₅X₁₆RSDELVRHX₁₇X₁₈ | |
| agg | GGG gtg | | RSDELVRHQRTHTGEKPYKCPEC | | X₁₉HX₂₀X₂₁X₂₂X₂₃X₂₄X₈X₉CX₁₀X₁₁CX₁₂X₁₃X₁₄X₁₅X₁₆RSDKLVRHX₁₇ | |
| | AGG | | GKSFSRSDKLVRHQRTHTGEKPY | | X₁₈X₁₉HX₂₀X₂₁X₂₂X₂₃X₂₄X₈X₉CX₁₀X₁₁CX₁₂X₁₃X₁₄X₁₅X₁₆RSDELVRH | |
| | | | KCPECGKSFSRSDELVRHQRTHT | | X₁₇X₁₈X₁₉HX₂₀X₂₁X₂₂X₂₃X₂₄X₈X₉CX₁₀X₁₁CX₁₂X₁₃X₁₄X₁₅X₁₆RSDKLV | |
| | | | GEKPYKCPECGKSFSRSDKLVRH | | RHX₁₇X₁₈X₁₉HX₂₀X₂₁X₂₂X₂₃X₂₄X₈X₉CX₁₀X₁₁CX₁₂X₁₃X₁₄X₁₅X₁₆RSDN | |
| | | | QRTHTGEKPYKCPECGKSFSRSD | | LVRHX₁₇X₁₈X₁₉HX₂₀X₂₁X₂₂X₂₃X₂₄X₈X₉CX₁₀X₁₁CX₁₂X₁₃X₁₄X₁₅X₁₆RS | |
| | | | NLVRHQRTHTGEKPYKCPECGKS | | DKLTEHX₁₇X₁₈X₁₉HX₂₀X₂₁X₂₂X₂₃X₂₄X₂₅X₂₆X₂₇X₂₈X₂₉X₃₀ | |
| | | | FSRSDKLTEHQRTHTGEKPTGKK | | | |
| | | | TS | | | |
| gagggggtg | GAG GGG | 894 | LEPGEKPYKCPECGKSFSQSSNL | 1443 | X₁X₂X₃X₄X₅X₆X₇X₈X₉CX₁₀X₁₁CX₁₂X₁₃X₁₄X₁₅X₁₆QSSNLVRHX₁₇X₁₈X₁₉ | 1992 |
| ggggtgagg | GTG GGG | | VRHQRTHTGEKPYKCPECGKSFS | | HX₂₀X₂₁X₂₂X₂₃X₂₄X₈X₉CX₁₀X₁₁CX₁₂X₁₃X₁₄X₁₅X₁₆RSDHLTNHX₁₇X₁₈ | |
| gaa | gtg AGG | | RSDHLTNHQRTHTGEKPYKCPEC | | X₁₉HX₂₀X₂₁X₂₂X₂₃X₂₄X₈X₉CX₁₀X₁₁CX₁₂X₁₃X₁₄X₁₅X₁₆RSDELVRHX₁₇ | |
| | GAA | | GKSFSRSDELVRHQRTHTGEKPY | | X₁₈X₁₉HX₂₀X₂₁X₂₂X₂₃X₂₄X₈X₉CX₁₀X₁₁CX₁₂X₁₃X₁₄X₁₅X₁₆RSDKLVRH | |
| | | | KCPECGKSFSRSDKLVRHQRTHT | | X₁₇X₁₈X₁₉HX₂₀X₂₁X₂₂X₂₃X₂₄X₈X₉CX₁₀X₁₁CX₁₂X₁₃X₁₄X₁₅X₁₆RSDELV | |
| | | | GEKPYKCPECGKSFSRSDELVRH | | RHX₁₇X₁₈X₁₉HX₂₀X₂₁X₂₂X₂₃X₂₄X₈X₉CX₁₀X₁₁CX₁₂X₁₃X₁₄X₁₅X₁₆RSDK | |
| | | | QRTHTGEKPYKCPECGKSFSRSD | | LVRHX₁₇X₁₈X₁₉HX₂₀X₂₁X₂₂X₂₃X₂₄X₈X₉CX₁₀X₁₁CX₁₂X₁₃X₁₄X₁₅X₁₆RS | |
| | | | KLVRHQRTHTGEKPYKCPECGKS | | DNLVRHX₁₇X₁₈X₁₉HX₂₀X₂₁X₂₂X₂₃X₂₄X₂₅X₂₆X₂₇X₂₈X₂₉X₃₀ | |
| | | | FSRSDNLVRHQRTHTGEKPTGKK | | | |
| | | | TS | | | |
| ggggtgggg | GGG GTG | 895 | LEPGEKPYKCPECGKSFSSPADL | 1444 | X₁X₂X₃X₄X₅X₆X₇X₈X₉CX₁₀X₁₁CX₁₂X₁₃X₁₄X₁₅X₁₆SPADLTRHX₁₇X₁₈X₁₉ | 1993 |
| gtgagggaa | GGG gtg | | TRHQRTHTGEKPYKCPECGKSFS | | HX₂₀X₂₁X₂₂X₂₃X₂₄X₈X₉CX₁₀X₁₁CX₁₂X₁₃X₁₄X₁₅X₁₆QSSNLVRHX₁₇X₁₈ | |
| aca | AGG GAA | | QSSNLVRHQRTHTGEKPYKCPEC | | X₁₉HX₂₀X₂₁X₂₂X₂₃X₂₄X₈X₉CX₁₀X₁₁CX₁₂X₁₃X₁₄X₁₅X₁₆RSDHLTNHX₁₇ | |
| | ACA | | GKSFSRSDHLTNHQRTHTGEKPY | | X₁₈X₁₉HX₂₀X₂₁X₂₂X₂₃X₂₄X₈X₉CX₁₀X₁₁CX₁₂X₁₃X₁₄X₁₅X₁₆RSDELVRH | |
| | | | KCPECGKSFSRSDELVRHQRTHT | | X₁₇X₁₈X₁₉HX₂₀X₂₁X₂₂X₂₃X₂₄X₈X₉CX₁₀X₁₁CX₁₂X₁₃X₁₄X₁₅X₁₆RSDKLV | |
| | | | GEKPYKCPECGKSFSRSDKLVRH | | RHX₁₇X₁₈X₁₉HX₂₀X₂₁X₂₂X₂₃X₂₄X₈X₉CX₁₀X₁₁CX₁₂X₁₃X₁₄X₁₅X₁₆RSDE | |
| | | | QRTHTGEKPYKCPECGKSFSRSD | | LVRHX₁₇X₁₈X₁₉HX₂₀X₂₁X₂₂X₂₃X₂₄X₈X₉CX₁₀X₁₁CX₁₂X₁₃X₁₄X₁₅X₁₆RS | |
| | | | ELVRHQRTHTGEKPYKCPECGKS | | DKLVRHX₁₇X₁₈X₁₉HX₂₀X₂₁X₂₂X₂₃X₂₄X₂₅X₂₆X₂₇X₂₈X₂₉X₃₀ | |
| | | | FSRSDKLVRHQRTHTGEKPTGKK | | | |
| | | | TS | | | |
| gtgggggtg | GTG GGG | 896 | LEPGEKPYKCPECGKSFSQRAHL | 1445 | X₁X₂X₃X₄X₅X₆X₇X₈X₉CX₁₀X₁₁CX₁₂X₁₃X₁₄X₁₅X₁₆QRAHLERHX₁₇X₁₈X₁₉ | 1994 |
| agggaaaca | gtg AGG | | ERHQRTHTGEKPYKCPECGKSFS | | HX₂₀X₂₁X₂₂X₂₃X₂₄X₈X₉CX₁₀X₁₁CX₁₂X₁₃X₁₄X₁₅X₁₆SPADLTRHX₁₇X₁₈ | |
| gga | GAA ACA | | SPADLTRHQRTHTGEKPYKCPEC | | X₁₉HX₂₀X₂₁X₂₂X₂₃X₂₄X₈X₉CX₁₀X₁₁CX₁₂X₁₃X₁₄X₁₅X₁₆QSSNLVRHX₁₇ | |
| | GGA | | GKSFSQSSNLVRHQRTHTGEKPY | | X₁₈X₁₉HX₂₀X₂₁X₂₂X₂₃X₂₄X₈X₉CX₁₀X₁₁CX₁₂X₁₃X₁₄X₁₅X₁₆RSDHLTNH | |
| | | | KCPECGKSFSRSDHLTNHQRTHT | | X₁₇X₁₈X₁₉HX₂₀X₂₁X₂₂X₂₃X₂₄X₈X₉CX₁₀X₁₁CX₁₂X₁₃X₁₄X₁₅X₁₆RSDELV | |
| | | | GEKPYKCPECGKSFSRSDELVRH | | RHX₁₇X₁₈X₁₉HX₂₀X₂₁X₂₂X₂₃X₂₄X₈X₉CX₁₀X₁₁CX₁₂X₁₃X₁₄X₁₅X₁₆RSDK | |
| | | | QRTHTGEKPYKCPECGKSFSRSD | | LVRHX₁₇X₁₈X₁₉HX₂₀X₂₁X₂₂X₂₃X₂₄X₈X₉CX₁₀X₁₁CX₁₂X₁₃X₁₄X₁₅X₁₆RS | |
| | | | KLVRHQRTHTGEKPYKCPECGKS | | DELVRHX₁₇X₁₈X₁₉HX₂₀X₂₁X₂₂X₂₃X₂₄X₂₅X₂₆X₂₇X₂₈X₂₉X₃₀ | |
| | | | FSRSDELVRHQRTHTGEKPTGKK | | | |
| | | | TS | | | |
| ggggtgagg | GGG gtg | 897 | LEPGEKPYKCPECGKSFSQSSNL | 1446 | X₁X₂X₃X₄X₅X₆X₇X₈X₉CX₁₀X₁₁CX₁₂X₁₃X₁₄X₁₅X₁₆QSSNLVRHX₁₇X₁₈X₁₉ | 1995 |
| gaaacagga | AGG GAA | | VRHQRTHTGEKPYKCPECGKSFS | | HX₂₀X₂₁X₂₂X₂₃X₂₄X₈X₉CX₁₀X₁₁CX₁₂X₁₃X₁₄X₁₅X₁₆QRAHLERHX₁₇X₁₈ | |
| gaa | ACA GGA | | QRAHLERHQRTHTGEKPYKCPEC | | X₁₉HX₂₀X₂₁X₂₂X₂₃X₂₄X₈X₉CX₁₀X₁₁CX₁₂X₁₃X₁₄X₁₅X₁₆SPADLTRHX₁₇ | |
| | GAA | | GKSFSSPADLTRHQRTHTGEKPY | | X₁₈X₁₉HX₂₀X₂₁X₂₂X₂₃X₂₄X₈X₉CX₁₀X₁₁CX₁₂X₁₃X₁₄X₁₅X₁₆QSSNLVRH | |
| | | | KCPECGKSFSQSSNLVRHQRTHT | | X₁₇X₁₈X₁₉HX₂₀X₂₁X₂₂X₂₃X₂₄X₈X₉CX₁₀X₁₁CX₁₂X₁₃X₁₄X₁₅X₁₆RSDHLT | |
| | | | GEKPYKCPECGKSFSRSDHLTNH | | NHX₁₇X₁₈X₁₉HX₂₀X₂₁X₂₂X₂₃X₂₄X₈X₉CX₁₀X₁₁CX₁₂X₁₃X₁₄X₁₅X₁₆RSDE | |
| | | | QRTHTGEKPYKCPECGKSFSRSD | | LVRHX₁₇X₁₈X₁₉HX₂₀X₂₁X₂₂X₂₃X₂₄X₈X₉CX₁₀X₁₁CX₁₂X₁₃X₁₄X₁₅X₁₆RS | |
| | | | ELVRHQRTHTGEKPYKCPECGKS | | DKLVRHX₁₇X₁₈X₁₉HX₂₀X₂₁X₂₂X₂₃X₂₄X₂₅X₂₆X₂₇X₂₈X₂₉X₃₀ | |
| | | | FSRSDKLVRHQRTHTGEKPTGKK | | | |
| | | | TS | | | |
| gggtgaggg | GGG TGA | 898 | LEPGEKPYKCPECGKSFSTTGNL | 1447 | X₁X₂X₃X₄X₅X₆X₇X₈X₉CX₁₀X₁₁CX₁₂X₁₃X₁₄X₁₅X₁₆TTGNLTVHX₁₇X₁₈X₁₉ | 1996 |
| aaacaggag | ggg AAA | | TVHQRTHTGEKPYKCPECGKSFS | | HX₂₀X₂₁X₂₂X₂₃X₂₄X₈X₉CX₁₀X₁₁CX₁₂X₁₃X₁₄X₁₅X₁₆RSDNLVRHX₁₇X₁₈ | |
| aat | CAG gag | | RSDNLVRHQRTHTGEKPYKCPEC | | X₁₉HX₂₀X₂₁X₂₂X₂₃X₂₄X₈X₉CX₁₀X₁₁CX₁₂X₁₃X₁₄X₁₅X₁₆RADNLTEHX₁₇ | |
| | AAT | | GKSFSRADNLTEHQRTHTGEKPY | | X₁₈X₁₉HX₂₀X₂₁X₂₂X₂₃X₂₄X₈X₉CX₁₀X₁₁CX₁₂X₁₃X₁₄X₁₅X₁₆QRANLRAH | |
| | | | KCPECGKSFSQRANLRAHQRTHT | | X₁₇X₁₈X₁₉HX₂₀X₂₁X₂₂X₂₃X₂₄X₈X₉CX₁₀X₁₁CX₁₂X₁₃X₁₄X₁₅X₁₆RSDKLV | |
| | | | GEKPYKCPECGKSFSRSDKLVRH | | RHX₁₇X₁₈X₁₉HX₂₀X₂₁X₂₂X₂₃X₂₄X₈X₉CX₁₀X₁₁CX₁₂X₁₃X₁₄X₁₅X₁₆QAGH | |
| | | | QRTHTGEKPYKCPECGKSFSQAG | | LASHX₁₇X₁₈X₁₉HX₂₀X₂₁X₂₂X₂₃X₂₄X₈X₉CX₁₀X₁₁CX₁₂X₁₃X₁₄X₁₅X₁₆RS | |
| | | | HLASHQRTHTGEKPYKCPECGKS | | DKLVRHX₁₇X₁₈X₁₉HX₂₀X₂₁X₂₂X₂₃X₂₄X₂₅X₂₆X₂₇X₂₈X₂₉X₃₀ | |
| | | | FSRSDKLVRHQRTHTGEKPTGKK | | | |
| | | | TS | | | |
| gggtggggg | GGG TGG | 899 | LEPGEKPYKCPECGKSFSRADNL | 1448 | X₁X₂X₃X₄X₅X₆X₇X₈X₉CX₁₀X₁₁CX₁₂X₁₃X₁₄X₁₅X₁₆RADNLTEHX₁₇X₁₈X₁₉ | 1997 |
| tgagggaaa | GGG TGA | | TEHQRTHTGEKPYKCPECGKSFS | | HX₂₀X₂₁X₂₂X₂₃X₂₄X₈X₉CX₁₀X₁₁CX₁₂X₁₃X₁₄X₁₅X₁₆QRANLRAHX₁₇X₁₈ | |
| cag | ggg AAA | | QRANLRAHQRTHTGEKPYKCPEC | | X₁₉HX₂₀X₂₁X₂₂X₂₃X₂₄X₈X₉CX₁₀X₁₁CX₁₂X₁₃X₁₄X₁₅X₁₆RSDKLVRHX₁₇ | |
| | CAG | | GKSFSRSDKLVRHQRTHTGEKPY | | X₁₈X₁₉HX₂₀X₂₁X₂₂X₂₃X₂₄X₈X₉CX₁₀X₁₁CX₁₂X₁₃X₁₄X₁₅X₁₆QAGHLASH | |
| | | | KCPECGKSFSQAGHLASHQRTHT | | X₁₇X₁₈X₁₉HX₂₀X₂₁X₂₂X₂₃X₂₄X₈X₉CX₁₀X₁₁CX₁₂X₁₃X₁₄X₁₅X₁₆RSDKLV | |
| | | | GEKPYKCPECGKSFSRSDKLVRH | | RHX₁₇X₁₈X₁₉HX₂₀X₂₁X₂₂X₂₃X₂₄X₈X₉CX₁₀X₁₁CX₁₂X₁₃X₁₄X₁₅X₁₆RSDH | |
| | | | QRTHTGEKPYKCPECGKSFSRSD | | LTTHX₁₇X₁₈X₁₉HX₂₀X₂₁X₂₂X₂₃X₂₄X₈X₉CX₁₀X₁₁CX₁₂X₁₃X₁₄X₁₅X₁₆RS | |
| | | | HLTTHQRTHTGEKPYKCPECGKS | | DKLVRHX₁₇X₁₈X₁₉HX₂₀X₂₁X₂₂X₂₃X₂₄X₂₅X₂₆X₂₇X₂₈X₂₉X₃₀ | |
| | | | FSRSDKLVRHQRTHTGEKPTGKK | | | |
| | | | TS | | | |
| tgagggaaa | TGA ggg | 900 | LEPGEKPYKCPECGKSFSRSDEL | 1449 | X₁X₂X₃X₄X₅X₆X₇X₈X₉CX₁₀X₁₁CX₁₂X₁₃X₁₄X₁₅X₁₆RSDELVRHX₁₇X₁₈X₁₉ | 1998 |
| caggagaat | AAA CAG | | VRHQRTHTGEKPYKCPECGKSFS | | HX₂₀X₂₁X₂₂X₂₃X₂₄X₈X₉CX₁₀X₁₁CX₁₂X₁₃X₁₄X₁₅X₁₆TTGNLTVHX₁₇X₁₈ | |
| gtg | gag AAT | | TTGNLTVHQRTHTGEKPYKCPEC | | X₁₉HX₂₀X₂₁X₂₂X₂₃X₂₄X₈X₉CX₁₀X₁₁CX₁₂X₁₃X₁₄X₁₅X₁₆RSDNLVRHX₁₇ | |
| | GTG | | GKSFSRSDNLVRHQRTHTGEKPY | | X₁₈X₁₉HX₂₀X₂₁X₂₂X₂₃X₂₄X₈X₉CX₁₀X₁₁CX₁₂X₁₃X₁₄X₁₅X₁₆RADNLTEH | |
| | | | KCPECGKSFSRADNLTEHQRTHT | | X₁₇X₁₈X₁₉HX₂₀X₂₁X₂₂X₂₃X₂₄X₈X₉CX₁₀X₁₁CX₁₂X₁₃X₁₄X₁₅X₁₆QRANLR | |
| | | | GEKPYKCPECGKSFSQRANLRAH | | AHX₁₇X₁₈X₁₉HX₂₀X₂₁X₂₂X₂₃X₂₄X₈X₉CX₁₀X₁₁CX₁₂X₁₃X₁₄X₁₅X₁₆RSDK | |
| | | | QRTHTGEKPYKCPECGKSFSRSD | | LVRHX₁₇X₁₈X₁₉HX₂₀X₂₁X₂₂X₂₃X₂₄X₈X₉CX₁₀X₁₁CX₁₂X₁₃X₁₄X₁₅X₁₆QA | |
| | | | KLVRHQRTHTGEKPYKCPECGKS | | GHLASHX₁₇X₁₈X₁₉HX₂₀X₂₁X₂₂X₂₃X₂₄X₂₅X₂₆X₂₇X₂₈X₂₉X₃₀ | |
| | | | FSQAGHLASHQRTHTGEKPTGKK | | | |
| | | | TS | | | |
| tgggggtga | TGG GGG | 901 | LEPGEKPYKCPECGKSFSRSDNL | 1450 | X₁X₂X₃X₄X₅X₆X₇X₈X₉CX₁₀X₁₁CX₁₂X₁₃X₁₄X₁₅X₁₆RSDNLVRHX₁₇X₁₈X₁₉ | 1999 |
| gggaaacag | TGA ggg | | VRHQRTHTGEKPYKCPECGKSFS | | HX₂₀X₂₁X₂₂X₂₃X₂₄X₈X₉CX₁₀X₁₁CX₁₂X₁₃X₁₄X₁₅X₁₆RADNLTEHX₁₇X₁₈ | |
| gag | AAA CAG | | RADNLTEHQRTHTGEKPYKCPEC | | X₁₉HX₂₀X₂₁X₂₂X₂₃X₂₄X₈X₉CX₁₀X₁₁CX₁₂X₁₃X₁₄X₁₅X₁₆QRANLRAHX₁₇ | |
| | GAG | | GKSFSQRANLRAHQRTHTGEKPY | | X₁₈X₁₉HX₂₀X₂₁X₂₂X₂₃X₂₄X₈X₉CX₁₀X₁₁CX₁₂X₁₃X₁₄X₁₅X₁₆RSDKLVRH | |
| | | | KCPECGKSFSRSDKLVRHQRTHT | | X₁₇X₁₈X₁₉HX₂₀X₂₁X₂₂X₂₃X₂₄X₈X₉CX₁₀X₁₁CX₁₂X₁₃X₁₄X₁₅X₁₆QAGHLA | |
| | | | GEKPYKCPECGKSFSQAGHLASH | | SHX₁₇X₁₈X₁₉HX₂₀X₂₁X₂₂X₂₃X₂₄X₈X₉CX₁₀X₁₁CX₁₂X₁₃X₁₄X₁₅X₁₆RSDK | |
| | | | QRTHTGEKPYKCPECGKSFSRSD | | LVRHX₁₇X₁₈X₁₉HX₂₀X₂₁X₂₂X₂₃X₂₄X₈X₉CX₁₀X₁₁CX₁₂X₁₃X₁₄X₁₅X₁₆RS | |
| | | | KLVRHQRTHTGEKPYKCPECGKS | | DHLTTHX₁₇X₁₈X₁₉HX₂₀X₂₁X₂₂X₂₃X₂₄X₂₅X₂₆X₂₇X₂₈X₂₉X₃₀ | |
| | | | FSRSDHLTTHQRTHTGEKPTGKK | | | |
| | | | TS | | | |
| gggaggggg | ggg AGG | 902 | LEPGEKPYKCPECGKSFSRSDKL | 1451 | X₁X₂X₃X₄X₅X₆X₇X₈X₉CX₁₀X₁₁CX₁₂X₁₃X₁₄X₁₅X₁₆RSDKLVRHX₁₇X₁₈X₁₉ | 2000 |
| tgggggtga | GGG TGG | | VRHQRTHTGEKPYKCPECGKSFS | | HX₂₀X₂₁X₂₂X₂₃X₂₄X₈X₉CX₁₀X₁₁CX₁₂X₁₃X₁₄X₁₅X₁₆QAGHLASHX₁₇X₁₈ | |
| ggg | GGG TGA | | QAGHLASHQRTHTGEKPYKCPEC | | X₁₉HX₂₀X₂₁X₂₂X₂₃X₂₄X₈X₉CX₁₀X₁₁CX₁₂X₁₃X₁₄X₁₅X₁₆RSDKLVRHX₁₇ | |
| | GGG | | GKSFSRSDKLVRHQRTHTGEKPY | | X₁₈X₁₉HX₂₀X₂₁X₂₂X₂₃X₂₄X₈X₉CX₁₀X₁₁CX₁₂X₁₃X₁₄X₁₅X₁₆RSDHLTTH | |
| | | | KCPECGKSFSRSDHLTTHQRTHT | | X₁₇X₁₈X₁₉HX₂₀X₂₁X₂₂X₂₃X₂₄X₈X₉CX₁₀X₁₁CX₁₂X₁₃X₁₄X₁₅X₁₆RSDKLV | |
| | | | GEKPYKCPECGKSFSRSDKLVRH | | RHX₁₇X₁₈X₁₉HX₂₀X₂₁X₂₂X₂₃X₂₄X₈X₉CX₁₀X₁₁CX₁₂X₁₃X₁₄X₁₅X₁₆RSDH | |
| | | | QRTHTGEKPYKCPECGKSFSRSD | | LTNHX₁₇X₁₈X₁₉HX₂₀X₂₁X₂₂X₂₃X₂₄X₈X₉CX₁₀X₁₁CX₁₂X₁₃X₁₄X₁₅X₁₆RS | |
| | | | HLTNHQRTHTGEKPYKCPECGKS | | DKLVRHX₁₇X₁₈X₁₉HX₂₀X₂₁X₂₂X₂₃X₂₄X₂₅X₂₆X₂₇X₂₈X₂₉X₃₀ | |
| | | | FSRSDKLVRHQRTHTGEKPTGKK | | | |
| | | | TS | | | |
| agggggtgg | AGG GGG | 903 | LEPGEKPYKCPECGKSFSQRANL | 1452 | X₁X₂X₃X₄X₅X₆X₇X₈X₉CX₁₀X₁₁CX₁₂X₁₃X₁₄X₁₅X₁₆QRANLRAHX₁₇X₁₈X₁₉ | 2001 |
| gggtgaggg | TGG GGG | | RAHQRTHTGEKPYKCPECGKSFS | | HX₂₀X₂₁X₂₂X₂₃X₂₄X₈X₉CX₁₀X₁₁CX₁₂X₁₃X₁₄X₁₅X₁₆RSDKLVRHX₁₇X₁₈ | |
| aaa | TGA ggg | | RSDKLVRHQRTHTGEKPYKCPEC | | X₁₉HX₂₀X₂₁X₂₂X₂₃X₂₄X₈X₉CX₁₀X₁₁CX₁₂X₁₃X₁₄X₁₅X₁₆QAGHLASHX₁₇ | |
| | AAA | | GKSFSQAGHLASHQRTHTGEKPY | | X₁₈X₁₉HX₂₀X₂₁X₂₂X₂₃X₂₄X₈X₉CX₁₀X₁₁CX₁₂X₁₃X₁₄X₁₅X₁₆RSDKLVRH | |
| | | | KCPECGKSFSRSDKLVRHQRTHT | | X₁₇X₁₈X₁₉HX₂₀X₂₁X₂₂X₂₃X₂₄X₈X₉CX₁₀X₁₁CX₁₂X₁₃X₁₄X₁₅X₁₆RSDHLT | |
| | | | GEKPYKCPECGKSFSRSDHLTTH | | THX₁₇X₁₈X₁₉HX₂₀X₂₁X₂₂X₂₃X₂₄X₈X₉CX₁₀X₁₁CX₁₂X₁₃X₁₄X₁₅X₁₆RSDK | |
| | | | QRTHTGEKPYKCPECGKSFSRSD | | LVRHX₁₇X₁₈X₁₉HX₂₀X₂₁X₂₂X₂₃X₂₄X₈X₉CX₁₀X₁₁CX₁₂X₁₃X₁₄X₁₅X₁₆RS | |
| | | | KLVRHQRTHTGEKPYKCPECGKS | | DHLTNHX₁₇X₁₈X₁₉HX₂₀X₂₁X₂₂X₂₃X₂₄X₂₅X₂₆X₂₇X₂₈X₂₉X₃₀ | |
| | | | FSRSDHLTNHQRTHTGEKPTGKK | | | |
| | | | TS | | | |
| gggaaacag | ggg AAA | 904 | LEPGEKPYKCPECGKSFSRRDEL | 1453 | X₁X₂X₃X₄X₅X₆X₇X₈X₉CX₁₀X₁₁CX₁₂X₁₃X₁₄X₁₅X₁₆RRDELNVHX₁₇X₁₈X₁₉ | 2002 |
| gagaatgtg | CAG gag | | NVHQRTHTGEKPYKCPECGKSFS | | HX₂₀X₂₁X₂₂X₂₃X₂₄X₈X₉CX₁₀X₁₁CX₁₂X₁₃X₁₄X₁₅X₁₆RSDELVRHX₁₇X₁₈ | |
| atg | AAT gtg | | RSDELVRHQRTHTGEKPYKCPEC | | X₁₉HX₂₀X₂₁X₂₂X₂₃X₂₄X₈X₉CX₁₀X₁₁CX₁₂X₁₃X₁₄X₁₅X₁₆TTGNLTVHX₁₇ | |
| | ATG | | GKSFSTTGNLTVHQRTHTGEKPY | | X₁₈X₁₉HX₂₀X₂₁X₂₂X₂₃X₂₄X₈X₉CX₁₀X₁₁CX₁₂X₁₃X₁₄X₁₅X₁₆RSDNLVRH | |
| | | | KCPECGKSFSRSDNLVRHQRTHT | | X₁₇X₁₈X₁₉HX₂₀X₂₁X₂₂X₂₃X₂₄X₈X₉CX₁₀X₁₁CX₁₂X₁₃X₁₄X₁₅X₁₆RADNLT | |
| | | | GEKPYKCPECGKSFSRADNLTEH | | EHX₁₇X₁₈X₁₉HX₂₀X₂₁X₂₂X₂₃X₂₄X₈X₉CX₁₀X₁₁CX₁₂X₁₃X₁₄X₁₅X₁₆QRAN | |
| | | | QRTHTGEKPYKCPECGKSFSQRA | | LRAHX₁₇X₁₈X₁₉HX₂₀X₂₁X₂₂X₂₃X₂₄X₈X₉CX₁₀X₁₁CX₁₂X₁₃X₁₄X₁₅X₁₆RS | |
| | | | NLRAHQRTHTGEKPYKCPECGKS | | DKLVRHX₁₇X₁₈X₁₉HX₂₀X₂₁X₂₂X₂₃X₂₄X₂₅X₂₆X₂₇X₂₈X₂₉X₃₀ | |
| | | | FSRSDKLVRHQRTHTGEKPTGKK | | | |
| | | | TS | | | |
| aaacaggag | AAA CAG | 905 | LEPGEKPYKCPECGKSFSQRAHL | 1454 | X₁X₂X₃X₄X₅X₆X₇X₈X₉CX₁₀X₁₁CX₁₂X₁₃X₁₄X₁₅X₁₆QRAHLERHX₁₇X₁₈X₁₉ | 2003 |
| aatgtgatg | gag AAT | | ERHQRTHTGEKPYKCPECGKSFS | | HX₂₀X₂₁X₂₂X₂₃X₂₄X₈X₉CX₁₀X₁₁CX₁₂X₁₃X₁₄X₁₅X₁₆RRDELNVHX₁₇X₁₈ | |
| gga | gtg ATG | | RRDELNVHQRTHTGEKPYKCPEC | | X₁₁HX₂₀X₂₁X₂₂X₂₃X₂₄X₈X₉CX₁₀X₁₁CX₁₂X₁₃X₁₄X₁₅X₁₆RSDELVRHX₁₇ | |
| | GGA | | GKSFSRSDELVRHQRTHTGEKPY | | X₁₈X₁₉HX₂₀X₂₁X₂₂X₂₃X₂₄X₈X₉CX₁₀X₁₁CX₁₂X₁₃X₁₄X₁₅X₁₆TTGNLTVH | |
| | | | KCPECGKSFSTTGNLTVHQRTHT | | X₁₇X₁₈X₁₉HX₂₀X₂₁X₂₂X₂₃X₂₄X₈X₉CX₁₀X₁₁CX₁₂X₁₃X₁₄X₁₅X₁₆RSDNLV | |
| | | | GEKPYKCPECGKSFSRSDNLVRH | | RHX₁₇X₁₈X₁₉HX₂₀X₂₁X₂₂X₂₃X₂₄X₈X₉CX₁₀X₁₁CX₁₂X₁₃X₁₄X₁₅X₁₆RADN | |
| | | | QRTHTGEKPYKCPECGKSFSRAD | | LTEHX₁₇X₁₈X₁₉HX₂₀X₂₁X₂₂X₂₃X₂₄X₈X₉CX₁₀X₁₁CX₁₂X₁₃X₁₄X₁₅X₁₆QR | |
| | | | NLTEHQRTHTGEKPYKCPECGKS | | ANLRAHX₁₇X₁₈X₁₉HX₂₀X₂₁X₂₂X₂₃X₂₄X₂₅X₂₆X₂₇X₂₈X₂₉X₃₀ | |
| | | | FSQRANLRAHQRTHTGEKPTGKK | | | |
| | | | TS | | | |
| caggagaat | CAG gag | 906 | LEPGEKPYKCPECGKSFSQRANL | 1455 | X₁X₂X₃X₄X₅X₆X₇X₈X₉CX₁₀X₁₁CX₁₂X₁₃X₁₄X₁₅X₁₆QRANLRAHX₁₇X₁₈X₁₉ | 2004 |
| gtgatggga | AAT gtg | | RAHQRTHTGEKPYKCPECGKSFS | | HX₂₀X₂₁X₂₂X₂₃X₂₄X₈X₉CX₁₀X₁₁CX₁₂X₁₃X₁₄X₁₅X₁₆QRAHLERHX₁₇X₁₈ | |
| aaa | ATG GGA | | QRAHLERHQRTHTGEKPYKCPEC | | X₁₉HX₂₀X₂₁X₂₂X₂₃X₂₄X₈X₉CX₁₀X₁₁CX₁₂X₁₃X₁₄X₁₅X₁₆RRDELNVHX₁₇ | |
| | AAA | | GKSFSRRDELNVHQRTHTGEKPY | | X₁₈X₁₉HX₂₀X₂₁X₂₂X₂₃X₂₄X₈X₉CX₁₀X₁₁CX₁₂X₁₃X₁₄X₁₅X₁₆RSDELVRH | |
| | | | KCPECGKSFSRSDELVRHQRTHT | | X₁₇X₁₈X₁₉HX₂₀X₂₁X₂₂X₂₃X₂₄X₈X₉CX₁₀X₁₁CX₁₂X₁₃X₁₄X₁₅X₁₆TTGNLT | |
| | | | GEKPYKCPECGKSFSTTGNLTVH | | VHX₁₇X₁₈X₁₉HX₂₀X₂₁X₂₂X₂₃X₂₄X₈X₉CX₁₀X₁₁CX₁₂X₁₃X₁₄X₁₅X₁₆RSDN | |
| | | | QRTHTGEKPYKCPECGKSFSRSD | | LVRHX₁₇X₁₈X₁₉HX₂₀X₂₁X₂₂X₂₃X₂₄X₈X₉CX₁₀X₁₁CX₁₂X₁₃X₁₄X₁₅X₁₆RA | |
| | | | NLVRHQRTHTGEKPYKCPECGKS | | DNLTEHX₁₇X₁₈X₁₉HX₂₀X₂₁X₂₂X₂₃X₂₄X₂₅X₂₆X₂₇X₂₈X₂₉X₃₀ | |
| | | | FSRADNLTEHQRTHTGEKPTGKK | | | |
| | | | TS | | | |
| ggccagaaa | GGC CAG | 907 | LEPGEKPYKCPECGKSFSRNDAL | 1456 | X₁X₂X₃X₄X₅X₆X₇X₈X₉CX₁₀X₁₁CX₁₂X₁₃X₁₄X₁₅X₁₆RNDALTEHX₁₇X₁₈X₁₉ | 2005 |
| cactgggag | AAA CAC | | TEHQRTHTGEKPYKCPECGKSFS | | HX₂₀X₂₁X₂₂X₂₃X₂₄X₈X₉CX₁₀X₁₁CX₁₂X₁₃X₁₄X₁₅X₁₆RSDNLVRHX₁₇X₁₈ | |
| ctg | TGG gag | | RSDNLVRHQRTHTGEKPYKCPEC | | X₁₉HX₂₀X₂₁X₂₂X₂₃X₂₄X₈X₉CX₁₀X₁₁CX₁₂X₁₃X₁₄X₁₅X₁₆RSDHLTTHX₁₇ | |
| | CTG | | GKSFSRSDHLTTHQRTHTGEKPY | | X₁₈X₁₉HX₂₀X₂₁X₂₂X₂₃X₂₄X₈X₉CX₁₀X₁₁CX₁₂X₁₃X₁₄X₁₅X₁₆SKKALTEH | |
| | | | KCPECGKSFSSKKALTEHQRTHT | | X₁₇X₁₈X₁₉HX₂₀X₂₁X₂₂X₂₃X₂₄X₈X₉CX₁₀X₁₁CX₁₂X₁₃X₁₄X₁₅X₁₆QRANLR | |
| | | | GEKPYKCPECGKSFSQRANLRAH | | AHX₁₇X₁₈X₁₉HX₂₀X₂₁X₂₂X₂₃X₂₄X₈X₉CX₁₀X₁₁CX₁₂X₁₃X₁₄X₁₅X₁₆RADN | |
| | | | QRTHTGEKPYKCPECGKSFSRAD | | LTEHX₁₇X₁₈X₁₉HX₂₀X₂₁X₂₂X₂₃X₂₄X₈X₉CX₁₀X₁₁CX₁₂X₁₃X₁₄X₁₅X₁₆DP | |
| | | | NLTEHQRTHTGEKPYKCPECGKS | | GHLVRHX₁₇X₁₈X₁₉HX₂₀X₂₁X₂₂X₂₃X₂₄X₂₅X₂₆X₂₇X₂₈X₂₉X₃₀ | |
| | | | FSDPGHLVRHQRTHTGEKPTGKK | | | |
| | | | TS | | | |
| ctgggccag | CTG GGC | 908 | LEPGEKPYKCPECGKSFSRSDNL | 1457 | X₁X₂X₃X₄X₅X₆X₇X₈X₉CX₁₀X₁₁CX₁₂X₁₃X₁₄X₁₅X₁₆RSDNLVRHX₁₇X₁₈X₁₉ | 2006 |
| aaacactgg | CAG AAA | | VRHQRTHTGEKPYKCPECGKSFS | | HX₂₀X₂₁X₂₂X₂₃X₂₄X₈X₉CX₁₀X₁₁CX₁₂X₁₃X₁₄X₁₅X₁₆RSDHLTTHX₁₇X₁₈ | |
| gag | CAC TGG | | RSDHLTTHQRTHTGEKPYKCPEC | | X₁₉HX₂₀X₂₁X₂₂X₂₃X₂₄X₈X₉CX₁₀X₁₁CX₁₂X₁₃X₁₄X₁₅X₁₆SKKALTEHX₁₇ | |
| | GAG | | GKSFSSKKALTEHQRTHTGEKPY | | X₁₈X₁₉HX₂₀X₂₁X₂₂X₂₃X₂₄X₈X₉CX₁₀X₁₁CX₁₂X₁₃X₁₄X₁₅X₁₆QRANLRAH | |
| | | | KCPECGKSFSQRANLRAHQRTHT | | X₁₇X₁₈X₁₉HX₂₀X₂₁X₂₂X₂₃X₂₄X₈X₉CX₁₀X₁₁CX₁₂X₁₃X₁₄X₁₅X₁₆RADNLT | |
| | | | GEKPYKCPECGKSFSRADNLTEH | | EHX₁₇X₁₈X₁₉HX₂₀X₂₁X₂₂X₂₃X₂₄X₈X₉CX₁₀X₁₁CX₁₂X₁₃X₁₄X₁₅X₁₆DPGH | |
| | | | QRTHTGEKPYKCPECGKSFSDPG | | LVRHX₁₇X₁₈X₁₉HX₂₀X₂₁X₂₂X₂₃X₂₄X₈X₉CX₁₀X₁₁CX₁₂X₁₃X₁₄X₁₅X₁₆RN | |
| | | | HLVRHQRTHTGEKPYKCPECGKS | | DALTEHX₁₇X₁₈X₁₉HX₂₀X₂₁X₂₂X₂₃X₂₄X₂₅X₂₆X₂₇X₂₈X₂₉X₃₀ | |
| | | | FSRNDALTEHQRTHTGEKPTGKK | | | |
| | | | TS | | | |
| aaacactgg | AAA CAC | 909 | LEPGEKPYKCPECGKSFSRSDNL | 1458 | X₁X₂X₃X₄X₅X₆X₇X₈X₉CX₁₀X₁₁CX₁₂X₁₃X₁₄X₁₅X₁₆RSDNLVRHX₁₇X₁₈X₁₉ | 2007 |
| gagctgtgg | TGG gag | | VRHQRTHTGEKPYKCPECGKSFS | | HX₂₀X₂₁X₂₂X₂₃X₂₄X₈X₉CX₁₀X₁₁CX₁₂X₁₃X₁₄X₁₅X₁₆RSDHLTTHX₁₇X₁₈ | |
| gag | CTG TGG | | RSDHLTTHQRTHTGEKPYKCPEC | | X₁₉HX₂₀X₂₁X₂₂X₂₃X₂₄X₈X₉CX₁₀X₁₁CX₁₂X₁₃X₁₄X₁₅X₁₆RNDALTEHX₁₇ | |
| | GAG | | GKSFSRNDALTEHQRTHTGEKPY | | X₁₈X₁₉HX₂₀X₂₁X₂₂X₂₃X₂₄X₈X₉CX₁₀X₁₁CX₁₂X₁₃X₁₄X₁₅X₁₆RSDNLVRH | |
| | | | KCPECGKSFSRSDNLVRHQRTHT | | X₁₇X₁₈X₁₉HX₂₀X₂₁X₂₂X₂₃X₂₄X₈X₉CX₁₀X₁₁CX₁₂X₁₃X₁₄X₁₅X₁₆RSDHLT | |
| | | | GEKPYKCPECGKSFSRSDHLTTH | | THX₁₇X₁₈X₁₉HX₂₀X₂₁X₂₂X₂₃X₂₄X₈X₉CX₁₀X₁₁CX₁₂X₁₃X₁₄X₁₅X₁₆SKKA | |
| | | | QRTHTGEKPYKCPECGKSFSSKK | | LTEHX₁₇X₁₈X₁₉HX₂₀X₂₁X₂₂X₂₃X₂₄X₈X₉CX₁₀X₁₁CX₁₂X₁₃X₁₄X₁₅X₁₆QR | |
| | | | ALTEHQRTHTGEKPYKCPECGKS | | ANLRAHX₁₇X₁₈X₁₉HX₂₀X₂₁X₂₂X₂₃X₂₄X₂₅X₂₆X₂₇X₂₈X₂₉X₃₀ | |
| | | | FSQRANLRAHQRTHTGEKPTGKK | | | |
| | | | TS | | | |
| gccagcctg | GCC AGC | 910 | LEPGEKPYKCPECGKSFSSKKAL | 1459 | X₁X₂X₃X₄X₅X₆X₇X₈X₉CX₁₀X₁₁CX₁₂X₁₃X₁₄X₁₅X₁₆SKKALTEHX₁₇X₁₈X₁₉ | 2008 |
| ggccagaaa | CTG GGC | | TEHQRTHTGEKPYKCPECGKSFS | | HX₂₀X₂₁X₂₂X₂₃X₂₄X₈X₉CX₁₀X₁₁CX₁₂X₁₃X₁₄X₁₅X₁₆QRANLRAHX₁₇X₁₈ | |
| cac | CAG AAA | | QRANLRAHQRTHTGEKPYKCPEC | | X₁₉HX₂₀X₂₁X₂₂X₂₃X₂₄X₈X₉CX₁₀X₁₁CX₁₂X₁₃X₁₄X₁₅X₁₆RADNLTEHX₁₇ | |
| | CAC | | GKSFSRADNLTEHQRTHTGEKPY | | X₁₈X₁₉HX₂₀X₂₁X₂₂X₂₃X₂₄X₈X₉CX₁₀X₁₁CX₁₂X₁₃X₁₄X₁₅X₁₆DPGHLVRH | |
| | | | KCPECGKSFSDPGHLVRHQRTHT | | X₁₇X₁₈X₁₉HX₂₀X₂₁X₂₂X₂₃X₂₄X₈X₉CX₁₀X₁₁CX₁₂X₁₃X₁₄X₁₅X₁₆RNDALT | |
| | | | GEKPYKCPECGKSFSRNDALTEH | | EHX₁₇X₁₈X₁₉HX₂₀X₂₁X₂₂X₂₃X₂₄X₈X₉CX₁₀X₁₁CX₁₂X₁₃X₁₄X₁₅X₁₆ERSH | |
| | | | QRTHTGEKPYKCPECGKSFSERS | | LREHX₁₇X₁₈X₁₉HX₂₀X₂₁X₂₂X₂₃X₂₄X₈X₉CX₁₀X₁₁CX₁₂X₁₃X₁₄X₁₅X₁₆DC | |
| | | | HLREHQRTHTGEKPYKCPECGKS | | RDLARHX₁₇X₁₈X₁₉HX₂₀X₂₁X₂₂X₂₃X₂₄X₂₅X₂₆X₂₇X₂₈X₂₉X₃₀ | |
| | | | FSDCRDLARHQRTHTGEKPTGKK | | | |
| | | | TS | | | |
| agcctgggc | AGC CTG | 911 | LEPGEKPYKCPECGKSFSRSDHL | 1460 | X₁X₂X₃X₄X₅X₆X₇X₈X₉CX₁₀X₁₁CX₁₂X₁₃X₁₄X₁₅X₁₆RSDHLTTHX₁₇X₁₈X₁₉ | 2009 |
| cagaaacac | GGC CAG | | TTHQRTHTGEKPYKCPECGKSFS | | HX₂₀X₂₁X₂₂X₂₃X₂₄X₈X₉CX₁₀X₁₁CX₁₂X₁₃X₁₄X₁₅X₁₆SKKALTEHX₁₇X₁₈ | |
| tgg | AAA CAC | | SKKALTEHQRTHTGEKPYKCPEC | | X₁₉HX₂₀X₂₁X₂₂X₂₃X₂₄X₈X₉CX₁₀X₁₁CX₁₂X₁₃X₁₄X₁₅X₁₆QRANLRAHX₁₇ | |
| | TGG | | GKSFSQRANLRAHQRTHTGEKPY | | X₁₈X₁₉HX₂₀X₂₁X₂₂X₂₃X₂₄X₈X₉CX₁₀X₁₁CX₁₂X₁₃X₁₄X₁₅X₁₆RADNLTEH | |
| | | | KCPECGKSFSRADNLTEHQRTHT | | X₁₇X₁₈X₁₉HX₂₀X₂₁X₂₂X₂₃X₂₄X₈X₉CX₁₀X₁₁CX₁₂X₁₃X₁₄X₁₅X₁₆DPGHLV | |
| | | | GEKPYKCPECGKSFSDPGHLVRH | | RHX₁₇X₁₈X₁₉HX₂₀X₂₁X₂₂X₂₃X₂₄X₈X₉CX₁₀X₁₁CX₁₂X₁₃X₁₄X₁₅X₁₆RNDA | |
| | | | QRTHTGEKPYKCPECGKSFSRND | | LTEHX₁₇X₁₈X₁₉HX₂₀X₂₁X₂₂X₂₃X₂₄X₈X₉CX₁₀X₁₁CX₁₂X₁₃X₁₄X₁₅X₁₆ER | |
| | | | ALTEHQRTHTGEKPYKCPECGKS | | SHLREHX₁₇X₁₈X₁₉HX₂₀X₂₁X₂₂X₂₃X₂₄X₂₅X₂₆X₂₇X₂₈X₂₉X₃₀ | |
| | | | FSERSHLREHQRTHTGEKPTGKK | | | |
| | | | TS | | | |
| cagaaacac | CAG AAA | 912 | LEPGEKPYKCPECGKSFSRSDHL | 1461 | X₁X₂X₃X₄X₅X₆X₇X₈X₉CX₁₀X₁₁CX₁₂X₁₃X₁₄X₁₅X₁₆RSDHLTTHX₁₇X₁₈X₁₉ | 2010 |
| tgggagctg | CAC TGG | | TTHQRTHTGEKPYKCPECGKSFS | | HX₂₀X₂₁X₂₂X₂₃X₂₄X₈X₉CX₁₀X₁₁CX₁₂X₁₃X₁₄X₁₅X₁₆RNDALTEHX₁₇X₁₈ | |
| tgg | gag CTG | | RNDALTEHQRTHTGEKPYKCPEC | | X₁₉HX₂₀X₂₁X₂₂X₂₃X₂₄X₈X₉CX₁₀X₁₁CX₁₂X₁₃X₁₄X₁₅X₁₆RSDNLVRHX₁₇ | |
| | TGG | | GKSFSRSDNLVRHQRTHTGEKPY | | X₁₈X₁₉HX₂₀X₂₁X₂₂X₂₃X₂₄X₈X₉CX₁₀X₁₁CX₁₂X₁₃X₁₄X₁₅X₁₆RSDHLTTH | |
| | | | KCPECGKSFSRSDHLTTHQRTHT | | X₁₇X₁₈X₁₉HX₂₀X₂₁X₂₂X₂₃X₂₄X₈X₉CX₁₀X₁₁CX₁₂X₁₃X₁₄X₁₅X₁₆SKKALT | |
| | | | GEKPYKCPECGKSFSSKKALTEH | | EHX₁₇X₁₈X₁₉HX₂₀X₂₁X₂₂X₂₃X₂₄X₈X₉CX₁₀X₁₁CX₁₂X₁₃X₁₄X₁₅X₁₆QRAN | |
| | | | QRTHTGEKPYKCPECGKSFSQRA | | LRAHX₁₇X₁₈X₁₉HX₂₀X₂₁X₂₂X₂₃X₂₄X₈X₉CX₁₀X₁₁CX₁₂X₁₃X₁₄X₁₅X₁₆RA | |
| | | | NLRAHQRTHTGEKPYKCPECGKS | | DNLTEHX₁₇X₁₈X₁₉HX₂₀X₂₁X₂₂X₂₃X₂₄X₂₅X₂₆X₂₇X₂₈X₂₉X₃₀ | |
| | | | FSRADNLTEHQRTHTGEKPTGKK | | | |
| | | | TS | | | |
| gatggagcc | GAT GGA | 913 | LEPGEKPYKCPECGKSFSRADNL | 1462 | X₁X₂X₃X₄X₅X₆X₇X₈X₉CX₁₀X₁₁CX₁₂X₁₃X₁₄X₁₅X₁₆RADNLTEHX₁₇X₁₈X₁₉ | 2011 |
| agcctgggc | GCC AGC | | TEHQRTHTGEKPYKCPECGKSFS | | HX₂₀X₂₁X₂₂X₂₃X₂₄X₈X₉CX₁₀X₁₁CX₁₂X₁₃X₁₄X₁₅X₁₆DPGHLVRHX₁₇X₁₈ | |
| cag | CTG GGC | | DPGHLVRHQRTHTGEKPYKCPEC | | X₁₉HX₂₀X₂₁X₂₂X₂₃X₂₄X₈X₉CX₁₀X₁₁CX₁₂X₁₃X₁₄X₁₅X₁₆RNDALTEHX₁₇ | |
| | CAG | | GKSFSRNDALTEHQRTHTGEKPY | | X₁₈X₁₉HX₂₀X₂₁X₂₂X₂₃X₂₄X₈X₉CX₁₀X₁₁CX₁₂X₁₃X₁₄X₁₅X₁₆ERSHLREH | |
| | | | KCPECGKSFSERSHLREHQRTHT | | X₁₇X₁₈X₁₉HX₂₀X₂₁X₂₂X₂₃X₂₄X₈X₉CX₁₀X₁₁CX₁₂X₁₃X₁₄X₁₅X₁₆DCRDLA | |
| | | | GEKPYKCPECGKSFSDCRDLARH | | RHX₁₇X₁₈X₁₉HX₂₀X₂₁X₂₂X₂₃X₂₄X₈X₉CX₁₀X₁₁CX₁₂X₁₃X₁₄X₁₅X₁₆QRAH | |
| | | | QRTHTGEKPYKCPECGKSFSQRA | | LERHX₁₇X₁₈X₁₉HX₂₀X₂₁X₂₂X₂₃X₂₄X₈X₉CX₁₀X₁₁CX₁₂X₁₃X₁₄X₁₅X₁₆TS | |
| | | | HLERHQRTHTGEKPYKCPECGKS | | GNLVRHX₁₇X₁₈X₁₉HX₂₀X₂₁X₂₂X₂₃X₂₄X₂₅X₂₆X₂₇X₂₈X₂₉X₃₀ | |
| | | | FSTSGNLVRHQRTHTGEKPTGKK | | | |
| | | | TS | | | |
| ggagccagc | GGA GCC | 914 | LEPGEKPYKCPECGKSFSQRANL | 1463 | X₁X₂X₃X₄X₅X₆X₇X₈X₉CX₁₀X₁₁CX₁₂X₁₃X₁₄X₁₅X₁₆QRANLRAHX₁₇X₁₈X₁₉ | 2012 |
| ctgggccag | AGC CTG | | RAHQRTHTGEKPYKCPECGKSFS | | HX₂₀X₂₁X₂₂X₂₃X₂₄X₈X₉CX₁₀X₁₁CX₁₂X₁₃X₁₄X₁₅X₁₆RADNLTEHX₁₇X₁₈ | |
| aaa | GGC CAG | | RADNLTEHQRTHTGEKPYKCPEC | | X₁₉HX₂₀X₂₁X₂₂X₂₃X₂₄X₈X₉CX₁₀X₁₁CX₁₂X₁₃X₁₄X₁₅X₁₆DPGHLVRHX₁₇ | |
| | AAA | | GKSFSDPGHLVRHQRTHTGEKPY | | X₁₈X₁₉HX₂₀X₂₁X₂₂X₂₃X₂₄X₈X₉CX₁₀X₁₁CX₁₂X₁₃X₁₄X₁₅X₁₆RNDALTEH | |
| | | | KCPECGKSFSRNDALTEHQRTHT | | X₁₇X₁₈X₁₉HX₂₀X₂₁X₂₂X₂₃X₂₄X₈X₉CX₁₀X₁₁CX₁₂X₁₃X₁₄X₁₅X₁₆ERSHLR | |
| | | | GEKPYKCPECGKSFSERSHLREH | | EHX₁₇X₁₈X₁₉HX₂₀X₂₁X₂₂X₂₃X₂₄X₈X₉CX₁₀X₁₁CX₁₂X₁₃X₁₄X₁₅X₁₆DCRD | |
| | | | QRTHTGEKPYKCPECGKSFSDCR | | LARHX₁₇X₁₈X₁₉HX₂₀X₂₁X₂₂X₂₃X₂₄X₈X₉CX₁₀X₁₁CX₁₂X₁₃X₁₄X₁₅X₁₆QR | |
| | | | DLARHQRTHTGEKPYKCPECGKS | | AHLERHX₁₇X₁₈X₁₉HX₂₀X₂₁X₂₂X₂₃X₂₄X₂₅X₂₆X₂₇X₂₈X₂₉X₃₀ | |
| | | | FSQRAHLERHQRTHTGEKPTGKK | | | |
| | | | TS | | | |
| tgggagctg | TGG gag | 915 | LEPGEKPYKCPECGKSFSRSDNL | 1464 | X₁X₂X₃X₄X₅X₆X₇X₈X₉CX₁₀X₁₁CX₁₂X₁₃X₁₄X₁₅X₁₆RSDNLVRHX₁₇X₁₈X₁₉ | 2013 |
| tgggagacg | CTG TGG | | VRHQRTHTGEKPYKCPECGKSFS | | HX₂₀X₂₁X₂₂X₂₃X₂₄X₈X₉CX₁₀X₁₁CX₁₂X₁₃X₁₄X₁₅X₁₆RTDTLRDHX₁₇X₁₈ | |
| gag | gag ACG | | RTDTLRDHQRTHTGEKPYKCPEC | | X₁₉HX₂₀X₂₁X₂₂X₂₃X₂₄X₈X₉CX₁₀X₁₁CX₁₂X₁₃X₁₄X₁₅X₁₆RSDNLVRHX₁₇ | |
| | GAG | | GKSFSRSDNLVRHQRTHTGEKPY | | X₁₈X₁₉HX₂₀X₂₁X₂₂X₂₃X₂₄X₈X₉CX₁₀X₁₁CX₁₂X₁₃X₁₄X₁₅X₁₆RSDHLTTH | |
| | | | KCPECGKSFSRSDHLTTHQRTHT | | X₁₇X₁₈X₁₉HX₂₀X₂₁X₂₂X₂₃X₂₄X₈X₉CX₁₀X₁₁CX₁₂X₁₃X₁₄X₁₅X₁₆RNDALT | |
| | | | GEKPYKCPECGKSFSRNDALTEH | | EHX₁₇X₁₈X₁₉HX₂₀X₂₁X₂₂X₂₃X₂₄X₈X₉CX₁₀X₁₁CX₁₂X₁₃X₁₄X₁₅X₁₆RSDN | |
| | | | QRTHTGEKPYKCPECGKSFSRSD | | LVRHX₁₇X₁₈X₁₉HX₂₀X₂₁X₂₂X₂₃X₂₄X₈X₉CX₁₀X₁₁CX₁₂X₁₃X₁₄X₁₅X₁₆RS | |
| | | | NLVRHQRTHTGEKPYKCPECGKS | | DHLTTHX₁₇X₁₈X₁₉HX₂₀X₂₁X₂₂X₂₃X₂₄X₂₅X₂₆X₂₇X₂₈X₂₉X₃₀ | |
| | | | FSRSDHLTTHQRTHTGEKPTGKK | | | |
| | | | TS | | | |
| gagctgtgg | gag CTG | 916 | LEPGEKPYKCPECGKSFSRSDHL | 1465 | X₁X₂X₃X₄X₅X₆X₇X₈X₉CX₁₀X₁₁CX₁₂X₁₃X₁₄X₁₅X₁₆RSDHLTNHX₁₇X₁₈X₁₉ | 2014 |
| gagacggag | TGG gag | | TNHQRTHTGEKPYKCPECGKSFS | | HX₂₀X₂₁X₂₂X₂₃X₂₄X₈X₉CX₁₀X₁₁CX₁₂X₁₃X₁₄X₁₅X₁₆RSDNLVRHX₁₇X₁₈ | |
| agg | ACG gag | | RSDNLVRHQRTHTGEKPYKCPEC | | X₁₉HX₂₀X₂₁X₂₂X₂₃X₂₄X₈X₉CX₁₀X₁₁CX₁₂X₁₃X₁₄X₁₅X₁₆RTDTLRDHX₁₇ | |
| | AGG | | GKSFSRTDTLRDHQRTHTGEKPY | | X₁₈X₁₉HX₂₀X₂₁X₂₂X₂₃X₂₄X₈X₉CX₁₀X₁₁CX₁₂X₁₃X₁₄X₁₅X₁₆RSDNLVRH | |
| | | | KCPECGKSFSRSDNLVRHQRTHT | | X₁₇X₁₈X₁₉HX₂₀X₂₁X₂₂X₂₃X₂₄X₈X₉CX₁₀X₁₁CX₁₂X₁₃X₁₄X₁₅X₁₆RSDHLT | |
| | | | GEKPYKCPECGKSFSRSDHLTTH | | THX₁₇X₁₈X₁₉HX₂₀X₂₁X₂₂X₂₃X₂₄X₈X₉CX₁₀X₁₁CX₁₂X₁₃X₁₄X₁₅X₁₆RNDA | |
| | | | QRTHTGEKPYKCPECGKSFSRND | | LTEHX₁₇X₁₈X₁₉HX₂₀X₂₁X₂₂X₂₃X₂₄X₈X₉CX₁₀X₁₁CX₁₂X₁₃X₁₄X₁₅X₁₆RS | |
| | | | ALTEHQRTHTGEKPYKCPECGKS | | DNLVRHX₁₇X₁₈X₁₉HX₂₀X₂₁X₂₂X₂₃X₂₄X₂₅X₂₆X₂₇X₂₈X₂₉X₃₀ | |
| | | | FSRSDNLVRHQRTHTGEKPTGKK | | | |
| | | | TS | | | |
| ctgtgggag | CTG TGG | 917 | LEPGEKPYKCPECGKSFSDPGHL | 1466 | X₁X₂X₃X₄X₅X₆X₇X₈X₉CX₁₀X₁₁CX₁₂X₁₃X₁₄X₁₅X₁₆DPGHLVRHX₁₇X₁₈X₁₉ | 2015 |
| acggagagg | gag ACG | | VRHQRTHTGEKPYKCPECGKSFS | | HX₂₀X₂₁X₂₂X₂₃X₂₄X₈X₉CX₁₀X₁₁CX₁₂X₁₃X₁₄X₁₅X₁₆RSDHLTNHX₁₇X₁₈ | |
| ggc | gag AGG | | RSDHLTNHQRTHTGEKPYKCPEC | | X₁₉HX₂₀X₂₁X₂₂X₂₃X₂₄X₈X₉CX₁₀X₁₁CX₁₂X₁₃X₁₄X₁₅X₁₆RSDNLVRHX₁₇ | |
| | GGC | | GKSFSRSDNLVRHQRTHTGEKPY | | X₁₈X₁₉HX₂₀X₂₁X₂₂X₂₃X₂₄X₈X₉CX₁₀X₁₁CX₁₂X₁₃X₁₄X₁₅X₁₆RTDTLRDH | |
| | | | KCPECGKSFSRTDTLRDHQRTHT | | X₁₇X₁₈X₁₉HX₂₀X₂₁X₂₂X₂₃X₂₄X₈X₉CX₁₀X₁₁CX₁₂X₁₃X₁₄X₁₅X₁₆RSDNLV | |
| | | | GEKPYKCPECGKSFSRSDNLVRH | | RHX₁₇X₁₈X₁₉HX₂₀X₂₁X₂₂X₂₃X₂₄X₈X₉CX₁₀X₁₁CX₁₂X₁₃X₁₄X₁₅X₁₆RSDH | |
| | | | QRTHTGEKPYKCPECGKSFSRSD | | LTTHX₁₇X₁₈X₁₉HX₂₀X₂₁X₂₂X₂₃X₂₄X₈X₉CX₁₀X₁₁CX₁₂X₁₃X₁₄X₁₅X₁₆RN | |
| | | | HLTTHQRTHTGEKPYKCPECGKS | | DALTEHX₁₇X₁₈X₁₉HX₂₀X₂₁X₂₂X₂₃X₂₄X₂₅X₂₆X₂₇X₂₈X₂₉X₃₀ | |
| | | | FSRNDALTEHQRTHTGEKPTGKK | | | |
| | | | TS | | | |
| gagacggag | gag ACG | 918 | LEPGEKPYKCPECGKSFSRSDEL | 1467 | X₁X₂X₃X₄X₅X₆X₇X₈X₉CX₁₀X₁₁CX₁₂X₁₃X₁₄X₁₅X₁₆RSDELVRHX₁₇X₁₈X₁₉ | 2016 |
| aggggcagg | gag AGG | | VRHQRTHTGEKPYKCPECGKSFS | | HX₂₀X₂₁X₂₂X₂₃X₂₄X₈X₉CX₁₀X₁₁CX₁₂X₁₃X₁₄X₁₅X₁₆RSDHLTNHX₁₇X₁₈ | |
| gtg | GGC AGG | | RSDHLTNHQRTHTGEKPYKCPEC | | X₁₉HX₂₀X₂₁X₂₂X₂₃X₂₄X₈X₉CX₁₀X₁₁CX₁₂X₁₃X₁₄X₁₅X₁₆DPGHLVRHX₁₇ | |
| | GTG | | GKSFSDPGHLVRHQRTHTGEKPY | | X₁₈X₁₉HX₂₀X₂₁X₂₂X₂₃X₂₄X₈X₉CX₁₀X₁₁CX₁₂X₁₃X₁₄X₁₅X₁₆RSDHLTNH | |
| | | | KCPECGKSFSRSDHLTNHQRTHT | | X₁₇X₁₈X₁₉HX₂₀X₂₁X₂₂X₂₃X₂₄X₈X₉CX₁₀X₁₁CX₁₂X₁₃X₁₄X₁₅X₁₆RSDNLV | |
| | | | GEKPYKCPECGKSFSRSDNLVRH | | RHX₁₇X₁₈X₁₉HX₂₀X₂₁X₂₂X₂₃X₂₄X₈X₉CX₁₀X₁₁CX₁₂X₁₃X₁₄X₁₅X₁₆RTDT | |
| | | | QRTHTGEKPYKCPECGKSFSRTD | | LRDHX₁₇X₁₈X₁₉HX₂₀X₂₁X₂₂X₂₃X₂₄X₈X₉CX₁₀X₁₁CX₁₂X₁₃X₁₄X₁₅X₁₆RS | |
| | | | TLRDHQRTHTGEKPYKCPECGKS | | DNLVRHX₁₇X₁₈X₁₉HX₂₀X₂₁X₂₂X₂₃X₂₄X₂₅X₂₆X₂₇X₂₈X₂₉X₃₀ | |
| | | | FSRSDNLVRHQRTHTGEKPTGKK | | | |
| | | | TS | | | |
| tgggagacg | TGG gag | 919 | LEPGEKPYKCPECGKSFSRSDHL | 1468 | X₁X₂X₃X₄X₅X₆X₇X₈X₉CX₁₀X₁₁CX₁₂X₁₃X₁₄X₁₅X₁₆RSDHLTNHX₁₇X₁₈X₁₉ | 2017 |
| gagaggggc | ACG gag | | TNHQRTHTGEKPYKCPECGKSFS | | HX₂₀X₂₁X₂₂X₂₃X₂₄X₈X₉CX₁₀X₁₁CX₁₂X₁₃X₁₄X₁₅X₁₆DPGHLVRHX₁₇X₁₈ | |
| agg | AGG GGC | | DPGHLVRHQRTHTGEKPYKCPEC | | X₁₉HX₂₀X₂₁X₂₂X₂₃X₂₄X₈X₉CX₁₀X₁₁CX₁₂X₁₃X₁₄X₁₅X₁₆RSDHLTNHX₁₇ | |
| | AGG | | GKSFSRSDHLTNHQRTHTGEKPY | | X₁₈X₁₉HX₂₀X₂₁X₂₂X₂₃X₂₄X₈X₉CX₁₀X₁₁CX₁₂X₁₃X₁₄X₁₅X₁₆RSDNLVRH | |
| | | | KCPECGKSFSRSDNLVRHQRTHT | | X₁₇X₁₈X₁₉HX₂₀X₂₁X₂₂X₂₃X₂₄X₈X₉CX₁₀X₁₁CX₁₂X₁₃X₁₄X₁₅X₁₆RTDTLR | |
| | | | GEKPYKCPECGKSFSRTDTLRDH | | DHX₁₇X₁₈X₁₉HX₂₀X₂₁X₂₂X₂₃X₂₄X₈X₉CX₁₀X₁₁CX₁₂X₁₃X₁₄X₁₅X₁₆RSDN | |
| | | | QRTHTGEKPYKCPECGKSFSRSD | | LVRHX₁₇X₁₈X₁₉HX₂₀X₂₁X₂₂X₂₃X₂₄X₈X₉CX₁₀X₁₁CX₁₂X₁₃X₁₄X₁₅X₁₆RS | |
| | | | NLVRHQRTHTGEKPYKCPECGKS | | DHLTTHX₁₇X₁₈X₁₉HX₂₀X₂₁X₂₂X₂₃X₂₄X₂₅X₂₆X₂₇X₂₈X₂₉X₃₀ | |
| | | | FSRSDHLTTHQRTHTGEKPTGKK | | | |
| | | | TS | | | |
| cactgggag | CAC TGG | 920 | LEPGEKPYKCPECGKSFSRTDTL | 1469 | X₁X₂X₃X₄X₅X₆X₇X₈X₉CX₁₀X₁₁CX₁₂X₁₃X₁₄X₁₅X₁₆RTDTLRDHX₁₇X₁₈X₁₉ | 2018 |
| ctgtgggag | gag CTG | | RDHQRTHTGEKPYKCPECGKSFS | | HX₂₀X₂₁X₂₂X₂₃X₂₄X₈X₉CX₁₀X₁₁CX₁₂X₁₃X₁₄X₁₅X₁₆RSDNLVRHX₁₇X₁₈ | |
| acg | TGG gag | | RSDNLVRHQRTHTGEKPYKCPEC | | X₁₉HX₂₀X₂₁X₂₂X₂₃X₂₄X₈X₉CX₁₀X₁₁CX₁₂X₁₃X₁₄X₁₅X₁₆RSDHLTTHX₁₇ | |
| | ACG | | GKSFSRSDHLTTHQRTHTGEKPY | | X₁₈X₁₉HX₂₀X₂₁X₂₂X₂₃X₂₄X₈X₉CX₁₀X₁₁CX₁₂X₁₃X₁₄X₁₅X₁₆RNDALTEH | |
| | | | KCPECGKSFSRNDALTEHQRTHT | | X₁₇X₁₈X₁₉HX₂₀X₂₁X₂₂X₂₃X₂₄X₈X₉CX₁₀X₁₁CX₁₂X₁₃X₁₄X₁₅X₁₆RSDNLV | |
| | | | GEKPYKCPECGKSFSRSDNLVRH | | RHX₁₇X₁₈X₁₉HX₂₀X₂₁X₂₂X₂₃X₂₄X₈X₉CX₁₀X₁₁CX₁₂X₁₃X₁₄X₁₅X₁₆RSDH | |
| | | | QRTHTGEKPYKCPECGKSFSRSD | | LTTHX₁₇X₁₈X₁₉HX₂₀X₂₁X₂₂X₂₃X₂₄X₈X₉CX₁₀X₁₁CX₁₂X₁₃X₁₄X₁₅X₁₆SK | |
| | | | HLTTHQRTHTGEKPYKCPECGKS | | KALTEHX₁₇X₁₈X₁₉HX₂₀X₂₁X₂₂X₂₃X₂₄X₂₅X₂₆X₂₇X₂₈X₂₉X₃₀ | |
| | | | FSSKKALTEHQRTHTGEKPTGKK | | | |
| | | | TS | | | |
| acggagagg | ACG gag | 921 | LEPGEKPYKCPECGKSFSQRAHL | 1470 | X₁X₂X₃X₄X₅X₆X₇X₈X₉CX₁₀X₁₁CX₁₂X₁₃X₁₄X₁₅X₁₆QRAHLERHX₁₇X₁₈X₁₉ | 2019 |
| ggcagggtg | AGG GGC | | ERHQRTHTGEKPYKCPECGKSFS | | HX₂₀X₂₁X₂₂X₂₃X₂₄X₈X₉CX₁₀X₁₁CX₁₂X₁₃X₁₄X₁₅X₁₆RSDELVRHX₁₇X₁₈ | |
| gga | AGG GTG | | RSDELVRHQRTHTGEKPYKCPEC | | X₁₉HX₂₀X₂₁X₂₂X₂₃X₂₄X₈X₉CX₁₀X₁₁CX₁₂X₁₃X₁₄X₁₅X₁₆RSDHLTNHX₁₇ | |
| | GGA | | GKSFSRSDHLTNHQRTHTGEKPY | | X₁₈X₁₉HX₂₀X₂₁X₂₂X₂₃X₂₄X₈X₉CX₁₀X₁₁CX₁₂X₁₃X₁₄X₁₅X₁₆DPGHLVRH | |
| | | | KCPECGKSFSDPGHLVRHQRTHT | | X₁₇X₁₈X₁₉HX₂₀X₂₁X₂₂X₂₃X₂₄X₈X₉CX₁₀X₁₁CX₁₂X₁₃X₁₄X₁₅X₁₆RSDHLT | |
| | | | GEKPYKCPECGKSFSRSDHLTNH | | NHX₁₇X₁₈X₁₉HX₂₀X₂₁X₂₂X₂₃X₂₄X₈X₉CX₁₀X₁₁CX₁₂X₁₃X₁₄X₁₅X₁₆RSDN | |
| | | | QRTHTGEKPYKCPECGKSFSRSD | | LVRHX₁₇X₁₈X₁₉HX₂₀X₂₁X₂₂X₂₃X₂₄X₈X₉CX₁₀X₁₁CX₁₂X₁₃X₁₄X₁₅X₁₆RT | |
| | | | NLVRHQRTHTGEKPYKCPECGKS | | DTLRDHX₁₇X₁₈X₁₉HX₂₀X₂₁X₂₂X₂₃X₂₄X₂₅X₂₆X₂₇X₂₈X₂₉X₃₀ | |
| | | | FSRTDTLRDHQRTHTGEKPTGKK | | | |
| | | | TS | | | |
| cgagatgga | CGA GAT | 922 | LEPGEKPYKCPECGKSFSDPGHL | 1471 | X₁X₂X₃X₄X₅X₆X₇X₈X₉CX₁₀X₁₁CX₁₂X₁₃X₁₄X₁₅X₁₆DPGHLVRHX₁₇X₁₈X₁₉ | 2020 |
| gccagcctg | GGA GCC | | VRHQRTHTGEKPYKCPECGKSFS | | HX₂₀X₂₁X₂₂X₂₃X₂₄X₈X₉CX₁₀X₁₁CX₁₂X₁₃X₁₄X₁₅X₁₆RNDALTEHX₁₇X₁₈ | |
| ggc | AGC CTG | | RNDALTEHQRTHTGEKPYKCPEC | | X₁₉HX₂₀X₂₁X₂₂X₂₃X₂₄X₈X₉CX₁₀X₁₁CX₁₂X₁₃X₁₄X₁₅X₁₆ERSHLREHX₁₇ | |
| | GGC | | GKSFSERSHLREHQRTHTGEKPY | | X₁₈X₁₉HX₂₀X₂₁X₂₂X₂₃X₂₄X₈X₉CX₁₀X₁₁CX₁₂X₁₃X₁₄X₁₅X₁₆DCRDLARH | |
| | | | KCPECGKSFSDCRDLARHQRTHT | | X₁₇X₁₈X₁₉HX₂₀X₂₁X₂₂X₂₃X₂₄X₈X₉CX₁₀X₁₁CX₁₂X₁₃X₁₄X₁₅X₁₆QRAHLE | |
| | | | GEKPYKCPECGKSFSQRAHLERH | | RHX₁₇X₁₈X₁₉HX₂₀X₂₁X₂₂X₂₃X₂₄X₈X₉CX₁₀X₁₁CX₁₂X₁₃X₁₄X₁₅X₁₆TSGN | |
| | | | QRTHTGEKPYKCPECGKSFSTSG | | LVRHX₁₇X₁₈X₁₉HX₂₀X₂₁X₂₂X₂₃X₂₄X₈X₉CX₁₀X₁₁CX₁₂X₁₃X₁₄X₁₅X₁₆QS | |
| | | | NLVRHQRTHTGEKPYKCPECGKS | | GHLTEHX₁₇X₁₈X₁₉HX₂₀X₂₁X₂₂X₂₃X₂₄X₂₅X₂₆X₂₇X₂₈X₂₉X₃₀ | |
| | | | FSQSGHLTEHQRTHTGEKPTGKK | | | |
| | | | TS | | | |
| gcctgggcc | GCC TGG | 923 | LEPGEKPYKCPECGKSFSRSDKL | 1472 | X₁X₂X₃X₄X₅X₆X₇X₈X₉CX₁₀X₁₁CX₁₂X₁₃X₁₄X₁₅X₁₆RSDKLVRHX₁₇X₁₈X₁₉ | 2021 |
| agaaacact | GCC AGA | | VRHQRTHTGEKPYKCPECGKSFS | | HX₂₀X₂₁X₂₂X₂₃X₂₄X₈X₉CX₁₀X₁₁CX₁₂X₁₃X₁₄X₁₅X₁₆THLDLIRHX₁₇X₁₈ | |
| ggg | AAC ACT | | THLDLIRHQRTHTGEKPYKCPEC | | X₁₉HX₂₀X₂₁X₂₂X₂₃X₂₄X₈X₉CX₁₀X₁₁CX₁₂X₁₃X₁₄X₁₅X₁₆DSGNLRVHX₁₇ | |
| | GGG | | GKSFSDSGNLRVHQRTHTGEKPY | | X₁₈X₁₉HX₂₀X₂₁X₂₂X₂₃X₂₄X₈X₉CX₁₀X₁₁CX₁₂X₁₃X₁₄X₁₅X₁₆QLAHLRAH | |
| | | | KCPECGKSFSQLAHLRAHQRTHT | | X₁₇X₁₈X₁₉HX₂₀X₂₁X₂₂X₂₃X₂₄X₈X₉CX₁₀X₁₁CX₁₂X₁₃X₁₄X₁₅X₁₆DCRDLA | |
| | | | GEKPYKCPECGKSFSDCRDLARH | | RHX₁₇X₁₈X₁₉HX₂₀X₂₁X₂₂X₂₃X₂₄X₈X₉CX₁₀X₁₁CX₁₂X₁₃X₁₄X₁₅X₁₆RSDH | |
| | | | QRTHTGEKPYKCPECGKSFSRSD | | LTTHX₁₇X₁₈X₁₉HX₂₀X₂₁X₂₂X₂₃X₂₄X₈X₉CX₁₀X₁₁CX₁₂X₁₃X₁₄X₁₅X₁₆DC | |
| | | | HLTTHQRTHTGEKPYKCPECGKS | | RDLARHX₁₇X₁₈X₁₉HX₂₀X₂₁X₂₂X₂₃X₂₄X₂₅X₂₆X₂₇X₂₈X₂₉X₃₀ | |
| | | | FSDCRDLARHQRTHTGEKPTGKK | | | |
| | | | TS | | | |
| cagcctgg | CCA GCC | 924 | LEPGEKPYKCPECGKSFSTHLDL | 1473 | X₁X₂X₃X₄X₅X₆X₇X₈X₉CX₁₀X₁₁CX₁₂X₁₃X₁₄X₁₅X₁₆THLDLIRHX₁₇X₁₈X₁₉ | 2022 |
| gccagaaac | TGG GCC | | IRHQRTHTGEKPYKCPECGKSFS | | HX₂₀X₂₁X₂₂X₂₃X₂₄X₈X₉CX₁₀X₁₁CX₁₂X₁₃X₁₄X₁₅X₁₆DSGNLRVHX₁₇X₁₈ | |
| act | AGA AAC | | DSGNLRVHQRTHTGEKPYKCPEC | | X₁₉HX₂₀X₂₁X₂₂X₂₃X₂₄X₈X₉CX₁₀X₁₁CX₁₂X₁₃X₁₄X₁₅X₁₆QLAHLRAHX₁₇ | |
| | ACT | | GKSFSQLAHLRAHQRTHTGEKPY | | X₁₈X₁₉HX₂₀X₂₁X₂₂X₂₃X₂₄X₈X₉CX₁₀X₁₁CX₁₂X₁₃X₁₄X₁₅X₁₆DCRDLARH | |
| | | | KCPECGKSFSDCRDLARHQRTHT | | X₁₇X₁₈X₁₉HX₂₀X₂₁X₂₂X₂₃X₂₄X₈X₉CX₁₀X₁₁CX₁₂X₁₃X₁₄X₁₅X₁₆RSDHLT | |
| | | | GEKPYKCPECGKSFSRSDHLTTH | | THX₁₇X₁₈X₁₉HX₂₀X₂₁X₂₂X₂₃X₂₄X₈X₉CX₁₀X₁₁CX₁₂X₁₃X₁₄X₁₅X₁₆DCRD | |
| | | | QRTHTGEKPYKCPECGKSFSDCR | | LARHX₁₇X₁₈X₁₉HX₂₀X₂₁X₂₂X₂₃X₂₄X₈X₉CX₁₀X₁₁CX₁₂X₁₃X₁₄X₁₅X₁₆TS | |
| | | | DLARHQRTHTGEKPYKCPECGKS | | HSLTEHX₁₇X₁₈X₁₉HX₂₀X₂₁X₂₂X₂₃X₂₄X₂₅X₂₆X₂₇X₂₈X₂₉X₃₀ | |
| | | | FSTSHSLTEHQRTHTGEKPTGKK | | | |
| | | | TS | | | |
| tgggccaga | TGG GCC | 925 | LEPGEKPYKCPECGKSFSERSHL | 1474 | X₁X₂X₃X₄X₅X₆X₇X₈X₉CX₁₀X₁₁CX₁₂X₁₃X₁₄X₁₅X₁₆ERSHLREHX₁₇X₁₈X₁₉ | 2023 |
| aacactggg | AGA AAC | | REHQRTHTGEKPYKCPECGKSFS | | HX₂₀X₂₁X₂₂X₂₃X₂₄X₈X₉CX₁₀X₁₁CX₁₂X₁₃X₁₄X₁₅X₁₆RSDKLVRHX₁₇X₁₈ | |
| agc | ACT ggg | | RSDKLVRHQRTHTGEKPYKCPEC | | X₁₉HX₂₀X₂₁X₂₂X₂₃X₂₄X₈X₉CX₁₀X₁₁CX₁₂X₁₃X₁₄X₁₅X₁₆THLDLIRHX₁₇ | |
| | AGC | | GKSFSTHLDLIRHQRTHTGEKPY | | X₁₈X₁₉HX₂₀X₂₁X₂₂X₂₃X₂₄X₈X₉CX₁₀X₁₁CX₁₂X₁₃X₁₄X₁₅X₁₆DSGNLRVH | |
| | | | KCPECGKSFSDSGNLRVHQRTHT | | X₁₇X₁₈X₁₉HX₂₀X₂₁X₂₂X₂₃X₂₄X₈X₉CX₁₀X₁₁CX₁₂X₁₃X₁₄X₁₅X₁₆QLAHLR | |
| | | | GEKPYKCPECGKSFSQLAHLRAH | | AHX₁₇X₁₈X₁₉HX₂₀X₂₁X₂₂X₂₃X₂₄X₈X₉CX₁₀X₁₁CX₁₂X₁₃X₁₄X₁₅X₁₆DCRD | |
| | | | QRTHTGEKPYKCPECGKSFSDCR | | LARHX₁₇X₁₈X₁₉HX₂₀X₂₁X₂₂X₂₃X₂₄X₈X₉CX₁₀X₁₁CX₁₂X₁₃X₁₄X₁₅X₁₆RS | |
| | | | DLARHQRTHTGEKPYKCPECGKS | | DHLTTHX₁₇X₁₈X₁₉HX₂₀X₂₁X₂₂X₂₃X₂₄X₂₅X₂₆X₂₇X₂₈X₂₉X₃₀ | |
| | | | FSRSDHLTTHQRTHTGEKPTGKK | | | |
| | | | TS | | | |
| gagccagcc | gag CCA | 926 | LEPGEKPYKCPECGKSFSDSGNL | 1475 | X₁X₂X₃X₄X₅X₆X₇X₈X₉CX₁₀X₁₁CX₁₂X₁₃X₁₄X₁₅X₁₆DSGNLRVHX₁₇X₁₈X₁₉ | 2024 |
| tgggccaga | GCC TGG | | RVHQRTHTGEKPYKCPECGKSFS | | HX₂₀X₂₁X₂₂X₂₃X₂₄X₈X₉CX₁₀X₁₁CX₁₂X₁₃X₁₄X₁₅X₁₆QLAHLRAHX₁₇X₁₈ | |
| aac | GCC AGA | | QLAHLRAHQRTHTGEKPYKCPEC | | X₁₉HX₂₀X₂₁X₂₂X₂₃X₂₄X₈X₉CX₁₀X₁₁CX₁₂X₁₃X₁₄X₁₅X₁₆DCRDLARHX₁₇ | |
| | AAC | | GKSFSDCRDLARHQRTHTGEKPY | | X₁₈X₁₉HX₂₀X₂₁X₂₂X₂₃X₂₄X₈X₉CX₁₀X₁₁CX₁₂X₁₃X₁₄X₁₅X₁₆RSDHLTTH | |
| | | | KCPECGKSFSRSDHLTTHQRTHT | | X₁₇X₁₈X₁₉HX₂₀X₂₁X₂₂X₂₃X₂₄X₈X₉CX₁₀X₁₁CX₁₂X₁₃X₁₄X₁₅X₁₆DCRDLA | |
| | | | GEKPYKCPECGKSFSDCRDLARH | | RHX₁₇X₁₈X₁₉HX₂₀X₂₁X₂₂X₂₃X₂₄X₈X₉CX₁₀X₁₁CX₁₂X₁₃X₁₄X₁₅X₁₆TSHS | |
| | | | QRTHTGEKPYKCPECGKSFSTSH | | LTEHX₁₇X₁₈X₁₉HX₂₀X₂₁X₂₂X₂₃X₂₄X₈X₉CX₁₀X₁₁CX₁₂X₁₃X₁₄X₁₅X₁₆RS | |
| | | | SLTEHQRTHTGEKPYKCPECGKS | | DNLVRHX₁₇X₁₈X₁₉HX₂₀X₂₁X₂₂X₂₃X₂₄X₂₅X₂₆X₂₇X₂₈X₂₉X₃₀ | |
| | | | FSRSDNLVRHQRTHTGEKPTGKK | | | |
| | | | TS | | | |
| atggagcca | ATG gag | 927 | LEPGEKPYKCPECGKSFSQLAHL | 1476 | X₁X₂X₃X₄X₅X₆X₇X₈X₉CX₁₀X₁₁CX₁₂X₁₃X₁₄X₁₅X₁₆QLAHLRAHX₁₇X₁₈X₁₉ | 2025 |
| gcctgggcc | CCA GCC | | RAHQRTHTGEKPYKCPECGKSFS | | HX₂₀X₂₁X₂₂X₂₃X₂₄X₈X₉CX₁₀X₁₁CX₁₂X₁₃X₁₄X₁₅X₁₆DCRDLARHX₁₇X₁₈ | |
| aga | TGG GCC | | DCRDLARHQRTHTGEKPYKCPEC | | X₁₉HX₂₀X₂₁X₂₂X₂₃X₂₄X₈X₉CX₁₀X₁₁CX₁₂X₁₃X₁₄X₁₅X₁₆RSDHLTTHX₁₇ | |
| | AGA | | GKSFSRSDHLTTHQRTHTGEKPY | | X₁₈X₁₉HX₂₀X₂₁X₂₂X₂₃X₂₄X₈X₉CX₁₀X₁₁CX₁₂X₁₃X₁₄X₁₅X₁₆DCRDLARH | |
| | | | KCPECGKSFSDCRDLARHQRTHT | | X₁₇X₁₈X₁₉HX₂₀X₂₁X₂₂X₂₃X₂₄X₈X₉CX₁₀X₁₁CX₁₂X₁₃X₁₄X₁₅X₁₆TSHSLT | |
| | | | GEKPYKCPECGKSFSTSHSLTEH | | EHX₁₇X₁₈X₁₉HX₂₀X₂₁X₂₂X₂₃X₂₄X₈X₉CX₁₀X₁₁CX₁₂X₁₃X₁₄X₁₅X₁₆RSDN | |
| | | | QRTHTGEKPYKCPECGKSFSRSD | | LVRHX₁₇X₁₈X₁₉HX₂₀X₂₁X₂₂X₂₃X₂₄X₈X₉CX₁₀X₁₁CX₁₂X₁₃X₁₄X₁₅X₁₆RR | |
| | | | NLVRHQRTHTGEKPYKCPECGKS | | DELNVHX₁₇X₁₈X₁₉HX₂₀X₂₁X₂₂X₂₃X₂₄X₂₅X₂₆X₂₇X₂₈X₂₉X₃₀ | |
| | | | FSRRDELNVHQRTHTGEKPTGKK | | | |
| | | | TS | | | |
| gagatggag | gag ATG | 928 | LEPGEKPYKCPECGKSFSDCRDL | 1477 | X₁X₂X₃X₄X₅X₆X₇X₈X₉CX₁₀X₁₁CX₁₂X₁₃X₁₄X₁₅X₁₆DCRDLARHX₁₇X₁₈X₁₉ | 2026 |
| ccagcctgg | gag CCA | | ARHQRTHTGEKPYKCPECGKSFS | | HX₂₀X₂₁X₂₂X₂₃X₂₄X₈X₉CX₁₀X₁₁CX₁₂X₁₃X₁₄X₁₅X₁₆RSDHLTTHX₁₇X₁₈ | |
| gcc | GCC TGG | | RSDHLTTHQRTHTGEKPYKCPEC | | X₁₉HX₂₀X₂₁X₂₂X₂₃X₂₄X₈X₉CX₁₀X₁₁CX₁₂X₁₃X₁₄X₁₅X₁₆DCRDLARHX₁₇ | |
| | GCC | | GKSFSDCRDLARHQRTHTGEKPY | | X₁₈X₁₉HX₂₀X₂₁X₂₂X₂₃X₂₄X₈X₉CX₁₀X₁₁CX₁₂X₁₃X₁₄X₁₅X₁₆TSHSLTEH | |
| | | | KCPECGKSFSTSHSLTEHQRTHT | | X₁₇X₁₈X₁₉HX₂₀X₂₁X₂₂X₂₃X₂₄X₈X₉CX₁₀X₁₁CX₁₂X₁₃X₁₄X₁₅X₁₆RSDNLV | |
| | | | GEKPYKCPECGKSFSRSDNLVRH | | RHX₁₇X₁₈X₁₉HX₂₀X₂₁X₂₂X₂₃X₂₄X₈X₉CX₁₀X₁₁CX₁₂X₁₃X₁₄X₁₅X₁₆RRDE | |
| | | | QRTHTGEKPYKCPECGKSFSRRD | | LNVHX₁₇X₁₈X₁₉HX₂₀X₂₁X₂₂X₂₃X₂₄X₈X₉CX₁₀X₁₁CX₁₂X₁₃X₁₄X₁₅X₁₆RS | |
| | | | ELNVHQRTHTGEKPYKCPECGKS | | DNLVRHX₁₇X₁₈X₁₉HX₂₀X₂₁X₂₂X₂₃X₂₄X₂₅X₂₆X₂₇X₂₈X₂₉X₃₀ | |
| | | | FSRSDNLVRHQRTHTGEKPTGKK | | | |
| | | | TS | | | |
| gggagacgg | ggg AGA | 929 | LEPGEKPYKCPECGKSFSRSDKL | 1478 | X₁X₂X₃X₄X₅X₆X₇X₈X₉CX₁₀X₁₁CX₁₂X₁₃X₁₄X₁₅X₁₆RSDKLVRHX₁₇X₁₈X₁₉ | 2027 |
| agaggggca | CGG AGA | | VRHQRTHTGEKPYKCPECGKSFS | | HX₂₀X₂₁X₂₂X₂₃X₂₄X₈X₉CX₁₀X₁₁CX₁₂X₁₃X₁₄X₁₅X₁₆QSGDLRRHX₁₇X₁₈ | |
| ggg | GGG GCA | | QSGDLRRHQRTHTGEKPYKCPEC | | X₁₉HX₂₀X₂₁X₂₂X₂₃X₂₄X₈X₉CX₁₀X₁₁CX₁₂X₁₃X₁₄X₁₅X₁₆RSDKLVRHX₁₇ | |
| | GGG | | GKSFSRSDKLVRHQRTHTGEKPY | | X₁₈X₁₉HX₂₀X₂₁X₂₂X₂₃X₂₄X₈X₉CX₁₀X₁₁CX₁₂X₁₃X₁₄X₁₅X₁₆QLAHLRAH | |
| | | | KCPECGKSFSQLAHLRAHQRTHT | | X₁₇X₁₈X₁₉HX₂₀X₂₁X₂₂X₂₃X₂₄X₈X₉CX₁₀X₁₁CX₁₂X₁₃X₁₄X₁₅X₁₆RSDKLT | |
| | | | GEKPYKCPECGKSFSRSDKLTEH | | EHX₁₇X₁₈X₁₉HX₂₀X₂₁X₂₂X₂₃X₂₄X₈X₉CX₁₀X₁₁CX₁₂X₁₃X₁₄X₁₅X₁₆QLAH | |
| | | | QRTHTGEKPYKCPECGKSFSQLA | | LRAHX₁₇X₁₈X₁₉HX₂₀X₂₁X₂₂X₂₃X₂₄X₈X₉CX₁₀X₁₁CX₁₂X₁₃X₁₄X₁₅X₁₆RS | |
| | | | HLRAHQRTHTGEKPYKCPECGKS | | DKLVRHX₁₇X₁₈X₁₉HX₂₀X₂₁X₂₂X₂₃X₂₄X₂₅X₂₆X₂₇X₂₈X₂₉X₃₀ | |
| | | | FSRSDKLVRHQRTHTGEKPTGKK | | | |
| | | | TS | | | |
| agacggaga | AGA CGG | 930 | LEPGEKPYKCPECGKSFSRSDHL | 1479 | X₁X₂X₃X₄X₅X₆X₇X₈X₉CX₁₀X₁₁CX₁₂X₁₃X₁₄X₁₅X₁₆RSDHLTTHX₁₇X₁₈X₁₉ | 2028 |
| ggggcaggg | AGA GGG | | TTHQRTHTGEKPYKCPECGKSFS | | HX₂₀X₂₁X₂₂X₂₃X₂₄X₈X₉CX₁₀X₁₁CX₁₂X₁₃X₁₄X₁₅X₁₆RSDKLVRHX₁₇X₁₈ | |
| tgg | GCA GGG | | RSDKLVRHQRTHTGEKPYKCPEC | | X₁₉HX₂₀X₂₁X₂₂X₂₃X₂₄X₈X₉CX₁₀X₁₁CX₁₂X₁₃X₁₄X₁₅X₁₆QSGDLRRHX₁₇ | |
| | TGG | | GKSF SQSGDLRRHQRTHTGEKPY | | X₁₈X₁₉HX₂₀X₂₁X₂₂X₂₃X₂₄X₈X₉CX₁₀X₁₁CX₁₂X₁₃X₁₄X₁₅X₁₆RSDKLVRH | |
| | | | KCPECGKSFSRSDKLVRHQRTHT | | X₁₇X₁₈X₁₉HX₂₀X₂₁X₂₂X₂₃X₂₄X₈X₉CX₁₀X₁₁CX₁₂X₁₃X₁₄X₁₅X₁₆QLAHLR | |
| | | | GEKPYKCPECGKSFSQLAHLRAH | | AHX₁₇X₁₈X₁₉HX₂₀X₂₁X₂₂X₂₃X₂₄X₈X₉CX₁₀X₁₁CX₁₂X₁₃X₁₄X₁₅X₁₆RSDK | |
| | | | QRTHTGEKPYKCPECGKSFSRSD | | LTEHX₁₇X₁₈X₁₉HX₂₀X₂₁X₂₂X₂₃X₂₄X₈X₉CX₁₀X₁₁CX₁₂X₁₃X₁₄X₁₅X₁₆QL | |
| | | | KLTEHQRTHTGEKPYKCPECGKS | | AHLRAHX₁₇X₁₈X₁₉HX₂₀X₂₁X₂₂X₂₃X₂₄X₂₅X₂₆X₂₇X₂₈X₂₉X₃₀ | |
| | | | FSQLAHLRAHQRTHTGEKPTGKK | | | |
| | | | TS | | | |
| cggagaggg | CGG AGA | 931 | LEPGEKPYKCPECGKSFSTSGNL | 1480 | X₁X₂X₃X₄X₅X₆X₇X₈X₉CX₁₀X₁₁CX₁₂X₁₃X₁₄X₁₅X₁₆TSGNLVRHX₁₇X₁₈X₁₉ | 2029 |
| gcagggtgg | GGG GCA | | VRHQRTHTGEKPYKCPECGKSFS | | HX₂₀X₂₁X₂₂X₂₃X₂₄X₈X₉CX₁₀X₁₁CX₁₂X₁₃X₁₄X₁₅X₁₆RSDHLTTHX₁₇X₁₈ | |
| gat | GGG TGG | | RSDHLTTHQRTHTGEKPYKCPEC | | X₁₉HX₂₀X₂₁X₂₂X₂₃X₂₄X₈X₉CX₁₀X₁₁CX₁₂X₁₃X₁₄X₁₅X₁₆RSDKLVRHX₁₇ | |
| | GAT | | GKSFSRSDKLVRHQRTHTGEKPY | | X₁₈X₁₉HX₂₀X₂₁X₂₂X₂₃X₂₄X₈X₉CX₁₀X₁₁CX₁₂X₁₃X₁₄X₁₅X₁₆QSGDLRRH | |
| | | | KCPECGKSFSQSGDLRRHQRTHT | | X₁₇X₁₈X₁₉HX₂₀X₂₁X₂₂X₂₃X₂₄X₈X₉CX₁₀X₁₁CX₁₂X₁₃X₁₄X₁₅X₁₆RSDKLV | |
| | | | GEKPYKCPECGKSFSRSDKLVRH | | RHX₁₇X₁₈X₁₉HX₂₀X₂₁X₂₂X₂₃X₂₄X₈X₉CX₁₀X₁₁CX₁₂X₁₃X₁₄X₁₅X₁₆QLAH | |
| | | | QRTHTGEKPYKCPECGKSFSQLA | | LRAHX₁₇X₁₈X₁₉HX₂₀X₂₁X₂₂X₂₃X₂₄X₈X₉CX₁₀X₁₁CX₁₂X₁₃X₁₄X₁₅X₁₆RS | |
| | | | HLRAHQRTHTGEKPYKCPECGKS | | DKLTEHX₁₇X₁₈X₁₉HX₂₀X₂₁X₂₂X₂₃X₂₄X₂₅X₂₆X₂₇X₂₈X₂₉X₃₀ | |
| | | | FSRSDKLTEHQRTHTGEKPTGKK | | | |
| | | | TS | | | |
| agaggggca | AGA GGG | 932 | LEPGEKPYKCPECGKSFSSKKAL | 1481 | X₁X₂X₃X₄X₅X₆X₇X₈X₉CX₁₀X₁₁CX₁₂X₁₃X₁₄X₁₅X₁₆SKKALTEHX₁₇X₁₈X₁₉ | 2030 |
| gggtgggat | GCA GGG | | TEHQRTHTGEKPYKCPECGKSFS | | HX₂₀X₂₁X₂₂X₂₃X₂₄X₈X₉CX₁₀X₁₁CX₁₂X₁₃X₁₄X₁₅X₁₆TSGNLVRHX₁₇X₁₈ | |
| cac | TGG GAT | | TSGNLVRHQRTHTGEKPYKCPEC | | X₁₉HX₂₀X₂₁X₂₂X₂₃X₂₄X₈X₉CX₁₀X₁₁CX₁₂X₁₃X₁₄X₁₅X₁₆RSDHLTTHX₁₇ | |
| | CAC | | GKSFSRSDHLTTHQRTHTGEKPY | | X₁₈X₁₉HX₂₀X₂₁X₂₂X₂₃X₂₄X₈X₉CX₁₀X₁₁CX₁₂X₁₃X₁₄X₁₅X₁₆RSDKLVRH | |
| | | | KCPECGKSFSRSDKLVRHQRTHT | | X₁₇X₁₈X₁₉HX₂₀X₂₁X₂₂X₂₃X₂₄X₈X₉CX₁₀X₁₁CX₁₂X₁₃X₁₄X₁₅X₁₆QSGDLR | |
| | | | GEKPYKCPECGKSFSQSGDLRRH | | RHX₁₇X₁₈X₁₉HX₂₀X₂₁X₂₂X₂₃X₂₄X₈X₉CX₁₀X₁₁CX₁₂X₁₃X₁₄X₁₅X₁₆RSDK | |
| | | | QRTHTGEKPYKCPECGKSFSRSD | | LVRHX₁₇X₁₈X₁₉HX₂₀X₂₁X₂₂X₂₃X₂₄X₈X₉CX₁₀X₁₁CX₁₂X₁₃X₁₄X₁₅X₁₆QL | |
| | | | KLVRHQRTHTGEKPYKCPECGKS | | AHLRAHX₁₇X₁₈X₁₉HX₂₀X₂₁X₂₂X₂₃X₂₄X₂₅X₂₆X₂₇X₂₈X₂₉X₃₀ | |
| | | | FSQLAHLRAHQRTHTGEKPTGKK | | | |
| | | | TS | | | |
| gatcacagg | GAT CAC | 933 | LEPGEKPYKCPECGKSFSRSDKL | 1482 | X₁X₂X₃X₄X₅X₆X₇X₈X₉CX₁₀X₁₁CX₁₂X₁₃X₁₄X₁₅X₁₆RSDKLTEHX₁₇X₁₈X₁₉ | 2031 |
| gagcaggag | AGG gag | | TEHQRTHTGEKPYKCPECGKSFS | | HX₂₀X₂₁X₂₂X₂₃X₂₄X₈X₉CX₁₀X₁₁CX₁₂X₁₃X₁₄X₁₅X₁₆RSDNLVRHX₁₇X₁₈ | |
| cgg | CAG gag | | RSDNLVRHQRTHTGEKPYKCPEC | | X₁₉HX₂₀X₂₁X₂₂X₂₃X₂₄X₈X₉CX₁₀X₁₁CX₁₂X₁₃X₁₄X₁₅X₁₆RADNLTEHX₁₇ | |
| | CGG | | GKSFSRADNLTEHQRTHTGEKPY | | X₁₈X₁₉HX₂₀X₂₁X₂₂X₂₃X₂₄X₈X₉CX₁₀X₁₁CX₁₂X₁₃X₁₄X₁₅X₁₆RSDNLVRH | |
| | | | KCPECGKSFSRSDNLVRHQRTHT | | X₁₇X₁₈X₁₉HX₂₀X₂₁X₂₂X₂₃X₂₄X₈X₉CX₁₀X₁₁CX₁₂X₁₃X₁₄X₁₅X₁₆RSDHLT | |
| | | | GEKPYKCPECGKSFSRSDHLTNH | | NHX₁₇X₁₈X₁₉HX₂₀X₂₁X₂₂X₂₃X₂₄X₈X₉CX₁₀X₁₁CX₁₂X₁₃X₁₄X₁₅X₁₆SKKA | |
| | | | QRTHTGEKPYKCPECGKSFSSKK | | LTEHX₁₇X₁₈X₁₉HX₂₀X₂₁X₂₂X₂₃X₂₄X₈X₉CX₁₀X₁₁CX₁₂X₁₃X₁₄X₁₅X₁₆TS | |
| | | | ALTEHQRTHTGEKPYKCPECGKS | | GNLVRHX₁₇X₁₈X₁₉HX₂₀X₂₁X₂₂X₂₃X₂₄X₂₅X₂₆X₂₇X₂₈X₂₉X₃₀ | |
| | | | FSTSGNLVRHQRTHTGEKPTGKK | | | |
| | | | TS | | | |
| ggggcaggg | GGG GCA | 934 | LEPGEKPYKCPECGKSFSRSDHL | 1483 | X₁X₂X₃X₄X₅X₆X₇X₈X₉CX₁₀X₁₁CX₁₂X₁₃X₁₄X₁₅X₁₆RSDHLTNHX₁₇X₁₈X₁₉ | 2032 |
| tgggatcac | GGG TGG | | TNHQRTHTGEKPYKCPECGKSFS | | HX₂₀X₂₁X₂₂X₂₃X₂₄X₈X₉CX₁₀X₁₁CX₁₂X₁₃X₁₄X₁₅X₁₆SKKALTEHX₁₇X₁₈ | |
| agg | GAT CAC | | SKKALTEHQRTHTGEKPYKCPEC | | X₁₉HX₂₀X₂₁X₂₂X₂₃X₂₄X₈X₉CX₁₀X₁₁CX₁₂X₁₃X₁₄X₁₅X₁₆TSGNLVRHX₁₇ | |
| | AGG | | GKSFSTSGNLVRHQRTHTGEKPY | | X₁₈X₁₉HX₂₀X₂₁X₂₂X₂₃X₂₄X₈X₉CX₁₀X₁₁CX₁₂X₁₃X₁₄X₁₅X₁₆RSDHLTTH | |
| | | | KCPECGKSFSRSDHLTTHQRTHT | | X₁₇X₁₈X₁₉HX₂₀X₂₁X₂₂X₂₃X₂₄X₈X₉CX₁₀X₁₁CX₁₂X₁₃X₁₄X₁₅X₁₆RSDKLV | |
| | | | GEKPYKCPECGKSFSRSDKLVRH | | RHX₁₇X₁₈X₁₉HX₂₀X₂₁X₂₂X₂₃X₂₄X₈X₉CX₁₀X₁₁CX₁₂X₁₃X₁₄X₁₅X₁₆QSGD | |
| | | | QRTHTGEKPYKCPECGKSFSQSG | | LRRHX₁₇X₁₈X₁₉HX₂₀X₂₁X₂₂X₂₃X₂₄X₈X₉CX₁₀X₁₁CX₁₂X₁₃X₁₄X₁₅X₁₆RS | |
| | | | DLRRHQRTHTGEKPYKCPECGKS | | DKLVRHX₁₇X₁₈X₁₉HX₂₀X₂₁X₂₂X₂₃X₂₄X₂₅X₂₆X₂₇X₂₈X₂₉X₃₀ | |
| | | | FSRSDKLVRHQRTHTGEKPTGKK | | | |
| | | | TS | | | |
| gggtgggat | GGG TGG | 935 | LEPGEKPYKCPECGKSFSRADNL | 1484 | X₁X₂X₃X₄X₅X₆X₇X₈X₉CX₁₀X₁₁CX₁₂X₁₃X₁₄X₁₅X₁₆RADNLTEHX₁₇X₁₈X₁₉ | 2033 |
| cacagggag | GAT CAC | | TEHQRTHTGEKPYKCPECGKSFS | | HX₂₀X₂₁X₂₂X₂₃X₂₄X₈X₉CX₁₀X₁₁CX₁₂X₁₃X₁₄X₁₅X₁₆RSDNLVRHX₁₇X₁₈ | |
| cag | AGG gag | | RSDNLVRHQRTHTGEKPYKCPEC | | X₁₉HX₂₀X₂₁X₂₂X₂₃X₂₄X₈X₉CX₁₀X₁₁CX₁₂X₁₃X₁₄X₁₅X₁₆RSDHLTNHX₁₇ | |
| | CAG | | GKSFSRSDHLTNHQRTHTGEKPY | | X₁₈X₁₉HX₂₀X₂₁X₂₂X₂₃X₂₄X₈X₉CX₁₀X₁₁CX₁₂X₁₃X₁₄X₁₅X₁₆SKKALTEH | |
| | | | KCPECGKSFSSKKALTEHQRTHT | | X₁₇X₁₈X₁₉HX₂₀X₂₁X₂₂X₂₃X₂₄X₈X₉CX₁₀X₁₁CX₁₂X₁₃X₁₄X₁₅X₁₆TSGNLV | |
| | | | GEKPYKCPECGKSFSTSGNLVRH | | RHX₁₇X₁₈X₁₉HX₂₀X₂₁X₂₂X₂₃X₂₄X₈X₉CX₁₀X₁₁CX₁₂X₁₃X₁₄X₁₅X₁₆RSDH | |
| | | | QRTHTGEKPYKCPECGKSFSRSD | | LTTHX₁₇X₁₈X₁₉HX₂₀X₂₁X₂₂X₂₃X₂₄X₈X₉CX₁₀X₁₁CX₁₂X₁₃X₁₄X₁₅X₁₆RS | |
| | | | HLTTHQRTHTGEKPYKCPECGKS | | DKLVRHX₁₇X₁₈X₁₉HX₂₀X₂₁X₂₂X₂₃X₂₄X₂₅X₂₆X₂₇X₂₈X₂₉X₃₀ | |
| | | | FSRSDKLVRHQRTHTGEKPTGKK | | | |
| | | | TS | | | |
| tgggatcac | TGG GAT | 936 | LEPGEKPYKCPECGKSFSRSDNL | 1485 | X₁X₂X₃X₄X₅X₆X₇X₈X₉CX₁₀X₁₁CX₁₂X₁₃X₁₄X₁₅X₁₆RSDNLVRHX₁₇X₁₈X₁₉ | 2034 |
| agggagcag | CAC AGG | | VRHQRTHTGEKPYKCPECGKSFS | | HX₂₀X₂₁X₂₂X₂₃X₂₄X₈X₉CX₁₀X₁₁CX₁₂X₁₃X₁₄X₁₅X₁₆RADNLTEHX₁₇X₁₈ | |
| gag | gag CAG | | RADNLTEHQRTHTGEKPYKCPEC | | X₁₉HX₂₀X₂₁X₂₂X₂₃X₂₄X₈X₉CX₁₀X₁₁CX₁₂X₁₃X₁₄X₁₅X₁₆RSDNLVRHX₁₇ | |
| | GAG | | GKSFSRSDNLVRHQRTHTGEKPY | | X₁₈X₁₉HX₂₀X₂₁X₂₂X₂₃X₂₄X₈X₉CX₁₀X₁₁CX₁₂X₁₃X₁₄X₁₅X₁₆RSDHLTNH | |
| | | | KCPECGKSFSRSDHLTNHQRTHT | | X₁₇X₁₈X₁₉HX₂₀X₂₁X₂₂X₂₃X₂₄X₈X₉CX₁₀X₁₁CX₁₂X₁₃X₁₄X₁₅X₁₆SKKALT | |
| | | | GEKPYKCPECGKSFSSKKALTEH | | EHX₁₇X₁₈X₁₉HX₂₀X₂₁X₂₂X₂₃X₂₄X₈X₉CX₁₀X₁₁CX₁₂X₁₃X₁₄X₁₅X₁₆TSGN | |
| | | | QRTHTGEKPYKCPECGKSFSTSG | | LVRHX₁₇X₁₈X₁₉HX₂₀X₂₁X₂₂X₂₃X₂₄X₈X₉CX₁₀X₁₁CX₁₂X₁₃X₁₄X₁₅X₁₆RS | |
| | | | NLVRHQRTHTGEKPYKCPECGKS | | DHLTTHX₁₇X₁₈X₁₉HX₂₀X₂₁X₂₂X₂₃X₂₄X₂₅X₂₆X₂₇X₂₈X₂₉X₃₀ | |
| | | | FSRSDHLTTHQRTHTGEKPTGKK | | | |
| | | | TS | | | |
| gcagggtgg | GCA GGG | 937 | LEPGEKPYKCPECGKSFSRSDNL | 1486 | X₁X₂X₃X₄X₅X₆X₇X₈X₉CX₁₀X₁₁CX₁₂X₁₃X₁₄X₁₅X₁₆RSDNLVRHX₁₇X₁₈X₁₉ | 2035 |
| gatcacagg | TGG GAT | | VRHQRTHTGEKPYKCPECGKSFS | | HX₂₀X₂₁X₂₂X₂₃X₂₄X₈X₉CX₁₀X₁₁CX₁₂X₁₃X₁₄X₁₅X₁₆RSDHLTNHX₁₇X₁₈ | |
| gag | CAC AGG | | RSDHLTNHQRTHTGEKPYKCPEC | | X₁₉HX₂₀X₂₁X₂₂X₂₃X₂₄X₈X₉CX₁₀X₁₁CX₁₂X₁₃X₁₄X₁₅X₁₆SKKALTEHX₁₇ | |
| | GAG | | GKSFSSKKALTEHQRTHTGEKPY | | X₁₈X₁₉HX₂₀X₂₁X₂₂X₂₃X₂₄X₈X₉CX₁₀X₁₁CX₁₂X₁₃X₁₄X₁₅X₁₆TSGNLVRH | |
| | | | KCPECGKSFSTSGNLVRHQRTHT | | X₁₇X₁₈X₁₉HX₂₀X₂₁X₂₂X₂₃X₂₄X₈X₉CX₁₀X₁₁CX₁₂X₁₃X₁₄X₁₅X₁₆RSDHLT | |
| | | | GEKPYKCPECGKSFSRSDHLTTH | | THX₁₇X₁₈X₁₉HX₂₀X₂₁X₂₂X₂₃X₂₄X₈X₉CX₁₀X₁₁CX₁₂X₁₃X₁₄X₁₅X₁₆RSDK | |
| | | | QRTHTGEKPYKCPECGKSFSRSD | | LVRHX₁₇X₁₈X₁₉HX₂₀X₂₁X₂₂X₂₃X₂₄X₈X₉CX₁₀X₁₁CX₁₂X₁₃X₁₄X₁₅X₁₆QS | |
| | | | KLVRHQRTHTGEKPYKCPECGKS | | GDLRRHX₁₇X₁₈X₁₉HX₂₀X₂₁X₂₂X₂₃X₂₄X₂₅X₂₆X₂₇X₂₈X₂₉X₃₀ | |
| | | | FSQSGDLRRHQRTHTGEKPTGKK | | | |
| | | | TS | | | |
| agggagcag | AGG gag | 938 | LEPGEKPYKCPECGKSFSHKNAL | 1487 | X₁X₂X₃X₄X₅X₆X₇X₈X₉CX₁₀X₁₁CX₁₂X₁₃X₁₄X₁₅X₁₆HKNALQNHX₁₇X₁₈X₁₉ | 2036 |
| gagcgggga | CAG gag | | QNHQRTHTGEKPYKCPECGKSFS | | HX₂₀X₂₁X₂₂X₂₃X₂₄X₈X₉CX₁₀X₁₁CX₁₂X₁₃X₁₄X₁₅X₁₆QRAHLERHX₁₇X₁₈ | |
| att | CGG GGA | | QRAHLERHQRTHTGEKPYKCPEC | | X₁₉HX₂₀X₂₁X₂₂X₂₃X₂₄X₈X₉CX₁₀X₁₁CX₁₂X₁₃X₁₄X₁₅X₁₆RSDKLTEHX₁₇ | |
| | ATT | | GKSFSRSDKLTEHQRTHTGEKPY | | X₁₈X₁₉HX₂₀X₂₁X₂₂X₂₃X₂₄X₈X₉CX₁₀X₁₁CX₁₂X₁₃X₁₄X₁₅X₁₆RSDNLVRH | |
| | | | KCPECGKSFSRSDNLVRHQRTHT | | X₁₇X₁₈X₁₉HX₂₀X₂₁X₂₂X₂₃X₂₄X₈X₉CX₁₀X₁₁CX₁₂X₁₃X₁₄X₁₅X₁₆RADNLT | |
| | | | GEKPYKCPECGKSFSRADNLTEH | | EHX₁₇X₁₈X₁₉HX₂₀X₂₁X₂₂X₂₃X₂₄X₈X₉CX₁₀X₁₁CX₁₂X₁₃X₁₄X₁₅X₁₆RSDN | |
| | | | QRTHTGEKPYKCPECGKSFSRSD | | LVRHX₁₇X₁₈X₁₉HX₂₀X₂₁X₂₂X₂₃X₂₄X₈X₉CX₁₀X₁₁CX₁₂X₁₃X₁₄X₁₅X₁₆RS | |
| | | | NLVRHQRTHTGEKPYKCPECGKS | | DHLTNHX₁₇X₁₈X₁₉HX₂₀X₂₁X₂₂X₂₃X₂₄X₂₅X₂₆X₂₇X₂₈X₂₉X₃₀ | |
| | | | FSRSDHLTNHQRTHTGEKPTGKK | | | |
| | | | TS | | | |
| cacagggag | CAC AGG | 939 | LEPGEKPYKCPECGKSFSQRAHL | 1488 | X₁X₂X₃X₄X₅X₆X₇X₈X₉CX₁₀X₁₁CX₁₂X₁₃X₁₄X₁₅X₁₆QRAHLERHX₁₇X₁₈X₁₉ | 2037 |
| caggagcgg | gag CAG | | ERHQRTHTGEKPYKCPECGKSFS | | HX₂₀X₂₁X₂₂X₂₃X₂₄X₈X₉CX₁₀X₁₁CX₁₂X₁₃X₁₄X₁₅X₁₆RSDKLTEHX₁₇X₁₈ | |
| gga | gag CGG | | RSDKLTEHQRTHTGEKPYKCPEC | | X₁₉HX₂₀X₂₁X₂₂X₂₃X₂₄X₈X₉CX₁₀X₁₁CX₁₂X₁₃X₁₄X₁₅X₁₆RSDNLVRHX₁₇ | |
| | GGA | | GKSFSRSDNLVRHQRTHTGEKPY | | X₁₈X₁₉HX₂₀X₂₁X₂₂X₂₃X₂₄X₈X₉CX₁₀X₁₁CX₁₂X₁₃X₁₄X₁₅X₁₆RADNLTEH | |
| | | | KCPECGKSFSRADNLTEHQRTHT | | X₁₇X₁₈X₁₉HX₂₀X₂₁X₂₂X₂₃X₂₄X₈X₉CX₁₀X₁₁CX₁₂X₁₃X₁₄X₁₅X₁₆RSDNLV | |
| | | | GEKPYKCPECGKSFSRSDNLVRH | | RHX₁₇X₁₈X₁₉HX₂₀X₂₁X₂₂X₂₃X₂₄X₈X₉CX₁₀X₁₁CX₁₂X₁₃X₁₄X₁₅X₁₆RSDH | |
| | | | QRTHTGEKPYKCPECGKSFSRSD | | LTNHX₁₇X₁₈X₁₉HX₂₀X₂₁X₂₂X₂₃X₂₄X₈X₉CX₁₀X₁₁CX₁₂X₁₃X₁₄X₁₅X₁₆SK | |
| | | | HLTNHQRTHTGEKPYKCPECGKS | | KALTEHX₁₇X₁₈X₁₉HX₂₀X₂₁X₂₂X₂₃X₂₄X₂₅X₂₆X₂₇X₂₈X₂₉X₃₀ | |
| | | | FSSKKALTEHQRTHTGEKPTGKK | | | |
| | | | TS | | | |
| gagcaggag | gag CAG | 940 | LEPGEKPYKCPECGKSFSQRAHL | 1489 | X₁X₂X₃X₄X₅X₆X₇X₈X₉CX₁₀X₁₁CX₁₂X₁₃X₁₄X₁₅X₁₆QRAHLERHX₁₇X₁₈X₁₉ | 2038 |
| cggggaatt | gag CGG | | ERHQRTHTGEKPYKCPECGKSFS | | HX₂₀X₂₁X₂₂X₂₃X₂₄X₈X₉CX₁₀X₁₁CX₁₂X₁₃X₁₄X₁₅X₁₆HKNALQNHX₁₇X₁₈ | |
| gga | GGA ATT | | HKNALQNHQRTHTGEKPYKCPEC | | X₁₉HX₂₀X₂₁X₂₂X₂₃X₂₄X₈X₉CX₁₀X₁₁CX₁₂X₁₃X₁₄X₁₅X₁₆QRAHLERHX₁₇ | |
| | GGA | | GKSFSQRAHLERHQRTHTGEKPY | | X₁₈X₁₉HX₂₀X₂₁X₂₂X₂₃X₂₄X₈X₉CX₁₀X₁₁CX₁₂X₁₃X₁₄X₁₅X₁₆RSDKLTEH | |
| | | | KCPECGKSFSRSDKLTEHQRTHT | | X₁₇X₁₈X₁₉HX₂₀X₂₁X₂₂X₂₃X₂₄X₈X₉CX₁₀X₁₁CX₁₂X₁₃X₁₄X₁₅X₁₆RSDNLV | |
| | | | GEKPYKCPECGKSFSRSDNLVRH | | RHX₁₇X₁₈X₁₉HX₂₀X₂₁X₂₂X₂₃X₂₄X₈X₉CX₁₀X₁₁CX₁₂X₁₃X₁₄X₁₅X₁₆RADN | |
| | | | QRTHTGEKPYKCPECGKSFSRAD | | LTEHX₁₇X₁₈X₁₉HX₂₀X₂₁X₂₂X₂₃X₂₄X₈X₉CX₁₀X₁₁CX₁₂X₁₃X₁₄X₁₅X₁₆RS | |
| | | | NLTEHQRTHTGEKPYKCPECGKS | | DNLVRHX₁₇X₁₈X₁₉HX₂₀X₂₁X₂₂X₂₃X₂₄X₂₅X₂₆X₂₇X₂₈X₂₉X₃₀ | |
| | | | FSRSDNLVRHQRTHTGEKPTGKK | | | |
| | | | TS | | | |
| caggagcgg | CAG gag | 941 | LEPGEKPYKCPECGKSFSTSGHL | 1490 | X₁X₂X₃X₄X₅X₆X₇X₈X₉CX₁₀X₁₁CX₁₂X₁₃X₁₄X₁₅X₁₆TSGHLVRHX₁₇X₁₈X₁₉ | 2039 |
| ggaattgga | CGG GGA | | VRHQRTHTGEKPYKCPECGKSFS | | HX₂₀X₂₁X₂₂X₂₃X₂₄X₈X₉CX₁₀X₁₁CX₁₂X₁₃X₁₄X₁₅X₁₆QRAHLERHX₁₇X₁₈ | |
| ggt | ATT GGA | | QRAHLERHQRTHTGEKPYKCPEC | | X₁₉HX₂₀X₂₁X₂₂X₂₃X₂₄X₈X₉CX₁₀X₁₁CX₁₂X₁₃X₁₄X₁₅X₁₆HKNALQNHX₁₇ | |
| | GGT | | GKSFSHKNALQNHQRTHTGEKPY | | X₁₈X₁₉HX₂₀X₂₁X₂₂X₂₃X₂₄X₈X₉CX₁₀X₁₁CX₁₂X₁₃X₁₄X₁₅X₁₆QRAHLERH | |
| | | | KCPECGKSFSQRAHLERHQRTHT | | X₁₇X₁₈X₁₉HX₂₀X₂₁X₂₂X₂₃X₂₄X₈X₉CX₁₀X₁₁CX₁₂X₁₃X₁₄X₁₅X₁₆RSDKLT | |
| | | | GEKPYKCPECGKSFSRSDKLTEH | | EHX₁₇X₁₈X₁₉HX₂₀X₂₁X₂₂X₂₃X₂₄X₈X₉CX₁₀X₁₁CX₁₂X₁₃X₁₄X₁₅X₁₆RSDN | |
| | | | QRTHTGEKPYKCPECGKSFSRSD | | LVRHX₁₇X₁₈X₁₉HX₂₀X₂₁X₂₂X₂₃X₂₄X₈X₉CX₁₀X₁₁CX₁₂X₁₃X₁₄X₁₅X₁₆RA | |
| | | | NLVRHQRTHTGEKPYKCPECGKS | | DNLTEHX₁₇X₁₈X₁₉HX₂₀X₂₁X₂₂X₂₃X₂₄X₂₅X₂₆X₂₇X₂₈X₂₉X₃₀ | |
| | | | FSRADNLTEHQRTHTGEKPTGKK | | | |
| | | | TS | | | |
| gagcgggga | gag CGG | 942 | LEPGEKPYKCPECGKSFSQSSNL | 1491 | X₁X₂X₃X₄X₅X₆X₇X₈X₉CX₁₀X₁₁CX₁₂X₁₃X₁₄X₁₅X₁₆QSSNLVRHX₁₇X₁₈X₁₉ | 2040 |
| attggaggt | GGA ATT | | VRHQRTHTGEKPYKCPECGKSFS | | HX₂₀X₂₁X₂₂X₂₃X₂₄X₈X₉CX₁₀X₁₁CX₁₂X₁₃X₁₄X₁₅X₁₆TSGHLVRHX₁₇X₁₈ | |
| gaa | GGA GGT | | TSGHLVRHQRTHTGEKPYKCPEC | | X₁₉HX₂₀X₂₁X₂₂X₂₃X₂₄X₈X₉CX₁₀X₁₁CX₁₂X₁₃X₁₄X₁₅X₁₆QRAHLERHX₁₇ | |
| | GAA | | GKSFSQRAHLERHQRTHTGEKPY | | X₁₈X₁₉HX₂₀X₂₁X₂₂X₂₃X₂₄X₈X₉CX₁₀X₁₁CX₁₂X₁₃X₁₄X₁₅X₁₆HKNALQNH | |
| | | | KCPECGKSFSHKNALQNHQRTHT | | X₁₇X₁₈X₁₉HX₂₀X₂₁X₂₂X₂₃X₂₄X₈X₉CX₁₀X₁₁CX₁₂X₁₃X₁₄X₁₅X₁₆QRAHLE | |
| | | | GEKPYKCPECGKSFSQRAHLERH | | RHX₁₇X₁₈X₁₉HX₂₀X₂₁X₂₂X₂₃X₂₄X₈X₉CX₁₀X₁₁CX₁₂X₁₃X₁₄X₁₅X₁₆RSDK | |
| | | | QRTHTGEKPYKCPECGKSFSRSD | | LTEHX₁₇X₁₈X₁₉HX₂₀X₂₁X₂₂X₂₃X₂₄X₈X₉CX₁₀X₁₁CX₁₂X₁₃X₁₄X₁₅X₁₆RS | |
| | | | KLTEHQRTHTGEKPYKCPECGKS | | DNLVRHX₁₇X₁₈X₁₉HX₂₀X₂₁X₂₂X₂₃X₂₄X₂₅X₂₆X₂₇X₂₈X₂₉X₃₀ | |
| | | | FSRSDNLVRHQRTHTGEKPTGKK | | | |
| | | | TS | | | |
| acagggagc | ACA ggg | 943 | LEPGEKPYKCPECGKSFSQSSNL | 1492 | X₁X₂X₃X₄X₅X₆X₇X₈X₉CX₁₀X₁₁CX₁₂X₁₃X₁₄X₁₅X₁₆QSSNLVRHX₁₇X₁₈X₁₉ | 2041 |
| aggagcggg | AGC AGG | | VRHQRTHTGEKPYKCPECGKSFS | | HX₂₀X₂₁X₂₂X₂₃X₂₄X₈X₉CX₁₀X₁₁CX₁₂X₁₃X₁₄X₁₅X₁₆RSDKLVRHX₁₇X₁₈ | |
| gaa | AGC GGG | | RSDKLVRHQRTHTGEKPYKCPEC | | X₁₉HX₂₀X₂₁X₂₂X₂₃X₂₄X₈X₉CX₁₀X₁₁CX₁₂X₁₃X₁₄X₁₅X₁₆ERSHLREHX₁₇ | |
| | GAA | | GKSFSERSHLREHQRTHTGEKPY | | X₁₈X₁₉HX₂₀X₂₁X₂₂X₂₃X₂₄X₈X₉CX₁₀X₁₁CX₁₂X₁₃X₁₄X₁₅X₁₆RSDHLTNH | |
| | | | KCPECGKSFSRSDHLTNHQRTHT | | X₁₇X₁₈X₁₉HX₂₀X₂₁X₂₂X₂₃X₂₄X₈X₉CX₁₀X₁₁CX₁₂X₁₃X₁₄X₁₅X₁₆ERSHLR | |
| | | | GEKPYKCPECGKSFSERSHLREH | | EHX₁₇X₁₈X₁₉HX₂₀X₂₁X₂₂X₂₃X₂₄X₈X₉CX₁₀X₁₁CX₁₂X₁₃X₁₄X₁₅X₁₆RSDK | |
| | | | QRTHTGEKPYKCPECGKSFSRSD | | LVRHX₁₇X₁₈X₁₉HX₂₀X₂₁X₂₂X₂₃X₂₄X₈X₉CX₁₀X₁₁CX₁₂X₁₃X₁₄X₁₅X₁₆SP | |
| | | | KLVRHQRTHTGEKPYKCPECGKS | | ADLTRHX₁₇X₁₈X₁₉HX₂₀X₂₁X₂₂X₂₃X₂₄X₂₅X₂₆X₂₇X₂₈X₂₉X₃₀ | |
| | | | FSSPADLTRHQRTHTGEKPTGKK | | | |
| | | | TS | | | |
| gcaggagcg | GCA GGA | 944 | LEPGEKPYKCPECGKSFSRSDHL | 1493 | X₁X₂X₃X₄X₅X₆X₇X₈X₉CX₁₀X₁₁CX₁₂X₁₃X₁₄X₁₅X₁₆RSDHLTNHX₁₇X₁₈X₁₉ | 2042 |
| gggaattgg | GCG ggg | | TNHQRTHTGEKPYKCPECGKSFS | | HX₂₀X₂₁X₂₂X₂₃X₂₄X₈X₉CX₁₀X₁₁CX₁₂X₁₃X₁₄X₁₅X₁₆RSDHLTTHX₁₇X₁₈ | |
| agg | AAT TGG | | RSDHLTTHQRTHTGEKPYKCPEC | | X₁₉HX₂₀X₂₁X₂₂X₂₃X₂₄X₈X₉CX₁₀X₁₁CX₁₂X₁₃X₁₄X₁₅X₁₆TTGNLTVHX₁₇ | |
| | AGG | | GKSFSTTGNLTVHQRTHTGEKPY | | X₁₈X₁₉HX₂₀X₂₁X₂₂X₂₃X₂₄X₈X₉CX₁₀X₁₁CX₁₂X₁₃X₁₄X₁₅X₁₆RSDKLVRH | |
| | | | KCPECGKSFSRSDKLVRHQRTHT | | X₁₇X₁₈X₁₉HX₂₀X₂₁X₂₂X₂₃X₂₄X₈X₉CX₁₀X₁₁CX₁₂X₁₃X₁₄X₁₅X₁₆RSDDLV | |
| | | | GEKPYKCPECGKSFSRSDDLVRH | | RHX₁₇X₁₈X₁₉HX₂₀X₂₁X₂₂X₂₃X₂₄X₈X₉CX₁₀X₁₁CX₁₂X₁₃X₁₄X₁₅X₁₆QRAH | |
| | | | QRTHTGEKPYKCPECGKSFSQRA | | LERHX₁₇X₁₈X₁₉HX₂₀X₂₁X₂₂X₂₃X₂₄X₈X₉CX₁₀X₁₁CX₁₂X₁₃X₁₄X₁₅X₁₆QS | |
| | | | HLERHQRTHTGEKPYKCPECGKS | | GDLRRHX₁₇X₁₈X₁₉HX₂₀X₂₁X₂₂X₂₃X₂₄X₂₅X₂₆X₂₇X₂₈X₂₉X₃₀ | |
| | | | FSQSGDLRRHQRTHTGEKPTGKK | | | |
| | | | TS | | | |
| ggagcgggg | GGA GCG | 945 | LEPGEKPYKCPECGKSFSQAGHL | 1494 | X₁X₂X₃X₄X₅X₆X₇X₈X₉CX₁₀X₁₁CX₁₂X₁₃X₁₄X₁₅X₁₆QAGHLASHX₁₇X₁₈X₁₉ | 2043 |
| aattggagg | ggg AAT | | ASHQRTHTGEKPYKCPECGKSFS | | HX₂₀X₂₁X₂₂X₂₃X₂₄X₈X₉CX₁₀X₁₁CX₁₂X₁₃X₁₄X₁₅X₁₆RSDHLTNHX₁₇X₁₈ | |
| tga | TGG AGG | | RSDHLTNHQRTHTGEKPYKCPEC | | X₁₉HX₂₀X₂₁X₂₂X₂₃X₂₄X₈X₉CX₁₀X₁₁CX₁₂X₁₃X₁₄X₁₅X₁₆RSDHLTTHX₁₇ | |
| | TGA | | GKSFSRSDHLTTHQRTHTGEKPY | | X₁₈X₁₉HX₂₀X₂₁X₂₂X₂₃X₂₄X₈X₉CX₁₀X₁₁CX₁₂X₁₃X₁₄X₁₅X₁₆TTGNLTVH | |
| | | | KCPECGKSFSTTGNLTVHQRTHT | | X₁₇X₁₈X₁₉HX₂₀X₂₁X₂₂X₂₃X₂₄X₈X₉CX₁₀X₁₁CX₁₂X₁₃X₁₄X₁₅X₁₆RSDKLV | |
| | | | GEKPYKCPECGKSFSRSDKLVRH | | RHX₁₇X₁₈X₁₉HX₂₀X₂₁X₂₂X₂₃X₂₄X₈X₉CX₁₀X₁₁CX₁₂X₁₃X₁₄X₁₅X₁₆RSDD | |
| | | | QRTHTGEKPYKCPECGKSFSRSD | | LVRHX₁₇X₁₈X₁₉HX₂₀X₂₁X₂₂X₂₃X₂₄X₈X₉CX₁₀X₁₁CX₁₂X₁₃X₁₄X₁₅X₁₆QR | |
| | | | DLVRHQRTHTGEKPYKCPECGKS | | AHLERHX₁₇X₁₈X₁₉HX₂₀X₂₁X₂₂X₂₃X₂₄X₂₅X₂₆X₂₇X₂₈X₂₉X₃₀ | |
| | | | FSQRAHLERHQRTHTGEKPTGKK | | | |
| | | | TS | | | |
| cagggagca | CAG GGA | 946 | LEPGEKPYKCPECGKSFSTTGNL | 1495 | X₁X₂X₃X₄X₅X₆X₇X₈X₉CX₁₀X₁₁CX₁₂X₁₃X₁₄X₁₅X₁₆TTGNLTVHX₁₇X₁₈X₁₉ | 2044 |
| ggagcgggg | GCA GGA | | TVHQRTHTGEKPYKCPECGKSFS | | HX₂₀X₂₁X₂₂X₂₃X₂₄X₈X₉CX₁₀X₁₁CX₁₂X₁₃X₁₄X₁₅X₁₆RSDKLVRHX₁₇X₁₈ | |
| aat | GCG ggg | | RSDKLVRHQRTHTGEKPYKCPEC | | X₁₉HX₂₀X₂₁X₂₂X₂₃X₂₄X₈X₉CX₁₀X₁₁CX₁₂X₁₃X₁₄X₁₅X₁₆RSDDLVRHX₁₇ | |
| | AAT | | GKSFSRSDDLVRHQRTHTGEKPY | | X₁₈X₁₉HX₂₀X₂₁X₂₂X₂₃X₂₄X₈X₉CX₁₀X₁₁CX₁₂X₁₃X₁₄X₁₅X₁₆QRAHLERH | |
| | | | KCPECGKSFSQRAHLERHQRTHT | | X₁₇X₁₈X₁₉HX₂₀X₂₁X₂₂X₂₃X₂₄X₈X₉CX₁₀X₁₁CX₁₂X₁₃X₁₄X₁₅X₁₆QSGDLR | |
| | | | GEKPYKCPECGKSFSQSGDLRRH | | RHX₁₇X₁₈X₁₉HX₂₀X₂₁X₂₂X₂₃X₂₄X₈X₉CX₁₀X₁₁CX₁₂X₁₃X₁₄X₁₅X₁₆QRAH | |
| | | | QRTHTGEKPYKCPECGKSFSQRA | | LERHX₁₇X₁₈X₁₉HX₂₀X₂₁X₂₂X₂₃X₂₄X₈X₉CX₁₀X₁₁CX₁₂X₁₃X₁₄X₁₅X₁₆RA | |
| | | | HLERHQRTHTGEKPYKCPECGKS | | DNLTEHX₁₇X₁₈X₁₉HX₂₀X₂₁X₂₂X₂₃X₂₄X₂₅X₂₆X₂₇X₂₈X₂₉X₃₀ | |
| | | | FSRADNLTEHQRTHTGEKPTGKK | | | |
| | | | TS | | | |
| ggagcagga | GGA GCA | 947 | LEPGEKPYKCPECGKSFSRSDHL | 1496 | X₁X₂X₃X₄X₅X₆X₇X₈X₉CX₁₀X₁₁CX₁₂X₁₃X₁₄X₁₅X₁₆RSDHLTTHX₁₇X₁₈X₁₉ | 2045 |
| gcggggaat | GGA GCG | | TTHQRTHTGEKPYKCPECGKSFS | | HX₂₀X₂₁X₂₂X₂₃X₂₄X₈X₉CX₁₀X₁₁CX₁₂X₁₃X₁₄X₁₅X₁₆TTGNLTVHX₁₇X₁₈ | |
| tgg | ggg AAT | | TTGNLTVHQRTHTGEKPYKCPEC | | X₁₉HX₂₀X₂₁X₂₂X₂₃X₂₄X₈X₉CX₁₀X₁₁CX₁₂X₁₃X₁₄X₁₅X₁₆RSDKLVRHX₁₇ | |
| | TGG | | GKSFSRSDKLVRHQRTHTGEKPY | | X₁₈X₁₉HX₂₀X₂₁X₂₂X₂₃X₂₄X₈X₉CX₁₀X₁₁CX₁₂X₁₃X₁₄X₁₅X₁₆RSDDLVRH | |
| | | | KCPECGKSFSRSDDLVRHQRTHT | | X₁₇X₁₈X₁₉HX₂₀X₂₁X₂₂X₂₃X₂₄X₈X₉CX₁₀X₁₁CX₁₂X₁₃X₁₄X₁₅X₁₆QRAHLE | |
| | | | GEKPYKCPECGKSFSQRAHLERH | | RHX₁₇X₁₈X₁₉HX₂₀X₂₁X₂₂X₂₃X₂₄X₈X₉CX₁₀X₁₁CX₁₂X₁₃X₁₄X₁₅X₁₆QSGD | |
| | | | QRTHTGEKPYKCPECGKSFSQSG | | LRRHX₁₇X₁₈X₁₉HX₂₀X₂₁X₂₂X₂₃X₂₄X₈X₉CX₁₀X₁₁CX₁₂X₁₃X₁₄X₁₅X₁₆QR | |
| | | | DLRRHQRTHTGEKPYKCPECGKS | | AHLERHX₁₇X₁₈X₁₉HX₂₀X₂₁X₂₂X₂₃X₂₄X₂₅X₂₆X₂₇X₂₈X₂₉X₃₀ | |
| | | | FSQRAHLERHQRTHTGEKPTGKK | | | |
| | | | TS | | | |
| ggccctccc | GGC CCT | 948 | LEPGEKPYKCPECGKSFSDPGAL | 1497 | X₁X₂X₃X₄X₅X₆X₇X₈X₉CX₁₀X₁₁CX₁₂X₁₃X₁₄X₁₅X₁₆DPGALVRHX₁₇X₁₈X₁₉ | 2046 |
| aaacttcca | CCC AAA | | VRHQRTHTGEKPYKCPECGKSFS | | HX₂₀X₂₁X₂₂X₂₃X₂₄X₈X₉CX₁₀X₁₁CX₁₂X₁₃X₁₄X₁₅X₁₆TSHSLTEHX₁₇X₁₈ | |
| gtc | CTT CCA | | TSHSLTEHQRTHTGEKPYKCPEC | | X₁₉HX₂₀X₂₁X₂₂X₂₃X₂₄X₈X₉CX₁₀X₁₁CX₁₂X₁₃X₁₄X₁₅X₁₆TTGALTEHX₁₇ | |
| | GTC | | GKSFSTTGALTEHQRTHTGEKPY | | X₁₈X₁₉HX₂₀X₂₁X₂₂X₂₃X₂₄X₈X₉CX₁₀X₁₁CX₁₂X₁₃X₁₄X₁₅X₁₆QRANLRAH | |
| | | | KCPECGKSFSQRANLRAHQRTHT | | X₁₇X₁₈X₁₉HX₂₀X₂₁X₂₂X₂₃X₂₄X₈X₉CX₁₀X₁₁CX₁₂X₁₃X₁₄X₁₅X₁₆SKKHLA | |
| | | | GEKPYKCPECGKSFSSKKHLAEH | | EHX₁₇X₁₈X₁₉HX₂₀X₂₁X₂₂X₂₃X₂₄X₈X₉CX₁₀X₁₁CX₁₂X₁₃X₁₄X₁₅X₁₆TKNS | |
| | | | QRTHTGEKPYKCPECGKSFSTKN | | LTEHX₁₇X₁₈X₁₉HX₂₀X₂₁X₂₂X₂₃X₂₄X₈X₉CX₁₀X₁₁CX₁₂X₁₃X₁₄X₁₅X₁₆DP | |
| | | | SLTEHQRTHTGEKPYKCPECGKS | | GHLVRHX₁₇X₁₈X₁₉HX₂₀X₂₁X₂₂X₂₃X₂₄X₂₅X₂₆X₂₇X₂₈X₂₉X₃₀ | |
| | | | FSDPGHLVRHQRTHTGEKPTGKK | | | |
| | | | TS | | | |
| cctcccaaa | CCT CCC | 949 | LEPGEKPYKCPECGKSFSTSGNL | 1498 | X₁X₂X₃X₄X₅X₆X₇X₈X₉CX₁₀X₁₁CX₁₂X₁₃X₁₄X₁₅X₁₆TSGNLTEHX₁₇X₁₈X₁₉ | 2047 |
| cttccagtc | AAA CTT | | TEHQRTHTGEKPYKCPECGKSFS | | HX₂₀X₂₁X₂₂X₂₃X₂₄X₈X₉CX₁₀X₁₁CX₁₂X₁₃X₁₄X₁₅X₁₆DPGALVRHX₁₇X₁₈ | |
| cat | CCA GTC | | DPGALVRHQRTHTGEKPYKCPEC | | X₁₉HX₂₀X₂₁X₂₂X₂₃X₂₄X₈X₉CX₁₀X₁₁CX₁₂X₁₃X₁₄X₁₅X₁₆TSHSLTEHX₁₇ | |
| | CAT | | GKSFSTSHSLTEHQRTHTGEKPY | | X₁₈X₁₉HX₂₀X₂₁X₂₂X₂₃X₂₄X₈X₉CX₁₀X₁₁CX₁₂X₁₃X₁₄X₁₅X₁₆TTGALTEH | |
| | | | KCPECGKSFSTTGALTEHQRTHT | | X₁₇X₁₈X₁₉HX₂₀X₂₁X₂₂X₂₃X₂₄X₈X₉CX₁₀X₁₁CX₁₂X₁₃X₁₄X₁₅X₁₆QRANLR | |
| | | | GEKPYKCPECGKSFSQRANLRAH | | AHX₁₇X₁₈X₁₉HX₂₀X₂₁X₂₂X₂₃X₂₄X₈X₉CX₁₀X₁₁CX₁₂X₁₃X₁₄X₁₅X₁₆SKKH | |
| | | | QRTHTGEKPYKCPECGKSFSSKK | | LAEHX₁₇X₁₈X₁₉HX₂₀X₂₁X₂₂X₂₃X₂₄X₈X₉CX₁₀X₁₁CX₁₂X₁₃X₁₄X₁₅X₁₆TK | |
| | | | HLAEHQRTHTGEKPYKCPECGKS | | NSLTEHX₁₇X₁₈X₁₉HX₂₀X₂₁X₂₂X₂₃X₂₄X₂₅X₂₆X₂₇X₂₈X₂₉X₃₀ | |
| | | | FSTKNSLTEHQRTHTGEKPTGKK | | | |
| | | | TS | | | |
| gggaaactg | ggg AAA | 950 | LEPGEKPYKCPECGKSFSRSDHL | 1499 | X₁X₂X₃X₄X₅X₆X₇X₈X₉CX₁₀X₁₁CX₁₂X₁₃X₁₄X₁₅X₁₆RSDHLTTHX₁₇X₁₈X₁₉ | 2048 |
| cgggggaac | CTG CGG | | TTHQRTHTGEKPYKCPECGKSFS | | HX₂₀X₂₁X₂₂X₂₃X₂₄X₈X₉CX₁₀X₁₁CX₁₂X₁₃X₁₄X₁₅X₁₆DSGNLRVHX₁₇X₁₈ | |
| tgg | ggg AAC | | DSGNLRVHQRTHTGEKPYKCPEC | | X₁₉HX₂₀X₂₁X₂₂X₂₃X₂₄X₈X₉CX₁₀X₁₁CX₁₂X₁₃X₁₄X₁₅X₁₆RSDKLVRHX₁₇ | |
| | TGG | | GKSFSRSDKLVRHQRTHTGEKPY | | X₁₈X₁₉HX₂₀X₂₁X₂₂X₂₃X₂₄X₈X₉CX₁₀X₁₁CX₁₂X₁₃X₁₄X₁₅X₁₆RSDKLTEH | |
| | | | KCPECGKSFSRSDKLTEHQRTHT | | X₁₇X₁₈X₁₉HX₂₀X₂₁X₂₂X₂₃X₂₄X₈X₉CX₁₀X₁₁CX₁₂X₁₃X₁₄X₁₅X₁₆RNDALT | |
| | | | GEKPYKCPECGKSFSRNDALTEH | | EHX₁₇X₁₈X₁₉HX₂₀X₂₁X₂₂X₂₃X₂₄X₈X₉CX₁₀X₁₁CX₁₂X₁₃X₁₄X₁₅X₁₆QRAN | |
| | | | QRTHTGEKPYKCPECGKSFSQRA | | LRAHX₁₇X₁₈X₁₉HX₂₀X₂₁X₂₂X₂₃X₂₄X₈X₉CX₁₀X₁₁CX₁₂X₁₃X₁₄X₁₅X₁₆RS | |
| | | | NLRAHQRTHTGEKPYKCPECGKS | | DKLVRHX₁₇X₁₈X₁₉HX₂₀X₂₁X₂₂X₂₃X₂₄X₂₅X₂₆X₂₇X₂₈X₂₉X₃₀ | |
| | | | FSRSDKLVRHQRTHTGEKPTGKK | | | |
| | | | TS | | | |
| accgggaaa | ACC ggg | 951 | LEPGEKPYKCPECGKSFSDSGNL | 1500 | X₁X₂X₃X₄X₅X₆X₇X₈X₉CX₁₀X₁₁CX₁₂X₁₃X₁₄X₁₅X₁₆DSGNLRVHX₁₇X₁₈X₁₉ | 2049 |
| ctgcggggg | AAA CTG | | RVHQRTHTGEKPYKCPECGKSFS | | HX₂₀X₂₁X₂₂X₂₃X₂₄X₈X₉CX₁₀X₁₁CX₁₂X₁₃X₁₄X₁₅X₁₆RSDKLVRHX₁₇X₁₈ | |
| aac | CGG ggg | | RSDKLVRHQRTHTGEKPYKCPEC | | X₁₉HX₂₀X₂₁X₂₂X₂₃X₂₄X₈X₉CX₁₀X₁₁CX₁₂X₁₃X₁₄X₁₅X₁₆RSDKLTEHX₁₇ | |
| | AAC | | GKSFSRSDKLTEHQRTHTGEKPY | | X₁₈X₁₉HX₂₀X₂₁X₂₂X₂₃X₂₄X₈X₉CX₁₀X₁₁CX₁₂X₁₃X₁₄X₁₅X₁₆RNDALTEH | |
| | | | KCPECGKSFSRNDALTEHQRTHT | | X₁₇X₁₈X₁₉HX₂₀X₂₁X₂₂X₂₃X₂₄X₈X₉CX₁₀X₁₁CX₁₂X₁₃X₁₄X₁₅X₁₆QRANLR | |
| | | | GEKPYKCPECGKSFSQRANLRAH | | AHX₁₇X₁₈X₁₉HX₂₀X₂₁X₂₂X₂₃X₂₄X₈X₉CX₁₀X₁₁CX₁₂X₁₃X₁₄X₁₅X₁₆RSDK | |
| | | | QRTHTGEKPYKCPECGKSFSRSD | | LVRHX₁₇X₁₈X₁₉HX₂₀X₂₁X₂₂X₂₃X₂₄X₈X₉CX₁₀X₁₁CX₁₂XEX₁₄X₁₅X₁₆DK | |
| | | | KLVRHQRTHTGEKPYKCPECGKS | | KDLTRHX₁₇X₁₈X₁₉HX₂₀X₂₁X₂₂X₂₃X₂₄X₂₅X₂₆X₂₇X₂₈X₂₉X₃₀ | |
| | | | FSDKKDLTRHQRTHTGEKPTGKK | | | |
| | | | TS | | | |
| aaactgcgg | AAA CTG | 952 | LEPGEKPYKCPECGKSFSRKDNL | 1501 | X₁X₂X₃X₄X₅X₆X₇X₈X₉CX₁₀X₁₁CX₁₂X₁₃X₁₄X₁₅X₁₆RKDNLKNHX₁₇X₁₈X₁₉ | 2050 |
| gggaactgg | CGG ggg | | KNHQRTHTGEKPYKCPECGKSFS | | HX₂₀X₂₁X₂₂X₂₃X₂₄X₈X₉CX₁₀X₁₁CX₁₂X₁₃X₁₄X₁₅X₁₆RSDHLTTHX₁₇X₁₈ | |
| aag | AAC TGG | | RSDHLTTHQRTHTGEKPYKCPEC | | X₁₉HX₂₀X₂₁X₂₂X₂₃X₂₄X₈X₉CX₁₀X₁₁CX₁₂X₁₃X₁₄X₁₅X₁₆DSGNLRVHX₁₇ | |
| | AAG | | GKSFSDSGNLRVHQRTHTGEKPY | | X₁₈X₁₉HX₂₀X₂₁X₂₂X₂₃X₂₄X₈X₉CX₁₀X₁₁CX₁₂X₁₃X₁₄X₁₅X₁₆RSDKLVRH | |
| | | | KCPECGKSFSRSDKLVRHQRTHT | | X₁₇X₁₈X₁₉HX₂₀X₂₁X₂₂X₂₃X₂₄X₈X₉CX₁₀X₁₁CX₁₂X₁₃X₁₄X₁₅X₁₆RSDKLT | |
| | | | GEKPYKCPECGKSFSRSDKLTEH | | EHX₁₇X₁₈X₁₉HX₂₀X₂₁X₂₂X₂₃X₂₄X₈X₉CX₁₀X₁₁CX₁₂X₁₃X₁₄X₁₅X₁₆RNDA | |
| | | | QRTHTGEKPYKCPECGKSFSRND | | LTEHX₁₇X₁₈X₁₉HX₂₀X₂₁X₂₂X₂₃X₂₄X₈X₉CX₁₀X₁₁CX₁₂X₁₃X₁₄X₁₅X₁₆QR | |
| | | | ALTEHQRTHTGEKPYKCPECGKS | | ANLRAHX₁₇X₁₈X₁₉HX₂₀X₂₁X₂₂X₂₃X₂₄X₂₅X₂₆X₂₇X₂₈X₂₉X₃₀ | |
| | | | FSQRANLRAHQRTHTGEKPTGKK | | | |
| | | | TS | | | |
| ggaaccggg | GGA ACC | 953 | LEPGEKPYKCPECGKSFSRSDKL | 1502 | X₁X₂X₃X₄X₅X₆X₇X₈X₉CX₁₀X₁₁CX₁₂X₁₃X₁₄X₁₅X₁₆RSDKLVRHX₁₇X₁₈X₁₉ | 2051 |
| aaactgcgg | ggg AAA | | VRHQRTHTGEKPYKCPECGKSFS | | HX₂₀X₂₁X₂₂X₂₃X₂₄X₈X₉CX₁₀X₁₁CX₁₂X₁₃X₁₄X₁₅X₁₆RSDKLTEHX₁₇X₁₈ | |
| ggg | CTG CGG | | RSDKLTEHQRTHTGEKPYKCPEC | | X₁₉HX₂₀X₂₁X₂₂X₂₃X₂₄X₈X₉CX₁₀X₁₁CX₁₂X₁₃X₁₄X₁₅X₁₆RNDALTEHX₁₇ | |
| | GGG | | GKSFSRNDALTEHQRTHTGEKPY | | X₁₈X₁₉HX₂₀X₂₁X₂₂X₂₃X₂₄X₈X₉CX₁₀X₁₁CX₁₂X₁₃X₁₄X₁₅X₁₆QRANLRAH | |
| | | | KCPECGKSFSQRANLRAHQRTHT | | X₁₇X₁₈X₁₉HX₂₀X₂₁X₂₂X₂₃X₂₄X₈X₉CX₁₀X₁₁CX₁₂X₁₃X₁₄X₁₅X₁₆RSDKLV | |
| | | | GEKPYKCPECGKSFSRSDKLVRH | | RHX₁₇X₁₈X₁₉HX₂₀X₂₁X₂₂X₂₃X₂₄X₈X₉CX₁₀X₁₁CX₁₂X₁₃X₁₄X₁₅X₁₆DKKD | |
| | | | QRTHTGEKPYKCPECGKSFSDKK | | LTRHX₁₇X₁₈X₁₉HX₂₀X₂₁X₂₂X₂₃X₂₄X₈X₉CX₁₀X₁₁CX₁₂X₁₃X₁₄X₁₅X₁₆QR | |
| | | | DLTRHQRTHTGEKPYKCPECGKS | | AHLERHX₁₇X₁₈X₁₉HX₂₀X₂₁X₂₂X₂₃X₂₄X₂₅X₂₆X₂₇X₂₈X₂₉X₃₀ | |
| | | | FSQRAHLERHQRTHTGEKPTGKK | | | |
| | | | TS | | | |
| aggggaacc | AGG GGA | 954 | LEPGEKPYKCPECGKSFSRSDKL | 1503 | X₁X₂X₃X₄X₅X₆X₇X₈X₉CX₁₀X₁₁CX₁₂X₁₃X₁₄X₁₅X₁₆RSDKLTEHX₁₇X₁₈X₁₉ | 2052 |
| gggaaactg | ACC ggg | | TEHQRTHTGEKPYKCPECGKSFS | | HX₂₀X₂₁X₂₂X₂₃X₂₄X₈X₉CX₁₀X₁₁CX₁₂X₁₃X₁₄X₁₅X₁₆RNDALTEHX₁₇X₁₈ | |
| cgg | AAA CTG | | RNDALTEHQRTHTGEKPYKCPEC | | X₁₉HX₂₀X₂₁X₂₂X₂₃X₂₄X₈X₉CX₁₀X₁₁CX₁₂X₁₃X₁₄X₁₅X₁₆QRANLRAHX₁₇ | |
| | CGG | | GKSFSQRANLRAHQRTHTGEKPY | | X₁₈X₁₉HX₂₀X₂₁X₂₂X₂₃X₂₄X₈X₉CX₁₀X₁₁CX₁₂X₁₃X₁₄X₁₅X₁₆RSDKLVRH | |
| | | | KCPECGKSFSRSDKLVRHQRTHT | | X₁₇X₁₈X₁₉HX₂₀X₂₁X₂₂X₂₃X₂₄X₈X₉CX₁₀X₁₁CX₁₂X₁₃X₁₄X₁₅X₁₆DKKDLT | |
| | | | GEKPYKCPECGKSFSDKKDLTRH | | RHX₁₇X₁₈X₁₉HX₂₀X₂₁X₂₂X₂₃X₂₄X₈X₉CX₁₀X₁₁CX₁₂X₁₃X₁₄X₁₅X₁₆QRAH | |
| | | | QRTHTGEKPYKCPECGKSFSQRA | | LERHX₁₇X₁₈X₁₉HX₂₀X₂₁X₂₂X₂₃X₂₄X₈X₉CX₁₀X₁₁CX₁₂X₁₃X₁₄X₁₅X₁₆RS | |
| | | | HLERHQRTHTGEKPYKCPECGKS | | DHLTNHX₁₇X₁₈X₁₉HX₂₀X₂₁X₂₂X₂₃X₂₄X₂₅X₂₆X₂₇X₂₈X₂₉X₃₀ | |
| | | | FSRSDHLTNHQRTHTGEKPTGKK | | | |
| | | | TS | | | |
| ctgcggggg | CTG CGG | 955 | LEPGEKPYKCPECGKSFSQRAHL | 1504 | X₁X₂X₃X₄X₅X₆X₇X₈X₉CX₁₀X₁₁CX₁₂X₁₃X₁₄X₁₅X₁₆QPAHLERHX₁₇X₁₈X₁₉ | 2053 |
| aactggaag | ggg AAC | | ERHQRTHTGEKPYKCPECGKSFS | | HX₂₀X₂₁X₂₂X₂₃X₂₄X₈X₉CX₁₀X₁₁CX₁₂X₁X₁₄X₁₅X₁₆RKDNLKNHX₁₇X₁₈ | |
| gga | TGG AAG | | RKDNLKNHQRTHTGEKPYKCPEC | | X₁₉HX₂₀X₂₁X₂₂X₂₃X₂₄X₈X₉CX₁₀X₁₁CX₁₂X₁₃X₁₄X₁₅X₁₆RSDHLTTHX₁₇ | |
| | GGA | | GKSFSRSDHLTTHQRTHTGEKPY | | X₁₈X₁₉HX₂₀X₂₁X₂₂X₂₃X₂₄X₈X₉CX₁₀X₁₁CX₁₂X₁₃X₁₄X₁₅X₁₆DSGNLRVH | |
| | | | KCPECGKSFSDSGNLRVHQRTHT | | X₁₇X₁₈X₁₉HX₂₀X₂₁X₂₂X₂₃X₂₄X₈X₉CX₁₀X₁₁CX₁₂X₁₃X₁₄X₁₅X₁₆RSDKLV | |
| | | | GEKPYKCPECGKSFSRSDKLVRH | | RHX₁₇X₁₈X₁₉HX₂₀X₂₁X₂₂X₂₃X₂₄X₈X₉CX₁₀X₁₁CX₁₂X₁₃X₁₄X₁₅X₁₆RSDK | |
| | | | QRTHTGEKPYKCPECGKSFSRSD | | LTEHX₁₇X₁₈X₁₉HX₂₀X₂₁X₂₂X₂₃X₂₄X₈X₉CX₁₀X₁₁CX₁₂X₁₃X₁₄X₁₅X₁₆RN | |
| | | | KLTEHQRTHTGEKPYKCPECGKS | | DALTEHX₁₇X₁₈X₁₉HX₂₀X₂₁X₂₂X₂₃X₂₄X₂₅X₂₆X₂₇X₂₈X₂₉X₃₀ | |
| | | | FSRNDALTEHQRTHTGEKPTGKK | | | |
| | | | TS | | | |
| cgggggaac | CGG ggg | 956 | LEPGEKPYKCPECGKSFSTSGEL | 1505 | X₁X₂X₃X₄X₅X₆X₇X₈X₉CX₁₀X₁₁CX₁₂X₁₃X₁₄X₁₅X₁₆TSGELVRHX₁₇X₁₈X₁₉ | 2054 |
| tggaaggga | AAC TGG | | VRHQRTHTGEKPYKCPECGKSFS | | HX₂₀X₂₁X₂₂X₂₃X₂₄X₈X₉CX₁₀X₁₁CX₁₂X₁₃X₁₄X₁₅X₁₆QRAHLERHX₁₇X₁₈ | |
| gct | AAG GGA | | QRAHLERHQRTHTGEKPYKCPEC | | X₁₉HX₂₀X₂₁X₂₂X₂₃X₂₄X₈X₉CX₁₀X₁₁CX₁₂X₁₃X₁₄X₁₅X₁₆RKDNLKNHX₁₇ | |
| | GCT | | GKSFSRKDNLKNHQRTHTGEKPY | | X₁₈X₁₉HX₂₀X₂₁X₂₂X₂₃X₂₄X₈X₉CX₁₀X₁₁CX₁₂X₁₃X₁₄X₁₅X₁₆RSDHLTTH | |
| | | | KCPECGKSFSRSDHLTTHQRTHT | | X₁₇X₁₈X₁₉HX₂₀X₂₁X₂₂X₂₃X₂₄X₈X₉CX₁₀X₁₁CX₁₂X₁₃X₁₄X₁₅X₁₆DSGNLR | |
| | | | GEKPYKCPECGKSFSDSGNLRVH | | VHX₁₇X₁₈X₁₉HX₂₀X₂₁X₂₂X₂₃X₂₄X₈X₉CX₁₀X₁₁CX₁₂X₁₃X₁₄X₁₅X₁₆RSDK | |
| | | | QRTHTGEKPYKCPECGKSFSRSD | | LVRHX₁₇X₁₈X₁₉HX₂₀X₂₁X₂₂X₂₃X₂₄X₈X₉CX₁₀X₁₁CX₁₂X₁₃X₁₄X₁₅X₁₆RS | |
| | | | KLVRHQRTHTGEKPYKCPECGKS | | DKLTEHX₁₇X₁₈X₁₉HX₂₀X₂₁X₂₂X₂₃X₂₄X₂₅X₂₆X₂₇X₂₈X₂₉X₃₀ | |
| | | | FSRSDKLTEHQRTHTGEKPTGKK | | | |
| | | | TS | | | |
| cccagggga | CCC AGG | 957 | LEPGEKPYKCPECGKSFSRNDAL | 1506 | X₁X₂X₃X₄X₅X₆X₇X₈X₉CX₁₀X₁₁CX₁₂X₁₃X₁₄X₁₅X₁₆RNDALTEHX₁₇X₁₈X₁₉ | 2055 |
| accgggaaa | GGA ACC | | TEHQRTHTGEKPYKCPECGKSFS | | HX₂₀X₂₁X₂₂X₂₃X₂₄X₈X₉CX₁₀X₁₁CX₁₂X₁₃X₁₄X₁₅X₁₆QRANLRAHX₁₇X₁₈ | |
| ctg | ggg AAA | | QRANLRAHQRTHTGEKPYKCPEC | | X₁₉HX₂₀X₂₁X₂₂X₂₃X₂₄X₈X₉CX₁₀X₁₁CX₁₂X₁₃X₁₄X₁₅X₁₆RSDKLVRHX₁₇ | |
| | CTG | | GKSFSRSDKLVRHQRTHTGEKPY | | X₁₈X₁₉HX₂₀X₂₁X₂₂X₂₃X₂₄X₈X₉CX₁₀X₁₁CX₁₂X₁₃X₁₄X₁₅X₁₆DKKDLTRH | |
| | | | KCPECGKSFSDKKDLTRHQRTHT | | X₁₇X₁₈X₁₉HX₂₀X₂₁X₂₂X₂₃X₂₄X₈X₉CX₁₀X₁₁CX₁₂X₁₃X₁₄X₁₅X₁₆QRAHLE | |
| | | | GEKPYKCPECGKSFSQRAHLERH | | RHX₁₇X₁₈X₁₉HX₂₀X₂₁X₂₂X₂₃X₂₄X₈X₉CX₁₀X₁₁CX₁₂X₁₃X₁₄X₁₅X₁₆RSDH | |
| | | | QRTHTGEKPYKCPECGKSFSRSD | | LTNHX₁₇X₁₈X₁₉HX₂₀X₂₁X₂₂X₂₃X₂₄X₈X₉CX₁₀X₁₁CX₁₂X₁₃X₁₄X₁₅X₁₆SK | |
| | | | HLTNHQRTHTGEKPYKCPECGKS | | KHLAEHX₁₇X₁₈X₁₉HX₂₀X₂₁X₂₂X₂₃X₂₄X₂₅X₂₆X₂₇X₂₈X₂₉X₃₀ | |
| | | | FSSKKHLAEHQRTHTGEKPTGKK | | | |
| | | | TS | | | |
| gctcccagg | GCT CCC | 958 | LEPGEKPYKCPECGKSFSQRANL | 1507 | X₁X₂X₃X₄X₅X₆X₇X₈X₉CX₁₀X₁₁CX₁₂X₁₃X₁₄X₁₅X₁₆QRANLRAHX₁₇X₁₈X₁₉ | 2056 |
| ggaaccggg | AGG GGA | | RAHQRTHTGEKPYKCPECGKSFS | | HX₂₀X₂₁X₂₂X₂₃X₂₄X₈X₉CX₁₀X₁₁CX₁₂X₁₃X₁₄X₁₅X₁₆RSDKLVRHX₁₇X₁₈ | |
| aaa | ACC ggg | | RSDKLVRHQRTHTGEKPYKCPEC | | X₁₉HX₂₀X₂₁X₂₂X₂₃X₂₄X₈X₉CX₁₀X₁₁CX₁₂X₁₃X₁₄X₁₅X₁₆DKKDLTRHX₁₇ | |
| | AAA | | GKSFSDKKDLTRHQRTHTGEKPY | | X₁₈X₁₉HX₂₀X₂₁X₂₂X₂₃X₂₄X₈X₉CX₁₀X₁₁CX₁₂X₁₃X₁₄X₁₅X₁₆QRAHLERH | |
| | | | KCPECGKSFSQRAHLERHQRTHT | | X₁₇X₁₈X₁₉HX₂₀X₂₁X₂₂X₂₃X₂₄X₈X₉CX₁₀X₁₁CX₁₂X₁₃X₁₄X₁₅X₁₆RSDHLT | |
| | | | GEKPYKCPECGKSFSRSDHLTNH | | NHX₁₇X₁₈X₁₉HX₂₀X₂₁X₂₂X₂₃X₂₄X₈X₉CX₁₀X₁₁CX₁₂X₁₃X₁₄X₁₅X₁₆SKKH | |
| | | | QRTHTGEKPYKCPECGKSFSSKK | | LAEHX₁₇X₁₈X₁₉HX₂₀X₂₁X₂₂X₂₃X₂₄X₈X₉CX₁₀X₁₁CX₁₂X₁₃X₁₄X₁₅X₁₆TS | |
| | | | HLAEHQRTHTGEKPYKCPECGKS | | GELVRHX₁₇X₁₈X₁₉HX₂₀X₂₁X₂₂X₂₃X₂₄X₂₅X₂₆X₂₇X₂₈X₂₉X₃₀ | |
| | | | FSTSGELVRHQRTHTGEKPTGKK | | | |
| | | | TS | | | |
| gggaactgg | ggg AAC | 959 | LEPGEKPYKCPECGKSFSSKKHL | 1508 | X₁X₂X₃X₄X₅X₆X₇X₈X₉CX₁₀X₁₁CX₁₂X₁₃X₁₄X₁₅X₁₆SKKHLAEHX₁₇X₁₈X₁₉ | 2057 |
| aagggagct | TGG AAG | | AEHQRTHTGEKPYKCPECGKSFS | | HX₂₀X₂₁X₂₂X₂₃X₂₄X₈X₉CX₁₀X₁₁CX₁₂X₁₃X₁₄X₁₅X₁₆TSGELVRHX₁₇X₁₈ | |
| ccc | GGA GCT | | TSGELVRHQRTHTGEKPYKCPEC | | X₁₉HX₂₀X₂₁X₂₂X₂₃X₂₄X₈X₉CX₁₀X₁₁CX₁₂X₁₃X₁₄X₁₅X₁₆QRAHLERHX₁₇ | |
| | CCC | | GKSFSQRAHLERHQRTHTGEKPY | | X₁₈X₁₉HX₂₀X₂₁X₂₂X₂₃X₂₄X₈X₉CX₁₀X₁₁CX₁₂X₁₃X₁₄X₁₅X₁₆RKDNLKNH | |
| | | | KCPECGKSFSRKDNLKNHQRTHT | | X₁₇X₁₈X₁₉HX₂₀X₂₁X₂₂X₂₃X₂₄X₈X₉CX₁₀X₁₁CX₁₂X₁₃X₁₄X₁₅X₁₆RSDHLT | |
| | | | GEKPYKCPECGKSFSRSDHLTTH | | THX₁₇X₁₈X₁₉HX₂₀X₂₁X₂₂X₂₃X₂₄X₈X₉CX₁₀X₁₁CX₁₂X₁₃X₁₄X₁₅X₁₆DSGN | |
| | | | QRTHTGEKPYKCPECGKSFSDSG | | LRVHX₁₇X₁₈X₁₉HX₂₀X₂₁X₂₂X₂₃X₂₄X₈X₉CX₁₀X₁₁CX₁₂X₁₃X₁₄X₁₅X₁₆RS | |
| | | | NLRVHQRTHTGEKPYKCPECGKS | | DKLVRHX₁₇X₁₈X₁₉HX₂₀X₂₁X₂₂X₂₃X₂₄X₂₅X₂₆X₂₇X₂₈X₂₉X₃₀ | |
| | | | FSRSDKLVRHQRTHTGEKPTGKK | | | |
| | | | TS | | | |
| aactggaag | AAC TGG | 960 | LEPGEKPYKCPECGKSFSQLAHL | 1509 | X₁X₂X₃X₄X₅X₆X₇X₈X₉CX₁₀X₁₁CX₁₂X₁₃X₁₄X₁₅X₁₆QLAHLRAHX₁₇X₁₈X₁₉ | 2058 |
| ggagctccc | AAG GGA | | RAHQRTHTGEKPYKCPECGKSFS | | HX₂₀X₂₁X₂₂X₂₃X₂₄X₈X₉CX₁₀X₁₁CX₁₂X₁₃X₁₄X₁₅X₁₆SKKHLAEHX₁₇X₁₈ | |
| aga | GCT CCC | | SKKHLAEHQRTHTGEKPYKCPEC | | X₁₉HX₂₀X₂₁X₂₂X₂₃X₂₄X₈X₉CX₁₀X₁₁CX₁₂X₁₃X₁₄X₁₅X₁₆TSGELVRHX₁₇ | |
| | AGA | | GKSFSTSGELVRHQRTHTGEKPY | | X₁₈X₁₉HX₂₀X₂₁X₂₂X₂₃X₂₄X₈X₉CX₁₀X₁₁CX₁₂X₁₃X₁₄X₁₅X₁₆QRAHLERH | |
| | | | KCPECGKSFSQRAHLERHQRTHT | | X₁₇X₁₈X₁₉HX₂₀X₂₁X₂₂X₂₃X₂₄X₈X₉CX₁₀X₁₁CX₁₂X₁₃X₁₄X₁₅X₁₆RKDNLK | |
| | | | GEKPYKCPECGKSFSRKDNLKNH | | NHX₁₇X₁₈X₁₉HX₂₀X₂₁X₂₂X₂₃X₂₄X₈X₉CX₁₀X₁₁CX₁₂X₁₃X₁₄X₁₅X₁₆RSDH | |
| | | | QRTHTGEKPYKCPECGKSFSRSD | | LTTHX₁₇X₁₈X₁₉HX₂₀X₂₁X₂₂X₂₃X₂₄X₈X₉CX₁₀X₁₁CX₁₂X₁₃X₁₄X₁₅X₁₆DS | |
| | | | HLTTHQRTHTGEKPYKCPECGKS | | GNLRVHX₁₇X₁₈X₁₉HX₂₀X₂₁X₂₂X₂₃X₂₄X₂₅X₂₆X₂₇X₂₈X₂₉X₃₀ | |
| | | | FSDSGNLRVHQRTHTGEKPTGKK | | | |
| | | | TS | | | |
| tggaaggga | TGG AAG | 961 | LEPGEKPYKCPECGKSFSSPADL | 1510 | X₁X₂X₃X₄X₅X₆X₇X₈X₉CX₁₀X₁₁CX₁₂X₁₃X₁₄X₁₅X₁₆SPADLTRHX₁₇X₁₈X₁₉ | 2059 |
| gctcccaga | GGA GCT | | TRHQRTHTGEKPYKCPECGKSFS | | HX₂₀X₂₁X₂₂X₂₃X₂₄X₈X₉CX₁₀X₁₁CX₁₂X₁₃X₁₄X₁₅X₁₆QLAHLRAHX₁₇X₁₈ | |
| aca | CCC AGA | | QLAHLRAHQRTHTGEKPYKCPEC | | X₁₉HX₂₀X₂₁X₂₂X₂₃X₂₄X₈X₉CX₁₀X₁₁CX₁₂X₁₃X₁₄X₁₅X₁₆SKKHLAEHX₁₇ | |
| | ACA | | GKSFSSKKHLAEHQRTHTGEKPY | | X₁₈X₁₉HX₂₀X₂₁X₂₂X₂₃X₂₄X₈X₉CX₁₀X₁₁CX₁₂X₁₃X₁₄X₁₅X₁₆TSGELVRH | |
| | | | KCPECGKSFSTSGELVRHQRTHT | | X₁₇X₁₈X₁₉HX₂₀X₂₁X₂₂X₂₃X₂₄X₈X₉CX₁₀X₁₁CX₁₂X₁₃X₁₄X₁₅X₁₆QRAHLE | |
| | | | GEKPYKCPECGKSFSQRAHLERH | | RHX₁₇X₁₈X₁₉HX₂₀X₂₁X₂₂X₂₃X₂₄X₈X₉CX₁₀X₁₁CX₁₂X₁₃X₁₄X₁₅X₁₆RKDN | |
| | | | QRTHTGEKPYKCPECGKSFSRKD | | LKNHX₁₇X₁₈X₁₉HX₂₀X₂₁X₂₂X₂₃X₂₄X₈X₉CX₁₀X₁₁CX₁₂X₁₃X₁₄X₁₅X₁₆RS | |
| | | | NLKNHQRTHTGEKPYKCPECGKS | | DHLTTHX₁₇X₁₈X₁₉HX₂₀X₂₁X₂₂X₂₃X₂₄X₂₅X₂₆X₂₇X₂₈X₂₉X₃₀ | |
| | | | FSRSDHLTTHQRTHTGEKPTGKK | | | |
| | | | TS | | | |
| aagggagct | AAG GGA | 962 | LEPGEKPYKCPECGKSFSRSDHL | 1511 | X₁X₂X₃X₄X₅X₆X₇X₈X₉CX₁₀X₁₁CX₁₂X₁₃X₁₄X₁₅X₁₆RSDHLTNHX₁₇X₁₈X₁₉ | 2060 |
| cccagaaca | GCT CCC | | TNHQRTHTGEKPYKCPECGKSFS | | HX₂₀X₂₁X₂₂X₂₃X₂₄X₈X₉CX₁₀X₁₁CX₁₂X₁₃X₁₄X₁₅X₁₆SPADLTRHX₁₇X₁₈ | |
| agg | AGA ACA | | SPADLTRHQRTHTGEKPYKCPEC | | X₁₉HX₂₀X₂₁X₂₂X₂₃X₂₄X₈X₉CX₁₀X₁₁CX₁₂X₁₃X₁₄X₁₅X₁₆QLAHLRAHX₁₇ | |
| | AGG | | GKSFSQLAHLRAHQRTHTGEKPY | | X₁₈X₁₉HX₂₀X₂₁X₂₂X₂₃X₂₄X₈X₉CX₁₀X₁₁CX₁₂X₁₃X₁₄X₁₅X₁₆SKKHLAEH | |
| | | | KCPECGKSFSSKKHLAEHQRTHT | | X₁₇X₁₈X₁₉HX₂₀X₂₁X₂₂X₂₃X₂₄X₈X₉CX₁₀X₁₁CX₁₂X₁₃X₁₄X₁₅X₁₆TSGELV | |
| | | | GEKPYKCPECGKSFSTSGELVRH | | RHX₁₇X₁₈X₁₉HX₂₀X₂₁X₂₂X₂₃X₂₄X₈X₉CX₁₀X₁₁CX₁₂X₁₃X₁₄X₁₅X₁₆QRAH | |
| | | | QRTHTGEKPYKCPECGKSFSQRA | | LERHX₁₇X₁₈X₁₉HX₂₀X₂₁X₂₂X₂₃X₂₄X₈X₉CX₁₀X₁₁CX₁₂X₁₃X₁₄X₁₅X₁₆RK | |
| | | | HLERHQRTHTGEKPYKCPECGKS | | DNLKNHX₁₇X₁₈X₁₉HX₂₀X₂₁X₂₂X₂₃X₂₄X₂₅X₂₆X₂₇X₂₈X₂₉X₃₀ | |
| | | | FSRKDNLKNHQRTHTGEKPTGKK | | | |
| | | | TS | | | |
| caggggaac | CAG ggg | 963 | LEPGEKPYKCPECGKSFSRSDDL | 1512 | X₁X₂X₃X₄X₅X₆X₇X₈X₉CX₁₀X₁₁CX₁₂X₁₃X₁₄X₁₅X₁₆RSDDLVRHX₁₇X₁₈X₁₉ | 2061 |
| cgggaaact | AAC CGG | | VRHQRTHTGEKPYKCPECGKSFS | | HX₂₀X₂₁X₂₂X₂₃X₂₄X₈X₉CX₁₀X₁₁CX₁₂X₁₃X₁₄X₁₅X₁₆THLDLIRHX₁₇X₁₈ | |
| gcg | GAA ACT | | THLDLIRHQRTHTGEKPYKCPEC | | X₁₉HX₂₀X₂₁X₂₂X₂₃X₂₄X₈X₉CX₁₀X₁₁CX₁₂X₁₃X₁₄X₁₅X₁₆QSSNLVRHX₁₇ | |
| | GCG | | GKSFSQSSNLVRHQRTHTGEKPY | | X₁₈X₁₉HX₂₀X₂₁X₂₂X₂₃X₂₄X₈X₉CX₁₀X₁₁CX₁₂X₁₃X₁₄X₁₅X₁₆RSDKLTEH | |
| | | | KCPECGKSFSRSDKLTEHQRTHT | | X₁₇X₁₈X₁₉HX₂₀X₂₁X₂₂X₂₃X₂₄X₈X₉CX₁₀X₁₁CX₁₂X₁₃X₁₄X₁₅X₁₆DSGNLR | |
| | | | GEKPYKCPECGKSFSDSGNLRVH | | VHX₁₇X₁₈X₁₉HX₂₀X₂₁X₂₂X₂₃X₂₄X₈X₉CX₁₀X₁₁CX₁₂X₁₃X₁₄X₁₅X₁₆RSDK | |
| | | | QRTHTGEKPYKCPECGKSFSRSD | | LVRHX₁₇X₁₈X₁₉HX₂₀X₂₁X₂₂X₂₃X₂₄X₈X₉CX₁₀X₁₁CX₁₂X₁₃X₁₄X₁₅X₁₆RA | |
| | | | KLVRHQRTHTGEKPYKCPECGKS | | DNLTEHX₁₇X₁₈X₁₉HX₂₀X₂₁X₂₂X₂₃X₂₄X₂₅X₂₆X₂₇X₂₈X₂₉X₃₀ | |
| | | | FSRADNLTEHQRTHTGEKPTGKK | | | |
| | | | TS | | | |
| gggaaccgg | ggg AAC | 964 | LEPGEKPYKCPECGKSFSRSDKL | 1513 | X₁X₂X₃X₄X₅X₆X₇X₈X₉CX₁₀X₁₁CX₁₂X₁₃X₁₄X₁₅X₁₆RSDKLVRHX₁₇X₁₈X₁₉ | 2062 |
| gaaactgcg | CGG GAA | | VRHQRTHTGEKPYKCPECGKSFS | | HX₂₀X₂₁X₂₂X₂₃X₂₄X₈X₉CX₁₀X₁₁CX₁₂X₁₃X₁₄X₁₅X₁₆RSDDLVRHX₁₇X₁₈ | |
| ggg | ACT GCG | | RSDDLVRHQRTHTGEKPYKCPEC | | X₁₉HX₂₀X₂₁X₂₂X₂₃X₂₄X₈X₉CX₁₀X₁₁CX₁₂X₁₃X₁₄X₁₅X₁₆THLDLTRHX₁₇ | |
| | GGG | | GKSFSTHLDLIRHQRTHTGEKPY | | X₁₈X₁₉HX₂₀X₂₁X₂₂X₂₃X₂₄X₈X₉CX₁₀X₁₁CX₁₂X₁₃X₁₄X₁₅X₁₆QSSNLVRH | |
| | | | KCPECGKSFSQSSNLVRHQRTHT | | X₁₇X₁₈X₁₉HX₂₀X₂₁X₂₂X₂₃X₂₄X₈X₉CX₁₀X₁₁CX₁₂X₁₃X₁₄X₁₅X₁₆RSDKLT | |
| | | | GEKPYKCPECGKSFSRSDKLTEH | | EHX₁₇X₁₈X₁₉HX₂₀X₂₁X₂₂X₂₃X₂₄X₈X₉CX₁₀X₁₁CX₁₂X₁₃X₁₄X₁₅X₁₆DSGN | |
| | | | QRTHTGEKPYKCPECGKSFSDSG | | LRVHX₁₇X₁₈X₁₉HX₂₀X₂₁X₂₂X₂₃X₂₄X₈X₉CX₁₀X₁₁CX₁₂X₁₃X₁₄X₁₅X₁₆RS | |
| | | | NLRVHQRTHTGEKPYKCPECGKS | | DKLVRHX₁₇X₁₈X₁₉HX₂₀X₂₁X₂₂X₂₃X₂₄X₂₅X₂₆X₂₇X₂₈X₂₉X₃₀ | |
| | | | FSRSDKLVRHQRTHTGEKPTGKK | | | |
| | | | TS | | | |
| aaccgggaa | AAC CGG | 965 | LEPGEKPYKCPECGKSFSQSSNL | 1514 | X₁X₂X₃X₄X₅X₆X₇X₈X₉CX₁₀X₁₁CX₁₂X₁₃X₁₄X₁₅X₁₆QSSNLVRHX₁₇X₁₈X₁₉ | 2063 |
| actgcgggg | GAA ACT | | VRHQRTHTGEKPYKCPECGKSFS | | HX₂₀X₂₁X₂₂X₂₃X₂₄X₈X₉CX₁₀X₁₁CX₁₂X₁₃X₁₄X₁₅X₁₆RSDKLVRHX₁₇X₁₈ | |
| gaa | GCG GGG | | RSDKLVRHQRTHTGEKPYKCPEC | | X₁₉HX₂₀X₂₁X₂₂X₂₃X₂₄X₈X₉CX₁₀X₁₁CX₁₂X₁₃X₁₄X₁₅X₁₆RSDDLVRHX₁₇ | |
| | GAA | | GKSFSRSDDLVRHQRTHTGEKPY | | X₁₈X₁₉HX₂₀X₂₁X₂₂X₂₃X₂₄X₈X₉CX₁₀X₁₁CX₁₂X₁₃X₁₄X₁₅X₁₆THLDLIRH | |
| | | | KCPECGKSFSTHLDLIRHQRTHT | | X₁₇X₁₈X₁₉HX₂₀X₂₁X₂₂X₂₃X₂₄X₈X₉CX₁₀X₁₁CX₁₂X₁₃X₁₄X₁₅X₁₆QSSNLV | |
| | | | GEKPYKCPECGKSFSQSSNLVRH | | RHX₁₇X₁₈X₁₉HX₂₀X₂₁X₂₂X₂₃X₂₄X₈X₉CX₁₀X₁₁CX₁₂X₁₃X₁₄X₁₅X₁₆RSDK | |
| | | | QRTHTGEKPYKCPECGKSFSRSD | | LTEHX₁₇X₁₈X₁₉HX₂₀X₂₁X₂₂X₂₃X₂₄X₈X₉CX₁₀X₁₁CX₁₂X₁₃X₁₄X₁₅X₁₆DS | |
| | | | KLTEHQRTHTGEKPYKCPECGKS | | GNLRVHX₁₇X₁₈X₁₉HX₂₀X₂₁X₂₂X₂₃X₂₄X₂₅X₂₆X₂₇X₂₈X₂₉X₃₀ | |
| | | | FSDSGNLRVHQRTHTGEKPTGKK | | | |
| | | | TS | | | |
| gcgggggaa | GCG GGG | 966 | LEPGEKPYKCPECGKSFSERSHL | 1515 | X₁X₂X₃X₄X₅X₆X₇X₈X₉CX₁₀X₁₁CX₁₂X₁₃X₁₄X₁₅X₁₆ERSHLREHX₁₇X₁₈X₁₉ | 2064 |
| ctggaaggg | GAA CTG | | REHQRTHTGEKPYKCPECGKSFS | | HX₂₀X₂₁X₂₂X₂₃X₂₄X₈X₉CX₁₀X₁₁CX₁₂X₁₃X₁₄X₁₅X₁₆RSDKLVRHX₁₇X₁₈ | |
| agc | GAA ggg | | RSDKLVRHQRTHTGEKPYKCPEC | | X₁₉HX₂₀X₂₁X₂₂X₂₃X₂₄X₈X₉CX₁₀X₁₁CX₁₂X₁₃X₁₄X₁₅X₁₆QSSNLVRHX₁₇ | |
| | AGC | | GKSFSQSSNLVRHQRTHTGEKPY | | X₁₈X₁₉HX₂₀X₂₁X₂₂X₂₃X₂₄X₈X₉CX₁₀X₁₁CX₁₂X₁₃X₁₄X₁₅X₁₆RNDALTEH | |
| | | | KCPECGKSFSRNDALTEHQRTHT | | X₁₇X₁₈X₁₉HX₂₀X₂₁X₂₂X₂₃X₂₄X₈X₉CX₁₀X₁₁CX₁₂X₁₃X₁₄X₁₅X₁₆QSSNLV | |
| | | | GEKPYKCPECGKSFSQSSNLVRH | | RHX₁₇X₁₈X₁₉HX₂₀X₂₁X₂₂X₂₃X₂₄X₈X₉CX₁₀X₁₁CX₁₂X₁₃X₁₄X₁₅X₁₆RSDK | |
| | | | QRTHTGEKPYKCPECGKSFSRSD | | LVRHX₁₇X₁₈X₁₉HX₂₀X₂₁X₂₂X₂₃X₂₄X₈X₉CX₁₀X₁₁CX₁₂X₁₃X₁₄X₁₅X₁₆RS | |
| | | | KLVRHQRTHTGEKPYKCPECGKS | | DDLVRHX₁₇X₁₈X₁₉HX₂₀X₂₁X₂₂X₂₃X₂₄X₂₅X₂₆X₂₇X₂₈X₂₉X₃₀ | |
| | | | FSRSDDLVRHQRTHTGEKPTGKK | | | |
| | | | TS | | | |
| actgcgggg | ACT GCG | 967 | LEPGEKPYKCPECGKSFSRSDKL | 1516 | X₁X₂X₃X₄X₅X₆X₇X₈X₉CX₁₀X₁₁CX₁₂X₁₃X₁₄X₁₅X₁₆RSDKLVRHX₁₇X₁₈X₁₉ | 2065 |
| gaactggaa | GGG GAA | | VRHQRTHTGEKPYKCPECGKSFS | | HX₂₀X₂₁X₂₂X₂₃X₂₄X₈X₉CX₁₀X₁₁CX₁₂X₁₃X₁₄X₁₅X₁₆QSSNLVRHX₁₇X₁₈ | |
| ggg | CTG GAA | | QSSNLVRHQRTHTGEKPYKCPEC | | X₁₉HX₂₀X₂₁X₂₂X₂₃X₂₄X₈X₉CX₁₀X₁₁CX₁₂X₁₃X₁₄X₁₅X₁₆RNDALTEHX₁₇ | |
| | GGG | | GKSFSRNDALTEHQRTHTGEKPY | | X₁₈X₁₉HX₂₀X₂₁X₂₂X₂₃X₂₄X₈X₉CX₁₀X₁₁CX₁₂X₁₃X₁₄X₁₅X₁₆QSSNLVRH | |
| | | | KCPECGKSFSQSSNLVRHQRTHT | | X₁₇X₁₈X₁₉HX₂₀X₂₁X₂₂X₂₃X₂₄X₈X₉CX₁₀X₁₁CX₁₂X₁₃X₁₄X₁₅X₁₆RSDKLV | |
| | | | GEKPYKCPECGKSFSRSDKLVRH | | RHX₁₇X₁₈X₁₉HX₂₀X₂₁X₂₂X₂₃X₂₄X₈X₉CX₁₀X₁₁CX₁₂X₁₃X₁₄X₁₅X₁₆RSDD | |
| | | | QRTHTGEKPYKCPECGKSFSRSD | | LVRHX₁₇X₁₈X₁₉HX₂₀X₂₁X₂₂X₂₃X₂₄X₈X₉CX₁₀X₁₁CX₁₂X₁₃X₁₄X₁₅X₁₆TH | |
| | | | DLVRHQRTHTGEKPYKCPECGKS | | LDLIRHX₁₇X₁₈X₁₉HX₂₀X₂₁X₂₂X₂₃X₂₄X₂₅X₂₆X₂₇X₂₈X₂₉X₃₀ | |
| | | | FSTHLDLIRHQRTHTGEKPTGKK | | | |
| | | | TS | | | |
| cgggaaact | CGG GAA | 968 | LEPGEKPYKCPECGKSFSRNDAL | 1517 | X₁X₂X₃X₄X₅X₆X₇X₈X₉CX₁₀X₁₁CX₁₂X₁₃X₁₄X₁₅X₁₆RNDALTEHX₁₇X₁₈X₁₉ | 2066 |
| gcgggggaa | ACT GCG | | TEHQRTHTGEKPYKCPECGKSFS | | HX₂₀X₂₁X₂₂X₂₃X₂₄X₈X₉CX₁₀X₁₁CX₁₂X₁₃X₁₄X₁₅X₁₆QSSNLVRHX₁₇X₁₈ | |
| ctg | GGG GAA | | QSSNLVRHQRTHTGEKPYKCPEC | | X₁₉HX₂₀X₂₁X₂₂X₂₃X₂₄X₈X₉CX₁₀X₁₁CX₁₂X₁₃X₁₄X₁₅X₁₆RSDKLVRHX₁₇ | |
| | CTG | | GKSFSRSDKLVRHQRTHTGEKPY | | X₁₈X₁₉HX₂₀X₂₁X₂₂X₂₃X₂₄X₈X₉CX₁₀X₁₁CX₁₂X₁₃X₁₄X₁₅X₁₆RSDDLVRH | |
| | | | KCPECGKSFSRSDDLVRHQRTHT | | X₁₇X₁₈X₁₉HX₂₀X₂₁X₂₂X₂₃X₂₄X₈X₉CX₁₀X₁₁CX₁₂X₁₃X₁₄X₁₅X₁₆THLDLI | |
| | | | GEKPYKCPECGKSFSTHLDLIRH | | RHX₁₇X₁₈X₁₉HX₂₀X₂₁X₂₂X₂₃X₂₄X₈X₉CX₁₀X₁₁CX₁₂X₁₃X₁₄X₁₅X₁₆QSSN | |
| | | | QRTHTGEKPYKCPECGKSFSQSS | | LVRHX₁₇X₁₈X₁₉HX₂₀X₂₁X₂₂X₂₃X₂₄X₈X₉CX₁₀X₁₁CX₁₂X₁₃X₁₄X₁₅X₁₆RS | |
| | | | NLVRHQRTHTGEKPYKCPECGKS | | DKLTEHX₁₇X₁₈X₁₉HX₂₀X₂₁X₂₂X₂₃X₂₄X₂₅X₂₆X₂₇X₂₈X₂₉X₃₀ | |
| | | | FSRSDKLTEHQRTHTGEKPTGKK | | | |
| | | | TS | | | |
| gaaactgcg | GAA ACT | 969 | LEPGEKPYKCPECGKSFSQSSNL | 1518 | X₁X₂X₃X₄X₅X₆X₇X₈X₉CX₁₀X₁₁CX₁₂X₁₃X₁₄X₁₅X₁₆QSSNLVRHX₁₇X₁₈X₁₉ | 2067 |
| ggggaactg | GCG GGG | | VRHQRTHTGEKPYKCPECGKSFS | | HX₂₀X₂₁X₂₂X₂₃X₂₄X₈X₉CX₁₀X₁₁CX₁₂X₁₃X₁₄X₁₅X₁₆RNDALTEHX₁₇X₁₈ | |
| gaa | GAA CTG | | RNDALTEHQRTHTGEKPYKCPEC | | X₁₉HX₂₀X₂₁X₂₂X₂₃X₂₄X₈X₉CX₁₀X₁₁CX₁₂X₁₃X₁₄X₁₅X₁₆QSSNLVRHX₁₇ | |
| | GAA | | GKSFSQSSNLVRHQRTHTGEKPY | | X₁₈X₁₉HX₂₀X₂₁X₂₂X₂₃X₂₄X₈X₉CX₁₀X₁₁CX₁₂X₁₃X₁₄X₁₅X₁₆RSDKLVRH | |
| | | | KCPECGKSFSRSDKLVRHQRTHT | | X₁₇X₁₈X₁₉HX₂₀X₂₁X₂₂X₂₃X₂₄X₈X₉CX₁₀X₁₁CX₁₂X₁₃X₁₄X₁₅X₁₆RSDDLV | |
| | | | GEKPYKCPECGKSFSRSDDLVRH | | RHX₁₇X₁₈X₁₉HX₂₀X₂₁X₂₂X₂₃X₂₄X₈X₉CX₁₀X₁₁CX₁₂X₁₃X₁₄X₁₅X₁₆THLD | |
| | | | QRTHTGEKPYKCPECGKSFSTHL | | LIRHX₁₇X₁₈X₁₉HX₂₀X₂₁X₂₂X₂₃X₂₄X₈X₉CX₁₀X₁₁CX₁₂X₁₃X₁₄X₁₅X₁₆QS | |
| | | | DLIRHQRTHTGEKPYKCPECGKS | | SNLVRHX₁₇X₁₈X₁₉HX₂₀X₂₁X₂₂X₂₃X₂₄X₂₅X₂₆X₂₇X₂₈X₂₉X₃₀ | |
| | | | FSQSSNLVRHQRTHTGEKPTGKK | | | |
| | | | TS | | | |
| catctgggg | CAT CTG | 970 | LEPGEKPYKCPECGKSFSREDNL | 1519 | X₁X₂X₃X₄X₅X₆X₇X₈X₉CX₁₀X₁₁CX₁₂X₁₃X₁₄X₁₅X₁₆REDNLHTHX₁₇X₁₈X₁₉ | 2068 |
| cctgggatt | ggg CCT | | HTHQRTHTGEKPYKCPECGKSFS | | HX₂₀X₂₁X₂₂X₂₃X₂₄X₈X₉CX₁₀X₁₁CX₁₂X₁₃X₁₄X₁₅X₁₆HKNALQNHX₁₇X₁₈ | |
| tag | ggg ATT | | HKNALQNHQRTHTGEKPYKCPEC | | X₁₉HX₂₀X₂₁X₂₂X₂₃X₂₄X₈X₉CX₁₀X₁₁CX₁₂X₁₃X₁₄X₁₅X₁₆RSDKLVRHX₁₇ | |
| | TAG | | GKSFSRSDKLVRHQRTHTGEKPY | | X₁₈X₁₉HX₂₀X₂₁X₂₂X₂₃X₂₄X₈X₉CX₁₀X₁₁CX₁₂X₁₃X₁₄X₁₅X₁₆TKNSLTEH | |
| | | | KCPECGKSFSTKNSLTEHQRTHT | | X₁₇X₁₈X₁₉HX₂₀X₂₁X₂₂X₂₃X₂₄X₈X₉CX₁₀X₁₁CX₁₂X₁₃X₁₄X₁₅X₁₆RSDKLV | |
| | | | GEKPYKCPECGKSFSRSDKLVRH | | RHX₁₇X₁₈X₁₉HX₂₀X₂₁X₂₂X₂₃X₂₄X₈X₉CX₁₀X₁₁CX₁₂X₁₃X₁₄X₁₅X₁₆RNDA | |
| | | | QRTHTGEKPYKCPECGKSFSRND | | LTEHX₁₇X₁₈X₁₉HX₂₀X₂₁X₂₂X₂₃X₂₄X₈X₉CX₁₀X₁₁CX₁₂X₁₃X₁₄X₁₅X₁₆TS | |
| | | | ALTEHQRTHTGEKPYKCPECGKS | | GNLTEHX₁₇X₁₈X₁₉HX₂₀X₂₁X₂₂X₂₃X₂₄X₂₅X₂₆X₂₇X₂₈X₂₉X₃₀ | |
| | | | FSTSGNLTEHQRTHTGEKPTGKK | | | |
| | | | TS | | | |
| gattggcat | GAT TGG | 971 | LEPGEKPYKCPECGKSFSRSDKL | 1520 | X₁X₂X₃X₄X₅X₆X₇X₈X₉CX₁₀X₁₁CX₁₂X₁₃X₁₄X₁₅X₁₆RSDKLVRHX₁₇X₁₈X₁₉ | 2069 |
| ctggggcct | CAT CTG | | VRHQRTHTGEKPYKCPECGKSFS | | HX₂₀X₂₁X₂₂X₂₃X₂₄X₈X₉CX₁₀X₁₁CX₁₂X₁₃X₁₄X₁₅X₁₆TKNSLTEHX₁₇X₁₈ | |
| ggg | ggg CCT | | TKNSLTEHQRTHTGEKPYKCPEC | | X₁₉HX₂₀X₂₁X₂₂X₂₃X₂₄X₈X₉CX₁₀X₁₁CX₁₂X₁₃X₁₄X₁₅X₁₆RSDKLVRHX₁₇ | |
| | GGG | | GKSFSRSDKLVRHQRTHTGEKPY | | X₁₈X₁₉HX₂₀X₂₁X₂₂X₂₃X₂₄X₈X₉CX₁₀X₁₁CX₁₂X₁₃X₁₄X₁₅X₁₆RNDALTEH | |
| | | | KCPECGKSFSRNDALTEHQRTHT | | X₁₇X₁₈X₁₉HX₂₀X₂₁X₂₂X₂₃X₂₄X₈X₉CX₁₀X₁₁CX₁₂X₁₃X₁₄X₁₅X₁₆TSGNLT | |
| | | | GEKPYKCPECGKSFSTSGNLTEH | | EHX₁₇X₁₈X₁₉HX₂₀X₂₁X₂₂X₂₃X₂₄X₈X₉CX₁₀X₁₁CX₁₂X₁₃X₁₄X₁₅X₁₆RSDH | |
| | | | QRTHTGEKPYKCPECGKSFSRSD | | LTTHX₁₇X₁₈X₁₉HX₂₀X₂₁X₂₂X₂₃X₂₄X₈X₉CX₁₀X₁₁CX₁₂X₁₃X₁₄X₁₅X₁₆TS | |
| | | | HLTTHQRTHTGEKPYKCPECGKS | | GNLVRHX₁₇X₁₈X₁₉HX₂₀X₂₁X₂₂X₂₃X₂₄X₂₅X₂₆X₂₇X₂₈X₂₉X₃₀ | |
| | | | FSTSGNLVRHQRTHTGEKPTGKK | | | |
| | | | TS | | | |
| tggcatctg | TGG CAT | 972 | LEPGEKPYKCPECGKSFSHKNAL | 1521 | X₁X₂X₃X₄X₅X₆X₇X₈X₉CX₁₀X₁₁CX₁₂X₁₃X₁₄X₁₅X₁₆HKNALQNHX₁₇X₁₈X₁₉ | 2070 |
| gggcctggg | CTG ggg | | QNHQRTHTGEKPYKCPECGKSFS | | HX₂₀X₂₁X₂₂X₂₃X₂₄X₈X₉CX₁₀X₁₁CX₁₂X₁₃X₁₄X₁₅X₁₆RSDKLVRHX₁₇X₁₈ | |
| att | CCT ggg | | RSDKLVRHQRTHTGEKPYKCPEC | | X₁₉HX₂₀X₂₁X₂₂X₂₃X₂₄X₈X₉CX₁₀X₁₁CX₁₂X₁₃X₁₄X₁₅X₁₆TKNSLTEHX₁₇ | |
| | ATT | | GKSFSTKNSLTEHQRTHTGEKPY | | X₁₈X₁₉HX₂₀X₂₁X₂₂X₂₃X₂₄X₈X₉CX₁₀X₁₁CX₁₂X₁₃X₁₄X₁₅X₁₆RSDKLVRH | |
| | | | KCPECGKSFSRSDKLVRHQRTHT | | X₁₇X₁₈X₁₉HX₂₀X₂₁X₂₂X₂₃X₂₄X₈X₉CX₁₀X₁₁CX₁₂X₁₃X₁₄X₁₅X₁₆RNDALT | |
| | | | GEKPYKCPECGKSFSRNDALTEH | | EHX₁₇X₁₈X₁₉HX₂₀X₂₁X₂₂X₂₃X₂₄X₈X₉CX₁₀X₁₁CX₁₂X₁₃X₁₄X₁₅X₁₆TSGN | |
| | | | QRTHTGEKPYKCPECGKSFSTSG | | LTEHX₁₇X₁₈X₁₉HX₂₀X₂₁X₂₂X₂₃X₂₄X₈X₉CX₁₀X₁₁CX₁₂X₁₃X₁₄X₁₅X₁₆RS | |
| | | | NLTEHQRTHTGEKPYKCPECGKS | | DHLTTHX₁₇X₁₈X₁₉HX₂₀X₂₁X₂₂X₂₃X₂₄X₂₅X₂₆X₂₇X₂₈X₂₉X₃₀ | |
| | | | FSRSDHLTTHQRTHTGEKPTGKK | | | |
| | | | TS | | | |
| cagaacaag | CAG AAC | 973 | LEPGEKPYKCPECGKSFSTSGNL | 1522 | X₁X₂X₃X₄X₅X₆X₇X₈X₉CX₁₀X₁₁CX₁₂X₁₃X₁₄X₁₅X₁₆TSGNLVRHX₁₇X₁₈X₁₉ | 2071 |
| gatccagaa | AAG GAT | | VRHQRTHTGEKPYKCPECGKSFS | | HX₂₀X₂₁X₂₂X₂₃X₂₄X₈X₉CX₁₀X₁₁CX₁₂X₁₃X₁₄X₁₅X₁₆QSSNLVRHX₁₇X₁₈ | |
| gat | CCA GAA | | QSSNLVRHQRTHTGEKPYKCPEC | | X₁₉HX₂₀X₂₁X₂₂X₂₃X₂₄X₈X₉CX₁₀X₁₁CX₁₂X₁₃X₁₄X₁₅X₁₆TSHSLTEHX₁₇ | |
| | GAT | | GKSFSTSHSLTEHQRTHTGEKPY | | X₁₈X₁₉HX₂₀X₂₁X₂₂X₂₃X₂₄X₈X₉CX₁₀X₁₁CX₁₂X₁₃X₁₄X₁₅X₁₆TSGNLVRH | |
| | | | KCPECGKSFSTSGNLVRHQRTHT | | X₁₇X₁₈X₁₉HX₂₀X₂₁X₂₂X₂₃X₂₄X₈X₉CX₁₀X₁₁CX₁₂X₁₃X₁₄X₁₅X₁₆RKDNLK | |
| | | | GEKPYKCPECGKSFSRKDNLKNH | | NHX₁₇X₁₈X₁₉HX₂₀X₂₁X₂₂X₂₃X₂₄X₈X₉CX₁₀X₁₁CX₁₂X₁₃X₁₄X₁₅X₁₆DSGN | |
| | | | QRTHTGEKPYKCPECGKSFSDSG | | LRVHX₁₇X₁₈X₁₉HX₂₀X₂₁X₂₂X₂₃X₂₄X₈X₉CX₁₀X₁₁CX₁₂X₁₃X₁₄X₁₅X₁₆RA | |
| | | | NLRVHQRTHTGEKPYKCPECGKS | | DNLTEHX₁₇X₁₈X₁₉HX₂₀X₂₁X₂₂X₂₃X₂₄X₂₅X₂₆X₂₇X₂₈X₂₉X₃₀ | |
| | | | FSRADNLTEHQRTHTGEKPTGKK | | | |
| | | | TS | | | |
| gaagattgg | GAA GAT | 974 | LEPGEKPYKCPECGKSFSTKNSL | 1523 | X₁X₂X₃X₄X₅X₆X₇X₈X₉CX₁₀X₁₁CX₁₂X₁₃X₁₄X₁₅X₁₆TKNSLTEHX₁₇X₁₈X₁₉ | 2072 |
| catctgggg | TGG CAT | | TEHQRTHTGEKPYKCPECGKSFS | | HX₂₀X₂₁X₂₂X₂₃X₂₄X₈X₉CX₁₀X₁₁CX₁₂X₁₃X₁₄X₁₅X₁₆RSDKLVRHX₁₇X₁₈ | |
| cct | CTG ggg | | RSDKLVRHQRTHTGEKPYKCPEC | | X₁₉HX₂₀X₂₁X₂₂X₂₃X₂₄X₈X₉CX₁₀X₁₁CX₁₂X₁₃X₁₄X₁₅X₁₆RNDALTEHX₁₇ | |
| | CCT | | GKSFSRNDALTEHQRTHTGEKPY | | X₁₈X₁₉HX₂₀X₂₁X₂₂X₂₃X₂₄X₈X₉CX₁₀X₁₁CX₁₂X₁₃X₁₄X₁₅X₁₆TSGNLTEH | |
| | | | KCPECGKSFSTSGNLTEHQRTHT | | X₁₇X₁₈X₁₉HX₂₀X₂₁X₂₂X₂₃X₂₄X₈X₉CX₁₀X₁₁CX₁₂X₁₃X₁₄X₁₅X₁₆RSDHLT | |
| | | | GEKPYKCPECGKSFSRSDHLTTH | | THX₁₇X₁₈X₁₉HX₂₀X₂₁X₂₂X₂₃X₂₄X₈X₉CX₁₀X₁₁CX₁₂X₁₃X₁₄X₁₅X₁₆TSGN | |
| | | | QRTHTGEKPYKCPECGKSFSTSG | | LVRHX₁₇X₁₈X₁₉HX₂₀X₂₁X₂₂X₂₃X₂₄X₈X₉CX₁₀X₁₁CX₁₂X₁₃X₁₄X₁₅X₁₆QS | |
| | | | NLVRHQRTHTGEKPYKCPECGKS | | SNLVRHX₁₇X₁₈X₁₉HX₂₀X₂₁X₂₂X₂₃X₂₄X₂₅X₂₆X₂₇X₂₈X₂₉X₃₀ | |
| | | | FSQSSNLVRHQRTHTGEKPTGKK | | | |
| | | | TS | | | |
| aacaaggat | AAC AAG | 975 | LEPGEKPYKCPECGKSFSRSDHL | 1524 | X₁X₂X₃X₄X₅X₆X₇X₈X₉CX₁₀X₁₁CX₁₂X₁₃X₁₄X₁₅X₁₆RSDHLTTHX₁₇X₁₈X₁₉ | 2073 |
| ccagaagat | GAT CCA | | TTHQRTHTGEKPYKCPECGKSFS | | HX₂₀X₂₀X₂₁X₂₂X₂₃X₂₄X₈X₉CX₁₀X₁₁CX₁₂X₁₃X₁₄X₁₅X₁₆TSGNLVRHX₁₇X₁₈ | |
| tgg | GAA GAT | | TSGNLVRHQRTHTGEKPYKCPEC | | X₁₉HX₂₀X₂₁X₂₂X₂₃X₂₄X₈X₉CX₁₀X₁₁CX₁₂X₁₃X₁₄X₁₅X₁₆QSSNLVRHX₁₇ | |
| | TGG | | GKSFSQSSNLVRHQRTHTGEKPY | | X₁₈X₁₉HX₂₀X₂₁X₂₂X₂₃X₂₄X₈X₉CX₁₀X₁₁CX₁₂X₁₃X₁₄X₁₅X₁₆TSHSLTEH | |
| | | | KCPECGKSFSTSHSLTEHQRTHT | | X₁₇X₁₈X₁₉HX₂₀X₂₁X₂₂X₂₃X₂₄X₈X₉CX₁₀X₁₁CX₁₂X₁₃X₁₄X₁₅X₁₆TSGNLV | |
| | | | GEKPYKCPECGKSFSTSGNLVRH | | RHX₁₇X₁₈X₁₉HX₂₀X₂₁X₂₂X₂₃X₂₄X₈X₉CX₁₀X₁₁CX₁₂X₁₃X₁₄X₁₅X₁₆RKDN | |
| | | | QRTHTGEKPYKCPECGKSFSRKD | | LKNHX₁₇X₁₈X₁₉HX₂₀X₂₁X₂₂X₂₃X₂₄X₈X₉CX₁₀X₁₁CX₁₂X₁₃X₁₄X₁₅X₁₆DS | |
| | | | NLKNHQRTHTGEKPYKCPECGKS | | GNLRVHX₁₇X₁₈X₁₉HX₂₀X₂₁X₂₂X₂₃X₂₄X₂₅X₂₆X₂₇X₂₈X₂₉X₃₀ | |
| | | | FSDSGNLRVHQRTHTGEKPTGKK | | | |
| | | | TS | | | |
| ccagaagat | CCA GAA | 976 | LEPGEKPYKCPECGKSFSRSDKL | 1525 | X₁X₂X₃X₄X₅X₆X₇X₈X₉CX₁₀X₁₁CX₁₂X₁₃X₁₄X₁₅X₁₆RSDKLVRHX₁₇X₁₈X₁₉ | 2074 |
| tggcatctg | GAT TGG | | VRHQRTHTGEKPYKCPECGKSFS | | HX₂₀X₂₀X₂₁X₂₂X₂₃X₂₄X₈X₉CX₁₀X₁₁CX₁₂X₁₃X₁₄X₁₅X₁₆RNDALTEHX₁₇X₁₈ | |
| ggg | CAT CTG | | RNDALTEHQRTHTGEKPYKCPEC | | X₁₉HX₂₀X₂₁X₂₂X₂₃X₂₄X₈X₉CX₁₀X₁₁CX₁₂X₁₃X₁₄X₁₅X₁₆TSGNLTEHX₁₇ | |
| | GGG | | GKSFSTSGNLTEHQRTHTGEKPY | | X₁₈X₁₉HX₂₀X₂₁X₂₂X₂₃X₂₄X₈X₉CX₁₀X₁₁CX₁₂X₁₃X₁₄X₁₅X₁₆RSDHLTTH | |
| | | | KCPECGKSFSRSDHLTTHQRTHT | | X₁₇X₁₈X₁₉HX₂₀X₂₁X₂₂X₂₃X₂₄X₈X₉CX₁₀X₁₁CX₁₂X₁₃X₁₄X₁₅X₁₆TSGNLV | |
| | | | GEKPYKCPECGKSFSTSGNLVRH | | RHX₁₇X₁₈X₁₉HX₂₀X₂₁X₂₂X₂₃X₂₄X₈X₉CX₁₀X₁₁CX₁₂X₁₃X₁₄X₁₅X₁₆QSSN | |
| | | | QRTHTGEKPYKCPECGKSFSQSS | | LVRHX₁₇X₁₈X₁₉HX₂₀X₂₁X₂₂X₂₃X₂₄X₈X₉CX₁₀X₁₁CX₁₂X₁₃X₁₄X₁₅X₁₆TS | |
| | | | NLVRHQRTHTGEKPYKCPECGKS | | HSLTEHX₁₇X₁₈X₁₉HX₂₀X₂₁X₂₂X₂₃X₂₄X₂₅X₂₆X₂₇X₂₈X₂₉X₃₀ | |
| | | | FSTSHSLTEHQRTHTGEKPTGKK | | | |
| | | | TS | | | |
| gatccagaa | GAT CCA | 977 | LEPGEKPYKCPECGKSFSRNDAL | 1526 | X₁X₂X₃X₄X₅X₆X₇X₈X₉CX₁₀X₁₁CX₁₂X₁₃X₁₄X₁₅X₁₆RNDALTEHX₁₇X₁₈X₁₉ | 2075 |
| gattggcat | GAA GAT | | TEHQRTHTGEKPYKCPECGKSFS | | HX₂₀X₂₁X₂₂X₂₃X₂₄X₈X₉CX₁₀X₁₁CX₁₂X₁₃X₁₄X₁₅X₁₆TSGNLTEHX₁₇X₁₈ | |
| ctg | TGG CAT | | TSGNLTEHQRTHTGEKPYKCPEC | | X₁₉HX₂₀X₂₁X₂₂X₂₃X₂₄X₈X₉CX₁₀X₁₁CX₁₂X₁₃X₁₄X₁₅X₁₆RSDHLTTHX₁₇ | |
| | CTG | | GKSFSRSDHLTTHQRTHTGEKPY | | X₁₈X₁₉HX₂₀X₂₁X₂₂X₂₃X₂₄X₈X₉CX₁₀X₁₁CX₁₂X₁₃X₁₄X₁₅X₁₆TSGNLVRH | |
| | | | KCPECGKSFSTSGNLVRHQRTHT | | X₁₇X₁₈X₁₉HX₂₀X₂₁X₂₂X₂₃X₂₄X₈X₉CX₁₀X₁₁CX₁₂X₁₃X₁₄X₁₅X₁₆QSSNLV | |
| | | | GEKPYKCPECGKSFSQSSNLVRH | | RHX₁₇X₁₈X₁₉HX₂₀X₂₁X₂₂X₂₃X₂₄X₈X₉CX₁₀X₁₁CX₁₂X₁₃X₁₄X₁₅X₁₆TSHS | |
| | | | QRTHTGEKPYKCPECGKSFSTSH | | LTEHX₁₇X₁₈X₁₉HX₂₀X₂₁X₂₂X₂₃X₂₄X₈X₉CX₁₀X₁₁CX₁₂X₁₃X₁₄X₁₅X₁₆TS | |
| | | | SLTEHQRTHTGEKPYKCPECGKS | | GNLVRHX₁₇X₁₈X₁₉HX₂₀X₂₁X₂₂X₂₃X₂₄X₂₅X₂₆X₂₇X₂₈X₂₉X₃₀ | |
| | | | FSTSGNLVRHQRTHTGEKPTGKK | | | |
| | | | TS | | | |
| aaggatcca | AAG GAT | 978 | LEPGEKPYKCPECGKSFSTSGNL | 1527 | X₁X₂X₃X₄X₅X₆X₇X₈X₉CX₁₀X₁₁CX₁₂X₁₃X₁₄X₁₅X₁₆TSGNLTEHX₁₇X₁₈X₁₉ | 2076 |
| gaagattgg | CCA GAA | | TEHQRTHTGEKPYKCPECGKSFS | | HX₂₀X₂₁X₂₂X₂₃X₂₄X₈X₉CX₁₀X₁₁CX₁₂X₁₃X₁₄X₁₅X₁₆RSDHLTTHX₁₇X₁₈ | |
| cat | GAT TGG | | RSDHLTTHQRTHTGEKPYKCPEC | | X₁₉HX₂₀X₂₁X₂₂X₂₃X₂₄X₈X₉CX₁₀X₁₁CX₁₂X₁₃X₁₄X₁₅X₁₆TSGNLVRHX₁₇ | |
| | CAT | | GKSFSTSGNLVRHQRTHTGEKPY | | X₁₈X₁₉HX₂₀X₂₁X₂₂X₂₃X₂₄X₈X₉CX₁₀X₁₁CX₁₂X₁₃X₁₄X₁₅X₁₆QSSNLVRH | |
| | | | KCPECGKSFSQSSNLVRHQRTHT | | X₁₇X₁₈X₁₉HX₂₀X₂₁X₂₂X₂₃X₂₄X₈X₉CX₁₀X₁₁CX₁₂X₁₃X₁₄X₁₅X₁₆TSHSLT | |
| | | | GEKPYKCPECGKSFSTSHSLTEH | | EHX₁₇X₁₈X₁₉HX₂₀X₂₁X₂₂X₂₃X₂₄X₈X₉CX₁₀X₁₁CX₁₂X₁₃X₁₄X₁₅X₁₆TSGN | |
| | | | QRTHTGEKPYKCPECGKSFSTSG | | LVRHX₁₇X₁₈X₁₉HX₂₀X₂₁X₂₂X₂₃X₂₄X₈X₉CX₁₀X₁₁CX₁₂XEX₁₄X₁₅X₁₆RK | |
| | | | NLVRHQRTHTGEKPYKCPECGKS | | DNLKNHX₁₇X₁₈X₁₉HX₂₀X₂₁X₂₂X₂₃X₂₄X₂₅X₂₆X₂₇X₂₈X₂₉X₃₀ | |
| | | | FSRKDNLKNHQRTHTGEKPTGKK | | | |
| | | | TS | | | |
| ctggggcct | CTG ggg | 979 | LEPGEKPYKCPECGKSFSTSGSL | 1528 | X₁X₂X₃X₄X₅X₆X₇X₈X₉CX₁₀X₁₁CX₁₂X₁₃X₁₄X₁₅X₁₆TSGSLVRHX₁₇X₁₈X₁₉ | 2077 |
| gggatttag | CCT ggg | | VRHQRTHTGEKPYKCPECGKSFS | | HX₂₀X₂₁X₂₂X₂₃X₂₄X₈X₉CX₁₀X₁₁CX₁₂X₁₃X₁₄X₁₅X₁₆REDNLHTHX₁₇X₁₈ | |
| gtt | ATT TAG | | REDNLHTHQRTHTGEKPYKCPEC | | X₁₉HX₂₀X₂₁X₂₂X₂₃X₂₄X₈X₉CX₁₀X₁₁CX₁₂X₁₃X₁₄X₁₅X₁₆HKNALQNHX₁₇ | |
| | GTT | | GKSFSHKNALQNHQRTHTGEKPY | | X₁₈X₁₉HX₂₀X₂₁X₂₂X₂₃X₂₄X₈X₉CX₁₀X₁₁CX₁₂X₁₃X₁₄X₁₅X₁₆RSDKLVRH | |
| | | | KCPECGKSFSRSDKLVRHQRTHT | | X₁₇X₁₈X₁₉HX₂₀X₂₁X₂₂X₂₃X₂₄X₈X₉CX₁₀X₁₁CX₁₂X₁₃X₁₄X₁₅X₁₆TKNSLT | |
| | | | GEKPYKCPECGKSFSTKNSLTEH | | EHX₁₇X₁₈X₁₉HX₂₀X₂₁X₂₂X₂₃X₂₄X₈X₉CX₁₀X₁₁CX₁₂X₁₃X₁₄X₁₅X₁₆RSDK | |
| | | | QRTHTGEKPYKCPECGKSFSRSD | | LVRHX₁₇X₁₈X₁₉HX₂₀X₂₁X₂₂X₂₃X₂₄X₈X₉CX₁₀X₁₁CX₁₂X₁₃X₁₄X₁₅X₁₆RN | |
| | | | KLVRHQRTHTGEKPYKCPECGKS | | DALTEHX₁₇X₁₈X₁₉HX₂₀X₂₁X₂₂X₂₃X₂₄X₂₅X₂₆X₂₇X₂₈X₂₉X₃₀ | |
| | | | FSRNDALTEHQRTHTGEKPTGKK | | | |
| | | | TS | | | |
| ctaaatcgt | CTA AAT | 980 | LEPGEKPYKCPECGKSFSDPGHL | 1529 | X₁X₂X₃X₄X₅X₆X₇X₈X₉CX₁₀X₁₁CX₁₂X₁₃X₁₄X₁₅X₁₆DPGHLVRHX₁₇X₁₈X₁₉ | 2078 |
| gggccatgg | CGT ggg | | VRHQRTHTGEKPYKCPECGKSFS | | HX₂₀X₂₁X₂₂X₂₃X₂₄X₈X₉CX₁₀X₁₁CX₁₂X₁₃X₁₄X₁₅X₁₆RSDHLTTHX₁₇X₁₈ | |
| ggc | CCA TGG | | RSDHLTTHQRTHTGEKPYKCPEC | | X₁₉HX₂₀X₂₁X₂₂X₂₃X₂₄X₈X₉CX₁₀X₁₁CX₁₂X₁₃X₁₄X₁₅X₁₆TSHSLTEHX₁₇ | |
| | GGC | | GKSFSTSHSLTEHQRTHTGEKPY | | X₁₈X₁₉HX₂₀X₂₁X₂₂X₂₃X₂₄X₈X₉CX₁₀X₁₁CX₁₂X₁₃X₁₄X₁₅X₁₆RSDKLVRH | |
| | | | KCPECGKSFSRSDKLVRHQRTHT | | X₁₇X₁₈X₁₉HX₂₀X₂₁X₂₂X₂₃X₂₄X₈X₉CX₁₀X₁₁CX₁₂X₁₃X₁₄X₁₅X₁₆SRRTCR | |
| | | | GEKPYKCPECGKSFSSRRTCRAH | | AHX₁₇X₁₈X₁₉HX₂₀X₂₁X₂₂X₂₃X₂₄X₈X₉CX₁₀X₁₁CX₁₂X₁₃X₁₄X₁₅X₁₆TTGN | |
| | | | QRTHTGEKPYKCPECGKSFSTTG | | LTVHX₁₇X₁₈X₁₉HX₂₀X₂₁X₂₂X₂₃X₂₄X₈X₉CX₁₀X₁₁CX₁₂X₁₃X₁₄X₁₅X₁₆QN | |
| | | | NLTVHQRTHTGEKPYKCPECGKS | | STLTEHX₁₇X₁₈X₁₉HX₂₀X₂₁X₂₂X₂₃X₂₄X₂₅X₂₆X₂₇X₂₈X₂₉X₃₀ | |
| | | | FSQNSTLTEHQRTHTGEKPTGKK | | | |
| | | | TS | | | |
| aatcgtggg | AAT CGT | 981 | LEPGEKPYKCPECGKSFSERSHL | 1530 | X₁X₂X₃X₄X₅X₆X₇X₈X₉CX₁₀X₁₁CX₁₂X₁₃X₁₄X₁₅X₁₆ERSHLREHX₁₇X₁₈X₁₉ | 2079 |
| ccatggggc | ggg CCA | | REHQRTHTGEKPYKCPECGKSFS | | HX₂₀X₂₁X₂₂X₂₃X₂₄X₈X₉CX₁₀X₁₁CX₁₂X₁₃X₁₄X₁₅X₁₆DPGHLVRHX₁₇X₁₈ | |
| agc | TGG GGC | | DPGHLVRHQRTHTGEKPYKCPEC | | X₁₉HX₂₀X₂₁X₂₂X₂₃X₂₄X₈X₉CX₁₀X₁₁CX₁₂X₁₃X₁₄X₁₅X₁₆RSDHLTTHX₁₇ | |
| | AGC | | GKSFSRSDHLTTHQRTHTGEKPY | | X₁₈X₁₉HX₂₀X₂₁X₂₂X₂₃X₂₄X₈X₉CX₁₀X₁₁CX₁₂X₁₃X₁₄X₁₅X₁₆TSHSLTEH | |
| | | | KCPECGKSFSTSHSLTEHQRTHT | | X₁₇X₁₈X₁₉HX₂₀X₂₁X₂₂X₂₃X₂₄X₈X₉CX₁₀X₁₁CX₁₂X₁₃X₁₄X₁₅X₁₆RSDKLV | |
| | | | GEKPYKCPECGKSFSRSDKLVRH | | RHX₁₇X₁₈X₁₉HX₂₀X₂₁X₂₂X₂₃X₂₄X₈X₉CX₁₀X₁₁CX₁₂X₁₃X₁₄X₁₅X₁₆SRRT | |
| | | | QRTHTGEKPYKCPECGKSFSSRR | | CRAHX₁₇X₁₈X₁₉HX₂₀X₂₁X₂₂X₂₃X₂₄X₈X₉CX₁₀X₁₁CX₁₂X₁₃X₁₄X₁₅X₁₆TT | |
| | | | TCRAHQRTHTGEKPYKCPECGKS | | GNLTVHX₁₇X₁₈X₁₉HX₂₀X₂₁X₂₂X₂₃X₂₄X₂₅X₂₆X₂₇X₂₈X₂₉X₃₀ | |
| | | | FSTTGNLTVHQRTHTGEKPTGKK | | | |
| | | | TS | | | |
| cgtgggcca | CGT ggg | 982 | LEPGEKPYKCPECGKSFSTTGAL | 1531 | X₁X₂X₃X₄X₅X₆X₇X₈X₉CX₁₀X₁₁CX₁₂X₁₃X₁₄X₁₅X₁₆TTGALTEHX₁₇X₁₈X₁₉ | 2080 |
| tggggcagc | CCA TGG | | TEHQRTHTGEKPYKCPECGKSFS | | HX₂₀X₂₁X₂₂X₂₃X₂₄X₈X₉CX₁₀X₁₁CX₁₂X₁₃X₁₄X₁₅X₁₆ERSHLREHX₁₇X₁₈ | |
| ctt | GGC AGC | | ERSHLREHQRTHTGEKPYKCPEC | | X₁₉HX₂₀X₂₁X₂₂X₂₃X₂₄X₈X₉CX₁₀X₁₁CX₁₂X₁₃X₁₄X₁₅X₁₆DPGHLVRHX₁₇ | |
| | CTT | | GKSFSDPGHLVRHQRTHTGEKPY | | X₁₈X₁₉HX₂₀X₂₁X₂₂X₂₃X₂₄X₈X₉CX₁₀X₁₁CX₁₂X₁₃X₁₄X₁₅X₁₆RSDHLTTH | |
| | | | KCPECGKSFSRSDHLTTHQRTHT | | X₁₇X₁₈X₁₉HX₂₀X₂₁X₂₂X₂₃X₂₄X₈X₉CX₁₀X₁₁CX₁₂X₁₃X₁₄X₁₅X₁₆TSHSLT | |
| | | | GEKPYKCPECGKSFSTSHSLTEH | | EHX₁₇X₁₈X₁₉HX₂₀X₂₁X₂₂X₂₃X₂₄X₈X₉CX₁₀X₁₁CX₁₂X₁₃X₁₄X₁₅X₁₆RSDK | |
| | | | QRTHTGEKPYKCPECGKSFSRSD | | LVRHX₁₇X₁₈X₁₉HX₂₀X₂₁X₂₂X₂₃X₂₄X₈X₉CX₁₀X₁₁CX₁₂XEX₁₄X₁₅X₁₆SR | |
| | | | KLVRHQRTHTGEKPYKCPECGKS | | RTCRAHX₁₇X₁₈X₁₉HX₂₀X₂₁X₂₂X₂₃X₂₄X₂₅X₂₆X₂₇X₂₈X₂₉X₃₀ | |
| | | | FSSRRTCRAHQRTHTGEKPTGKK | | | |
| | | | TS | | | |
| ctgcaaaag | CTG CAA | 983 | LEPGEKPYKCPECGKSFSREDNL | 152 | X₁X₂X₃X₄X₅X₆X₇X₈X₉CX₁₀X₁₁CX₁₂X₁₃X₁₄X₁₅X₁₆REDNLHTHX₁₇X₁₈X₁₉ | 2081 |
| cattgaggg | AAG CAT | | HTHQRTHTGEKPYKCPECGKSFS | | HX₂₀X₂₁X₂₂X₂₃X₂₄X₈X₉CX₁₀X₁₁CX₁₂X₁₃X₁₄X₁₅X₁₆RSDKLVRHX₁₇X₁₈ | |
| tag | TGA GGG | | RSDKLVRHQRTHTGEKPYKCPEC | | X₁₉HX₂₀X₂₁X₂₂X₂₃X₂₄X₈X₉CX₁₀X₁₁CX₁₂X₁₃X₁₄X₁₅X₁₆QAGHLASHX₁₇ | |
| | TAG | | GKSFSQAGHLASHQRTHTGEKPY | | X₁₈X₁₉HX₂₀X₂₁X₂₂X₂₃X₂₄X₈X₉CX₁₀X₁₁CX₁₂X₁₃X₁₄X₁₅X₁₆TSGNLTEH | |
| | | | KCPECGKSFSTSGNLTEHQRTHT | | X₁₇X₁₈X₁₉HX₂₀X₂₁X₂₂X₂₃X₂₄X₈X₉CX₁₀X₁₁CX₁₂X₁₃X₁₄X₁₅X₁₆RKDNLK | |
| | | | GEKPYKCPECGKSFSRKDNLKNH | | NHX₁₇X₁₈X₁₉HX₂₀X₂₁X₂₂X₂₃X₂₄X₈X₉CX₁₀X₁₁CX₁₂X₁₃X₁₄X₁₅X₁₆QSGN | |
| | | | QRTHTGEKPYKCPECGKSFSQSG | | LTEHX₁₇X₁₈X₁₉HX₂₀X₂₁X₂₂X₂₃X₂₄X₈X₉CX₁₀X₁₁CX₁₂X₁₃X₁₄X₁₅X₁₆RN | |
| | | | NLTEHQRTHTGEKPYKCPECGKS | | DALTEHX₁₇X₁₈X₁₉HX₂₀X₂₁X₂₂X₂₃X₂₄X₂₅X₂₆X₂₇X₂₈X₂₉X₃₀ | |
| | | | FSRNDALTEHQRTHTGEKPTGKK | | | |
| | | | TS | | | |
| caaaagcat | CAA AAG | 984 | LEPGEKPYKCPECGKSFSRKDNL | 1533 | X₁X₂X₃X₄X₅X₆X₇X₈X₉CX₁₀X₁₁CX₁₂X₁₃X₁₄X₁₅X₁₆RKDNLKNHX₁₇X₁₈X₁₉ | 2082 |
| tgagggtag | CAT TGA | | KNHQRTHTGEKPYKCPECGKSFS | | HX₂₀X₂₁X₂₂X₂₃X₂₄X₈X₉CX₁₀X₁₁CX₁₂X₁₃X₁₄X₁₅X₁₆REDNLHTHX₁₇X₁₈ | |
| aag | GGG TAG | | REDNLHTHQRTHTGEKPYKCPEC | | X₁₉HX₂₀X₂₁X₂₂X₂₃X₂₄X₈X₉CX₁₀X₁₁CX₁₂X₁₃X₁₄X₁₅X₁₆RSDKLVRHX₁₇ | |
| | APG | | GKSFSRSDKLVRHQRTHTGEKPY | | X₁₈X₁₉HX₂₀X₂₁X₂₂X₂₃X₂₄X₈X₉CX₁₀X₁₁CX₁₂X₁₃X₁₄X₁₅X₁₆QAGHLASH | |
| | | | KCPECGKSFSQAGHLASHQRTHT | | X₁₇X₁₈X₁₉HX₂₀X₂₁X₂₂X₂₃X₂₄X₈X₉CX₁₀X₁₁CX₁₂X₁₃X₁₄X₁₅X₁₆TSGNLT | |
| | | | GEKPYKCPECGKSFSTSGNLTEH | | EHX₁₇X₁₈X₁₉HX₂₀X₂₁X₂₂X₂₃X₂₄X₈X₉CX₁₀X₁₁CX₁₂X₁₃X₁₄X₁₅X₁₆RKDN | |
| | | | QRTHTGEKPYKCPECGKSFSRKD | | LKNHX₁₇X₁₈X₁₉HX₂₀X₂₁X₂₂X₂₃X₂₄X₈X₉CX₁₀X₁₁CX₁₂X₁₃X₁₄X₁₅X₁₆QS | |
| | | | NLKNHQRTHTGEKPYKCPECGKS | | GNLTEHX₁₇X₁₈X₁₉HX₂₀X₂₁X₂₂X₂₃X₂₄X₂₅X₂₆X₂₇X₂₈X₂₉X₃₀ | |
| | | | FSQSGNLTEHQRTHTGEKPTGKK | | | |
| | | | TS | | | |
| aaaagcatt | AAA AGC | 985 | LEPGEKPYKCPECGKSFSHRTTL | 1534 | X₁X₂X₃X₄X₅X₆X₇X₈X₉CX₁₀X₁₁CX₁₂X₁₃X₁₄X₁₅X₁₆HRTTLTNHX₁₇X₁₈X₁₉ | 2083 |
| gagggtaga | ATT GAG | | TNHQRTHTGEKPYKCPECGKSFS | | HX₂₀X₂₁X₂₂X₂₃X₂₄X₈X₉CX₁₀X₁₁CX₁₂X₁₃X₁₄X₁₅X₁₆QLAHLRAHX₁₇X₁₈ | |
| agt | GGT AGA | | QLAHLRAHQRTHTGEKPYKCPEC | | X₁₉HX₂₀X₂₁X₂₂X₂₃X₂₄X₈X₉CX₁₀X₁₁CX₁₂X₁₃X₁₄X₁₅X₁₆TSGHLVRHX₁₇ | |
| | AGT | | GKSFSTSGHLVRHQRTHTGEKPY | | X₁₈X₁₉HX₂₀X₂₁X₂₂X₂₃X₂₄X₈X₉CX₁₀X₁₁CX₁₂X₁₃X₁₄X₁₅X₁₆RSDNLVRH | |
| | | | KCPECGKSFSRSDNLVRHQRTHT | | X₁₇X₁₈X₁₉HX₂₀X₂₁X₂₂X₂₃X₂₄X₈X₉CX₁₀X₁₁CX₁₂X₁₃X₁₄X₁₅X₁₆HKNALQ | |
| | | | GEKPYKCPECGKSFSHKNALQNH | | NHX₁₇X₁₈X₁₉HX₂₀X₂₁X₂₂X₂₃X₂₄X₈X₉CX₁₀X₁₁CX₁₂X₁₃X₁₄X₁₅X₁₆ERSH | |
| | | | QRTHTGEKPYKCPECGKSFSERS | | LREHX₁₇X₁₈X₁₉HX₂₀X₂₁X₂₂X₂₃X₂₄X₈X₉CX₁₀X₁₁CX₁₂X₁₃X₁₄X₁₅X₁₆QR | |
| | | | HLREHQRTHTGEKPYKCPECGKS | | ANLRAHX₁₇X₁₈X₁₉HX₂₀X₂₁X₂₂X₂₃X₂₄X₂₅X₂₆X₂₇X₂₈X₂₉X₃₀ | |
| | | | FSQRANLRAHQRTHTGEKPTGKK | | | |
| | | | TS | | | |
| attgagggt | ATT GAG | 986 | LEPGEKPYKCPECGKSFSQAGHL | 1535 | X₁X₂X₃X₄X₅X₆X₇X₈X₉CX₁₀X₁₁CX₁₂X₁₃X₁₄X₁₅X₁₆QAGHLASHX₁₇X₁₈X₁₉ | 2084 |
| agaagtcaa | GGT AGA | | ASHQRTHTGEKPYKCPECGKSFS | | HX₂₀X₂₁X₂₂X₂₃X₂₄X₈X₉CX₁₀X₁₁CX₁₂X₁₃X₁₄X₁₅X₁₆QSGNLTEHX₁₇X₁₈ | |
| tga | AGT CAA | | QSGNLTEHQRTHTGEKPYKCPEC | | X₁₉HX₂₀X₂₁X₂₂X₂₃X₂₄X₈X₉CX₁₀X₁₁CX₁₂X₁₃X₁₄X₁₅X₁₆HRTTLTNHX₁₇ | |
| | TGA | | GKSFSHRTTLTNHQRTHTGEKPY | | X₁₈X₁₉HX₂₀X₂₁X₂₂X₂₃X₂₄X₈X₉CX₁₀X₁₁CX₁₂X₁₃X₁₄X₁₅X₁₆QLAHLRAH | |
| | | | KCPECGKSFSQLAHLRAHQRTHT | | X₁₇X₁₈X₁₉HX₂₀X₂₁X₂₂X₂₃X₂₄X₈X₉CX₁₀X₁₁CX₁₂X₁₃X₁₄X₁₅X₁₆TSGHLV | |
| | | | GEKPYKCPECGKSFSTSGHLVRH | | RHX₁₇X₁₈X₁₉HX₂₀X₂₁X₂₂X₂₃X₂₄X₈X₉CX₁₀X₁₁CX₁₂X₁₃X₁₄X₁₅X₁₆RSDN | |
| | | | QRTHTGEKPYKCPECGKSFSRSD | | LVRHX₁₇X₁₈X₁₉HX₂₀X₂₁X₂₂X₂₃X₂₄X₈X₉CX₁₀X₁₁CX₁₂X₁₃X₁₄X₁₅X₁₆HK | |
| | | | NLVRHQRTHTGEKPYKCPECGKS | | NALQNHX₁₇X₁₈X₁₉HX₂₀X₂₁X₂₂X₂₃X₂₄X₂₅X₂₆X₂₇X₂₈X₂₉X₃₀ | |
| | | | FSHKNALQNHQRTHTGEKPTGKK | | | |
| | | | TS | | | |
| agcattgag | AGC ATT | 987 | LEPGEKPYKCPECGKSFSQSGNL | 1536 | X₁X₂X₃X₄X₅X₆X₇X₈X₉CX₁₀X₁₁CX₁₂X₁₃X₁₄X₁₅X₁₆QSGNLTEHX₁₇X₁₈X₁₉ | 2085 |
| ggtagaagt | GAG GGT | | TEHQRTHTGEKPYKCPECGKSFS | | HX₂₀X₂₁X₂₂X₂₃X₂₄X₈X₉CX₁₀X₁₁CX₁₂X₁₃X₁₄X₁₅X₁₆HRTTLTNHX₁₇X₁₈ | |
| caa | AGA AGT | | HRTTLTNHQRTHTGEKPYKCPEC | | X₁₉HX₂₀X₂₁X₂₂X₂₃X₂₄X₈X₉CX₁₀X₁₁CX₁₂X₁₃X₁₄X₁₅X₁₆QLAHLRAHX₁₇ | |
| | CAA | | GKSFSQLAHLRAHQRTHTGEKPY | | X₁₈X₁₉HX₂₀X₂₁X₂₂X₂₃X₂₄X₈X₉CX₁₀X₁₁CX₁₂X₁₃X₁₄X₁₅X₁₆TSGHLVRH | |
| | | | KCPECGKSFSTSGHLVRHQRTHT | | X₁₇X₁₈X₁₉HX₂₀X₂₁X₂₂X₂₃X₂₄X₈X₉CX₁₀X₁₁CX₁₂X₁₃X₁₄X₁₅X₁₆RSDNLV | |
| | | | GEKPYKCPECGKSFSRSDNLVRH | | RHX₁₇X₁₈X₁₉HX₂₀X₂₁X₂₂X₂₃X₂₄X₈X₉CX₁₀X₁₁CX₁₂X₁₃X₁₄X₁₅X₁₆HKNA | |
| | | | QRTHTGEKPYKCPECGKSFSHKN | | LQNHX₁₇X₁₈X₁₉HX₂₀X₂₁X₂₂X₂₃X₂₄X₈X₉CX₁₀X₁₁CX₁₂X₁₃X₁₄X₁₅X₁₆ER | |
| | | | ALQNHQRTHTGEKPYKCPECGKS | | SHLREHX₁₇X₁₈X₁₉HX₂₀X₂₁X₂₂X₂₃X₂₄X₂₅X₂₆X₂₇X₂₈X₂₉X₃₀ | |
| | | | FSERSHLREHQRTHTGEKPTGKK | | | |
| | | | TS | | | |
| atgatttgg | ATG ATT | 988 | LEPGEKPYKCPECGKSFSQSSNL | 1537 | X₁X₂X₃X₄X₅X₆X₇X₈X₉CX₁₀X₁₁CX₁₂X₁₃X₁₄X₁₅X₁₆QSSNLVRHX₁₇X₁₈X₁₉ | 2086 |
| gaagttatt | TGG GAA | | VRHQRTHTGEKPYKCPECGKSFS | | HX₂₀X₂₁X₂₂X₂₃X₂₄X₈X₉CX₁₀X₁₁CX₁₂X₁₃X₁₄X₁₅X₁₆HKNALQNHX₁₇X₁₈ | |
| gaa | GTT ATT | | HKNALQNHQRTHTGEKPYKCPEC | | X₁₉HX₂₀X₂₁X₂₂X₂₃X₂₄X₈X₉CX₁₀X₁₁CX₁₂X₁₃X₁₄X₁₅X₁₆TSGSLVRHX₁₇ | |
| | GAA | | GKSFSTSGSLVRHQRTHTGEKPY | | X₁₈X₁₉HX₂₀X₂₁X₂₂X₂₃X₂₄X₈X₉CX₁₀X₁₁CX₁₂X₁₃X₁₄X₁₅X₁₆QSSNLVRH | |
| | | | KCPECGKSFSQSSNLVRHQRTHT | | X₁₇X₁₈X₁₉HX₂₀X₂₁X₂₂X₂₃X₂₄X₈X₉CX₁₀X₁₁CX₁₂X₁₃X₁₄X₁₅X₁₆RSDHLT | |
| | | | GEKPYKCPECGKSFSRSDHLTTH | | THX₁₇X₁₈X₁₉HX₂₀X₂₁X₂₂X₂₃X₂₄X₈X₉CX₁₀X₁₁CX₁₂X₁₃X₁₄X₁₅X₁₆HKNA | |
| | | | QRTHTGEKPYKCPECGKSFSHKN | | LQNHX₁₇X₁₈X₁₉HX₂₀X₂₁X₂₂X₂₃X₂₄X₈X₉CX₁₀X₁₁CX₁₂X₁₃X₁₄X₁₅X₁₆RR | |
| | | | ALQNHQRTHTGEKPYKCPECGKS | | DELNVHX₁₇X₁₈X₁₉HX₂₀X₂₁X₂₂X₂₃X₂₄X₂₅X₂₆X₂₇X₂₈X₂₉X₃₀ | |
| | | | FSRRDELNVHQRTHTGEKPTGKK | | | |
| | | | TS | | | |
| taggctgtc | TAG GCT | 989 | LEPGEKPYKCPECGKSFSREDNL | 1538 | X₁X₂X₃X₄X₅X₆X₇X₈X₉CX₁₀X₁₁CX₁₂X₁₃X₁₄X₁₅X₁₆REDNLHTHX₁₇X₁₈X₁₉ | 2087 |
| agtgcctga | GTC AGT | | HTHQRTHTGEKPYKCPECGKSFS | | HX₂₀X₂₁X₂₂X₂₃X₂₄X₈X₉CX₁₀X₁₁CX₁₂X₁₃X₁₄X₁₅X₁₆QAGHLASHX₁₇X₁₈ | |
| tag | GCC TGA | | QAGHLASHQRTHTGEKPYKCPEC | | X₁₉HX₂₀X₂₁X₂₂X₂₃X₂₄X₈X₉CX₁₀X₁₁CX₁₂X₁₃X₁₄X₁₅X₁₆DCRDLARHX₁₇ | |
| | TAG | | GKSFSDCRDLARHQRTHTGEKPY | | X₁₈X₁₉HX₂₀X₂₁X₂₂X₂₃X₂₄X₈X₉CX₁₀X₁₁CX₁₂X₁₃X₁₄X₁₅X₁₆HRTTLTNH | |
| | | | KCPECGKSFSHRTTLTNHQRTHT | | X₁₇X₁₈X₁₉HX₂₀X₂₁X₂₂X₂₃X₂₄X₈X₉CX₁₀X₁₁CX₁₂X₁₃X₁₄X₁₅X₁₆DPGALV | |
| | | | GEKPYKCPECGKSFSDPGALVRH | | RHX₁₇X₁₈X₁₉HX₂₀X₂₁X₂₂X₂₃X₂₄X₈X₉CX₁₀X₁₁CX₁₂X₁₃X₁₄X₁₅X₁₆TSGE | |
| | | | QRTHTGEKPYKCPECGKSFSTSG | | LVRHX₁₇X₁₈X₁₉HX₂₀X₂₁X₂₂X₂₃X₂₄X₈X₉CX₁₀X₁₁CX₁₂XEX₁₄X₁₅X₁₆RE | |
| | | | ELVRHQRTHTGEKPYKCPECGKS | | DNLHTHX₁₇X₁₈X₁₉HX₂₀X₂₁X₂₂X₂₃X₂₄X₂₅X₂₆X₂₇X₂₈X₂₉X₃₀ | |
| | | | FSREDNLHTHQRTHTGEKPTGKK | | | |
| | | | TS | | | |
| aggtaggct | AGG TAG | 990 | LEPGEKPYKCPECGKSFSQAGHL | 1539 | X₁X₂X₃X₄X₅X₆X₇X₈X₉CX₁₀X₁₁CX₁₂X₁₃X₁₄X₁₅X₁₆QAGHLASHX₁₇X₁₈X₁₉ | 2088 |
| gtcagtgcc | GCT GTC | | ASHQRTHTGEKPYKCPECGKSFS | | HX₂₀X₂₁X₂₂X₂₃X₂₄X₈X₉CX₁₀X₁₁CX₁₂X₁₃X₁₄X₁₅X₁₆DCRDLARHX₁₇X₁₈ | |
| tga | AGT GCC | | DCRDLARHQRTHTGEKPYKCPEC | | X₁₉HX₂₀X₂₁X₂₂X₂₃X₂₄X₈X₉CX₁₀X₁₁CX₁₂X₁₃X₁₄X₁₅X₁₆HRTTLTNHX₁₇ | |
| | TGA | | GKSFSHRTTLTNHQRTHTGEKPY | | X₁₈X₁₉HX₂₀X₂₁X₂₂X₂₃X₂₄X₈X₉CX₁₀X₁₁CX₁₂X₁₃X₁₄X₁₅X₁₆DPGALVRH | |
| | | | KCPECGKSFSDPGALVRHQRTHT | | X₁₇X₁₈X₁₉HX₂₀X₂₁X₂₂X₂₃X₂₄X₈X₉CX₁₀X₁₁CX₁₂X₁₃X₁₄X₁₅X₁₆TSGELV | |
| | | | GEKPYKCPECGKSFSTSGELVRH | | RHX₁₇X₁₈X₁₉HX₂₀X₂₁X₂₂X₂₃X₂₄X₈X₉CX₁₀X₁₁CX₁₂X₁₃X₁₄X₁₅X₁₆REDN | |
| | | | QRTHTGEKPYKCPECGKSFSRED | | LHTHX₁₇X₁₈X₁₉HX₂₀X₂₁X₂₂X₂₃X₂₄X₈X₉CX₁₀X₁₁CX₁₂X₁₃X₁₄X₁₅X₁₆RS | |
| | | | NLHTHQRTHTGEKPYKCPECGKS | | DHLTNHX₁₇X₁₈X₁₉HX₂₀X₂₁X₂₂X₂₃X₂₄X₂₅X₂₆X₂₇X₂₈X₂₉X₃₀ | |
| | | | FSRSDHLTNHQRTHTGEKPTGKK | | | |
| | | | TS | | | |
| cggaggtag | CGG AGG | 991 | LEPGEKPYKCPECGKSFSDCRDL | 1540 | X₁X₂X₃X₄X₅X₆X₇X₈X₉CX₁₀X₁₁CX₁₂X₁₃X₁₄X₁₅X₁₆DCRDLARHX₁₇X₁₈X₁₉ | 2089 |
| gctgtcagt | TAG GCT | | ARHQRTHTGEKPYKCPECGKSFS | | HX₂₀X₂₁X₂₂X₂₃X₂₄X₈X₉CX₁₀X₁₁CX₁₂X₁₃X₁₄X₁₅X₁₆HRTTLTNHX₁₇X₁₈ | |
| gcc | GTC AGT | | HRTTLTNHQRTHTGEKPYKCPEC | | X₁₉HX₂₀X₂₁X₂₂X₂₃X₂₄X₈X₉CX₁₀X₁₁CX₁₂X₁₃X₁₄X₁₅X₁₆DPGALVRHX₁₇ | |
| | GCC | | GKSFSDPGALVRHQRTHTGEKPY | | X₁₈X₁₉HX₂₀X₂₁X₂₂X₂₃X₂₄X₈X₉CX₁₀X₁₁CX₁₂X₁₃X₁₄X₁₅X₁₆TSGELVRH | |
| | | | KCPECGKSFSTSGELVRHQRTHT | | X₁₇X₁₈X₁₉HX₂₀X₂₁X₂₂X₂₃X₂₄X₈X₉CX₁₀X₁₁CX₁₂X₁₃X₁₄X₁₅X₁₆REDNLH | |
| | | | GEKPYKCPECGKSFSREDNLHTH | | THX₁₇X₁₈X₁₉HX₂₀X₂₁X₂₂X₂₃X₂₄X₈X₉CX₁₀X₁₁CX₁₂X₁₃X₁₄X₁₅X₁₆RSDH | |
| | | | QRTHTGEKPYKCPECGKSFSRSD | | LTNHX₁₇X₁₈X₁₉HX₂₀X₂₁X₂₂X₂₃X₂₄X₈X₉CX₁₀X₁₁CX₁₂X₁₃X₁₄X₁₅X₁₆RS | |
| | | | HLTNHQRTHTGEKPYKCPECGKS | | DKLTEHX₁₇X₁₈X₁₉HX₂₀X₂₁X₂₂X₂₃X₂₄X₂₅X₂₆X₂₇X₂₈X₂₉X₃₀ | |
| | | | FSRSDKLTEHQRTHTGEKPTGKK | | | |
| | | | TS | | | |
| tagaatgcc | TAG AAT | 992 | LEPGEKPYKCPECGKSFSRSDEL | 1541 | X₁X₂X₃X₄X₅X₆X₇X₈X₉CX₁₀X₁₁CX₁₂X₁₃X₁₄X₁₅X₁₆RSDELVRHX₁₇X₁₈X₁₉ | 2090 |
| tgacttggg | GCC TGA | | VRHQRTHTGEKPYKCPECGKSFS | | HX₂₀X₂₁X₂₂X₂₃X₂₄X₈X₉CX₁₀X₁₁CX₁₂X₁₃X₁₄X₁₅X₁₆RSDKLVRHX₁₇X₁₈ | |
| gtg | CTT GGG | | RSDKLVRHQRTHTGEKPYKCPEC | | X₁₉HX₂₀X₂₁X₂₂X₂₃X₂₄X₈X₉CX₁₀X₁₁CX₁₂X₁₃X₁₄X₁₅X₁₆TTGALTEHX₁₇ | |
| | GTG | | GKSFSTTGALTEHQRTHTGEKPY | | X₁₈X₁₉HX₂₀X₂₁X₂₂X₂₃X₂₄X₈X₉CX₁₀X₁₁CX₁₂X₁₃X₁₄X₁₅X₁₆QAGHLASH | |
| | | | KCPECGKSFSQAGHLASHQRTHT | | X₁₇X₁₈X₁₉HX₂₀X₂₁X₂₂X₂₃X₂₄X₈X₉CX₁₀X₁₁CX₁₂X₁₃X₁₄X₁₅X₁₆DCRDLA | |
| | | | GEKPYKCPECGKSFSDCRDLARH | | RHX₁₇X₁₈X₁₉HX₂₀X₂₁X₂₂X₂₃X₂₄X₈X₉CX₁₀X₁₁CX₁₂X₁₃X₁₄X₁₅X₁₆TTGN | |
| | | | QRTHTGEKPYKCPECGKSFSTTG | | LTVHX₁₇X₁₈X₁₉HX₂₀X₂₁X₂₂X₂₃X₂₄X₈X₉CX₁₀X₁₁CX₁₂X₁₃X₁₄X₁₅X₁₆RE | |
| | | | NLTVHQRTHTGEKPYKCPECGKS | | DNLHTHX₁₇X₁₈X₁₉HX₂₀X₂₁X₂₂X₂₃X₂₄X₂₅X₂₆X₂₇X₂₈X₂₉X₃₀ | |
| | | | FSREDNLHTHQRTHTGEKPTGKK | | | |
| | | | TS | | | |
| aatgcctga | AAT GCC | 993 | LEPGEKPYKCPECGKSFSSPADL | 1542 | X₁X₂X₃X₄X₅X₆X₇X₈X₉CX₁₀X₁₁CX₁₂X₁₃X₁₄X₁₅X₁₆SPADLTRHX₁₇X₁₈X₁₉ | 2091 |
| cttggggtg | TGA CTT | | TRHQRTHTGEKPYKCPECGKSFS | | HX₂₀X₂₁X₂₂X₂₃X₂₄X₈X₉CX₁₀X₁₁CX₁₂X₁₃X₁₄X₁₅X₁₆RSDELVRHX₁₇X₁₈ | |
| aca | GGG gtg | | RSDELVRHQRTHTGEKPYKCPEC | | X₁₉HX₂₀X₂₁X₂₂X₂₃X₂₄X₈X₉CX₁₀X₁₁CX₁₂X₁₃X₁₄X₁₅X₁₆RSDKLVRHX₁₇ | |
| | ACA | | GKSFSRSDKLVRHQRTHTGEKPY | | X₁₈X₁₉HX₂₀X₂₁X₂₂X₂₃X₂₄X₈X₉CX₁₀X₁₁CX₁₂X₁₃X₁₄X₁₅X₁₆TTGALTEH | |
| | | | KCPECGKSFSTTGALTEHQRTHT | | X₁₇X₁₈X₁₉HX₂₀X₂₁X₂₂X₂₃X₂₄X₈X₉CX₁₀X₁₁CX₁₂X₁₃X₁₄X₁₅X₁₆QAGHLA | |
| | | | GEKPYKCPECGKSFSQAGHLASH | | SHX₁₇X₁₈X₁₉HX₂₀X₂₁X₂₂X₂₃X₂₄X₈X₉CX₁₀X₁₁CX₁₂X₁₃X₁₄X₁₅X₁₆DCRD | |
| | | | QRTHTGEKPYKCPECGKSFSDCR | | LARHX₁₇X₁₈X₁₉HX₂₀X₂₁X₂₂X₂₃X₂₄X₈X₉CX₁₀X₁₁CX₁₂XEX₁₄X₁₅X₁₆TT | |
| | | | DLARHQRTHTGEKPYKCPECGKS | | GNLTVHX₁₇X₁₈X₁₉HX₂₀X₂₁X₂₂X₂₃X₂₄X₂₅X₂₆X₂₇X₂₈X₂₉X₃₀ | |
| | | | FSTTGNLTVHQRTHTGEKPTGKK | | | |
| | | | TS | | | |
| agttagaat | AGT TAG | 994 | LEPGEKPYKCPECGKSFSRSDKL | 1543 | X₁X₂X₃X₄X₅X₆X₇X₈X₉CX₁₀X₁₁CX₁₂X₁₃X₁₄X₁₅X₁₆RSDKLVRHX₁₇X₁₈X₁₉ | 2092 |
| gcctgactt | AT GCC | | VRHQRTHTGEKPYKCPECGKSFS | | HX₂₀X₂₁X₂₂X₂₃X₂₄X₈X₉CX₁₀X₁₁CX₁₂X₁₃X₁₄X₁₅X₁₆TTGALTEHX₁₇X₁₈ | |
| ggg | TGA CTT | | TTGALTEHQRTHTGEKPYKCPEC | | X₁₉HX₂₀X₂₁X₂₂X₂₃X₂₄X₈X₉CX₁₀X₁₁CX₁₂X₁₃X₁₄X₁₅X₁₆QAGHLASHX₁₇ | |
| | GGG | | GKSFSQAGHLASHQRTHTGEKPY | | X₁₈X₁₉HX₂₀X₂₁X₂₂X₂₃X₂₄X₈X₉CX₁₀X₁₁CX₁₂X₁₃X₁₄X₁₅X₁₆DCRDLARH | |
| | | | KCPECGKSFSDCRDLARHQRTHT | | X₁₇X₁₈X₁₉HX₂₀X₂₁X₂₂X₂₃X₂₄X₈X₉CX₁₀X₁₁CX₁₂X₁₃X₁₄X₁₅X₁₆TTGNLT | |
| | | | GEKPYKCPECGKSFSTTGNLTVH | | VHX₁₇X₁₈X₁₉HX₂₀X₂₁X₂₂X₂₃X₂₄X₈X₉CX₁₀X₁₁CX₁₂X₁₃X₁₄X₁₅X₁₆REDN | |
| | | | QRTHTGEKPYKCPECGKSFSRED | | LHTHX₁₇X₁₈X₁₉HX₂₀X₂₁X₂₂X₂₃X₂₄X₈X₉CX₁₀X₁₁CX₁₂X₁₃X₁₄X₁₅X₁₆HR | |
| | | | NLHTHQRTHTGEKPYKCPECGKS | | TTLTNHX₁₇X₁₈X₁₉HX₂₀X₂₁X₂₂X₂₃X₂₄X₂₅X₂₆X₂₇X₂₈X₂₉X₃₀ | |
| | | | FSHRTTLTNHQRTHTGEKPTGKK | | | |
| | | | TS | | | |
| gcctgactt | GCC TGA | 995 | LEPGEKPYKCPECGKSFSRRDEL | 1544 | X₁X₂X₃X₄X₅X₆X₇X₈X₉CX₁₀X₁₁CX₁₂X₁₃X₁₄X₁₅X₁₆RRDELNVHX₁₇X₁₈X₁₉ | 2093 |
| ggggtgaca | CTT GGG | | NVHQRTHTGEKPYKCPECGKSFS | | HX₂₀X₂₁X₂₂X₂₃X₂₄X₈X₉CX₁₀X₁₁CX₁₂X₁₃X₁₄X₁₅X₁₆SPADLTRHX₁₇X₁₈ | |
| atg | gtg ACA | | SPADLTRHQRTHTGEKPYKCPEC | | X₁₉HX₂₀X₂₁X₂₂X₂₃X₂₄X₈X₉CX₁₀X₁₁CX₁₂X₁₃X₁₄X₁₅X₁₆RSDELVRHX₁₇ | |
| | ATG | | GKSFSRSDELVRHQRTHTGEKPY | | X₁₈X₁₉HX₂₀X₂₁X₂₂X₂₃X₂₄X₈X₉CX₁₀X₁₁CX₁₂X₁₃X₁₄X₁₅X₁₆RSDKLVRH | |
| | | | KCPECGKSFSRSDKLVRHQRTHT | | X₁₇X₁₈X₁₉HX₂₀X₂₁X₂₂X₂₃X₂₄X₈X₉CX₁₀X₁₁CX₁₂X₁₃X₁₄X₁₅X₁₆TTGALT | |
| | | | GEKPYKCPECGKSFSTTGALTEH | | EHX₁₇X₁₈X₁₉HX₂₀X₂₁X₂₂X₂₃X₂₄X₈X₉CX₁₀X₁₁CX₁₂X₁₃X₁₄X₁₅X₁₆QAGH | |
| | | | QRTHTGEKPYKCPECGKSFSQAG | | LASHX₁₇X₁₈X₁₉HX₂₀X₂₁X₂₂X₂₃X₂₄X₈X₉CX₁₀X₁₁CX₁₂X₁₃X₁₄X₁₅X₁₆DC | |
| | | | HLASHQRTHTGEKPYKCPECGKS | | RDLARHX₁₇X₁₈X₁₉HX₂₀X₂₁X₂₂X₂₃X₂₄X₂₅X₂₆X₂₇X₂₈X₂₉X₃₀ | |
| | | | FSDCRDLARHQRTHTGEKPTGKK | | | |
| | | | TS | | | |
| ggggtgaca | GGG gtg | 996 | LEPGEKPYKCPECGKSFSRSDHL | 1545 | X₁X₂X₃X₄X₅X₆X₇X₈X₉CX₁₀X₁₁CX₁₂X₁₃X₁₄X₁₅X₁₆RSDHLTNHX₁₇X₁₈X₁₉ | 2094 |
| atggcttgg | ACA ATG | | TNHQRTHTGEKPYKCPECGKSFS | | HX₂₀X₂₁X₂₂X₂₃X₂₄X₈X₉CX₁₀X₁₁CX₁₂X₁₃X₁₄X₁₅X₁₆RSDHLTTHX₁₇X₁₈ | |
| agg | GCT TGG | | RSDHLTTHQRTHTGEKPYKCPEC | | X₁₉HX₂₀X₂₁X₂₂X₂₃X₂₄X₈X₉CX₁₀X₁₁CX₁₂X₁₃X₁₄X₁₅X₁₆TSGELVRHX₁₇ | |
| | AGG | | GKSFSTSGELVRHQRTHTGEKPY | | X₁₈X₁₉HX₂₀X₂₁X₂₂X₂₃X₂₄X₈X₉CX₁₀X₁₁CX₁₂X₁₃X₁₄X₁₅X₁₆RRDELNVH | |
| | | | KCPECGKSFSRRDELNVHQRTHT | | X₁₇X₁₈X₁₉HX₂₀X₂₁X₂₂X₂₃X₂₄X₈X₉CX₁₀X₁₁CX₁₂X₁₃X₁₄X₁₅X₁₆SPADLT | |
| | | | GEKPYKCPECGKSFSSPADLTRH | | RHX₁₇X₁₈X₁₉HX₂₀X₂₁X₂₂X₂₃X₂₄X₈X₉CX₁₀X₁₁CX₁₂X₁₃X₁₄X₁₅X₁₆RSDE | |
| | | | QRTHTGEKPYKCPECGKSFSRSD | | LVRHX₁₇X₁₈X₁₉HX₂₀X₂₁X₂₂X₂₃X₂₄X₈X₉CX₁₀X₁₁CX₁₂X₁₃X₁₄X₁₅X₁₆RS | |
| | | | ELVRHQRTHTGEKPYKCPECGKS | | DKLVRHX₁₇X₁₈X₁₉HX₂₀X₂₁X₂₂X₂₃X₂₄X₂₅X₂₆X₂₇X₂₈X₂₉X₃₀ | |
| | | | FSRSDKLVRHQRTHTGEKPTGKK | | | |
| | | | TS | | | |
| tgacttggg | TGA CTT | 997 | LEPGEKPYKCPECGKSFSTSGEL | 1546 | X₁X₂X₃X₄X₅X₆X₇X₈X₉CX₁₀X₁₁CX₁₂X₁₃X₁₄X₁₅X₁₆TSGELVRHX₁₇X₁₈X₁₉ | 2095 |
| gtgacaatg | GGG gtg | | VRHQRTHTGEKPYKCPECGKSFS | | HX₂₀X₂₁X₂₂X₂₃X₂₄X₈X₉CX₁₀X₁₁CX₁₂X₁₃X₁₄X₁₅X₁₆RRDELNVHX₁₇X₁₈ | |
| gct | ACA ATG | | RRDELNVHQRTHTGEKPYKCPEC | | X₁₉HX₂₀X₂₁X₂₂X₂₃X₂₄X₈X₉CX₁₀X₁₁CX₁₂X₁₃X₁₄X₁₅X₁₆SPADLTRHX₁₇ | |
| | GCT | | GKSFSSPADLTRHQRTHTGEKPY | | X₁₈X₁₉HX₂₀X₂₁X₂₂X₂₃X₂₄X₈X₉CX₁₀X₁₁CX₁₂X₁₃X₁₄X₁₅X₁₆RSDELVRH | |
| | | | KCPECGKSFSRSDELVRHQRTHT | | X₁₇X₁₈X₁₉HX₂₀X₂₁X₂₂X₂₃X₂₄X₈X₉CX₁₀X₁₁CX₁₂X₁₃X₁₄X₁₅X₁₆RSDKLV | |
| | | | GEKPYKCPECGKSFSRSDKLVRH | | RHX₁₇X₁₈X₁₉HX₂₀X₂₁X₂₂X₂₃X₂₄X₈X₉CX₁₀X₁₁CX₁₂X₁₃X₁₄X₁₅X₁₆TTGA | |
| | | | QRTHTGEKPYKCPECGKSFSTTG | | LTEHX₁₇X₁₈X₁₉HX₂₀X₂₁X₂₂X₂₃X₂₄X₈X₉CX₁₀X₁₁CX₁₂X₁₃X₁₄X₁₅X₁₆QA | |
| | | | ALTEHQRTHTGEKPYKCPECGKS | | GHLASHX₁₇X₁₈X₁₉HX₂₀X₂₁X₂₂X₂₃X₂₄X₂₅X₂₆X₂₇X₂₈X₂₉X₃₀ | |
| | | | FSQAGHLASHQRTHTGEKPTGKK | | | |
| | | | TS | | | |
| cttggggtg | CTT GGG | 130 | LEPGEKPYKCPECGKSFSRSDHL | 131 | X₁X₂X₃X₄X₅X₆X₇X₈X₉CX₁₀X₁₁CX₁₂X₁₃X₁₄X₁₅X₁₆RSDHLTTHX₁₇X₁₈X₁₉ | 320 |
| acaatggct | gtg ACA | | TTHQRTHTGEKPYKCPECGKSFS | | HX₂₀X₂₁X₂₂X₂₃X₂₄X₈X₉CX₁₀X₁₁CX₁₂X₁₃X₁₄X₁₅X₁₆TSGELVRHX₁₇X₁₈ | |
| tgg | ATG GCT | | TSGELVRHQRTHTGEKPYKCPEC | | X₁₉HX₂₀X₂₁X₂₂X₂₃X₂₄X₈X₉CX₁₀X₁₁CX₁₂X₁₃X₁₄X₁₅X₁₆RRDELNVHX₁₇ | |
| | TGG | | GKSFSRRDELNVHQRTHTGEKPY | | X₁₈X₁₉HX₂₀X₂₁X₂₂X₂₃X₂₄X₈X₉CX₁₀X₁₁CX₁₂X₁₃X₁₄X₁₅X₁₆SPADLTRH | |
| | | | KCPECGKSFSSPADLTRHQRTHT | | X₁₇X₁₈X₁₉HX₂₀X₂₁X₂₂X₂₃X₂₄X₈X₉CX₁₀X₁₁CX₁₂X₁₃X₁₄X₁₅X₁₆RSDELV | |
| | | | GEKPYKCPECGKSFSRSDELVRH | | RHX₁₇X₁₈X₁₉HX₂₀X₂₁X₂₂X₂₃X₂₄X₈X₉CX₁₀X₁₁CX₁₂X₁₃X₁₄X₁₅X₁₆RSDK | |
| | | | QRTHTGEKPYKCPECGKSFSRSD | | LVRHX₁₇X₁₈X₁₉HX₂₀X₂₁X₂₂X₂₃X₂₄X₈X₉CX₁₀X₁₁CX₁₂XEX₁₄X₁₅X₁₆TT | |
| | | | KLVRHQRTHTGEKPYKCPECGKS | | GALTEHX₁₇X₁₈X₁₉HX₂₀X₂₁X₂₂X₂₃X₂₄X₂₅X₂₆X₂₇X₂₈X₂₉X₃₀ | |
| | | | FSTTGALTEHQRTHTGEKPTGKK | | | |
| | | | TS | | | |
| gcttggagg | GCT TGG | 998 | LEPGEKPYKCPECGKSFSDPGAL | 1547 | X₁X₂X₃X₄X₅X₆X₇X₈X₉CX₁₀X₁₁CX₁₂X₁₃X₁₄X₁₅X₁₆DPGALVRHX₁₇X₁₈X₁₉ | 2096 |
| ggtgggtga | AGG GGT | | VRHQRTHTGEKPYKCPECGKSFS | | HX₂₀X₂₁X₂₂X₂₃X₂₄X₈X₉CX₁₀X₁₁CX₁₂X₁₃X₁₄X₁₅X₁₆QAGHLASHX₁₇X₁₈ | |
| gtc | GGG TGA | | QAGHLASHQRTHTGEKPYKCPEC | | X₁₉HX₂₀X₂₁X₂₂X₂₃X₂₄X₈X₉CX₁₀X₁₁CX₁₂X₁₃X₁₄X₁₅X₁₆RSDKLVRHX₁₇ | |
| | GTC | | GKSFSRSDKLVRHQRTHTGEKPY | | X₁₈X₁₉HX₂₀X₂₁X₂₂X₂₃X₂₄X₈X₉CX₁₀X₁₁CX₁₂X₁₃X₁₄X₁₅X₁₆TSGHLVRH | |
| | | | KCPECGKSFSTSGHLVRHQRTHT | | X₁₇X₁₈X₁₉HX₂₀X₂₁X₂₂X₂₃X₂₄X₈X₉CX₁₀X₁₁CX₁₂X₁₃X₁₄X₁₅X₁₆RSDHLT | |
| | | | GEKPYKCPECGKSFSRSDHLTNH | | NHX₁₇X₁₈X₁₉HX₂₀X₂₁X₂₂X₂₃X₂₄X₈X₉CX₁₀X₁₁CX₁₂X₁₃X₁₄X₁₅X₁₆RSDH | |
| | | | QRTHTGEKPYKCPECGKSFSRSD | | LTTHX₁₇X₁₈X₁₉HX₂₀X₂₁X₂₂X₂₃X₂₄X₈X₉CX₁₀X₁₁CX₁₂X₁₃X₁₄X₁₅X₁₆TS | |
| | | | HLTTHQRTHTGEKPYKCPECGKS | | GELVRHX₁₇X₁₈X₁₉HX₂₀X₂₁X₂₂X₂₃X₂₄X₂₅X₂₆X₂₇X₂₈X₂₉X₃₀ | |
| | | | FSTSGELVRHQRTHTGEKPTGKK | | | |
| | | | TS | | | |
| tggaggggt | TGG AGG | 999 | LEPGEKPYKCPECGKSFSRKDNL | 1548 | X₁X₂X₃X₄X₅X₆X₇X₈X₉CX₁₀X₁₁CX₁₂X₁₃X₁₄X₁₅X₁₆RKDNLKNHX₁₇X₁₈X₁₉ | 2097 |
| gggtgagtc | GGT GGG | | KNHQRTHTGEKPYKCPECGKSFS | | HX₂₀X₂₁X₂₂X₂₃X₂₄X₈X₉CX₁₀X₁₁CX₁₂X₁₃X₁₄X₁₅X₁₆DPGALVRHX₁₇X₁₈ | |
| aag | TGA GTC | | DPGALVRHQRTHTGEKPYKCPEC | | X₁₉HX₂₀X₂₁X₂₂X₂₃X₂₄X₈X₉CX₁₀X₁₁CX₁₂X₁₃X₁₄X₁₅X₁₆QAGHLASHX₁₇ | |
| | APG | | GKSFSQAGHLASHQRTHTGEKPY | | X₁₈X₁₉HX₂₀X₂₁X₂₂X₂₃X₂₄X₈X₉CX₁₀X₁₁CX₁₂X₁₃X₁₄X₁₅X₁₆RSDKLVRH | |
| | | | KCPECGKSFSRSDKLVRHQRTHT | | X₁₇X₁₈X₁₉HX₂₀X₂₁X₂₂X₂₃X₂₄X₈X₉CX₁₀X₁₁CX₁₂X₁₃X₁₄X₁₅X₁₆TSGHLV | |
| | | | GEKPYKCPECGKSFSTSGHLVRH | | RHX₁₇X₁₈X₁₉HX₂₀X₂₁X₂₂X₂₃X₂₄X₈X₉CX₁₀X₁₁CX₁₂X₁₃X₁₄X₁₅X₁₆RSDH | |
| | | | QRTHTGEKPYKCPECGKSFSRSD | | LTNHX₁₇X₁₈X₁₉HX₂₀X₂₁X₂₂X₂₃X₂₄X₈X₉CX₁₀X₁₁CX₁₂X₁₃X₁₄X₁₅X₁₆RS | |
| | | | HLTNHQRTHTGEKPYKCPECGKS | | DHLTTHX₁₇X₁₈X₁₉HX₂₀X₂₁X₂₂X₂₃X₂₄X₂₅X₂₆X₂₇X₂₈X₂₉X₃₀ | |
| | | | FSRSDHLTTHQRTHTGEKPTGKK | | | |
| | | | TS | | | |
| gtgacaatg | gtg ACA | 1000 | LEPGEKPYKCPECGKSFSTSGHL | 1549 | X₁X₂X₃X₄X₅X₆X₇X₈X₉CX₁₀X₁₁CX₁₂X₁₃X₁₄X₁₅X₁₆TSGHLVRHX₁₇X₁₈X₁₉ | 2098 |
| gcttggagg | ATG GCT | | VRHQRTHTGEKPYKCPECGKSFS | | HX₂₀X₂₁X₂₂X₂₃X₂₄X₈X₉CX₁₀X₁₁CX₁₂X₁₃X₁₄X₁₅X₁₆RSDHLTNHX₁₇X₁₈ | |
| ggt | TGG AGG | | RSDHLTNHQRTHTGEKPYKCPEC | | X₁₉HX₂₀X₂₁X₂₂X₂₃X₂₄X₈X₉CX₁₀X₁₁CX₁₂X₁₃X₁₄X₁₅X₁₆RSDHLTTHX₁₇ | |
| | GGT | | GKSFSRSDHLTTHQRTHTGEKPY | | X₁₈X₁₉HX₂₀X₂₁X₂₂X₂₃X₂₄X₈X₉CX₁₀X₁₁CX₁₂X₁₃X₁₄X₁₅X₁₆TSGELVRH | |
| | | | KCPECGKSFSTSGELVRHQRTHT | | X₂₇X₁₈X₁₉HX₂₀X₂₁X₂₂X₂₃X₂₄X₈X₉CX₁₀X₁₁CX₁₂X₁₃X₁₄X₁₅X₁₆RRDELN | |
| | | | GEKPYKCPECGKSFSRRDELNVH | | VHX₁₇X₁₈X₁₉HX₂₀X₂₁X₂₂X₂₃X₂₄X₈X₉CX₁₀X₁₁CX₁₂X₁₃X₁₄X₁₅X₁₆SPAD | |
| | | | QRTHTGEKPYKCPECGKSFSSPA | | LTRHX₁₇X₁₈X₁₉HX₂₀X₂₁X₂₂X₂₃X₂₄X₈X₉CX₁₀X₁₁CX₁₂X₁₃X₁₄X₁₅X₁₆RS | |
| | | | DLTRHQRTHTGEKPYKCPECGKS | | DELVRHX₁₇X₁₈X₁₉HX₂₀X₂₁X₂₂X₂₃X₂₄X₂₅X₂₆X₂₇X₂₈X₂₉X₃₀ | |
| | | | FSRSDELVRHQRTHTGEKPTGKK | | | |
| | | | TS | | | |
| atggcttgg | ATG GCT | 1001 | LEPGEKPYKCPECGKSFSQAGHL | 1550 | X₁X₂X₃X₄X₅X₆X₇X₈X₉CX₁₀X₁₁CX₁₂X₁₃X₁₄X₁₅X₁₆QAGHLASHX₁₇X₁₈X₁₉ | 2099 |
| aggggtggg | TGG AGG | | ASHQRTHTGEKPYKCPECGKSFS | | HX₂₀X₂₁X₂₂X₂₃X₂₄X₈X₉CX₁₀X₁₁CX₁₂X₁₃X₁₄X₁₅X₁₆RSDKLVRHX₁₇X₁₈ | |
| tga | GGT GGG | | RSDKLVRHQRTHTGEKPYKCPEC | | X₁₉HX₂₀X₂₁X₂₂X₂₃X₂₄X₈X₉CX₁₀X₁₁CX₁₂X₁₃X₁₄X₁₅X₁₆TSGHLVRHX₁₇ | |
| | TGA | | GKSFSTSGHLVRHQRTHTGEKPY | | X₁₈X₁₉HX₂₀X₂₁X₂₂X₂₃X₂₄X₈X₉CX₁₀X₁₁CX₁₂X₁₃X₁₄X₁₅X₁₆RSDHLTNH | |
| | | | KCPECGKSFSRSDHLTNHQRTHT | | X₁₇X₁₈X₁₉HX₂₀X₂₁X₂₂X₂₃X₂₄X₈X₉CX₁₀X₁₁CX₁₂X₁₃X₁₄X₁₅X₁₆RSDHLT | |
| | | | GEKPYKCPECGKSFSRSDHLTTH | | THX₁₇X₁₈X₁₉HX₂₀X₂₁X₂₂X₂₃X₂₄X₈X₉CX₁₀X₁₁CX₁₂X₁₃X₁₄X₁₅X₁₆TSGE | |
| | | | QRTHTGEKPYKCPECGKSFSTSG | | LVRHX₁₇X₁₈X₁₉HX₂₀X₂₁X₂₂X₂₃X₂₄X₈X₉CX₁₀X₁₁CX₁₂X₁₃X₁₄X₁₅X₁₆RR | |
| | | | ELVRHQRTHTGEKPYKCPECGKS | | DELNVHX₁₇X₁₈X₁₉HX₂₀X₂₁X₂₂X₂₃X₂₄X₂₅X₂₆X₂₇X₂₈X₂₉X₃₀ | |
| | | | FSRRDELNVHQRTHTGEKPTGKK | | | |
| | | | TS | | | |
| acaatggct | ACA ATG | 1002 | LEPGEKPYKCPECGKSFSRSDKL | 1551 | X₁X₂X₃X₄X₅X₆X₇X₈X₉CX₁₀X₁₁CX₁₂X₁₃X₁₄X₁₅X₁₆RSDKLVRHX₁₇X₁₈X₁₉ | 2100 |
| tggaggggt | GCT TGG | | VRHQRTHTGEKPYKCPECGKSFS | | HX₂₀X₂₁X₂₂X₂₃X₂₄X₈X₉CX₁₀X₁₁CX₁₂X₁₃X₁₄X₁₅X₁₆TSGHLVRHX₁₇X₁₈ | |
| ggg | AGG GGT | | TSGHLVRHQRTHTGEKPYKCPEC | | X₁₉HX₂₀X₂₁X₂₂X₂₃X₂₄X₈X₉CX₁₀X₁₁CX₁₂X₁₃X₁₄X₁₅X₁₆RSDHLTNHX₁₇ | |
| | GGG | | GKSFSRSDHLTNHQRTHTGEKPY | | X₁₈X₁₉HX₂₀X₂₁X₂₂X₂₃X₂₄X₈X₉CX₁₀X₁₁CX₁₂X₁₃X₁₄X₁₅X₁₆RSDHLTTH | |
| | | | KCPECGKSFSRSDHLTTHQRTHT | | X₁₇X₁₈X₁₉HX₂₀X₂₁X₂₂X₂₃X₂₄X₈X₉CX₁₀X₁₁CX₁₂X₁₃X₁₄X₁₅X₁₆TSGELV | |
| | | | GEKPYKCPECGKSFSTSGELVRH | | RHX₁₇X₁₈X₁₉HX₂₀X₂₁X₂₂X₂₃X₂₄X₈X₉CX₁₀X₁₁CX₁₂X₁₃X₁₄X₁₅X₁₆RRDE | |
| | | | QRTHTGEKPYKCPECGKSFSRRD | | LNVHX₁₇X₁₈X₁₉HX₂₀X₂₁X₂₂X₂₃X₂₄X₈X₉CX₁₀X₁₁CX₁₂X₁₃X₁₄X₁₅X₁₆SP | |
| | | | ELNVHQRTHTGEKPYKCPECGKS | | ADLTRHX₁₇X₁₈X₁₉HX₂₀X₂₁X₂₂X₂₃X₂₄X₂₅X₂₆X₂₇X₂₈X₂₉X₃₀ | |
| | | | FSSPADLTRHQRTHTGEKPTGKK | | | |
| | | | TS | | | |
| gggtgagtc | GGG TGA | 1003 | LEPGEKPYKCPECGKSFSRRDEL | 1552 | X₁X₂X₃X₄X₅X₆X₇X₈X₉CX₁₀X₁₁CX₁₂X₁₃X₁₄X₁₅X₁₆RRDELNVHX₁₇X₁₈X₁₉ | 2101 |
| aagggtcaa | GTC AAG | | NVHQRTHTGEKPYKCPECGKSFS | | HX₂₀X₂₁X₂₂X₂₃X₂₄X₈X₉CX₁₀X₁₁CX₁₂X₁₃X₁₄X₁₅X₁₆QSGNLTEHX₁₇X₁₈ | |
| atg | GGT CAA | | QSGNLTEHQRTHTGEKPYKCPEC | | X₁₉HX₂₀X₂₁X₂₂X₂₃X₂₄X₈X₉CX₁₀X₁₁CX₁₂X₁₃X₁₄X₁₅X₁₆TSGHLVRHX₁₇ | |
| | ATG | | GKSFSTSGHLVRHQRTHTGEKPY | | X₁₈X₁₉HX₂₀X₂₁X₂₂X₂₃X₂₄X₈X₉CX₁₀X₁₁CX₁₂X₁₃X₁₄X₁₅X₁₆RKDNLKNH | |
| | | | KCPECGKSFSRKDNLKNHQRTHT | | X₁₇X₁₈X₁₉HX₂₀X₂₁X₂₂X₂₃X₂₄X₈X₉CX₁₀X₁₁CX₁₂X₁₃X₁₄X₁₅X₁₆DPGALV | |
| | | | GEKPYKCPECGKSFSDPGALVRH | | RHX₁₇X₁₈X₁₉HX₂₀X₂₁X₂₂X₂₃X₂₄X₈X₉CX₁₀X₁₁CX₁₂X₁₃X₁₄X₁₅X₁₆QAGH | |
| | | | QRTHTGEKPYKCPECGKSFSQAG | | LASHX₁₇X₁₈X₁₉HX₂₀X₂₁X₂₂X₂₃X₂₄X₈X₉CX₁₀X₁₁CX₁₂X₁₃X₁₄X₁₅X₁₆RS | |
| | | | HLASHQRTHTGEKPYKCPECGKS | | DKLVRHX₁₇X₁₈X₁₉HX₂₀X₂₁X₂₂X₂₃X₂₄X₂₅X₂₆X₂₇X₂₈X₂₉X₃₀ | |
| | | | FSRSDKLVRHQRTHTGEKPTGKK | | | |
| | | | TS | | | |
| ggtcaaatg | GGT CAA | 1004 | LEPGEKPYKCPECGKSFSRSDNL | 1553 | X₁X₂X₃X₄X₅X₆X₇X₈X₉CX₁₀X₁₁CX₁₂X₁₃X₁₄X₁₅X₁₆RSDNLVRHX₁₇X₁₈X₁₉ | 2102 |
| agtgcccgt | ATG AGT | | VRHQRTHTGEKPYKCPECGKSFS | | HX₂₀X₂₁X₂₂X₂₃X₂₄X₈X₉CX₁₀X₁₁CX₁₂X₁₃X₁₄X₁₅X₁₆SRRTCRAHX₁₇X₁₈ | |
| gag | GCC CGT | | SRRTCRAHQRTHTGEKPYKCPEC | | X₁₉HX₂₀X₂₁X₂₂X₂₃X₂₄X₈X₉CX₁₀X₁₁CX₁₂X₁₃X₁₄X₁₅X₁₆DCRDLARHX₁₇ | |
| | GAG | | GKSFSDCRDLARHQRTHTGEKPY | | X₁₈X₁₉HX₂₀X₂₁X₂₂X₂₃X₂₄X₈X₉CX₁₀X₁₁CX₁₂X₁₃X₁₄X₁₅X₁₆HRTTLTNH | |
| | | | KCPECGKSFSHRTTLTNHQRTHT | | X₁₇X₁₈X₁₉HX₂₀X₂₁X₂₂X₂₃X₂₄X₈X₉CX₁₀X₁₁CX₁₂X₁₃X₁₄X₁₅X₁₆RRDELN | |
| | | | GEKPYKCPECGKSFSRRDELNVH | | VHX₁₇X₁₈X₁₉HX₂₀X₂₁X₂₂X₂₃X₂₄X₈X₉CX₁₀X₁₁CX₁₂X₁₃X₁₄X₁₅X₁₆QSGN | |
| | | | QRTHTGEKPYKCPECGKSFSQSG | | LTEHX₁₇X₁₈X₁₉HX₂₀X₂₁X₂₂X₂₃X₂₄X₈X₉CX₁₀X₁₁CX₁₂X₁₃X₁₄X₁₅X₁₆TS | |
| | | | NLTEHQRTHTGEKPYKCPECGKS | | GHLVRHX₁₇X₁₈X₁₉HX₂₀X₂₁X₂₂X₂₃X₂₄X₂₅X₂₆X₂₇X₂₈X₂₉X₃₀ | |
| | | | FSTSGHLVRHQRTHTGEKPTGKK | | | |
| | | | TS | | | |
| tgagtcaag | TGA GTC | 1005 | LEPGEKPYKCPECGKSFSHRTTL | 1554 | X₁X₂X₃X₄X₅X₆X₇X₈X₉CX₁₀X₁₁CX₁₂X₁₃X₁₄X₁₅X₁₆HRTTLTNHX₁₇X₁₈X₁₉ | 2103 |
| ggtcaaatg | AAG GGT | | TNHQRTHTGEKPYKCPECGKSFS | | HX₂₀X₂₁X₂₂X₂₃X₂₄X₈X₉CX₁₀X₁₁CX₁₂X₁₃X₁₄X₁₅X₁₆RRDELNVHX₁₇X₁₈ | |
| agt | CAA ATG | | RRDELNVHQRTHTGEKPYKCPEC | | X₁₉HX₂₀X₂₁X₂₂X₂₃X₂₄X₈X₉CX₁₀X₁₁CX₁₂X₁₃X₁₄X₁₅X₁₆QSGNLTEHX₁₇ | |
| | AGT | | GKSFSQSGNLTEHQRTHTGEKPY | | X₁₈X₁₉HX₂₀X₂₁X₂₂X₂₃X₂₄X₈X₉CX₁₀X₁₁CX₁₂X₁₃X₁₄X₁₅X₁₆TSGHLVRH | |
| | | | KCPECGKSFSTSGHLVRHQRTHT | | X₁₇X₁₈X₁₉HX₂₀X₂₁X₂₂X₂₃X₂₄X₈X₉CX₁₀X₁₁CX₁₂X₁₃X₁₄X₁₅X₁₆RKDNLK | |
| | | | GEKPYKCPECGKSFSRKDNLKNH | | NHX₁₇X₁₈X₁₉HX₂₀X₂₁X₂₂X₂₃X₂₄X₈X₉CX₁₀X₁₁CX₁₂X₁₃X₁₄X₁₅X₁₆DPGA | |
| | | | QRTHTGEKPYKCPECGKSFSDPG | | LVRHX₁₇X₁₈X₁₉HX₂₀X₂₁X₂₂X₂₃X₂₄X₈X₉CX₁₀X₁₁CX₁₂X₁₃X₁₄X₁₅X₁₆QA | |
| | | | ALVRHQRTHTGEKPYKCPECGKS | | GHLASHX₁₇X₁₈X₁₉HX₂₀X₂₁X₂₂X₂₃X₂₄X₂₅X₂₆X₂₇X₂₈X₂₉X₃₀ | |
| | | | FSQAGHLASHQRTHTGEKPTGKK | | | |
| | | | TS | | | |
| gtcaagggt | GTC AAG | 1006 | LEPGEKPYKCPECGKSFSDCRDL | 1555 | X₁X₂X₃X₄X₅X₆X₇X₈X₉CX₁₀X₁₁CX₁₂X₁₃X₁₄X₁₅X₁₆DCRDLARHX₁₇X₁₈X₁₉ | 2104 |
| caaatgagt | GGT CAA | | ARHQRTHTGEKPYKCPECGKSFS | | HX₂₀X₂₁X₂₂X₂₃X₂₄X₈X₉CX₁₀X₁₁CX₁₂X₁₃X₁₄X₁₅X₁₆HRTTLTNHX₁₇X₁₈ | |
| gcc | ATG AGT | | HRTTLTNHQRTHTGEKPYKCPEC | | X₁₉HX₂₀X₂₁X₂₂X₂₃X₂₄X₈X₉CX₁₀X₁₁CX₁₂X₁₃X₁₄X₁₅X₁₆RRDELNVHX₁₇ | |
| | GCC | | GKSFSRRDELNVHQRTHTGEKPY | | X₁₈X₁₉HX₂₀X₂₁X₂₂X₂₃X₂₄X₈X₉CX₁₀X₁₁CX₁₂X₁₃X₁₄X₁₅X₁₆QSGNLTEH | |
| | | | KCPECGKSFSQSGNLTEHQRTHT | | X₁₇X₁₈X₁₉HX₂₀X₂₁X₂₂X₂₃X₂₄X₈X₉CX₁₀X₁₁CX₁₂X₁₃X₁₄X₁₅X₁₆TSGHLV | |
| | | | GEKPYKCPECGKSFSTSGHLVRH | | RHX₁₇X₁₈X₁₉HX₂₀X₂₁X₂₂X₂₃X₂₄X₈X₉CX₁₀X₁₁CX₁₂X₁₃X₁₄X₁₅X₁₆RKDN | |
| | | | QRTHTGEKPYKCPECGKSFSRKD | | LKNHX₁₇X₁₈X₁₉HX₂₀X₂₁X₂₂X₂₃X₂₄X₈X₉CX₁₀X₁₁CX₁₂X₁₃X₁₄X₁₅X₁₆DP | |
| | | | NLKNHQRTHTGEKPYKCPECGKS | | GALVRHX₁₇X₁₈X₁₉HX₂₀X₂₁X₂₂X₂₃X₂₄X₂₅X₂₆X₂₇X₂₈X₂₉X₃₀ | |
| | | | FSDPGALVRHQRTHTGEKPTGKK | | | |
| | | | TS | | | |
| aagggtcaa | AAG GGT | 1007 | LEPGEKPYKCPECGKSFSSRRTC | 1556 | X₁X₂X₃X₄X₅X₆X₇X₈X₉CX₁₀X₁₁CX₁₂X₁₃X₁₄X₁₅X₁₆SRRTCRAHX₁₇X₁₈X₁₉ | 2105 |
| atgagtgcc | CAA ATG | | RAHQRTHTGEKPYKCPECGKSFS | | HX₂₀X₂₁X₂₂X₂₃X₂₄X₈X₉CX₁₀X₁₁CX₁₂X₁₃X₁₄X₁₅X₁₆DCRDLARHX₁₇X₁₈ | |
| cgt | AGT GCC | | DCRDLARHQRTHTGEKPYKCPEC | | X₁₉HX₂₀X₂₁X₂₂X₂₃X₂₄X₈X₉CX₁₀X₁₁CX₁₂X₁₃X₁₄X₁₅X₁₆HRTTLTNHX₁₇ | |
| | CGT | | GKSFSHRTTLTNHQRTHTGEKPY | | X₁₈X₁₉HX₂₀X₂₁X₂₂X₂₃X₂₄X₈X₉CX₁₀X₁₁CX₁₂X₁₃X₁₄X₁₅X₁₆RRDELNVH | |
| | | | KCPECGKSFSRRDELNVHQRTHT | | X₁₇X₁₈X₁₉HX₂₀X₂₁X₂₂X₂₃X₂₄X₈X₉CX₁₀X₁₁CX₁₂X₁₃X₁₄X₁₅X₁₆QSGNLT | |
| | | | GEKPYKCPECGKSFSQSGNLTEH | | EHX₁₇X₁₈X₁₉HX₂₀X₂₁X₂₂X₂₃X₂₄X₈X₉CX₁₀X₁₁CX₁₂X₁₃X₁₄X₁₅X₁₆TSGH | |
| | | | QRTHTGEKPYKCPECGKSFSTSG | | LVRHX₁₇X₁₈X₁₉HX₂₀X₂₁X₂₂X₂₃X₂₄X₈X₉CX₁₀X₁₁CX₁₂X₁₃X₁₄X₁₅X₁₆RK | |
| | | | HLVRHQRTHTGEKPYKCPECGKS | | DNLKNHX₁₇X₁₈X₁₉HX₂₀X₂₁X₂₂X₂₃X₂₄X₂₅X₂₆X₂₇X₂₈X₂₉X₃₀ | |
| | | | FSRKDNLKNHQRTHTGEKPTGKK | | | |
| | | | TS | | | |
| aggggtggg | AGG GGT | 1008 | LEPGEKPYKCPECGKSFSTSGHL | 1557 | X₁X₂X₃X₄X₅X₆X₇X₈X₉CX₁₀X₁₁CX₁₂X₁₃X₁₄X₁₅X₁₆TSGHLVRHX₁₇X₁₈X₁₉ | 2106 |
| tgagtcaag | GGG TGA | | VRHQRTHTGEKPYKCPECGKSFS | | HX₂₀X₂₁X₂₂X₂₃X₂₄X₈X₉CX₁₀X₁₁CX₁₂X₁₃X₁₄X₁₅X₁₆RKDNLKNHX₁₇X₁₈ | |
| ggt | GTC AAG | | RKDNLKNHQRTHTGEKPYKCPEC | | X₁₉HX₂₀X₂₁X₂₂X₂₃X₂₄X₈X₉CX₁₀X₁₁CX₁₂X₁₃X₁₄X₁₅X₁₆DPGALVRHX₁₇ | |
| | GGT | | GKSFSDPGALVRHQRTHTGEKPY | | X₁₈X₁₉HX₂₀X₂₁X₂₂X₂₃X₂₄X₈X₉CX₁₀X₁₁CX₁₂X₁₃X₁₄X₁₅X₁₆QAGHLASH | |
| | | | KCPECGKSFSQAGHLASHQRTHT | | X₁₇X₁₈X₁₉HX₂₀X₂₁X₂₂X₂₃X₂₄X₈X₉CX₁₀X₁₁CX₁₂X₁₃X₁₄X₁₅X₁₆RSDKLV | |
| | | | GEKPYKCPECGKSFSRSDKLVRH | | RHX₁₇X₁₈X₁₉HX₂₀X₂₁X₂₂X₂₃X₂₄X₈X₉CX₁₀X₁₁CX₁₂X₁₃X₁₄X₁₅X₁₆TSGH | |
| | | | QRTHTGEKPYKCPECGKSFSTSG | | LVRHX₁₇X₁₈X₁₉HX₂₀X₂₁X₂₂X₂₃X₂₄X₈X₉CX₁₀X₁₁CX₁₂X₁₃X₁₄X₁₅X₁₆RS | |
| | | | HLVRHQRTHTGEKPYKCPECGKS | | DHLTNHX₁₇X₁₃X₁₉HX₂₀X₂₁X₂₂X₂₃X₂₄X₂₅X₂₆X₂₇X₂₈X₂₉X₃₀ | |
| | | | FSRSDHLTNHQRTHTGEKPTGKK | | | |
| | | | TS | | | |
| ggtgggtga | GGT GGG | 1009 | LEPGEKPYKCPECGKSFSQSGNL | 1558 | X₁X₂X₃X₄X₅X₆X₇X₈X₉CX₁₀X₁₁CX₁₂X₁₃X₁₄X₁₅X₁₆QSGNLTEHX₁₇X₁₈X₁₉ | 2107 |
| gtcaagggt | TGA GTC | | TEHQRTHTGEKPYKCPECGKSFS | | HX₂₀X₂₁X₂₂X₂₃X₂₄X₈X₉CX₁₀X₁₁CX₁₂X₁₃X₁₄X₁₅X₁₆TSGHLVRHX₁₇X₁₈ | |
| caa | AAG GGT | | TSGHLVRHQRTHTGEKPYKCPEC | | X₁₉HX₂₀X₂₁X₂₂X₂₃X₂₄X₈X₉CX₁₀X₁₁CX₁₂X₁₃X₁₄X₁₅X₁₆RKDNLKNHX₁₇ | |
| | CAA | | GKSFSRKDNLKNHQRTHTGEKPY | | X₁₈X₁₉HX₂₀X₂₁X₂₂X₂₃X₂₄X₈X₉CX₁₀X₁₁CX₁₂X₁₃X₁₄X₁₅X₁₆DPGALVRH | |
| | | | KCPECGKSFSDPGALVRHQRTHT | | X₁₇X₁₈X₁₉HX₂₀X₂₁X₂₂X₂₃X₂₄X₈X₉CX₁₀X₁₁CX₁₂X₁₃X₁₄X₁₅X₁₆QAGHLA | |
| | | | GEKPYKCPECGKSFSQAGHLASH | | SHX₁₇X₁₈X₁₉HX₂₀X₂₁X₂₂X₂₃X₂₄X₈X₉CX₁₀X₁₁CX₁₂X₁₃X₁₄X₁₅X₁₆RSDK | |
| | | | QRTHTGEKPYKCPECGKSFSRSD | | LVRHX₁₇X₁₈X₁₉HX₂₀X₂₁X₂₂X₂₃X₂₄X₈X₉CX₁₀X₁₁CX₁₂X₁₃X₁₄X₁₅X₁₆TS | |
| | | | KLVRHQRTHTGEKPYKCPECGKS | | GHLVRHX₁₇X₁₈X₁₉HX₂₀X₂₁X₂₂X₂₃X₂₄X₂₅X₂₆X₂₇X₂₈X₂₉X₃₀ | |
| | | | FSTSGHLVRHQRTHTGEKPTGKK | | | |
| | | | TS | | | |
| ctgacttgg | CTG ACT | 1010 | LEPGEKPYKCPECGKSFSDPGHL | 1559 | X₁X₂X₃X₄X₅X₆X₇X₈X₉CX₁₀X₁₁CX₁₂X₁₃X₁₄X₁₅X₁₆DPGHLVRHX₁₇X₁₈X₁₉ | 2108 |
| ggtgacaat | TGG GGT | | VRHQRTHTGEKPYKCPECGKSFS | | HX₂₀X₂₁X₂₂X₂₃X₂₄X₈X₉CX₁₀X₁₁CX₁₂X₁₃X₁₄X₁₅X₁₆TTGNLTVHX₁₇X₁₈ | |
| ggc | GAC AAT | | TTGNLTVHQRTHTGEKPYKCPEC | | X₁₉HX₂₀X₂₁X₂₂X₂₃X₂₄X₈X₉CX₁₀X₁₁CX₁₂X₁₃X₁₄X₁₅X₁₆DPGNLVRHX₁₇ | |
| | GGC | | GKSFSDPGNLVRHQRTHTGEKPY | | X₁₈X₁₉HX₂₀X₂₁X₂₂X₂₃X₂₄X₈X₉CX₁₀X₁₁CX₁₂X₁₃X₁₄X₁₅X₁₆TSGHLVRH | |
| | | | KCPECGKSFSTSGHLVRHQRTHT | | X₁₇X₁₈X₁₉HX₂₀X₂₁X₂₂X₂₃X₂₄X₈X₉CX₁₀X₁₁CX₁₂X₁₃X₁₄X₁₅X₁₆RSDHLT | |
| | | | GEKPYKCPECGKSFSRSDHLTTH | | THX₁₇X₁₈X₁₉HX₂₀X₂₁X₂₂X₂₃X₂₄X₈X₉CX₁₀X₁₁CX₁₂X₁₃X₁₄X₁₅X₁₆THLD | |
| | | | QRTHTGEKPYKCPECGKSFSTHL | | LIRHX₁₇X₁₈X₁₉HX₂₀X₂₁X₂₂X₂₃X₂₄X₈X₉CX₁₀X₁₁CX₁₂X₁₃X₁₄X₁₅X₁₆RN | |
| | | | DLIRHQRTHTGEKPYKCPECGKS | | DALTEHX₁₇X₁₈X₁₉XHX₂₀X₂₁X₂₂X₂₃X₂₄X₂₅X₂₆X₂₇X₂₈X₂₉X₃₀ | |
| | | | FSRNDALTEHQRTHTGEKPTGKK | | | |
| | | | TS | | | |
| gggtgacaa | GGG TGA | 1011 | LEPGEKPYKCPECGKSFSRSDKL | 1560 | X₁X₂X₃X₄X₅X₆X₇X₈X₉CXₗ₀X₁₁CX₁₂X₁₃X₁₄X₁₅X₁₆RSDKLVRHX₁₇X₁₈X₁₉ | 2109 |
| tggcttgga | CAA TGG | | VRHQRTHTGEKPYKCPECGKSFS | | HX₂₀X₂₁X₂₂X₂₃X₂₄X₈X₉CX₁₀X₁₁CX₁₂X₁₃X₁₄X₁₅X₁₆QRAHLERHX₁₇X₁₈ | |
| ggg | CTT GGA | | QRAHLERHQRTHTGEKPYKCPEC | | X₁₉HX₂₀X₂₁X₂₂X₂₃X₂₄X₈X₉CX₁₀X₁₁CX₁₂X₁₃X₁₄X₁₅X₁₆TTGALTEHX₁₇ | |
| | GGG | | GKSFSTTGALTEHQRTHTGEKPY | | X₁₈X₁₉HX₂₀X₂₁X₂₂X₂₃X₂₄X₈X₉CX₁₀X₁₁CX₁₂X₁₃X₁₄X₁₅X₁₆RSDHLTTH | |
| | | | KCPECGKSFSRSDHLTTHQRTHT | | X₁₇X₁₈X₁₉HX₂₀X₂₁X₂₂X₂₃X₂₄X₈X₉CX₁₀X₁₁CX₁₂X₁₃X₁₄X₁₅X₁₆QSGNLT | |
| | | | GEKPYKCPECGKSFSQSGNLTEH | | EHX₁₇X₁₈X₁₉HX₂₀X₂₁X₂₂X₂₃X₂₄X₈X₉CX₁₀X₁₁CX₁₂X₁₃X₁₄X₁₅X₁₆QAGH | |
| | | | QRTHTGEKPYKCPECGKSFSQAG | | LASHX₁₇X₁₈X₁₉HX₂₀X₂₁X₂₂X₂₃X₂₄X₈X₉CX₁₀X₁₁CX₁₂X₁₃X₁₄X₁₅X₁₆RS | |
| | | | HLASHQRTHTGEKPYKCPECGKS | | DKLVRHX₁₇X₁₈X₁₉HX₂₀X₂₁X₂₂X₂₃X₂₄X₂₅X₂₆X₂₇X₂₈X₂₉X₃₀ | |
| | | | FSRSDKLVRHQRTHTGEKPTGKK | | | |
| | | | TS | | | |
| tgacaatgg | TGA CAA | 1012 | LEPGEKPYKCPECGKSFSRSDEL | 1561 | X₁X₂X₃X₄X₅X₆X₇X₈X₉CX₁₀X₁₁CX₁₂X₁₃X₁₄X₁₅X₁₆RSDELVRHX₁₇X₁₈X₁₉ | 2110 |
| cttggaggg | TGG CTT | | VRHQRTHTGEKPYKCPECGKSFS | | HX₂₀X₂₁X₂₂X₂₃X₂₄X₈X₉CX₁₀X₁₁CX₁₂X₁₃X₁₄X₁₅X₁₆RSDKLVRHX₁₇X₁₈ | |
| gtg | GGA GGG | | RSDKLVRHQRTHTGEKPYKCPEC | | X₁₉HX₂₀X₂₁X₂₂X₂₃X₂₄X₈X₉CX₁₀X₁₁CX₁₂X₁₃X₁₄X₁₅X₁₆QRAHLERHX₁₇ | |
| | GTG | | GKSFSQRAHLERHQRTHTGEKPY | | X₁₈X₁₉HX₂₀X₂₁X₂₂X₂₃X₂₄X₈X₉CX₁₀X₁₁CX₁₂X₁₃X₁₄X₁₅X₁₆TTGALTEH | |
| | | | KCPECGKSFSTTGALTEHQRTHT | | X₁₇X₁₈X₁₉HX₂₀X₂₁X₂₂X₂₃X₂₄X₈X₉CX₁₀X₁₁CX₁₂X₁₃X₁₄X₁₅X₁₆RSDHLT | |
| | | | GEKPYKCPECGKSFSRSDHLTTH | | THX₁₇X₁₈X₁₉HX₂₀X₂₁X₂₂X₂₃X₂₄X₈X₉CX₁₀X₁₁CX₁₂X₁₃X₁₄X₁₅X₁₆QSGN | |
| | | | QRTHTGEKPYKCPECGKSFSQSG | | LTEHX₁₇X₁₈X₁₉HX₂₀X₂₁X₂₂X₂₃X₂₄X₈X₉CX₁₀X₁₁CX₁₂X₁₃X₁₄X₁₅X₁₆QA | |
| | | | NLTEHQRTHTGEKPYKCPECGKS | | GHLASHX₁₇X₁₈X₁₉HX₂₀X₂₁X₂₂X₂₃X₂₄X₂₅X₂₆X₂₇X₂₈X₂₉X₃₀ | |
| | | | FSQAGHLASHQRTHTGEKPTGKK | | | |
| | | | TS | | | |
| tggcttgga | TGG CTT | 1013 | LEPGEKPYKCPECGKSFSRSDNL | 1562 | X₁X₂X₃X₄X₅X₆X₇X₈X₉CX₁₀X₁₁CX₁₂X₁₃X₁₄X₁₅X₁₆RSDNLVRHX₁₇X₁₈X₁₉ | 2111 |
| ggggtgggt | GGA GGG | | VRHQRTHTGEKPYKCPECGKSFS | | HX₂₀X₂₁X₂₂X₂₃X₂₄X₈X₉CX₁₀X₁₁CX₁₂X₁₃X₁₄Z15X₁₆TSGHLVRHX₁₇X₁₈ | |
| gag | GTG GGT | | TSGHLVRHQRTHTGEKPYKCPEC | | X₁₉HX₂₀X₂₁X₂₂X₂₃X₂₄X₈X₉CX₁₀X₁₁CX₁₂X₁₃X₁₄X₁₅X₁₆RSDELVRHX₁₇ | |
| | GAG | | GKSFSRSDELVRHQRTHTGEKPY | | X₁₈X₁₉HX₂₀X₂₁X₂₂X₂₃X₂₄X₈X₉CX₁₀X₁₁CX₁₂X₁₃X₁₄X₁₅X₁₆RSDKLVRH | |
| | | | KCPECGKSFSRSDKLVRHQRTHT | | X₁₇X₁₈X₁₉HX₂₀X₂₁X₂₂X₂₃X₂₄X₈X₉CX₁₀X₁₁CX₁₂X₁₃X₁₄X₁₅X₁₆QRAHLE | |
| | | | GEKPYKCPECGKSFSQRAHLERH | | RHX₁₇X₁₈X₁₉HX₂₀X₂₁X₂₂X₂₃X₂₄X₈X₉CX₁₀X₁₁CX₁₂X₁₃X₁₄X₁₅X₁₆TTGA | |
| | | | QRTHTGEKPYKCPECGKSFSTTG | | LTEHX₁₇X₁₈X₁₉HX₂₀X₂₁X₂₂X₂₃X₂₄X₈X₉CX₁₀X₁₁CX₁₂X₁₃X₁₄X₁₅X₁₆RS | |
| | | | ALTEHQRTHTGEKPYKCPECGKS | | DHLTTHX₁₇X₁₈X₁₉HX₂₀X₂₁X₂₂X₂₃X₂₄X₂₅X₂₆X₂₇X₂₈X₂₉X₃₀ | |
| | | | FSRSDHLTTHQRTHTGEKPTGKK | | | |
| | | | TS | | | |
| caatggctt | CAA TGG | 1014 | LEPGEKPYKCPECGKSFSTSGHL | 1563 | X₁X₂X₃X₄X₅X₆X₇X₈X₉CX₁₀X₁₁CX₁₂X₁₃X₁₄X₁₅X₁₆TSGHLVRHX₁₇X₁₈X₁₉ | 2112 |
| ggaggggtg | CTT GGA | | VRHQRTHTGEKPYKCPECGKSFS | | HX₂₀X₂₁X₂₂X₂₃X₂₄X₈X₉CX₁₀X₁₁CX₁₂X₁₃X₁₄X₁₅X₁₆RSDELVRHX₁₇X₁₈ | |
| ggt | GGG GTG | | RSDELVRHQRTHTGEKPYKCPEC | | X₁₉HX₂₀X₂₁X₂₂X₂₃X₂₄X₈X₉CX₁₀X₁₁CX₁₂X₁₃X₁₄X₁₅X₁₆RSDKLVRHX₁₇ | |
| | GGT | | GKSFSRSDKLVRHQRTHTGEKPY | | X₁₈X₁₉HX₂₀X₂₁X₂₂X₂₃X₂₄X₈X₉CX₁₀X₁₁CX₁₂X₁₃X₁₄X₁₅X₁₆QRAHLERH | |
| | | | KCPECGKSFSQRAHLERHQRTHT | | X₁₇X₁₈X₁₉HX₂₀X₂₁X₂₂X₂₃X₂₄X₈X₉CX₁₀X₁₁CX₁₂X₁₃X₁₄X₁₅X₁₆TTGALT | |
| | | | GEKPYKCPECGKSFSTTGALTEH | | EHX₁₇X₁₈X₁₉HX₂₀X₂₁X₂₂X₂₃X₂₄X₈X₉CX₁₀X₁₁CX₁₂X₁₃X₁₄X₁₅X₁₆RSDH | |
| | | | QRTHTGEKPYKCPECGKSFSRSD | | LTTHX₁₇X₁₈X₁₉HX₂₀X₂₁X₂₂X₂₃X₂₄X₈X₉CX₁₀X₁₁CX₁₂X₁₃X₁₄X₁₅X₁₆QS | |
| | | | HLTTHQRTHTGEKPYKCPECGKS | | GNLTEHX₁₇X₁₈X₁₉HX₂₀X₂₁X₂₂X₂₃X₂₄X₂₅X₂₆X₂₇X₂₈X₂₉X₃₀ | |
| | | | FSQSGNLTEHQRTHTGEKPTGKK | | | |
| | | | TS | | | |
| gaggggtgg | GAG GGG | 1015 | LEPGEKPYKCPECGKSFSRSDKL | 1564 | X₁X₂X₃X₄X₅X₆X₇X₈X₉CX₁₀X₁₁CX₁₂X₁₃X₁₄X₁₅X₁₆RSDKLVRHX₁₇X₁₈X₁₉ | 2113 |
| gtgagtcaa | TGG gtg | | VRHQRTHTGEKPYKCPECGKSFS | | HX₂₀X₂₁X₂₂X₂₃X₂₄X₈X₉CX₁₀X₁₁CX₁₂X₁₃X₁₄X₁₅X₁₆QSGNLTEHX₁₇X₁₈ | |
| ggg | AGT CAA | | QSGNLTEHQRTHTGEKPYKCPEC | | X₁₉HX₂₀X₂₁X₂₂X₂₃X₂₄X₈X₉CX₁₀X₁₁CX₁₂X₁₃X₁₄X₁₅X₁₆HRTTLTNHX₁₇ | |
| | GGG | | GKSFSHRTTLTNHQRTHTGEKPY | | X₁₈X₁₉HX₂₀X₂₁X₂₂X₂₃X₂₄X₈X₉CX₁₀X₁₁CX₁₂X₁₃X₁₄X₁₅X₁₆RSDELVRH | |
| | | | KCPECGKSFSRSDELVRHQRTHT | | X₁₇X₁₈X₁₉HX₂₀X₂₁X₂₂X₂₃X₂₄X₈X₉CX₁₀X₁₁CX₁₂X₁₃X₁₄X₁₅X₁₆RSDHLT | |
| | | | GEKPYKCPECGKSFSRSDHLTTH | | THX₁₇X₁₈X₁₉HX₂₀X₂₁X₂₂X₂₃X₂₄X₈X₉CX₁₀X₁₁CX₁₂X₁₃X₁₄X₁₅X₁₆RSDK | |
| | | | QRTHTGEKPYKCPECGKSFSRSD | | LVRHX₁₇X₁₈X₁₉HX₂₀X₂₁X₂₂X₂₃X₂₄X₈X₉CX₁₀X₁₁CX₁₂X₁₃X₁₄X₁₅X₁₆RS | |
| | | | KLVRHQRTHTGEKPYKCPECGKS | | DNLVRHX₁₇X₁₈X₁₉HX₂₀X₂₁X₂₂X₂₃X₂₄X₂₅X₂₆X₂₇X₂₈X₂₉X₃₀ | |
| | | | FSRSDNLVRHQRTHTGEKPTGKK | | | |
| | | | TS | | | |
| agggtcaaa | AGG GTC | 1016 | LEPGEKPYKCPECGKSFSRSDEL | 1565 | X₁X₂X₃X₄X₅X₆X₇X₈X₉CX₁₀X₁₁CX₁₂X₁₃X₁₄X₁₅X₁₆RSDELVRHX₁₇X₁₈X₁₉ | 2114 |
| tgagtgccc | AAA TGA | | VRHQRTHTGEKPYKCPECGKSFS | | HX₂₀X₂₁X₂₂X₂₃X₂₄X₈X₉CX₁₀X₁₁CX₁₂X₁₃X₁₄X₁₅X₁₆SKKHLAEHX₁₇X₁₈ | |
| gtg | gtg CCC | | SKKHLAEHQRTHTGEKPYKCPEC | | X₁₉HX₂₀X₂₁X₂₂X₂₃X₂₄X₈X₉CX₁₀X₁₁CX₁₂X₁₃X₁₄X₁₅X₁₆RSDELVRHX₁₇ | |
| | GTG | | GKSFSRSDELVRHQRTHTGEKPY | | X₁₈X₁₉HX₂₀X₂₁X₂₂X₂₃X₂₄X₈X₉CX₁₀X₁₁CX₁₂X₁₃X₁₄X₁₅X₁₆QAGHLASH | |
| | | | KCPECGKSFSQAGHLASHQRTHT | | X₁₇X₁₈X₁₉HX₂₀X₂₁X₂₂X₂₃X₂₄X₈X₉CX₁₀X₁₁CX₁₂X₁₃X₁₄X₁₅X₁₆QRANLR | |
| | | | GEKPYKCPECGKSFSQRANLRAH | | AHX₁₇X₁₈X₁₉HX₂₀X₂₁X₂₂X₂₃X₂₄X₈X₉CX₁₀X₁₁CX₁₂X₁₃X₁₄X₁₅X₁₆DPGA | |
| | | | QRTHTGEKPYKCPECGKSFSDPG | | LVRHX₁₇X₁₈X₁₉HX₂₀X₂₁X₂₂X₂₃X₂₄X₈X₉CX₁₀X₁₁CX₁₂X₁₃X₁₄X₁₅X₁₆RS | |
| | | | ALVRHQRTHTGEKPYKCPECGKS | | DHLTNHX₁₇X₁₈X₁₉HX₂₀X₂₁X₂₂X₂₃X₂₄X₂₅X₂₆X₂₇X₂₈X₂₉X₃₀ | |
| | | | FSRSDHLTNHQRTHTGEKPTGKK | | | |
| | | | TS | | | |
| gtcaaatga | GTC AAA | 1017 | LEPGEKPYKCPECGKSFSHRTTL | 1566 | X₁X₂X₃X₄X₅X₆X₇X₈X₉CX₁₀X₁₁CX₁₂X₁₃X₁₄X₁₅X₁₆HRTTLTNHX₁₇X₁₈X₁₉ | 2115 |
| gtgcccgtg | TGA gtg | | TNHQRTHTGEKPYKCPECGKSFS | | HX₂₀X₂₁X₂₂X₂₃X₂₄X₈X₉CX₁₀X₁₁CX₁₂X₁₃X₁₄X₁₅X₁₆RSDELVRHX₁₇X₁₈ | |
| agt | CCC gtg | | RSDELVRHQRTHTGEKPYKCPEC | | X₁₉HX₂₀X₂₁X₂₂X₂₃X₂₄X₈X₉CX₁₀X₁₁CX₁₂X₁₃X₁₄X₁₅X₁₆SKKHLAEHX₁₇ | |
| | AGT | | GKSFSSKKHLAEHQRTHTGEKPY | | X₁₈X₁₉HX₂₀X₂₁X₂₂X₂₃X₂₄X₈X₉CX₁₀X₁₁CX₁₂X₁₃X₁₄X₁₅X₁₆RSDELVRH | |
| | | | KCPECGKSFSRSDELVRHQRTHT | | X₁₇X₁₈X₁₉HX₂₀X₂₁X₂₂X₂₃X₂₄X₈X₉CX₁₀X₁₁CX₁₂X₁₃X₁₄X₁₅X₁₆QAGHLA | |
| | | | GEKPYKCPECGKSFSQAGHLASH | | SHX₁₇X₁₈X₁₉HX₂₀X₂₁X₂₂X₂₃X₂₄X₈X₉CX₁₀X₁₁CX₁₂X₁₃X₁₄X₁₅X₁₆QRAN | |
| | | | QRTHTGEKPYKCPECGKSFSQRA | | LRAHX₁₇X₁₈X₁₉HX₂₀X₂₁X₂₂X₂₃X₂₄X₈X₉CX₁₀X₁₁CX₁₂X₁₃X₁₄X₁₅X₁₆DP | |
| | | | NLRAHQRTHTGEKPYKCPECGKS | | GALVRHX₁₇X₁₈X₁₉HX₂₀X₂₁X₂₂X₂₃X₂₄X₂₅X₂₆X₂₇X₂₈X₂₉X₃₀ | |
| | | | FSDPGALVRHQRTHTGEKPTGKK | | | |
| | | | TS | | | |
| aaatgagtg | AAA TGA | 1018 | LEPGEKPYKCPECGKSFSTSGNL | 1567 | X₁X₂X₃X₄X₅X₆X₇X₈X₉CX₁₀X₁₁CX₁₂X₁₃X₁₄X₁₅X₁₆TSGNLTEHX₁₇X₁₈X₁₉ | 2116 |
| cccgtgagt | gtg CCC | | TEHQRTHTGEKPYKCPECGKSFS | | HX₂₀X₂₁X₂₂X₂₃X₂₄X₈X₉CX₁₀X₁₁CX₁₂X₁₃X₁₄X₁₅X₁₆HRTTLTNHX₁₇X₁₈ | |
| cat | gtg AGT | | HRTTLTNHQRTHTGEKPYKCPEC | | X₁₉HX₂₀X₂₁X₂₂X₂₃X₂₄X₈X₉CX₁₀X₁₁CX₁₂X₁₃X₁₄X₁₅X₁₆RSDELVRHX₁₇ | |
| | CAT | | GKSFSRSDELVRHQRTHTGEKPY | | X₁₈X₁₉HX₂₀X₂₁X₂₂X₂₃X₂₄X₈X₉CX₁₀X₁₁CX₁₂X₁₃X₁₄X₁₅X₁₆SKKHLAEH | |
| | | | KCPECGKSFSSKKHLAEHQRTHT | | X₁₇X₁₈X₁₉HX₂₀X₂₁X₂₂X₂₃X₂₄X₈X₉CX₁₀X₁₁CX₁₂X₁₃X₁₄X₁₅X₁₆RSDELV | |
| | | | GEKPYKCPECGKSFSRSDELVRH | | RHX₁₇X₁₈X₁₉HX₂₀X₂₁X₂₂X₂₃X₂₄X₈X₉CX₁₀X₁₁CX₁₂X₁₃X₁₄X₁₅X₁₆QAGH | |
| | | | QRTHTGEKPYKCPECGKSFSQAG | | LASHX₁₇X₁₈X₁₉HX₂₀X₂₁X₂₂X₂₃X₂₄X₈X₉CX₁₀X₁₁CX₁₂X₁₃X₁₄X₁₅X₁₆QR | |
| | | | HLASHQRTHTGEKPYKCPECGKS | | ANLRAHX₁₇X₁₈X₁₉HX₂₀X₂₁X₂₂X₂₃X₂₄X₂₅X₂₆X₂₇X₂₈X₂₉X₃₀ | |
| | | | FSQRANLRAHQRTHTGEKPTGKK | | | |
| | | | TS | | | |
| tgagtgccc | TGA gtg | 1019 | LEPGEKPYKCPECGKSFSTSGNL | 1568 | X₁X₂X₃X₄X₅X₆X₇X₈X₉CX₁₀X₁₁CX₁₂X₁₃X₁₄X₁₅X₁₆TSGNLVRHX₁₇X₁₈X₁₉ | 2117 |
| gtgagtcat | CCC gtg | | VRHQRTHTGEKPYKCPECGKSFS | | HX₂₀X₂₁X₂₂X₂₃X₂₄X₈X₉CX₁₀X₁₁CX₁₂X₁₃X₁₄X₁₅X₁₆TSGNLTEHX₁₇X₁₈ | |
| gat | AGT CAT | | TSGNLTEHQRTHTGEKPYKCPEC | | X₁₉HX₂₀X₂₁X₂₂X₂₃X₂₄X₈X₉CX₁₀X₁₁CX₁₂X₁₃X₁₄X₁₅X₁₆HRTTLTNHX₁₇ | |
| | GAT | | GKSFSHRTTLTNHQRTHTGEKPY | | X₁₈X₁₉HX₂₀X₂₁X₂₂X₂₃X₂₄X₈X₉CX₁₀X₁₁CX₁₂X₁₃X₁₄X₁₅X₁₆RSDELVRH | |
| | | | KCPECGKSFSRSDELVRHQRTHT | | X₁₇X₁₈X₁₉HX₂₀X₂₁X₂₂X₂₃X₂₄X₈X₉CX₁₀X₁₁CX₁₂X₁₃X₁₄X₁₅X₁₆SKKHLA | |
| | | | GEKPYKCPECGKSFSSKKHLAEH | | EHX₁₇X₁₈X₁₉HX₂₀X₂₁X₂₂X₂₃X₂₄X₈X₉CX₁₀X₁₁CX₁₂X₁₃X₁₄X₁₅X₁₆RSDE | |
| | | | QRTHTGEKPYKCPECGKSFSRSD | | LVRHX₁₇X₁₈X₁₉HX₂₀X₂₁X₂₂X₂₃X₂₄X₈X₉CX₁₀X₁₁CX₁₂X₁₃X₁₄X₁₅X₁₆QA | |
| | | | ELVRHQRTHTGEKPYKCPECGKS | | GHLASHX₁₇X₁₈X₁₉HX₂₀X₂₁X₂₂X₂₃X₂₄X₂₅X₂₆X₂₇X₂₈X₂₉X₃₀ | |
| | | | FSQAGHLASHQRTHTGEKPTGKK | | | |
| | | | TS | | | |
| gtgcccgtg | gtg CCC | 1020 | LEPGEKPYKCPECGKSFSDCRDL | 1569 | X₁X₂X₃X₄X₅X₆X₇X₈X₉CX₁₀X₁₁CX₁₂X₁₃X₁₄X₁₅X₁₆DCRDLARHX₁₇X₁₈X₁₉ | 2118 |
| agtcatgat | gtg AGT | | ARHQRTHTGEKPYKCPECGKSFS | | HX₂₀X₂₁X₂₂X₂₃X₂₄X₈X₉CX₁₀X₁₁CX₁₂X₁₃X₁₄X₁₅X₁₆TSGNLVRHX₁₇X₁₈ | |
| gcc | CAT GAT | | TSGNLVRHQRTHTGEKPYKCPEC | | X₁₉HX₂₀X₂₁X₂₂X₂₃X₂₄X₈X₉CX₁₀X₁₁CX₁₂X₁₃X₁₄X₁₅X₁₆TSGNLTEHX₁₇ | |
| | GCC | | GKSFSTSGNLTEHQRTHTGEKPY | | X₁₈X₁₉HX₂₀X₂₁X₂₂X₂₃X₂₄X₈X₉CX₁₀X₁₁CX₁₂X₁₃X₁₄X₁₅X₁₆HRTTLTNH | |
| | | | KCPECGKSFSHRTTLTNHQRTHT | | X₁₇X₁₈X₁₉HX₂₀X₂₁X₂₂X₂₃X₂₄X₈X₉CX₁₀X₁₁CX₁₂X₁₃X₁₄X₁₅X₁₆RSDELV | |
| | | | GEKPYKCPECGKSFSRSDELVRH | | RHX₁₇X₁₈X₁₉HX₂₀X₂₁X₂₂X₂₃X₂₄X₈X₉CX₁₀X₁₁CX₁₂X₁₃X₁₄X₁₅X₁₆SKKH | |
| | | | QRTHTGEKPYKCPECGKSFSSKK | | LAEHX₁₇X₁₈X₁₉HX₂₀X₂₁X₂₂X₂₃X₂₄X₈X₉CX₁₀X₁₁CX₁₂X₁₃X₁₄X₁₅X₁₆RS | |
| | | | HLAEHQRTHTGEKPYKCPECGKS | | DELVRHX₁₇X₁₈X₁₉HX₂₀X₂₁X₂₂X₂₃X₂₄X₂₅X₂₆X₂₇X₂₈X₂₉X₃₀ | |
| | | | FSRSDELVRHQRTHTGEKPTGKK | | | |
| | | | TS | | | |
| ccgtgagtc | CCG TGA | 1021 | LEPGEKPYKCPECGKSFSDCRDL | 1570 | X₁X₂X₃X₄X₅X₆X₇X₈X₉CX₁₀X₁₁CX₁₂X₁₃X₁₄X₁₅X₁₆DCRDLARHX₁₇X₁₈X₁₉ | 2119 |
| atgatgcct | GTC ATG | | ARHQRTHTGEKPYKCPECGKSFS | | HX₂₀X₂₁X₂₂X₂₃X₂₄X₈X₉CX₁₀X₁₁CX₁₂X₁₃X₁₄X₁₅X₁₆TKNSLTEHX₁₇X₁₈ | |
| gcc | ATG CCT | | TKNSLTEHQRTHTGEKPYKCPEC | | X₁₉HX₂₀X₂₁X₂₂X₂₃X₂₄X₈X₉CX₁₀X₁₁CX₁₂X₁₃X₁₄X₁₅X₁₆RRDELNVHX₁₇ | |
| | GCC | | GKSFSRRDELNVHQRTHTGEKPY | | X₁₈X₁₉HX₂₀X₂₁X₂₂X₂₃X₂₄X₈X₉CX₁₀X₁₁CX₁₂X₁₃X₁₄X₁₅X₁₆RRDELNVH | |
| | | | KCPECGKSFSRRDELNVHQRTHT | | X₁₇X₁₈X₁₉HX₂₀X₂₁X₂₂X₂₃X₂₄X₈X₉CX₁₀X₁₁CX₁₂X₁₃X₁₄X₁₅X₁₆DPGALV | |
| | | | GEKPYKCPECGKSFSDPGALVRH | | RHX₁₇X₁₈X₁₉HX₂₀X₂₁X₂₂X₂₃X₂₄X₈X₉CX₁₀X₁₁CX₁₂X₁₃X₁₄X₁₅X₁₆QAGH | |
| | | | QRTHTGEKPYKCPECGKSFSQAG | | LASHX₁₇X₁₈X₁₉HX₂₀X₂₁X₂₂X₂₃X₂₄X₈X₉CX₁₀X₁₁CX₁₂X₁₃X₁₄X₁₅X₁₆RN | |
| | | | HLASHQRTHTGEKPYKCPECGKS | | DTLTEHX₁₇X₁₈X₁₉HX₂₀X₂₁X₂₂X₂₃X₂₄X₂₅X₂₆X₂₇X₂₈X₂₉X₃₀ | |
| | | | FSRNDTLTEHQRTHTGEKPTGKK | | | |
| | | | TS | | | |
| gtcagccag | GTC AGC | 1022 | LEPGEKPYKCPECGKSFSDSGNL | 1571 | X₁X₂X₃X₄X₅X₆X₇X₈X₉CX₁₀X₁₁CX₁₂X₁₃X₁₄X₁₅X₁₆DSGNLRVHX₁₇X₁₈X₁₉ | 2120 |
| aaaccaaca | CAG AAA | | RVHQRTHTGEKPYKCPECGKSFS | | HX₂₀X₂₁X₂₂X₂₃X₂₄X₈X₉CX₁₀X₁₁CX₁₂X₁₃X₁₄X₁₅X₁₆SPADLTRHX₁₇X₁₈ | |
| aac | CCA ACA | | SPADLTRHQRTHTGEKPYKCPEC | | X₁₉HX₂₀X₂₁X₂₂X₂₃X₂₄X₈X₉CX₁₀X₁₁CX₁₂X₁₃X₁₄X₁₅X₁₆TSHSLTEHX₁₇ | |
| | AAC | | GKSFSTSHSLTEHQRTHTGEKPY | | X₁₈X₁₉HX₂₀X₂₁X₂₂X₂₃X₂₄X₈X₉CX₁₀X₁₁CX₁₂X₁₃X₁₄X₁₅X₁₆QRANLRAH | |
| | | | KCPECGKSFSQRANLRAHQRTHT | | X₁₇X₁₈X₁₉HX₂₀X₂₁X₂₂X₂₃X₂₄X₈X₉CX₁₀X₁₁CX₁₂X₁₃X₁₄X₁₅X₁₆RADNLT | |
| | | | GEKPYKCPECGKSFSRADNLTEH | | EHX₁₇X₁₈X₁₉HX₂₀X₂₁X₂₂X₂₃X₂₄X₈X₉CX₁₀X₁₁CX₁₂X₁₃X₁₄X₁₅X₁₆ERSH | |
| | | | QRTHTGEKPYKCPECGKSFSERS | | LREHX₁₇X₁₈X₁₉HX₂₀X₂₁X₂₂X₂₃X₂₄X₈X₉CX₁₀X₁₁CX₁₂X₁₃X₁₄X₁₅X₁₆DP | |
| | | | HLREHQRTHTGEKPYKCPECGKS | | GALVRHX₁₇X₁₈X₁₉HX₂₀X₂₁X₂₂X₂₃X₂₄X₂₅X₂₆X₂₇X₂₈X₂₉X₃₀ | |
| | | | FSDPGALVRHQRTHTGEKPTGKK | | | |
| | | | TS | | | |
| agccagaaa | AGC CAG | 1023 | LEPGEKPYKCPECGKSFSERSHL | 1572 | X₁X₂X₃X₄X₅X₆X₇X₈X₉CX₁₀X₁₁CX₁₂X₁₃X₁₄X₁₅X₁₆ERSHLREHX₁₇X₁₈X₁₉ | 2121 |
| ccaacaaac | AAA CCA | | REHQRTHTGEKPYKCPECGKSFS | | HX₂₀X₂₁X₂₂X₂₃X₂₄X₈X₉CX₁₀X₁₁CX₁₂X₁₃X₁₄X₁₅X₁₆DSGNLRVHX₁₇X₁₈ | |
| agc | ACA AAC | | DSGNLRVHQRTHTGEKPYKCPEC | | X9HX₂₀X₂₁X₂₂X₂₃X₂₄X₈X₉CX₁₀X₁₁CX₁₂X₁₃X₁₄X₁₅X₁₆SPADLTRHX₁₇ | |
| | AGC | | GKSFSSPADLTRHQRTHTGEKPY | | X₁₈X₁₉HX₂₀X₂₁X₂₂X₂₃X₂₄X₈X₉CX₁₀X₁₁CX₁₂X₁₃X₁₄X₁₅X₁₆TSHSLTEH | |
| | | | KCPECGKSFSTSHSLTEHQRTHT | | X₁₇X₁₈X₁₉HX₂₀X₂₁X₂₂X₂₃X₂₄X₈X₉CX₁₀X₁₁CX₁₂X₁₃X₁₄X₁₅X₁₆QRANLR | |
| | | | GEKPYKCPECGKSFSQRANLRAH | | AHX₁₇X₁₈X₁₉HX₂₀X₂₁X₂₂X₂₃X₂₄X₈X₉CX₁₀X₁₁CX₁₂X₁₃X₁₄X₁₅X₁₆RADN | |
| | | | QRTHTGEKPYKCPECGKSFSRAD | | LTEHX₁₇X₁₈X₁₉HX₂₀X₂₁X₂₂X₂₃X₂₄X₈X₉CX₁₀X₁₁CX₁₂X₁₃X₁₄X₁₅X₁₆ER | |
| | | | NLTEHQRTHTGEKPYKCPECGKS | | SHLREHX₁₇X₁₈X₁₉HX₂₀X₂₁X₂₂X₂₃X₂₄X₂₅X₂₆X₂₇X₂₈X₂₉X₃₀ | |
| | | | FSERSHLREHQRTHTGEKPTGKK | | | |
| | | | TS | | | |
| cagaaacca | CAG AAA | 1024 | LEPGEKPYKCPECGKSFSQSGNL | 1573 | X₁X₂X₃X₄X₅X₆X₇X₈X₉CX₁₀X₁₁CX₁₂X₁₃X₁₄X₁₅X₁₆QSGNLTEHX₁₇X₁₈X₁₉ | 2122 |
| acaaacagc | CCA ACA | | TEHQRTHTGEKPYKCPECGKSFS | | HX₂₀X₂₁X₂₂X₂₃X₂₄X₈X₉CX₁₀X₁₁CX₁₂X₁₃X₁₄X₁₅X₁₆ERSHLREHX₁₇X₁₈ | |
| caa | AAC AGC | | ERSHLREHQRTHTGEKPYKCPEC | | X₁₉HX₂₀X₂₁X₂₂X₂₃X₂₄X₈X₉CX₁₀X₁₁CX₁₂X₁₃X₁₄X₁₅X₁₆DSGNLRVHX₁₇ | |
| | CAA | | GKSFSDSGNLRVHQRTHTGEKPY | | X₁₈X₁₉HX₂₀X₂₁X₂₂X₂₃X₂₄X₈X₉CX₁₀X₁₁CX₁₂X₁₃X₁₄X₁₅X₁₆SPADLTRH | |
| | | | KCPECGKSFSSPADLTRHQRTHT | | X₁₇X₁₈X₁₉HX₂₀X₂₁X₂₂X₂₃X₂₄X₈X₉CX₁₀X₁₁CX₁₂X₁₃X₁₄X₁₅X₁₆TSHSLT | |
| | | | GEKPYKCPECGKSFSTSHSLTEH | | EHX₁₇X₁₈X₁₉HX₂₀X₂₁X₂₂X₂₃X₂₄X₈X₉CX₁₀X₁₁CX₁₂X₁₃X₁₄X₁₅X₁₆QRAN | |
| | | | QRTHTGEKPYKCPECGKSFSQRA | | LRAHX₁₇X₁₈X₁₉HX₂₀X₂₁X₂₂X₂₃X₂₄X₈X₉CX₁₀X₁₁CX₁₂X₁₃X₁₄X₁₅X₁₆RA | |
| | | | NLRAHQRTHTGEKPYKCPECGKS | | DNLTEHX₁₇X₁₈X₁₉HX₂₀X₂₁X₂₂X₂₃X₂₄X₂₅X₂₆X₂₇X₂₈X₂₉X₃₀ | |
| | | | FSRADNLTEHQRTHTGEKPTGKK | | | |
| | | | TS | | | |
| gccccagca | GCC CCA | 1025 | LEPGEKPYKCPECGKSFSERSHL | 1574 | X₁X₂X₃X₄X₅X₆X₇X₈X₉CX₁₀X₁₁CX₁₂X₁₃X₁₄X₁₅X₁₆ERSHLREHX₁₇X₁₈X₁₉ | 2123 |
| gttgtaatt | GCA GTT | | REHQRTHTGEKPYKCPECGKSFS | | HX₂₀X₂₁X₂₂X₂₃X₂₄X₈X₉CX₁₀X₁₁CX₁₂X₁₃X₁₄X₁₅X₁₆HKNALQNHX₁₇X₁₈ | |
| agc | GTA ATT | | HKNALQNHQRTHTGEKPYKCPEC | | X₁₉HX₂₀X₂₁X₂₂X₂₃X₂₄X₈X₉CX₁₀X₁₁CX₁₂X₁₃X₁₄X₁₅X₁₆QSSSLVRHX₁₇ | |
| | AGC | | GKSFSQSSSLVRHQRTHTGEKPY | | X₁₈X₁₉HX₂₀X₂₁X₂₂X₂₃X₂₄X₈X₉CX₁₀X₁₁CX₁₂X₁₃X₁₄X₁₅X₁₆TSGSLVRH | |
| | | | KCPECGKSFSTSGSLVRHQRTHT | | X₁₇X₁₈X₁₉HX₂₀X₂₁X₂₂X₂₃X₂₄X₈X₉CX₁₀X₁₁CX₁₂X₁₃X₁₄X₁₅X₁₆QSGDLR | |
| | | | GEKPYKCPECGKSFSQSGDLRRH | | RHX₁₇X₁₈X₁₉HX₂₀X₂₁X₂₂X₂₃X₂₄X₈X₉CX₁₀X₁₁CX₁₂X₁₃X₁₄X₁₅X₁₆TSHS | |
| | | | QRTHTGEKPYKCPECGKSFSTSH | | LTEHX₁₇X₁₈X₁₉HX₂₀X₂₁X₂₂X₂₃X₂₄X₈X₉CX₁₀X₁₁CX₁₂X₁₃X₁₄X₁₅X₁₆DC | |
| | | | SLTEHQRTHTGEKPYKCPECGKS | | RDLARHX₁₇X₁₈X₁₉HX₂₀X₂₁X₂₂X₂₃X₂₄X₂₅X₂₆X₂₇X₂₈X₂₉X3 | |
| | | | FSDCRDLARHQRTHTGEKPTGKK | | | |
| | | | TS | | | |
| cggtgagtt | CGG TGA | 1026 | LEPGEKPYKCPECGKSFSQSGDL | 1575 | X₁X₂X₃X₄X₅X₆X₇X₈X₉CX₁₀X₁₁CX₁₂X₁₃X₁₄X₁₅X₁₆QSGDLRRHX₁₇X₁₈X₁₉ | 2124 |
| agggcccca | GTT AGG | | RRHQRTHTGEKPYKCPECGKSFS | | HX₂₀X₂₁X₂₂X₂₃X₂₄X₈X₉CX₁₀X₁₁CX₁₂X₁₃X₁₄X₁₅X₁₆TSHSLTEHX₁₇X₁₈ | |
| gca | GCC CCA | | TSHSLTEHQRTHTGEKPYKCPEC | | X₁₉HX₂₀X₂₁X₂₂X₂₃X₂₄X₈X₉CX₁₀X₁₁CX₁₂X₁₃X₁₄X₁₅X₁₆DCRDLARHX₁₇ | |
| | GCA | | GKSFSDCRDLARHQRTHTGEKPY | | X₁₈X₁₉HX₂₀X₂₁X₂₂X₂₃X₂₄X₈X₉CX₁₀X₁₁CX₁₂X₁₃X₁₄X₁₅X₁₆RSDHLTNH | |
| | | | KCPECGKSFSRSDHLTNHQRTHT | | X₁₇X₁₈X₁₉HX₂₀X₂₁X₂₂X₂₃X₂₄X₈X₉CX₁₀X₁₁CX₁₂X₁₃X₁₄X₁₅X₁₆TSGSLV | |
| | | | GEKPYKCPECGKSFSTSGSLVRH | | RHX₁₇X₁₈X₁₉HX₂₀X₂₁X₂₂X₂₃X₂₄X₈X₉CX₁₀X₁₁CX₁₂X₁₃X₁₄X₁₅X₁₆QAGH | |
| | | | QRTHTGEKPYKCPECGKSFSQAG | | LASHX₁₇X₁₈X₁₉HX₂₀X₂₁X₂₂X₂₃X₂₄X₈X₉CX₁₀X₁₁CX₁₂X₁₃X₁₄X₁₅X₁₆RS | |
| | | | HLASHQRTHTGEKPYKCPECGKS | | DKLTEHX₁₇X₁₈X₁₉HX₂₀X₂₁X₂₂X₂₃X₂₄X₂₅X₂₆X₂₇X₂₈X₂₉X₃₀ | |
| | | | FSRSDKLTEHQRTHTGEKPTGKK | | | |
| | | | TS | | | |
| ggtgtcagc | GGT GTC | 1027 | LEPGEKPYKCPECGKSFSSPADL | 1576 | X₁X₂X₃X₄X₅X₆X₇X₈X₉CX₁₀X₁₁CX₁₂X₁₃X₁₄X₁₅X₁₆SPADLTRHX₁₇X₁₈X₁₉ | 2125 |
| cagaaacca | AGC CAG | | TRHQRTHTGEKPYKCPECGKSFS | | HX₂₀X₂₁X₂₂X₂₃X₂₄X₈X₉CX₁₀X₁₁CX₁₂X₁₃X₁₄X₁₅X₁₆TSHSLTEHX₁₇X₁₈ | |
| aca | AAA CCA | | TSHSLTEHQRTHTGEKPYKCPEC | | X₁₉HX₂₀X₂₁X₂₂X₂₃X₂₄X₈X₉CX₁₀X₁₁CX₁₂X₁₃X₁₄X₁₅X₁₆QRANLRAHX₁₇ | |
| | ACA | | GKSFSQRANLRAHQRTHTGEKPY | | X₁₈X₁₉HX₂₀X₂₁X₂₂X₂₃X₂₄X₈X₉CX₁₀X₁₁CX₁₂X₁₃X₁₄X₁₅X₁₆RADNLTEH | |
| | | | KCPECGKSFSRADNLTEHQRTHT | | X₁₇X₁₈X₁₉HX₂₀X₂₁X₂₂X₂₃X₂₄X₈X₉CX₁₀X₁₁CX₁₂X₁₃X₁₄X₁₅X₁₆ERSHLR | |
| | | | GEKPYKCPECGKSFSERSHLREH | | EHX₁₇X₁₈X₁₉HX₂₀X₂₁X₂₂X₂₃X₂₄X₈X₉CX₁₀X₁₁CX₁₂X₁₃X₁₄X₁₅X₁₆DPGA | |
| | | | QRTHTGEKPYKCPECGKSFSDPG | | LVRHX₁₇X₁₈X₁₉HX₂₀X₂₁X₂₂X₂₃X₂₄X₈X₉CX₁₀X₁₁CX₁₂X₁₃X₁₄X₁₅X₁₆TS | |
| | | | ALVRHQRTHTGEKPYKCPECGKS | | GHLVRHX₁₇X₁₈X₁₉HX₂₀X₂₁X₂₂X₂₃X₂₄X₂₅X₂₆X₂₇X₂₈X₂₉X₃₀ | |
| | | | FSTSGHLVRHQRTHTGEKPTGKK | | | |
| | | | TS | | | |
| agggcccca | AGG GCC | 1028 | LEPGEKPYKCPECGKSFSHKNAL | 1577 | X₁X₂X₃X₄X₅X₆X₇X₈X₉CX₁₀X₁₁CX₁₂X₁₃X₁₄X₁₅X₁₆HKNALQNHX₁₇X₁₈X₁₉ | 2126 |
| gcagttgta | CCA GCA | | QNHQRTHTGEKPYKCPECGKSFS | | HX₂₀X₂₁X₂₂X₂₃X₂₄X₈X₉CX₁₀X₁₁CX₁₂X₁₃X₁₄X₁₅X₁₆QSSSLVRHX₁₇X₁₈ | |
| att | GTT GTA | | QSSSLVRHQRTHTGEKPYKCPEC | | X₁₉HX₂₀X₂₁X₂₂X₂₃X₂₄X₈X₉CX₁₀X₁₁CX₁₂X₁₃X₁₄X₁₅X₁₆TSGSLVRHX₁₇ | |
| | ATT | | GKSFSTSGSLVRHQRTHTGEKPY | | X₁₈X₁₉HX₂₀X₂₁X₂₂X₂₃X₂₄X₈X₉CX₁₀X₁₁CX₁₂X₁₃X₁₄X₁₅X₁₆QSGDLRRH | |
| | | | KCPECGKSFSQSGDLRRHQRTHT | | X₁₇X₁₈X₁₉HX₂₀X₂₁X₂₂X₂₃X₂₄X₈X₉CX₁₀X₁₁CX₁₂X₁₃X₁₄X₁₅X₁₆TSHSLT | |
| | | | GEKPYKCPECGKSFSTSHSLTEH | | EHX₁₇X₁₈X₁₉HX₂₀X₂₁X₂₂X₂₃X₂₄X₈X₉CX₁₀X₁₁CX₁₂X₁₃X₁₄X₁₅X₁₆DCRD | |
| | | | QRTHTGEKPYKCPECGKSFSDCR | | LARHX₁₇X₁₈X₁₉HX₂₀X₂₁X₂₂X₂₃X₂₄X₈X₉CX₁₀X₁₁CX₁₂X₁₃X₁₄X₁₅X₁₆RS | |
| | | | DLARHQRTHTGEKPYKCPECGKS | | DHLTNHX₁₇X₁₈X₁₉HX₂₀X₂₁X₂₂X₂₃X₂₄X₂₅X₂₆X₂₇X₂₈X₂₉X₃₀ | |
| | | | FSRSDHLTNHQRTHTGEKPTGKK | | | |
| | | | TS | | | |
| ccagcagtt | CCA GCA | 1029 | LEPGEKPYKCPECGKSFSDKKDL | 1578 | X₁X₂X₃X₄X₅X₆X₇X₈X₉CX₁₀X₁₁CX₁₂X₁₃X₁₄X₁₅X₁₆DKKDLTRHX₁₇X₁₈X₁₉ | 2127 |
| gtaattagc | GTT GTA | | TRHQRTHTGEKPYKCPECGKSFS | | HX₂₀X₂₁X₂₂X₂₃X₂₄X₈X₉CX₁₀X₁₁CX₁₂X₁₃X₁₄X₁₅X₁₆ERSHLREHX₁₇X₁₈ | |
| acc | ATT AGC | | ERSHLREHQRTHTGEKPYKCPEC | | X₁₉HX₂₀X₂₁X₂₂X₂₃X₂₄X₈X₉CX₁₀X₁₁CX₁₂X₁₃X₁₄X₁₅X₁₆HKNALQNHX₁₇ | |
| | ACC | | GKSFSHKNALQNHQRTHTGEKPY | | X₁₈X₁₉HX₂₀X₂₁X₂₂X₂₃X₂₄X₈X₉CX₁₀X₁₁CX₁₂X₁₃X₁₄X₁₅X₁₆QSSSLVRH | |
| | | | KCPECGKSFSQSSSLVRHQRTHT | | X₁₇X₁₈X₁₉HX₂₀X₂₁X₂₂X₂₃X₂₄X₈X₉CX₁₀X₁₁CX₁₂X₁₃X₁₄X₁₅X₁₆TSGSLV | |
| | | | GEKPYKCPECGKSFSTSGSLVRH | | RHX₁₇X₁₈X₁₉HX₂₀X₂₁X₂₂X₂₃X₂₄X₈X₉CX₁₀X₁₁CX₁₂X₁₃X₁₄X₁₅X₁₆QSGD | |
| | | | QRTHTGEKPYKCPECGKSFSQSG | | LRRHX₁₇X₁₈X₁₉HX₂₀X₂₁X₂₂X₂₃X₂₄X₈X₉CX₁₀X₁₁CX₁₂X₁₃X₁₄X₁₅X₁₆TS | |
| | | | DLRRHQRTHTGEKPYKCPECGKS | | HSLTEHX₁₇X₁₈X₁₉HX₂₀X₂₁X₂₂X₂₃X₂₄X₂₅X₂₆X₂₇X₂₈X₂₉X₃₀ | |
| | | | FSTSHSLTEHQRTHTGEKPTGKK | | | |
| | | | TS | | | |
| ataactgaa | ATA ACT | 1030 | LEPGEKPYKCPECGKSFSTSGSL | 1579 | X₁X₂X₃X₄X₅X₆X₇X₈X₉CX₁₀X₁₁CX₁₂X₁₃X₁₄X₁₅X₁₆TSGSLVRHX₁₇X₁₈X₁₉ | 2128 |
| catcggtga | GAA CAT | | VRHQRTHTGEKPYKCPECGKSFS | | HX₂₀X₂₁X₂₂X₂₃X₂₄X₈X₉CX₁₀X₁₁CX₁₂X₁₃X₁₄X₁₅X₁₆QAGHLASHX₁₇X₁₈ | |
| gtt | CGG TGA | | QAGHLASHQRTHTGEKPYKCPEC | | X₁₉HX₂₀X₂₁X₂₂X₂₃X₂₄X₈X₉CX₁₀X₁₁CX₁₂X₁₃X₁₄X₁₅X₁₆RSDKLTEHX₁₇ | |
| | GTT | | GKSFSRSDKLTEHQRTHTGEKPY | | X₁₈X₁₉HX₂₀X₂₁X₂₂X₂₃X₂₄X₈X₉CX₁₀X₁₁CX₁₂X₁₃X₁₄X₁₅X₁₆TSGNLTEH | |
| | | | KCPECGKSFSTSGNLTEHQRTHT | | X₁₇X₁₈X₁₉HX₂₀X₂₁X₂₂X₂₃X₂₄X₈X₉CX₁₀X₁₁CX₁₂X₁₃X₁₄X₁₅X₁₆QSSNLV | |
| | | | GEKPYKCPECGKSFSQSSNLVRH | | RHX₁₇X₁₈X₁₉HX₂₀X₂₁X₂₂X₂₃X₂₄X₈X₉CX₁₀X₁₁CX₁₂X₁₃X₁₄X₁₅X₁₆THLD | |
| | | | QRTHTGEKPYKCPECGKSFSTHL | | LIRHX₁₇X₁₈X₁₉HX₂₀X₂₁X₂₂X₂₃X₂₄X₈X₉CX₁₀X₁₁CX₁₂X₁₃X₁₄X₁₅X₁₆QK | |
| | | | DLIRHQRTHTGEKPYKCPECGKS | | SSLIAHX₁₇X₁₈X₁₉HX₂₀X₂₁X₂₂X₂₃X₂₄X₂₅X₂₆X₂₇X₂₈X₂₉X₃₀ | |
| | | | FSQKSSLIAHQRTHTGEKPTGKK | | | |
| | | | TS | | | |
| catcggtga | CAT CGG | 1031 | LEPGEKPYKCPECGKSFSTSHSL | 1580 | X₁X₂X₃X₄X₅X₆X₇X₈X₉CX₁₀X₁₁CX₁₂X₁₃X₁₄X₁₅X₁₆TSHSLTEHX₁₇X₁₈X₁₉ | 2129 |
| gttagggcc | TGA GTT | | TEHQRTHTGEKPYKCPECGKSFS | | HX₂₀X₂₁X₂₂X₂₃X₂₄X₈X₉CX₁₀X₁₁CX₁₂X₁₃X₁₄X₁₅X₁₆DCRDLARHX₁₇X₁₈ | |
| cca | AGG GCC | | DCRDLARHQRTHTGEKPYKCPEC | | X₁₉HX₂₀X₂₁X₂₂X₂₃X₂₄X₈X₉CX₁₀X₁₁CX₁₂X₁₃X₁₄X₁₅X₁₆RSDHLTNHX₁₇ | |
| | CCA | | GKSFSRSDHLTNHQRTHTGEKPY | | X₁₈X₁₉HX₂₀X₂₁X₂₂X₂₃X₂₄X₈X₉CX₁₀X₁₁CX₁₂X₁₃X₁₄X₁₅X₁₆TSGSLVRH | |
| | | | KCPECGKSFSTSGSLVRHQRTHT | | X₁₇X₁₈X₁₉HX₂₀X₂₁X₂₂X₂₃X₂₄X₈X₉CX₁₀X₁₁CX₁₂X₁₃X₁₄X₁₅X₁₆QAGHLA | |
| | | | GEKPYKCPECGKSFSQAGHLASH | | SHX₁₇X₁₈X₁₉HX₂₀X₂₁X₂₂X₂₃X₂₄X₈X₉CX₁₀X₁₁CX₁₂X₁₃X₁₄X₁₅X₁₆RSDK | |
| | | | QRTHTGEKPYKCPECGKSFSRSD | | LTEHX₁₇X₁₈X₁₉HX₂₀X₂₁X₂₂X₂₃X₂₄X₈X₉CX₁₀X₁₁CX₁₂X₁₃X₁₄X₁₅X₁₆TS | |
| | | | KLTEHQRTHTGEKPYKCPECGKS | | GNLTEHX₁₇X₁₈X₁₉HX₂₀X₂₁X₂₂X₂₃X₂₄X₂₅X₂₆X₂₇X₂₈X₂₉X₃₀ | |
| | | | FSTSGNLTEHQRTHTGEKPTGKK | | | |
| | | | TS | | | |
| ccgggtgtc | CCG GGT | 122 | LEPGEKPYKCPECGKSFSTSHSL | 123 | X₁X₂X₃X₄X₅X₆X₇X₈X₉CX₁₀X₁₁CX₁₂X₁₃X₁₄X₁₅X₁₆TSHSLTEHX₁₇X₁₈X₁₉ | 318 |
| agccagaaa | GTC AGC | | TEHQRTHTGEKPYKCPECGKSFS | | HX₂₀X₂₁X₂₂X₂₃X₂₄X₈X₉CX₁₀X₁₁CX₁₂X₁₃X₁₄X₁₅X₁₆QRANLRAHX₁₇X₁₈ | |
| cca | CAG AAA | | QRANLRAHQRTHTGEKPYKCPEC | | X₁₉HX₂₀X₂₁X₂₂X₂₃X₂₄X₈X₉CX₁₀X₁₁CX₁₂X₁₃X₁₄X₁₅X₁₆RADNLTEHX₁₇ | |
| | CCA | | GKSFSRADNLTEHQRTHTGEKPY | | X₁₈X₁₉HX₂₀X₂₁X₂₂X₂₃X₂₄X₈X₉CX₁₀X₁₁CX₁₂X₁₃X₁₄X₁₅X₁₆ERSHLREH | |
| | | | KCPECGKSFSERSHLREHQRTHT | | X₁₇X₁₈X₁₉HX₂₀X₂₁X₂₂X₂₃X₂₄X₈X₉CX₁₀X₁₁CX₁₂X₁₃X₁₄X₁₅X₁₆DPGALV | |
| | | | GEKPYKCPECGKSFSDPGALVRH | | RHX₁₇X₁₈X₁₉HX₂₀X₂₁X₂₂X₂₃X₂₄X₈X₉CX₁₀X₁₁CX₁₂X₁₃X₁₄X₁₅X₁₆TSGH | |
| | | | QRTHTGEKPYKCPECGKSFSTSG | | LVRHX₁₇X₁₈X₁₉HX₂₀X₂₁X₂₂X₂₃X₂₄X₈X₉CX₁₀X₁₁CX₁₂X₁₃X₁₄X₁₅X₁₆RN | |
| | | | HLVRHQRTHTGEKPYKCPECGKS | | DTLTEHX₁₇X₁₈X₁₉HX₂₀X₂₁X₂₂X₂₃X₂₄X₂₅X₂₆X₂₇X₂₈X₂₉X₃₀ | |
| | | | FSRNDTLTEHQRTHTGEKPTGKK | | | |
| | | | TS | | | |
| actgaacat | ACT GAA | 126 | LEPGEKPYKCPECGKSFSRSDHL | 127 | X₁X₂X₃X₄X₅X₆X₇X₈X₉CX₁₀X₁₁CX₁₂X₁₃X₁₄X₁₅X₁₆RSDHLTNHX₁₇X₁₈X₁₉ | 319 |
| cggtgagtt | CAT CGG | | TNHQRTHTGEKPYKCPECGKSFS | | HX₂₀X₂₁X₂₂X₂₃X₂₄X₈X₉CX₁₀X₁₁CX₁₂X₁₃X₁₄X₁₅X₁₆TSGSLVRHX₁₇X₁₈ | |
| agg | TGA GTT | | TSGSLVRHQRTHTGEKPYKCPEC | | X₁₉HX₂₀X₂₁X₂₂X₂₃X₂₄X₈X₉CX₁₀X₁₁CX₁₂X₁₃X₁₄X₁₅X₁₆QAGHLASHX₁₇ | |
| | AGG | | GKSFSQAGHLASHQRTHTGEKPY | | X₁₈X₁₉HX₂₀X₂₁X₂₂X₂₃X₂₄X₈X₉CX₁₀X₁₁CX₁₂X₁₃X₁₄X₁₅X₁₆RSDKLTEH | |
| | | | KCPECGKSFSRSDKLTEHQRTHT | | X₁₇X₁₈X₁₉HX₂₀X₂₁X₂₂X₂₃X₂₄X₈X₉CX₁₀X₁₁CX₁₂X₁₃X₁₄X₁₅X₁₆TSGNLT | |
| | | | GEKPYKCPECGKSFSTSGNLTEH | | EHX₁₇X₁₈X₁₉HX₂₀X₂₁X₂₂X₂₃X₂₄X₈X₉CX₁₀X₁₁CX₁₂X₁₃X₁₄X₁₅X₁₆QSSN | |
| | | | QRTHTGEKPYKCPECGKSFSQSS | | LVRHX₁₇X₁₈X₁₉HX₂₀X₂₁X₂₂X₂₃X₂₄X₈X₉CX₁₀X₁₁CX₁₂X₁₃X₁₄X₁₅X₁₆TH | |
| | | | NLVRHQRTHTGEKPYKCPECGKS | | LDLIRHX₁₇X₁₈X₁₉HX₂₀X₂₁X₂₂X₂₃X₂₄X₂₅X₂₆X₂₇X₂₈X₂₉X₃₀ | |
| | | | FSTHLDLIRHQRTHTGEKPTGKK | | | |
| | | | TS | | | |
| gaacatcgg | GAA CAT | 1032 | LEPGEKPYKCPECGKSFSDCRDL | 1581 | X₁X₂X₃X₄X₅X₆X₇X₈X₉CX₁₀X₁₁CX₁₂X₁₃X₁₄X₁₅X₁₆DCRDLARHX₁₇X₁₈X₁₉ | 2130 |
| tgagttagg | CGG TGA | | ARHQRTHTGEKPYKCPECGKSFS | | HX₂₀X₂₁X₂₂X₂₃X₂₄X₈X₉CX₁₀X₁₁CX₁₂X₁₃X₁₄X₁₅X₁₆RSDHLTNHX₁₇X₁₈ | |
| gcc | GTT AGG | | RSDHLTNHQRTHTGEKPYKCPEC | | X₁₉HX₂₀X₂₁X₂₂X₂₃X₂₄X₈X₉CX₁₀X₁₁CX₁₂X₁₃X₁₄X₁₅X₁₆TSGSLVRHX₁₇ | |
| | GCC | | GKSFSTSGSLVRHQRTHTGEKPY | | X₁₈X₁₉HX₂₀X₂₁X₂₂X₂₃X₂₄X₈X₉CX₁₀X₁₁CX₁₂X₁₃X₁₄X₁₅X₁₆QAGHLASH | |
| | | | KCPECGKSFSQAGHLASHQRTHT | | X₁₇X₁₈X₁₉HX₂₀X₂₁X₂₂X₂₃X₂₄X₈X₉CX₁₀X₁₁CX₁₂X₁₃X₁₄X₁₅X₁₆RSDKLT | |
| | | | GEKPYKCPECGKSFSRSDKLTEH | | EHX₁₇X₁₈X₁₉HX₂₀X₂₁X₂₂X₂₃X₂₄X₈X₉CX₁₀X₁₁CX₁₂X₁₃X₁₄X₁₅X₁₆TSGN | |
| | | | QRTHTGEKPYKCPECGKSFSTSG | | LTEHX₁₇X₁₈X₁₉HX₂₀X₂₁X₂₂X₂₃X₂₄X₈X₉CX₁₀X₁₁CX₁₂X₁₃X₁₄X₁₅X₁₆QS | |
| | | | NLTEHQRTHTGEKPYKCPECGKS | | SNLVRHX₁₇X₁₈X₁₉HX₂₀X₂₁X₂₂X₂₃X₂₄X₂₅X₂₆X₂₇X₂₈X₂₉X₃₀ | |
| | | | FSQSSNLVRHQRTHTGEKPTGKK | | | |
| | | | TS | | | |
| accccgggt | ACC CCG | 1033 | LEPGEKPYKCPECGKSFSQRANL | 1582 | X₁X₂X₃X₄X₅X₆X₇X₈X₉CX₁₀X₁₁CX₁₂X₁₃X₁₄X₁₅X₁₆QRANLRAHX₁₇X₁₈X₁₉ | 2131 |
| gtcagccag | GGT GTC | | RAHQRTHTGEKPYKCPECGKSFS | | HX₂₀X₂₁X₂₂X₂₃X₂₄X₈X₉CX₁₀X₁₁CX₁₂X₁₃X₁₄X₁₅X₁₆RADNLTEHX₁₇X₁₈ | |
| aaa | AGC CAG | | RADNLTEHQRTHTGEKPYKCPEC | | X₁₉HX₂₀X₂₁X₂₂X₂₃X₂₄X₈X₉CX₁₀X₁₁CX₁₂X₁₃X₁₄X₁₅X₁₆ERSHLREHX₁₇ | |
| | AAA | | GKSFSERSHLREHQRTHTGEKPY | | X₁₈X₁₉HX₂₀X₂₁X₂₂X₂₃X₂₄X₈X₉CX₁₀X₁₁CX₁₂X₁₃X₁₄X₁₅X₁₆DPGALVRH | |
| | | | KCPECGKSFSDPGALVRHQRTHT | | X₁₇X₁₈X₁₉HX₂₀X₂₁X₂₂X₂₃X₂₄X₈X₉CX₁₀X₁₁CX₁₂X₁₃X₁₄X₁₅X₁₆TSGHLV | |
| | | | GEKPYKCPECGKSFSTSGHLVRH | | RHX₁₇X₁₈X₁₉HX₂₀X₂₁X₂₂X₂₃X₂₄X₈X₉CX₁₀X₁₁CX₁₂X₁₃X₁₄X₁₅X₁₆RNDT | |
| | | | QRTHTGEKPYKCPECGKSFSRND | | LTEHX₁XX9HX₂₀X₂₁X₂₂X₂₃X₂₄X₈X₉CX₁₀X₁₁CX₁₂X₁₃X₁₄X₁₅X₁₆DK | |
| | | | TLTEHQRTHTGEKPYKCPECGKS | | KDLTRHX₁₇X₁₈X₁₉HX₂₀X₂₁X₂₂X₂₃X₂₄X₂₅X₂₆X₂₇X₂₈X₂₉X₃₀ | |
| | | | FSDKKDLTRHQRTHTGEKPTGKK | | | |
| | | | TS | | | |
| agcaccccg | AGC ACC | 1034 | LEPGEKPYKCPECGKSFSRADNL | 1583 | X₁X₂X₃X₄X₅X₆X₇X₈X₉CX₁₀X₁₁CX₁₂X₁₃X₁₄X₁₅X₁₆RADNLTEHX₁₇X₁₈X₁₉ | 2132 |
| ggtgtcagc | CCG GGT | | TEHQRTHTGEKPYKCPECGKSFS | | HX₂₀X₂₁X₂₂X₂₃X₂₄X₈X₉CX₁₀X₁₁CX₁₂X₁₃X₁₄X₁₅X₁₆ERSHLREHX₁₇X₁₈ | |
| cag | GTC AGC | | ERSHLREHQRTHTGEKPYKCPEC | | X₁₉HX₂₀X₂₁X₂₂X₂₃X₂₄X₈X₉CX₁₀X₁₁CX₁₂X₁₃X₁₄X₁₅X₁₆DPGALVRHX₁₇ | |
| | CAG | | GKSFSDPGALVRHQRTHTGEKPY | | X₁₈X₁₉HX₂₀X₂₁X₂₂X₂₃X₂₄X₈X₉CX₁₀X₁₁CX₁₂X₁₃X₁₄X₁₅X₁₆TSGHLVRH | |
| | | | KCPECGKSFSTSGHLVRHQRTHT | | X₁₇X₁₈X₁₉HX₂₀X₂₁X₂₂X₂₃X₂₄X₈X₉CX₁₀X₁₁CX₁₂X₁₃X₁₄X₁₅X₁₆RNDTLT | |
| | | | GEKPYKCPECGKSFSRNDTLTEH | | EHX₁₇X₁₈X₁₉HX₂₀X₂₁X₂₂X₂₃X₂₄X₈X₉CX₁₀X₁₁CX₁₂X₁₃X₁₄X₁₅X₁₆DKKD | |
| | | | QRTHTGEKPYKCPECGKSFSDKK | | LTRHX₁₇X₁₈X₁₉HX₂₀X₂₁X₂₂X₂₃X₂₄X₈X₉CX₁₀X₁₁CX₁₂X₁₃X₁₄X₁₅X₁₆ER | |
| | | | DLTRHQRTHTGEKPYKCPECGKS | | SHLREHX₁₇X₁₈X₁₉HX₂₀X₂₁X₂₂X₂₃X₂₄X₂₅X₂₆X₂₇X₂₈X₂₉X₃₀ | |
| | | | FSERSHLREHQRTHTGEKPTGKK | | | |
| | | | TS | | | |
| gcagttgta | GCA GTT | 1035 | LEPGEKPYKCPECGKSFSRNDTL | 1584 | X₁X₂X₃X₄X₅X₆X₇X₈X₉CX₁₀X₁₁CX₁₂X₁₃X₁₄X₁₅X₁₆RNDTLTEHX₁₇X₁₈X₁₉ | 2133 |
| attagcacc | GTA ATT | | TEHQRTHTGEKPYKCPECGKSFS | | HX₂₀X₂₁X₂₂X₂₃X₂₄X₈X₉CX₁₀X₁₁CX₁₂X₁₃X₁₄X₁₅X₁₆DKKDLTRHX₁₇X₁₈ | |
| ccg | AGC ACC | | DKKDLTRHQRTHTGEKPYKCPEC | | X₁₉HX₂₀X₂₁X₂₂X₂₃X₂₄X₈X₉CX₁₀X₁₁CX₁₂X₁₃X₁₄X₁₅X₁₆ERSHLREHX₁₇ | |
| | CCG | | GKSFSERSHLREHQRTHTGEKPY | | X₁₈X₁₉HX₂₀X₂₁X₂₂X₂₃X₂₄X₈X₉CX₁₀X₁₁CX₁₂X₁₃X₁₄X₁₅X₁₆HKNALQNH | |
| | | | KCPECGKSFSHKNALQNHQRTHT | | X₁₇X₁₈X₁₉HX₂₀X₂₁X₂₂X₂₃X₂₄X₈X₉CX₁₀X₁₁CX₁₂X₁₃X₁₄X₁₅X₁₆QSSSLV | |
| | | | GEKPYKCPECGKSFSQSSSLVRH | | RHX₁₇X₁₈X₁₉HX₂₀X₂₁X₂₂X₂₃X₂₄X₈X₉CX₁₀X₁₁CX₁₂X₁₃X₁₄X₁₅X₁₆TSGS | |
| | | | QRTHTGEKPYKCPECGKSFSTSG | | LVRHX₁₇X₁₈X₁₉HX₂₀X₂₁X₂₂X₂₃X₂₄X₈X₉CX₁₀X₁₁CX₁₂X₁₃X₁₄X₁₅X₁₆QS | |
| | | | SLVRHQRTHTGEKPYKCPECGKS | | GDLRRHX₁₇X₁₈X₁₉HX₂₀X₂₁X₂₂X₂₃X₂₄X₂₅X₂₆X₂₇X₂₈X₂₉X₃₀ | |
| | | | FSQSGDLRRHQRTHTGEKPTGKK | | | |
| | | | TS | | | |
| attagcacc | ATT AGC | 1036 | LEPGEKPYKCPECGKSFSERSHL | 1585 | X₁X₂X₃X₄X₅X₆X₇X₈X₉CX₁₀X₁₁CX₁₂X₁₃X₁₄X₁₅X₁₆ERSHLREHX₁₇X₁₈X₁₉ | 2134 |
| ccgggtgtc | ACC CCG | | REHQRTHTGEKPYKCPECGKSFS | | HX₂₀X₂₁X₂₂X₂₃X₂₄X₈X₉CX₁₀X₁₁CX₁₂X₁₃X₁₄X₁₅X₁₆DPGALVRHX₁₇X₁₈ | |
| agc | GGT GTC | | DPGALVRHQRTHTGEKPYKCPEC | | X₁₉HX₂₀X₂₁X₂₂X₂₃X₂₄X₈X₉CX₁₀X₁₁CX₁₂X₁₃X₁₄X₁₅X₁₆TSGHLVRHX₁₇ | |
| | AGC | | GKSFSTSGHLVRHQRTHTGEKPY | | X₁₈X₁₉HX₂₀X₂₁X₂₂X₂₃X₂₄X₈X₉CX₁₀X₁₁CX₁₂X₁₃X₁₄X₁₅X₁₆RNDTLTEH | |
| | | | KCPECGKSFSRNDTLTEHQRTHT | | X₁₇X₁₈X₁₉HX₂₀X₂₁X₂₂X₂₃X₂₄X₈X₉CX₁₀X₁₁CX₁₂X₁₃X₁₄X₁₅X₁₆DKKDLT | |
| | | | GEKPYKCPECGKSFSDKKDLTRH | | RHX₁₇X₁₈X₁₉HX₂₀X₂₁X₂₂X₂₃X₂₄X₈X₉CX₁₀X₁₁CX₁₂X₁₃X₁₄X₁₅X₁₆ERSH | |
| | | | QRTHTGEKPYKCPECGKSFSERS | | LREHX₁₇X₁₈X₁₉HX₂₀X₂₁X₂₂X₂₃X₂₄X₈X₉CX₁₀X₁₁CX₁₂X₁₃X₁₄X₁₅X₁₆HK | |
| | | | HLREHQRTHTGEKPYKCPECGKS | | NALQNHX₁₇X₁₈X₁₉HX₂₀X₂₁X₂₂X₂₃X₂₄X₂₅X₂₆X₂₇X₂₈X₂₉X₃₀ | |
| | | | FSHKNALQNHQRTHTGEKPTGKK | | | |
| | | | TS | | | |
| gtaattagc | GTA ATT | 1037 | LEPGEKPYKCPECGKSFSDPGAL | 1586 | X₁X₂X₃X₄X₅X₆X₇X₈X₉CX₁₀X₁₁CX₁₂X₁₃X₁₄X₁₅X₁₆DPGALVRHX₁₇X₁₈X₁₉ | 2135 |
| accccgggt | AGC ACC | | VRHQRTHTGEKPYKCPECGKSFS | | HX₂₀X₂₁X₂₂X₂₃X₂₄X₈X₉CX₁₀X₁₁CX₁₂X₁₃X₁₄X₁₅X₁₆TSGHLVRHX₁₇X₁₈ | |
| gtc | CCG GGT | | TSGHLVRHQRTHTGEKPYKCPEC | | X₁₉HX₂₀X₂₁X₂₂X₂₃X₂₄X₈X₉CX₁₀X₁₁CX₁₂X₁₃X₁₄X₁₅X₁₆RNDTLTEHX₁₇ | |
| | GTC | | GKSFSRNDTLTEHQRTHTGEKPY | | X₁₈X₁₉HX₂₀X₂₁X₂₂X₂₃X₂₄X₈X₉CX₁₀X₁₁CX₁₂X₁₃X₁₄X₁₅X₁₆DKKDLTRH | |
| | | | KCPECGKSFSDKKDLTRHQRTHT | | X₁₇X₁₈X₁₉HX₂₀X₂₁X₂₂X₂₃X₂₄X₈X₉CX₁₀X₁₁CX₁₂X₁₃X₁₄X₁₅X₁₆ERSHLR | |
| | | | GEKPYKCPECGKSFSERSHLREH | | EHX₁₇X₁₈X₁₉HX₂₀X₂₁X₂₂X₂₃X₂₄X₈X₉CX₁₀X₁₁CX₁₂X₁₃X₁₄X₁₅X₁₆HKNA | |
| | | | QRTHTGEKPYKCPECGKSFSHKN | | LQNHX₁₇X₁₈X₁₉HX₂₀X₂₁X₂₂X₂₃X₂₄X₈X₉CX₁₀X₁₁CX₁₂X₁₃X₁₄X₁₅X₁₆QS | |
| | | | ALQNHQRTHTGEKPYKCPECGKS | | SSLVRHX₁₇X₁₈X₁₉HX₂₀X₂₁X₂₂X₂₃X₂₄X₂₅X₂₆X₂₇X₂₈X₂₉X₃₀ | |
| | | | FSQSSSLVRHQRTHTGEKPTGKK | | | |
| | | | TS | | | |
| tgagttagg | TGA GTT | 1038 | LEPGEKPYKCPECGKSFSTSGSL | 1587 | X₁X₂X₃X₄X₅X₆X₇X₈X₉CX₁₀X₁₁CX₁₂X₁₃X₁₄X₁₅X₁₆TSGSLVRHX₁₇X₁₈X₁₉ | 2136 |
| gccccagca | AGG GCC | | VRHQRTHTGEKPYKCPECGKSFS | | HX₂₀X₂₁X₂₂X₂₃X₂₄X₈X₉CX₁₀X₁₁CX₁₂X₁₃X₁₄X₁₅X₁₆QSGDLRRHX₁₇X₁₈ | |
| gtt | CCA GCA | | QSGDLRRHQRTHTGEKPYKCPEC | | X₁₉HX₂₀X₂₁X₂₂X₂₃X₂₄X₈X₉CX₁₀X₁₁CX₁₂X₁₃X₁₄X₁₅X₁₆TSHSLTEHX₁₇ | |
| | GTT | | GKSFSTSHSLTEHQRTHTGEKPY | | X₁₈X₁₉HX₂₀X₂₁X₂₂X₂₃X₂₄X₈X₉CX₁₀X₁₁CX₁₂X₁₃X₁₄X₁₅X₁₆DCRDLARH | |
| | | | KCPECGKSFSDCRDLARHQRTHT | | X₁₇X₁₈X₁₉HX₂₀X₂₁X₂₂X₂₃X₂₄X₈X₉CX₁₀X₁₁CX₁₂X₁₃X₁₄X₁₅X₁₆RSDHLT | |
| | | | GEKPYKCPECGKSFSRSDHLTNH | | NHX₁₇X₁₈X₁₉HX₂₀X₂₁X₂₂X₂₃X₂₄X₈X₉CX₁₀X₁₁CX₁₂X₁₃X₁₄X₁₅X₁₆TSGS | |
| | | | QRTHTGEKPYKCPECGKSFSTSG | | LVRHX₁₇X₁₈X₁₉HX₂₀X₂₁X₂₂X₂₃X₂₄X₈X₉CX₁₀X₁₁CX₁₂X₁₃X₁₄X₁₅X₁₆QA | |
| | | | SLVRHQRTHTGEKPYKCPECGKS | | GHLASHX₁₇X₁₈X₁₉HX₂₀X₂₁X₂₂X₂₃X₂₄X₂₅X₂₆X₂₇X₂₈X₂₉X₃₀ | |
| | | | FSQAGHLASHQRTHTGEKPTGKK | | | |
| | | | TS | | | |
| gttagggcc | GTT AGG | 1039 | LEPGEKPYKCPECGKSFSQSSSL | 1588 | X₁X₂X₃X₄X₅X₆X₇X₈X₉CX₁₀X₁₁CX₁₂X₁₃X₁₄X₁₅X₁₆QSSSLVRHX₁₇X₁₈X₁₉ | 2137 |
| ccagcagtt | GCC CCA | | VRHQRTHTGEKPYKCPECGKSFS | | HX₂₀X₂₁X₂₂X₂₃X₂₄X₈X₉CX₁₀X₁₁CX₁₂X₁₃X₁₄X₁₅X₁₆TSGSLVRHX₁₇X₁₈ | |
| gta | GCA GTT | | TSGSLVRHQRTHTGEKPYKCPEC | | X₁₉HX₂₀X₂₁X₂₂X₂₃X₂₄X₈X₉CX₁₀X₁₁CX₁₂X₁₃X₁₄X₁₅X₁₆QSGDLRRHX₁₇ | |
| | GTA | | GKSFSQSGDLRRHQRTHTGEKPY | | X₁₈X₁₉HX₂₀X₂₁X₂₂X₂₃X₂₄X₈X₉CX₁₀X₁₁CX₁₂X₁₃X₁₄X₁₅X₁₆TSHSLTEH | |
| | | | KCPECGKSFSTSHSLTEHQRTHT | | X₁₇X₁₈X₁₉HX₂₀X₂₁X₂₂X₂₃X₂₄X₈X₉CX₁₀X₁₁CX₁₂X₁₃X₁₄X₁₅X₁₆DCRDLA | |
| | | | GEKPYKCPECGKSFSDCRDLARH | | RHX₁₇X₁₈X₁₉HX₂₀X₂₁X₂₂X₂₃X₂₄X₈X₉CX₁₀X₁₁CX₁₂X₁₃X₁₄X₁₅X₁₆RSDH | |
| | | | QRTHTGEKPYKCPECGKSFSRSD | | LTNHX₁₇X₁₈X₁₉HX₂₀X₂₁X₂₂X₂₃X₂₄X₈X₉CX₁₀X₁₁CX₁₂X₁₃X₁₄X₁₅X₁₆TS | |
| | | | HLTNHQRTHTGEKPYKCPECGKS | | GSLVRHX₁₇X₁₈X₁₉HX₂₀X₂₁X₂₂X₂₃X₂₄X₂₅X₂₆X₂₇X₂₈X₂₉X₃₀ | |
| | | | FSTSGSLVRHQRTHTGEKPTGKK | | | |
| | | | TS | | | |
| gttgtaatt | GTT GTA | 1040 | LEPGEKPYKCPECGKSFSTSGHL | 1589 | X₁X₂X₃X₄X₅X₆X₇X₈X₉CX₁₀X₁₁CX₁₂X₁₃X₁₄X₁₅X₁₆TSGHLVRHX₁₇X₁₈X₁₉ | 2138 |
| agcaccccg | ATT AGC | | VRHQRTHTGEKPYKCPECGKSFS | | HX₂₀X₂₁X₂₂X₂₃X₂₄X₈X₉CX₁₀X₁₁CX₁₂X₁₃X₁₄X₁₅X₁₆RNDTLTEHX₁₇X₁₈ | |
| ggt | ACC CCG | | RNDTLTEHQRTHTGEKPYKCPEC | | X₁₉HX₂₀X₂₁X₂₂X₂₃X₂₄X₈X₉CX₁₀X₁₁CX₁₂X₁₃X₁₄X₁₅X₁₆DKKDLTRHX₁₇ | |
| | GGT | | GKSFSDKKDLTRHQRTHTGEKPY | | X₁₈X₁₉HX₂₀X₂₁X₂₂X₂₃X₂₄X₈X₉CX₁₀X₁₁CX₁₂X₁₃X₁₄X₁₅X₁₆ERSHLREH | |
| | | | KCPECGKSFSERSHLREHQRTHT | | X₁₇X₁₈X₁₉HX₂₀X₂₁X₂₂X₂₃X₂₄X₈X₉CX₁₀X₁₁CX₁₂X₁₃X₁₄X₁₅X₁₆HKNALQ | |
| | | | GEKPYKCPECGKSFSHKNALQNH | | NHX₁₇X₁₈X₁₉HX₂₀X₂₁X₂₂X₂₃X₂₄X₈X₉CX₁₀X₁₁CX₁₂X₁₃X₁₄X₁₅X₁₆QSSS | |
| | | | QRTHTGEKPYKCPECGKSFSQSS | | LVRHX₁₇X₁₈X₁₉HX₂₀X₂₁X₂₂X₂₃X₂₄X₈X₉CX₁₀X₁₁CX₁₂X₁₃X₁₄X₁₅X₁₆TS | |
| | | | SLVRHQRTHTGEKPYKCPECGKS | | GSLVRHX₁₇X₁₈X₁₉HX₂₀X₂₁X₂₂X₂₃X₂₄X₂₅X₂₆X₂₇X₂₈X₂₉X₃₀ | |
| | | | FSTSGSLVRHQRTHTGEKPTGKK | | | |
| | | | TS | | | |
| gtgagttag | gtg AGT | 1041 | LEPGEKPYKCPECGKSFSHRTTL | 1590 | X₁X₂X₃X₄X₅X₆X₇X₈X₉CX₁₀X₁₁CX₁₂X₁₃X₁₄X₁₅X₁₆HRTTLTNHX₁₇X₁₈X₁₉ | 2139 |
| ggccccagc | TAG GGC | | TNHQRTHTGEKPYKCPECGKSFS | | HX₂₀X₂₁X₂₂X₂₃X₂₄X₈X₉CX₁₀X₁₁CX₁₂X₁₃X₁₄X₁₅X₁₆ERSHLREHX₁₇X₁₈ | |
| agt | CCC AGC | | ERSHLREHQRTHTGEKPYKCPEC | | X₁₉HX₂₀X₂₁X₂₂X₂₃X₂₄X₈X₉CX₁₀X₁₁CX₁₂X₁₃X₁₄X₁₅X₁₆SKKHLAEHX₁₇ | |
| | AGT | | GKSFSSKKHLAEHQRTHTGEKPY | | X₁₈X₁₉HX₂₀X₂₁X₂₂X₂₃X₂₄X₈X₉CX₁₀X₁₁CX₁₂X₁₃X₁₄X₁₅X₁₆DPGHLVRH | |
| | | | KCPECGKSFSDPGHLVRHQRTHT | | X₁₇X₁₈X₁₉HX₂₀X₂₁X₂₂X₂₃X₂₄X₈X₉CX₁₀X₁₁CX₁₂X₁₃X₁₄X₁₅X₁₆REDNLH | |
| | | | GEKPYKCPECGKSFSREDNLHTH | | THX₁₇X₁₈X₁₉HX₂₀X₂₁X₂₂X₂₃X₂₄X₈X₉CX₁₀X₁₁CX₁₂X₁₃X₁₄X₁₅X₁₆HRTT | |
| | | | QRTHTGEKPYKCPECGKSFSHRT | | LTNHX₁₇X₁₈X₁₉HX₂₀X₂₁X₂₂X₂₃X₂₄X₈X₉CX₁₀X₁₁CX₁₂X₁₃X₁₄X₁₅X₁₆RS | |
| | | | TLTNHQRTHTGEKPYKCPECGKS | | DELVRHX₁₇X₁₈X₁₉HX₂₀X₂₁X₂₂X₂₃X₂₄X₂₅X₂₆X₂₇X₂₈X₂₉X₃₀ | |
| | | | FSRSDELVRHQRTHTGEKPTGKK | | | |
| | | | TS | | | |
| cagccagaa | CAG CCA | 1042 | LEPGEKPYKCPECGKSFSRADNL | 1591 | X₁X₂X₃X₄X₅X₆X₇X₈X₉CX₁₀X₁₁CX₁₂X₁₃X₁₄X₁₅X₁₆RADNLTEHX₁₇X₁₈X₁₉ | 2140 |
| accaacaaa | GAA ACC | | TEHQRTHTGEKPYKCPECGKSFS | | HX₂₀X₂₁X₂₂X₂₃X₂₄X₈X₉CX₁₀X₁₁CX₁₂X₁₃X₁₄X₁₅X₁₆QRANLRAHX₁₇X₁₈ | |
| cag | AAC AAA | | QRANLRAHQRTHTGEKPYKCPEC | | X₁₉HX₂₀X₂₁X₂₂X₂₃X₂₄X₈X₉CX₁₀X₁₁CX₁₂X₁₃X₁₄X₁₅X₁₆DSGNLRVHX₁₇ | |
| | CAG | | GKSFSDSGNLRVHQRTHTGEKPY | | X₁₈X₁₉HX₂₀X₂₁X₂₂X₂₃X₂₄X₈X₉CX₁₀X₁₁CX₁₂X₁₃X₁₄X₁₅X₁₆DKKDLTRH | |
| | | | KCPECGKSFSDKKDLTRHQRTHT | | X₁₇X₁₈X₁₉HX₂₀X₂₁X₂₂X₂₃X₂₄X₈X₉CX₁₀X₁₁CX₁₂X₁₃X₁₄X₁₅X₁₆QSSNLV | |
| | | | GEKPYKCPECGKSFSQSSNLVRH | | RHX₁₇X₁₈X₁₉HX₂₀X₂₁X₂₂X₂₃X₂₄X₈X₉CX₁₀X₁₁CX₁₂X₁₃X₁₄X₁₅X₁₆TSHS | |
| | | | QRTHTGEKPYKCPECGKSFSTSH | | LTEHX₁₇X₁₈X₁₉HX₂₀X₂₁X₂₂X₂₃X₂₄X₈X₉CX₁₀X₁₁CX₁₂X₁₃X₁₄X₁₅X₁₆RA | |
| | | | SLTEHQRTHTGEKPYKCPECGKS | | DNLTEHX₁₇X₁₈X₁₉HX₂₀X₂₁X₂₂X₂₃X₂₄X₂₅X₂₆X₂₇X₂₈X₂₉X₃₀ | |
| | | | FSRADNLTEHQRTHTGEKPTGKK | | | |
| | | | TS | | | |
| gaaaccaac | GAA ACC | 1043 | LEPGEKPYKCPECGKSFSTTGNL | 1592 | X₁X₂X₃X₄X₅X₆X₇X₈X₉CX₁₀X₁₁CX₁₂X₁₃X₁₄X₁₅X₁₆TTGNLTVHX₁₇X₁₈X₁₉ | 2141 |
| aaacagcca | AAC AAA | | TVHQRTHTGEKPYKCPECGKSFS | | HX₂₀X₂₁X₂₂X₂₃X₂₄X₈X₉CX₁₀X₁₁CX₁₂X₁₃X₁₄X₁₅X₁₆TSHSLTEHX₁₇X₁₈ | |
| aat | CAG CCA | | TSHSLTEHQRTHTGEKPYKCPEC | | X₁₉HX₂₀X₂₁X₂₂X₂₃X₂₄X₈X₉CX₁₀X₁₁CX₁₂X₁₃X₁₄X₁₅X₁₆RADNLTEHX₁₇ | |
| | AAT | | GKSFSRADNLTEHQRTHTGEKPY | | X₁₈X₁₉HX₂₀X₂₁X₂₂X₂₃X₂₄X₈X₉CX₁₀X₁₁CX₁₂X₁₃X₁₄X₁₅X₁₆QRANLRAH | |
| | | | KCPECGKSFSQRANLRAHQRTHT | | X₁₇X₁₈X₁₉HX₂₀X₂₁X₂₂X₂₃X₂₄X₈X₉CX₁₀X₁₁CX₁₂X₁₃X₁₄X₁₅X₁₆DSGNLR | |
| | | | GEKPYKCPECGKSFSDSGNLRVH | | VHX₁₇X₁₈X₁₉HX₂₀X₂₁X₂₂X₂₃X₂₄X₈X₉CX₁₀X₁₁CX₁₂X₁₃X₁₄X₁₅X₁₆DKKD | |
| | | | QRTHTGEKPYKCPECGKSFSDKK | | LTRHX₁₇X₁₈X₁₉HX₂₀X₂₁X₂₂X₂₃X₂₄X₈X₉CX₁₀X₁₁CX₁₂X₁₃X₁₄X₁₅X₁₆QS | |
| | | | DLTRHQRTHTGEKPYKCPECGKS | | SNLVRHX₁₇X₁₈X₁₉HX₂₀X₂₁X₂₂X₂₃X₂₄X₂₅X₂₆X₂₇X₂₈X₂₉X₃₀ | |
| | | | FSQSSNLVRHQRTHTGEKPTGKK | | | |
| | | | TS | | | |
| ccagaaacc | CCA GAA | 1044 | LEPGEKPYKCPECGKSFSTSHSL | 1593 | X₁X₂X₃X₄X₅X₆X₇X₈X₉CX₁₀X₁₁CX₁₂X₁₃X₁₄X₁₅X₁₆TSHSLTEHX₁₇X₁₈X₁₉ | 2142 |
| aacaaacag | ACC AAC | | TEHQRTHTGEKPYKCPECGKSFS | | HX₂₀X₂₁X₂₂X₂₃X₂₄X₈X₉CX₁₀X₁₁CX₁₂X₁₃X₁₄X₁₅X₁₆RADNLTEHX₁₇X₁₈ | |
| cca | AAA CAG | | RADNLTEHQRTHTGEKPYKCPEC | | X₁₉HX₂₀X₂₁X₂₂X₂₃X₂₄X₈X₉CX₁₀X₁₁CX₁₂X₁₃X₁₄X₁₅X₁₆QRANLRAHX₁₇ | |
| | CCA | | GKSFSQRANLRAHQRTHTGEKPY | | X₁₈X₁₉HX₂₀X₂₁X₂₂X₂₃X₂₄X₈X₉CX₁₀X₁₁CX₁₂X₁₃X₁₄X₁₅X₁₆DSGNLRVH | |
| | | | KCPECGKSFSDSGNLRVHQRTHT | | X₁₇X₁₈X₁₉HX₂₀X₂₁X₂₂X₂₃X₂₄X₈X₉CX₁₀X₁₁CX₁₂X₁₃X₁₄X₁₅X₁₆DKKDLT | |
| | | | GEKPYKCPECGKSFSDKKDLTRH | | RHX₁₇X₁₈X₁₉HX₂₀X₂₁X₂₂X₂₃X₂₄X₈X₉CX₁₀X₁₁CX₁₂X₁₃X₁₄X₁₅X₁₆QSSN | |
| | | | QRTHTGEKPYKCPECGKSFSQSS | | LVRHX₁₇X₁₈X₁₉HX₂₀X₂₁X₂₂X₂₃X₂₄X₈X₉CX₁₀X₁₁CX₁₂X₁₃X₁₄X₁₅X₁₆TS | |
| | | | NLVRHQRTHTGEKPYKCPECGKS | | HSLTEHX₁₇X₁₈X₁₉HX₂₀X₂₁X₂₂X₂₃X₂₄X₂₅X₂₆X₂₇X₂₈X₂₉X₃₀ | |
| | | | FSTSHSLTEHQRTHTGEKPTGKK | | | |
| | | | TS | | | |
| accaacaaa | ACC AAC | 1045 | LEPGEKPYKCPECGKSFSSKKHL | 1594 | X₁X₂X₃X₄X₅X₆X₇X₈X₉CX₁₀X₁₁CX₁₂X₁₃X₁₄X₁₅X₁₆SKKHLAEHX₁₇X₁₈X₁₉ | 2143 |
| cagccaaat | AAA CAG | | AEHQRTHTGEKPYKCPECGKSFS | | HX₂₀X₂₁X₂₂X₂₃X₂₄X₈X₉CX₁₀X₁₁CX₁₂X₁₃X₁₄X₁₅X₁₆TTGNLTVHX₁₇X₁₈ | |
| ccc | CCA AAT | | TTGNLTVHQRTHTGEKPYKCPEC | | X₁₉HX₂₀X₂₁X₂₂X₂₃X₂₄X₈X₉CX₁₀X₁₁CX₁₂X₁₃X₁₄X₁₅X₁₆TSHSLTEHX₁₇ | |
| | CCC | | GKSFSTSHSLTEHQRTHTGEKPY | | X₁₈X₁₉HX₂₀X₂₁X₂₂X₂₃X₂₄X₈X₉CX₁₀X₁₁CX₁₂X₁₃X₁₄X₁₅X₁₆RADNLTEH | |
| | | | KCPECGKSFSRADNLTEHQRTHT | | X₁₇X₁₈X₁₉HX₂₀X₂₁X₂₂X₂₃X₂₄X₈X₉CX₁₀X₁₁CX₁₂X₁₃X₁₄X₁₅X₁₆QRANLR | |
| | | | GEKPYKCPECGKSFSQRANLRAH | | AHX₁₇X₁₈X₁₉HX₂₀X₂₁X₂₂X₂₃X₂₄X₈X₉CX₁₀X₁₁CX₁₂X₁₃X₁₄X₁₅X₁₆DSGN | |
| | | | QRTHTGEKPYKCPECGKSFSDSG | | LRVHX₁₇X₁₈X₁₉HX₂₀X₂₁X₂₂X₂₃X₂₄X₈X₉CX₁₀X₁₁CX₁₂X₁₃X₁₄X₁₅X₁₆DK | |
| | | | NLRVHQRTHTGEKPYKCPECGKS | | KDLTRHX₁₇X₁₈X₁₉HX₂₀X₂₁X₂₂X₂₃X₂₄X₂₅X₂₆X₂₇X₂₈X₂₉X₃₀ | |
| | | | FSDKKDLTRHQRTHTGEKPTGKK | | | |
| | | | TS | | | |
| gccagaaac | GCC AGA | 1046 | LEPGEKPYKCPECGKSFSDCRDL | 1595 | X₁X₂X₃X₄X₅X₆X₇X₈X₉CX₁₀X₁₁CX₁₂X₁₃X₁₄X₁₅X₁₆DCRDLARHX₁₇X₁₈X₁₉ | 2144 |
| caacaaaca | AAC CAA | | ARHQRTHTGEKPYKCPECGKSFS | | HX₂₀X₂₁X₂₂X₂₃X₂₄X₈X₉CX₁₀X₁₁CX₁₂X₁₃X₁₄X₁₅X₁₆SPADLTRHX₁₇X₁₈ | |
| gcc | CAA ACA | | SPADLTRHQRTHTGEKPYKCPEC | | X₁₉HX₂₀X₂₁X₂₂X₂₃X₂₄X₈X₉CX₁₀X₁₁CX₁₂X₁₃X₁₄X₁₅X₁₆QSGNLTEHX₁₇ | |
| | GCC | | GKSFSQSGNLTEHQRTHTGEKPY | | X₁₈X₁₉HX₂₀X₂₁X₂₂X₂₃X₂₄X₈X₉CX₁₀X₁₁CX₁₂X₁₃X₁₄X₁₅X₁₆QSGNLTEH | |
| | | | KCPECGKSFSQSGNLTEHQRTHT | | X₁₇X₁₈X₁₉HX₂₀X₂₁X₂₂X₂₃X₂₄X₈X₉CX₁₀X₁₁CX₁₂X₁₃X₁₄X₁₅X₁₆DSGNLR | |
| | | | GEKPYKCPECGKSFSDSGNLRVH | | VHX₁₇X₁₈X₁₉HX₂₀X₂₁X₂₂X₂₃X₂₄X₈X₉CX₁₀X₁₁CX₁₂X₁₃X₁₄X₁₅X₁₆QLAH | |
| | | | QRTHTGEKPYKCPECGKSFSQLA | | LRAHX₁₇X₁₈X₁₉HX₂₀X₂₁X₂₂X₂₃X₂₄X₈X₉CX₁₀X₁₁CX₁₂X₁₃X₁₄X₁₅X₁₆DC | |
| | | | HLRAHQRTHTGEKPYKCPECGKS | | RDLARHX₁₇X₁₈X₁₉HX₂₀X₂₁X₂₂X₂₃X₂₄X₂₅X₂₆X₂₇X₂₈X₂₉X₃₀ | |
| | | | FSDCRDLARHQRTHTGEKPTGKK | | | |
| | | | TS | | | |
| agaaaccaa | AGA AAC | 1047 | LEPGEKPYKCPECGKSFSQRANL | 1596 | X₁X₂X₃X₄X₅X₆X₇X₈X₉CX₁₀X₁₁X₁₂X₁₃X₁₄X₁₅X₁₆QRANLRAHX₁₇X₁₈X₁₉ | 2145 |
| caaacagcc | CAA CAA | | RAHQRTHTGEKPYKCPECGKSFS | | HX₂₀X₂₁X₂₂X₂₃X₂₄X₈X₉CX₁₀X₁₁CX₁₂X₁₃X₁₄X₁₅X₁₆DCRDLARHX₁₇X₁₈ | |
| aaa | ACA GCC | | DCRDLARHQRTHTGEKPYKCPEC | | X₁₉HX₂₀X₂₁X₂₂X₂₃X₂₄X₈X₉CX₁₀X₁₁CX₁₂X₁₃X₁₄X₁₅X₁₆SPADLTRHX₁₇ | |
| | AAA | | GKSFSSPADLTRHQRTHTGEKPY | | X₁₈X₁₉HX₂₀X₂₁X₂₂X₂₃X₂₄X₈X₉CX₁₀X₁₁CX₁₂X₁₃X₁₄X₁₅X₁₆QSGNLTEH | |
| | | | KCPECGKSFSQSGNLTEHQRTHT | | X₁₇X₁₈X₁₉HX₂₀X₂₁X₂₂X₂₃X₂₄X₈X₉CX₁₀X₁₁CX₁₂X₁₃X₁₄X₁₅X₁₆QSGNLT | |
| | | | GEKPYKCPECGKSFSQSGNLTEH | | EHX₁₇X₁₈X₁₉HX₂₀X₂₁X₂₂X₂₃X₂₄X₈X₉CX₁₀X₁₁CX₁₂X₁₃X₁₄X₁₅X₁₆DSGN | |
| | | | QRTHTGEKPYKCPECGKSFSDSG | | LRVHX₁₇X₁₈X₁₉HX₂₀X₂₁X₂₂X₂₃X₂₄X₈X₉CX₁₀X₁₁CX₁₂X₁₃X₁₄X₁₅X₁₆QL | |
| | | | NLRVHQRTHTGEKPYKCPECGKS | | AHLRAHX₁₇X₁₈X₁₉HX₂₀X₂₁X₂₂X₂₃X₂₄X₂₅X₂₆X₂₇X₂₈X₂₉X₃₀ | |
| | | | FSQLAHLRAHQRTHTGEKPTGKK | | | |
| | | | TS | | | |
| cctgcagcc | CCT GCA | 138 | LEPGEKPYKCPECGKSFSQNSTL | 139 | X₁X₂X₃X₄X₅X₆X₇X₈X₉CX₁₀X₁₁CX₁₂X₁₃X₁₄X₁₅X₁₆QNSTLTEHX₁₇X₁₈X₁₉ | 322 |
| ccgcccagc | GCC CCG | | TEHQRTHTGEKPYKCPECGKSFS | | HX₂₀X₂₁X₂₂X₂₃X₂₄X₈X₉CX₁₀X₁₁CX₁₂X₁₃X₁₄X₁₅X₁₆ERSHLREHX₁₇X₁₈ | |
| cta | CCC AGC | | ERSHLREHQRTHTGEKPYKCPEC | | X₁₉HX₂₀X₂₁X₂₂X₂₃X₂₄X₈X₉CX₁₀X₁₁CX₁₂X₁₃X₁₄X₁₅X₁₆SKKHLAEHX₁₇ | |
| | CTA | | GKSFSSKKHLAEHQRTHTGEKPY | | X₁₈X₁₉HX₂₀X₂₁X₂₂X₂₃X₂₄X₈X₉CX₁₀X₁₁CX₁₂X₁₃X₁₄X₁₅X₁₆RNDTLTEH | |
| | | | KCPECGKSFSRNDTLTEHQRTHT | | X₁₇X₁₈X₁₉HX₂₀X₂₁X₂₂X₂₃X₂₄X₈X₉CX₁₀X₁₁CX₁₂X₁₃X₁₄X₁₅X₁₆DCRDLA | |
| | | | GEKPYKCPECGKSFSDCRDLARH | | RHX₁₇X₁₈X₁₉HX₂₀X₂₁X₂₂X₂₃X₂₄X₈X₉CX₁₀X₁₁CX₁₂X₁₃X₁₄X₁₅X₁₆QSGD | |
| | | | QRTHTGEKPYKCPECGKSFSQSG | | LRRHX₁₇X₁₈X₁₉HX₂₀X₂₁X₂₂X₂₃X₂₄X₈X₉CX₁₀X₁₁CX₁₂X₁₃X₁₄X₁₅X₁₆TK | |
| | | | DLRRHQRTHTGEKPYKCPECGKS | | NSLTEHX₁₇X₁₈X₁₉HX₂₀X₂₁X₂₂X₂₃X₂₄X₂₅X₂₆X₂₇X₂₈X₂₉X₃₀ | |
| | | | FSTKNSLTEHQRTHTGEKPTGKK | | | |
| | | | TS | | | |
| accggcggg | ACC GGC | 1048 | LEPGEKPYKCPECGKSFSDSGNL | 1597 | X₁X₂X₃X₄X₅X₆X₇X₈X₉CX₁₀X₁₁CX₁₂X₁₃X₁₄X₁₅X₁₆DSGNLRVHX₁₇X₁₈X₁₉ | 2146 |
| ggaccgatt | GGG GGA | | RVHQRTHTGEKPYKCPECGKSFS | | HX₂₀X₂₁X₂₂X₂₃X₂₄X₈X₉CX₁₀X₁₁CX₁₂X₁₃X₁₄X₁₅X₁₆HKNALQNHX₁₇X₁₈ | |
| aac | CCG ATT | | HKNALQNHQRTHTGEKPYKCPEC | | X₁₉HX₂₀X₂₁X₂₂X₂₃X₂₄X₈X₉CX₁₀X₁₁CX₁₂X₁₃X₁₄X₁₅X₁₆RNDTLTEHX₁₇ | |
| | AAC | | GKSFSRNDTLTEHQRTHTGEKPY | | X₁₈X₁₉HX₂₀X₂₁X₂₂X₂₃X₂₄X₈X₉CX₁₀X₁₁CX₁₂X₁₃X₁₄X₁₅X₁₆QRAHLERH | |
| | | | KCPECGKSFSQRAHLERHQRTHT | | X₁₇X₁₈X₁₉HX₂₀X₂₁X₂₂X₂₃X₂₄X₈X₉CX₁₀X₁₁CX₁₂X₁₃X₁₄X₁₅X₁₆RSDKLV | |
| | | | GEKPYKCPECGKSFSRSDKLVRH | | RHX₁₇X₁₈X₁₉HX₂₀X₂₁X₂₂X₂₃X₂₄X₈X₉CX₁₀X₁₁CX₁₂X₁₃X₁₄X₁₅X₁₆DPGH | |
| | | | QRTHTGEKPYKCPECGKSFSDPG | | LVRHX₁₇X₁₈X₁₉HX₂₀X₂₁X₂₂X₂₃X₂₄X₈X₉CX₁₀X₁₁CX₁₂XEX₁₄X₁₅X₁₆DK | |
| | | | HLVRHQRTHTGEKPYKCPECGKS | | KDLTRHX₁₇X₁₈X₁₉HX₂₀X₂₁X₂₂X₂₃X₂₄X₂₅X₂₆X₂₇X₂₈X₂₉X₃₀ | |
| | | | FSDKKDLTRHQRTHTGEKPTGKK | | | |
| | | | TS | | | |
| ggcggggga | GGC GGG | 118 | LEPGEKPYKCPECGKSFSTSGNL | 119 | X₁X₂X₃X₄X₅X₆X₇X₈X₉CX₁₀X₁₁CX₁₂X₁₃X₁₄X₁₅X₁₆TSGNLTEHX₁₇X₁₈X₁₉ | 317 |
| ccgattaac | GGA CCG | | TEHQRTHTGEKPYKCPECGKSFS | | HX₂₀X₂₁X₂₂X₂₃X₂₄X₈X₉CX₁₀X₁₁CX₁₂X₁₃X₁₄X₁₅X₁₆DSGNLRVHX₁₇X₁₈ | |
| cat | ATT AAC | | DSGNLRVHQRTHTGEKPYKCPEC | | X₁₉HX₂₀X₂₁X₂₂X₂₃X₂₄X₈X₉CX₁₀X₁₁CX₁₂X₁₃X₁₄X₁₅X₁₆HKNALQNHX₁₇ | |
| | CAT | | GKSFSHKNALQNHQRTHTGEKPY | | X₁₈X₁₉HX₂₀X₂₁X₂₂X₂₃X₂₄X₈X₉CX₁₀X₁₁CX₁₂X₁₃X₁₄X₁₅X₁₆RNDTLTEH | |
| | | | KCPECGKSFSRNDTLTEHQRTHT | | X₁₇X₁₈X₁₉HX₂₀X₂₁X₂₂X₂₃X₂₄X₈X₉CX₁₀X₁₁CX₁₂X₁₃X₁₄X₁₅X₁₆QRAHLE | |
| | | | GEKPYKCPECGKSFSQRAHLERH | | RHX₁₇X₁₈X₁₉HX₂₀X₂₁X₂₂X₂₃X₂₄X₈X₉CX₁₀X₁₁CX₁₂X₁₃X₁₄X₁₅X₁₆RSDK | |
| | | | QRTHTGEKPYKCPECGKSFSRSD | | LVRHX₁₇X₁₈X₁₉HX₂₀X₂₁X₂₂X₂₃X₂₄X₈X₉CX₁₀X₁₁CX₁₂X₁₃X₁₄X₁₅X₁₆DP | |
| | | | KLVRHQRTHTGEKPYKCPECGKS | | GHLVRHX₁₇X₁₈X₁₉HX₂₀X₂₁X₂₂X₂₃X₂₄X₂₅X₂₆X₂₇X₂₈X₂₉X₃₀ | |
| | | | FSDPGHLVRHQRTHTGEKPTGKK | | | |
| | | | TS | | | |
| cccacccct | CCC ACC | 142 | LEPGEKPYKCPECGKSFSERSHL | 143 | X₁X₂X₃X₄X₅X₆X₇X₈X₉CX₁₀X₁₁CX₁₂X₁₃X₁₄X₁₅X₁₆ERSHLREHX₁₇X₁₈X₁₉ | 323 |
| ccccggcag | CCT CCC | | REHQRTHTGEKPYKCPECGKSFS | | HX₂₀X₂₁X₂₂X₂₃X₂₄X₈X₉CX₁₀X₁₁CX₁₂X₁₃X₁₄X₁₅X₁₆RADNLTEHX₁₇X₁₈ | |
| agc | CGG CAG | | RADNLTEHQRTHTGEKPYKCPEC | | X₁₉HX₂₀X₂₁X₂₂X₂₃X₂₄X₈X₉CX₁₀X₁₁CX₁₂X₁₃X₁₄X₁₅X₁₆RSDKLTEHX₁₇ | |
| | AGC | | GKSFSRSDKLTEHQRTHTGEKPY | | X₁₈X₁₉HX₂₀X₂₁X₂₂X₂₃X₂₄X₈X₉CX₁₀X₁₁CX₁₂X₁₃X₁₄X₁₅X₁₆SKKHLAEH | |
| | | | KCPECGKSFSSKKHLAEHQRTHT | | X₁₇X₁₈X₁₉HX₂₀X₂₁X₂₂X₂₃X₂₄X₈X₉CX₁₀X₁₁CX₁₂X₁₃X₁₄X₁₅X₁₆TKNSLT | |
| | | | GEKPYKCPECGKSFSTKNSLTEH | | EHX₁₇X₁₈X₁₉HX₂₀X₂₁X₂₂X₂₃X₂₄X₈X₉CX₁₀X₁₁CX₁₂X₁₃X₁₄X₁₅X₁₆DKKD | |
| | | | QRTHTGEKPYKCPECGKSFSDKK | | LTRHX₁₇X₁₈X₁₉HX₂₀X₂₁X₂₂X₂₃X₂₄X₈X₉CX₁₀X₁₁CX₁₂X₁₃X₁₄X₁₅X₁₆SK | |
| | | | DLTRHQRTHTGEKPYKCPECGKS | | KHLAEHX₁₇X₁₈X₁₉HX₂₀X₂₁X₂₂X₂₃X₂₄X₂₅X₂₆X₂₇X₂₈X₂₉X₃₀ | |
| | | | FSSKKHLAEHQRTHTGEKPTGKK | | | |
| | | | TS | | | |
| acccccacc | ACC CCC | 1049 | LEPGEKPYKCPECGKSFSRADNL | 1598 | X₁X₂X₃X₄X₅X₆X₇X₈X₉CX₁₀X₁₁CX₁₂X₁₃X₁₄X₁₅X₁₆RADNLTEHX₁₇X₁₈X₁₉ | 2147 |
| cctccccgg | ACC CCT | | TEHQRTHTGEKPYKCPECGKSFS | | HX₂₀X₂₁X₂₂X₂₃X₂₄X₈X₉CX₁₀X₁₁CX₁₂X₁₃X₁₄X₁₅X₁₆RSDKLTEHX₁₇X₁₈ | |
| cag | CCC CGG | | RSDKLTEHQRTHTGEKPYKCPEC | | X₁₉HX₂₀X₂₁X₂₂X₂₃X₂₄X₈X₉CX₁₀X₁₁CX₁₂X₁₃X₁₄X₁₅X₁₆SKKHLAEHX₁₇ | |
| | CAG | | GKSFSSKKHLAEHQRTHTGEKPY | | X₁₈X₁₉HX₂₀X₂₁X₂₂X₂₃X₂₄X₈X₉CX₁₀X₁₁CX₁₂X₁₃X₁₄X₁₅X₁₆TKNSLTEH | |
| | | | KCPECGKSFSTKNSLTEHQRTHT | | X₁₇X₁₈X₁₉HX₂₀X₂₁X₂₂X₂₃X₂₄X₈X₉CX₁₀X₁₁CX₁₂X₁₃X₁₄X₁₅X₁₆DKKDLT | |
| | | | GEKPYKCPECGKSFSDKKDLTRH | | RHX₁₇X₁₈X₁₉HX₂₀X₂₁X₂₂X₂₃X₂₄X₈X₉CX₁₀X₁₁CX₁₂X₁₃X₁₄X₁₅X₁₆SKKH | |
| | | | QRTHTGEKPYKCPECGKSFSSKK | | LAEHX₁₇X₁₈X₁₉HX₂₀X₂₁X₂₂X₂₃X₂₄X₈X₉CX₁₀X₁₁CX₁₂X₁₃X₁₄X₁₅X₁₆DK | |
| | | | HLAEHQRTHTGEKPYKCPECGKS | | KDLTRHX₁₇X₁₈X₁₉HX₂₀X₂₁X₂₂X₂₃X₂₄X₂₅X₂₆X₂₇X₂₈X₂₉X₃₀ | |
| | | | FSDKKDLTRHQRTHTGEKPTGKK | | | |
| | | | TS | | | |
| cacagaggc | CAC AGA | 1050 | LEPGEKPYKCPECGKSFSTHLDL | 1599 | X₁X₂X₃X₄X₅X₆X₇X₈X₉CX₁₀X₁₁CX₁₂X₁₃X₁₄X₁₅X₁₆THLDLIRHX₁₇X₁₈X₁₉ | 2148 |
| taggccaag | GGC TAG | | IRHQRTHTGEKPYKCPECGKSFS | | HX₂₀X₂₁X₂₂X₂₃X₂₄X₈X₉CX₁₀X₁₁CX₁₂X₁₃X₁₄X₁₅X₁₆RKDNLKNHX₁₇X₁₈ | |
| act | GCC AAG | | RKDNLKNHQRTHTGEKPYKCPEC | | X₁₉HX₂₀X₂₁X₂₂X₂₃X₂₄X₈X₉CX₁₀X₁₁CX₁₂X₁₃X₁₄X₁₅X₁₆DCRDLARHX₁₇ | |
| | ACT | | GKSFSDCRDLARHQRTHTGEKPY | | X₁₈X₁₉HX₂₀X₂₁X₂₂X₂₃X₂₄X₈X₉CX₁₀X₁₁CX₁₂X₁₃X₁₄X₁₅X₁₆REDNLHTH | |
| | | | KCPECGKSFSREDNLHTHQRTHT | | X₁₇X₁₈X₁₉HX₂₀X₂₁X₂₂X₂₃X₂₄X₈X₉CX₁₀X₁₁CX₁₂X₁₃X₁₄X₁₅X₁₆DPGHLV | |
| | | | GEKPYKCPECGKSFSDPGHLVRH | | RHX₁₇X₁₈X₁₉HX₂₀X₂₁X₂₂X₂₃X₂₄X₈X₉CX₁₀X₁₁CX₁₂X₁₃X₁₄X₁₅X₁₆QLAH | |
| | | | QRTHTGEKPYKCPECGKSFSQLA | | LRAHX₁₇X₁₈X₁₉HX₂₀X₂₁X₂₂X₂₃X₂₄X₈X₉CX₁₀X₁₁CX₁₂X₁₃X₁₄X₁₅X₁₆SK | |
| | | | HLRAHQRTHTGEKPYKCPECGKS | | KALTEHX₁₇X₁₈X₁₉HX₂₀X₂₁X₂₂X₂₃X₂₄X₂₅X₂₆X₂₇X₂₈X₂₉X₃₀ | |
| | | | FSSKKALTEHQRTHTGEKPTGKK | | | |
| | | | TS | | | |
| agaggctag | AGA GGC | 146 | LEPGEKPYKCPECGKSFSSKKHL | 147 | X₁X₂X₃X₄X₅X₆X₇X₈X₉CX₁₀X₁₁CX₁₂X₁₃X₁₄X₁₅X₁₆SKKHLAEHX₁₇X₁₈X₁₉ | 324 |
| gccaagact | TAG GCC | | AEHQRTHTGEKPYKCPECGKSFS | | HX₂₀X₂₁X₂₂X₂₃X₂₄X₈X₉CX₁₀X₁₁CX₁₂X₁₃X₁₄X₁₅X₁₆THLDLIRHX₁₇X₁₈ | |
| ccc | AAG ACT | | THLDLIRHQRTHTGEKPYKCPEC | | X₁₉HX₂₀X₂₁X₂₂X₂₃X₂₄X₈X₉CX₁₀X₁₁CX₁₂X₁₃X₁₄X₁₅X₁₆RKDNLKNHX₁₇ | |
| | CCC | | GKSFSRKDNLKNHQRTHTGEKPY | | X₁₈X₁₉HX₂₀X₂₁X₂₂X₂₃X₂₄X₈X₉CX₁₀X₁₁CX₁₂X₁₃X₁₄X₁₅X₁₆DCRDLARH | |
| | | | KCPECGKSFSDCRDLARHQRTHT | | X₁₇X₁₈X₁₉HX₂₀X₂₁X₂₂X₂₃X₂₄X₈X₉CX₁₀X₁₁CX₁₂X₁₃X₁₄X₁₅X₁₆REDNLH | |
| | | | GEKPYKCPECGKSFSREDNLHTH | | THX₁₇X₁₈X₁₉HX₂₀X₂₁X₂₂X₂₃X₂₄X₈X₉CX₁₀X₁₁CX₁₂X₁₃X₁₄X₁₅X₁₆DPGH | |
| | | | QRTHTGEKPYKCPECGKSFSDPG | | LVRHX₁₇X₁₈X₁₉HX₂₀X₂₁X₂₂X₂₃X₂₄X₈X₉CX₁₀X₁₁CX₁₂X₁₃X₁₄X₁₅X₁₆QL | |
| | | | HLVRHQRTHTGEKPYKCPECGKS | | AHLRAHX₁₇X₁₈X₁₉HX₂₀X₂₁X₂₂X₂₃X₂₄X₂₅X₂₆X₂₇X₂₈X₂₉X₃₀ | |
| | | | FSQLAHLRAHQRTHTGEKPTGKK | | | |
| | | | TS | | | |
| cttcacaga | CTT CAC | 1051 | LEPGEKPYKCPECGKSFSRKDNL | 1600 | X₁X₂X₃X₄X₅X₆X₇X₈X₉CX₁₀X₁₁CX₁₂X₁₃X₁₄X₁₅X₁₆RKDNLKNHX₁₇X₁₈X₁₉ | 2149 |
| ggctaggcc | AGA GGC | | KNHQRTHTGEKPYKCPECGKSFS | | HX₂₀X₂₁X₂₂X₂₃X₂₄X₈X₉CX₁₀X₁₁CX₁₂X₁₃X₁₄X₁₅X₁₆DCRDLARHX₁₇X₁₈ | |
| aag | TAG GCC | | DCRDLARHQRTHTGEKPYKCPEC | | X₁₉HX₂₀X₂₁X₂₂X₂₃X₂₄X₈X₉CX₁₀X₁₁CX₁₂X₁₃X₁₄X₁₅X₁₆REDNLHTHX₁₇ | |
| | APG | | GKSFSREDNLHTHQRTHTGEKPY | | X₁₈X₁₉HX₂₀X₂₁X₂₂X₂₃X₂₄X₈X₉CX₁₀X₁₁CX₁₂X₁₃X₁₄X₁₅X₁₆DPGHLVRH | |
| | | | KCPECGKSFSDPGHLVRHQRTHT | | X₁₇X₁₈X₁₉HX₂₀X₂₁X₂₂X₂₃X₂₄X₈X₉CX₁₀X₁₁CX₁₂X₁₃X₁₄X₁₅X₁₆QLAHLR | |
| | | | GEKPYKCPECGKSFSQLAHLRAH | | AHX₁₇X₁₈X₁₉HX₂₀X₂₁X₂₂X₂₃X₂₄X₈X₉CX₁₀X₁₁CX₁₂X₁₃X₁₄X₁₅X₁₆SKKA | |
| | | | QRTHTGEKPYKCPECGKSFSSKK | | LTEHX₁₇X₁₈X₁₉HX₂₀X₂₁X₂₂X₂₃X₂₄X₈X₉CX₁₀X₁₁CX₁₂X₁₃X₁₄X₁₅X₁₆TT | |
| | | | ALTEHQRTHTGEKPYKCPECGKS | | GALTEHX₁₇X₁₈X₁₉HX₂₀X₂₁X₂₂X₂₃X₂₄X₂₅X₂₆X₂₇X₂₈X₂₉X₃₀ | |
| | | | FSTTGALTEHQRTHTGEKPTGKK | | | |
| | | | TS | | | |
| taggccaag | TAG GCC | 1052 | LEPGEKPYKCPECGKSFSQLAHL | 1601 | X₁X₂X₃X₄X₅X₆X₇X₈X₉CX₁₀X₁₁CX₁₂X₁₃X₁₄X₁₅X₁₆QLAHLRAHX₁₇X₁₈X₁₉ | 2150 |
| actcccagc | AAG ACT | | RAHQRTHTGEKPYKCPECGKSFS | | HX₂₀X₂₁X₂₂X₂₃X₂₄X₈X₉CX₁₀X₁₁CX₁₂X₁₃X₁₄X₁₅X₁₆ERSHLREHX₁₇X₁₈ | |
| aga | CCC AGC | | ERSHLREHQRTHTGEKPYKCPEC | | X₁₉HX₂₀X₂₁X₂₂X₂₃X₂₄X₈X₉CX₁₀X₁₁CX₁₂X₁₃X₁₄X₁₅X₁₆SKKHLAEHX₁₇ | |
| | AGA | | GKSFSSKKHLAEHQRTHTGEKPY | | X₁₈X₁₉HX₂₀X₂₁X₂₂X₂₃X₂₄X₈X₉CX₁₀X₁₁CX₁₂X₁₃X₁₄X₁₅X₁₆THLDLIRH | |
| | | | KCPECGKSFSTHLDLIRHQRTHT | | X₁₇X₁₈X₁₉HX₂₀X₂₁X₂₂X₂₃X₂₄X₈X₉CX₁₀X₁₁CX₁₂X₁₃X₁₄X₁₅X₁₆RKDNLK | |
| | | | GEKPYKCPECGKSFSRKDNLKNH | | NHX₁₇X₁₈X₁₉HX₂₀X₂₁X₂₂X₂₃X₂₄X₈X₉CX₁₀X₁₁CX₁₂X₁₃X₁₄X₁₅X₁₆DCRD | |
| | | | QRTHTGEKPYKCPECGKSFSDCR | | LARHX₁₇X₁₈X₁₉HX₂₀X₂₁X₂₂X₂₃X₂₄X₈X₉CX₁₀X₁₁CX₁₂X₁₃X₁₄X₁₅X₁₆RE | |
| | | | DLARHQRTHTGEKPYKCPECGKS | | DNLHTHX₁₇X₁₈X₁₉HX₂₀X₂₁X₂₂X₂₃X₂₄X₂₅X₂₆X₂₇X₂₈X₂₉X₃₀ | |
| | | | FSREDNLHTHQRTHTGEKPTGKK | | | |
| | | | TS | | | |
| ggctaggcc | GGC TAG | 1053 | LEPGEKPYKCPECGKSFSERSHL | 1602 | X₁X₂X₃X₄X₅X₆X₇X₈X₉CX₁₀X₁₁CX₁₂X₁₃X₁₄X₁₅X₁₆ERSHLREHX₁₇X₁₈X₁₉ | 2151 |
| aagactccc | GCC AAG | | REHQRTHTGEKPYKCPECGKSFS | | HX₂₀X₂₁X₂₂X₂₃X₂₄X₈X₉CX₁₀X₁₁CX₁₂X₁₃X₁₄X₁₅X₁₆SKKHLAEHX₁₇X₁₈ | |
| agc | ACT CCC | | SKKHLAEHQRTHTGEKPYKCPEC | | X₁₉HX₂₀X₂₁X₂₂X₂₃X₂₄X₈X₉CX₁₀X₁₁CX₁₂X₁₃X₁₄X₁₅X₁₆THLDLIRHX₁₇ | |
| | AGC | | GKSFSTHLDLIRHQRTHTGEKPY | | X₁₈X₁₉HX₂₀X₂₁X₂₂X₂₃X₂₄X₈X₉CX₁₀X₁₁CX₁₂X₁₃X₁₄X₁₅X₁₆RKDNLKNH | |
| | | | KCPECGKSFSRKDNLKNHQRTHT | | X₁₇X₁₈X₁₉HX₂₀X₂₁X₂₂X₂₃X₂₄X₈X₉CX₁₀X₁₁CX₁₂X₁₃X₁₄X₁₅X₁₆DCRDLA | |
| | | | GEKPYKCPECGKSFSDCRDLARH | | RHX₁₇X₁₈X₁₉HX₂₀X₂₁X₂₂X₂₃X₂₄X₈X₉CX₁₀X₁₁CX₁₂X₁₃X₁₄X₁₅X₁₆REDN | |
| | | | QRTHTGEKPYKCPECGKSFSRED | | LHTHX₁₇X₁₈X₁₉HX₂₀X₂₁X₂₂X₂₃X₂₄X₈X₉CX₁₀X₁₁CX₁₂X₁₃X₁₄X₁₅X₁₆DP | |
| | | | NLHTHQRTHTGEKPYKCPECGKS | | GHLVRHX₁₇X₁₈X₁₉HX₂₀X₂₁X₂₂X₂₃X₂₄X₂₅X₂₆X₂₇X₂₈X₂₉X₃₀ | |
| | | | FSDPGHLVRHQRTHTGEKPTGKK | | | |
| | | | TS | | | |
| ccccttcac | CCC CTT | 1054 | LEPGEKPYKCPECGKSFSDCRDL | 1603 | X₁X₂X₃X₄X₅X₆X₇X₈X₉CX₁₀X₁₁CX₁₂X₁₃X₁₄X₁₅X₁₆DCRDLARHX₁₇X₁₈X₁₉ | 2152 |
| agaggctag | CAC AGA | | ARHQRTHTGEKPYKCPECGKSFS | | HX₂₀X₂₁X₂₂X₂₃X₂₄X₈X₉CX₁₀X₁₁CX₁₂X₁₃X₁₄X₁₅X₁₆REDNLHTHX₁₇X₁₈ | |
| gcc | GGC TAG | | REDNLHTHQRTHTGEKPYKCPEC | | X₁₉HX₂₀X₂₁X₂₂X₂₃X₂₄X₈X₉CX₁₀X₁₁CX₁₂X₁₃X₁₄X₁₅X₁₆DPGHLVRHX₁₇ | |
| | GCC | | GKSFSDPGHLVRHQRTHTGEKPY | | X₁₈X₁₉HX₂₀X₂₁X₂₂X₂₃X₂₄X₈X₉CX₁₀X₁₁CX₁₂X₁₃X₁₄X₁₅X₁₆QLAHLRAH | |
| | | | KCPECGKSFSQLAHLRAHQRTHT | | X₁₇X₁₈X₁₉HX₂₀X₂₁X₂₂X₂₃X₂₄X₈X₉CX₁₀X₁₁CX₁₂X₁₃X₁₄X₁₅X₁₆SKKALT | |
| | | | GEKPYKCPECGKSFSSKKALTEH | | EHX₁₇X₁₈X₁₉HX₂₀X₂₁X₂₂X₂₃X₂₄X₈X₉CX₁₀X₁₁CX₁₂X₁₃X₁₄X₁₅X₁₆TTGA | |
| | | | QRTHTGEKPYKCPECGKSFSTTG | | LTEHX₁₇X₁₈X₁₉HX₂₀X₂₁X₂₂X₂₃X₂₄X₈X₉CX₁₀X₁₁CX₁₂X₁₃X₁₄X₁₅X₁₆SK | |
| | | | ALTEHQRTHTGEKPYKCPECGKS | | KHLAEHX₁₇X₁₈X₁₉HX₂₀X₂₁X₂₂X₂₃X₂₄X₂₅X₂₆X₂₇X₂₈X₂₉X₃₀ | |
| | | | FSSKKHLAEHQRTHTGEKPTGKK | | | |
| | | | TS | | | |
| ccacccctt | CCA CCC | 1055 | LEPGEKPYKCPECGKSFSREDNL | 1604 | X₁X₂X₃X₄X₅X₆X₇X₈X₉CX₁₀X₁₁CX₁₂X₁₃X₁₄X₁₅X₁₆REDNLHTHX₁₇X₁₈X₁₉ | 2153 |
| cacagaggc | CTT CAC | | HTHQRTHTGEKPYKCPECGKSFS | | HX₂₀X₂₁X₂₂X₂₃X₂₄X₈X₉CX₁₀X₁₁CX₁₂X₁₃X₁₄X₁₅X₁₆DPGHLVRHX₁₇X₁₈ | |
| tag | AGA GGC | | DPGHLVRHQRTHTGEKPYKCPEC | | X₁₉HX₂₀X₂₁X₂₂X₂₃X₂₄X₈X₉CX₁₀X₁₁CX₁₂X₁₃X₁₄X₁₅X₁₆QLAHLRAHX₁₇ | |
| | TAG | | GKSFSQLAHLRAHQRTHTGEKPY | | X₁₈X₁₉HX₂₀X₂₁X₂₂X₂₃X₂₄X₈X₉CX₁₀X₁₁CX₁₂X₁₃X₁₄X₁₅X₁₆SKKALTEH | |
| | | | KCPECGKSFSSKKALTEHQRTHT | | X₁₇X₁₈X₁₉HX₂₀X₂₁X₂₂X₂₃X₂₄X₈X₉CX₁₀X₁₁CX₁₂X₁₃X₁₄X₁₅X₁₆TTGALT | |
| | | | GEKPYKCPECGKSFSTTGALTEH | | EHX₁₇X₁₈X₁₉HX₂₀X₂₁X₂₂X₂₃X₂₄X₈X₉CX₁₀X₁₁CX₁₂X₁₃X₁₄X₁₅X₁₆SKKH | |
| | | | QRTHTGEKPYKCPECGKSFSSKK | | LAEHX₁₇X₁₈X₁₉HX₂₀X₂₁X₂₂X₂₃X₂₄X₈X₉CX₁₀X₁₁CX₁₂X₁₃X₁₄X₁₅X₁₆TS | |
| | | | HLAEHQRTHTGEKPYKCPECGKS | | HSLTEHX₁₇X₁₈X₁₉HX₂₀X₂₁X₂₂X₂₃X₂₄X₂₅X₂₆X₂₇X₂₈X₂₉X₃₀ | |
| | | | FSTSHSLTEHQRTHTGEKPTGKK | | | |
| | | | TS | | | |
| cctccaccc | CCT CCA | 1056 | LEPGEKPYKCPECGKSFSDPGHL | 1605 | X₁X₂X₃X₄X₅X₆X₇X₈X₉CX₁₀X₁₁CX₁₂X₁₃X₁₄X₁₅X₁₆DPGHLVRHX₁₇X₁₈X₁₉ | 2154 |
| cttcacaga | CCC CTT | | VRHQRTHTGEKPYKCPECGKSFS | | HX₂₀X₂₁X₂₂X₂₃X₂₄X₈X₉CX₁₀X₁₁CX₁₂X₁₃X₁₄X₁₅X₁₆QLAHLRAHX₁₇X₁₈ | |
| ggc | CAC AGA | | QLAHLRAHQRTHTGEKPYKCPEC | | X₁₉HX₂₀X₂₁X₂₂X₂₃X₂₄X₈X₉CX₁₀X₁₁CX₁₂X₁₃X₁₄X₁₅X₁₆SKKALTEHX₁₇ | |
| | GGC | | GKSFSSKKALTEHQRTHTGEKPY | | X₁₈X₁₉HX₂₀X₂₁X₂₂X₂₃X₂₄X₈X₉CX₁₀X₁₁CX₁₂X₁₃X₁₄X₁₅X₁₆TTGALTEH | |
| | | | KCPECGKSFSTTGALTEHQRTHT | | X₁₇X₁₈X₁₉HX₂₀X₂₁X₂₂X₂₃X₂₄X₈X₉CX₁₀X₁₁CX₁₂X₁₃X₁₄X₁₅X₁₆SKKHLA | |
| | | | GEKPYKCPECGKSFSSKKHLAEH | | EHX₁₇X₁₈X₁₉HX₂₀X₂₁X₂₂X₂₃X₂₄X₈X₉CX₁₀X₁₁CX₁₂X₁₃X₁₄X₁₅X₁₆TSHS | |
| | | | QRTHTGEKPYKCPECGKSFSTSH | | LTEHX₁₇X₁₈X₁₉HX₂₀X₂₁X₂₂X₂₃X₂₄X₈X₉CX₁₀X₁₁CX₁₂X₁₃X₁₄X₁₅X₁₆TK | |
| | | | SLTEHQRTHTGEKPYKCPECGKS | | NSLTEHX₁₇X₁₈X₁₉HX₂₀X₂₁X₂₂X₂₃X₂₄X₂₅X₂₆X₂₇X₂₈X₂₉X₃₀ | |
| | | | FSTKNSLTEHQRTHTGEKPTGKK | | | |
| | | | TS | | | |
| gcagagcct | GCA gag | 1057 | LEPGEKPYKCPECGKSFSSKKAL | 1606 | X₁X₂X₃X₄X₅X₆X₇X₈X₉CX₁₀X₁₁CX₁₂X₁₃X₁₄X₁₅X₁₆SKKALTEHX₁₇X₁₈X₁₉ | 2155 |
| ccacccctt | CCT CCA | | TEHQRTHTGEKPYKCPECGKSFS | | HX₂₀X₂₁X₂₂X₂₃X₂₄X₈X₉CX₁₀X₁₁CX₁₂X₁₃X₁₄X₁₅X₁₆TTGALTEHX₁₇X₁₈ | |
| cac | CCC CTT | | TTGALTEHQRTHTGEKPYKCPEC | | X₁₉HX₂₀X₂₁X₂₂X₂₃X₂₄X₈X₉CX₁₀X₁₁CX₁₂X₁₃X₁₄X₁₅X₁₆SKKHLAEHX₁₇ | |
| | CAC | | GKSFSSKKHLAEHQRTHTGEKPY | | X₁₈X₁₉HX₂₀X₂₁X₂₂X₂₃X₂₄X₈X₉CX₁₀X₁₁CX₁₂X₁₃X₁₄X₁₅X₁₆TSHSLTEH | |
| | | | KCPECGKSFSTSHSLTEHQRTHT | | X₁₇X₁₈X₁₉HX₂₀X₂₁X₂₂X₂₃X₂₄X₈X₉CX₁₀X₁₁CX₁₂X₁₃X₁₄X₁₅X₁₆TKNSLT | |
| | | | GEKPYKCPECGKSFSTKNSLTEH | | EHX₁₇X₁₈X₁₉HX₂₀X₂₁X₂₂X₂₃X₂₄X₈X₉CX₁₀X₁₁CX₁₂X₁₃X₁₄X₁₅X₁₆RSDN | |
| | | | QRTHTGEKPYKCPECGKSFSRSD | | LVRHX₁₇X₁₈X₁₉HX₂₀X₂₁X₂₂X₂₃X₂₄X₈X₉CX₁₀X₁₁CX₁₂X₁₃X₁₄X₁₅X₁₆QS | |
| | | | NLVRHQRTHTGEKPYKCPECGKS | | GDLRRHX₁₇X₁₈X₁₉HX₂₀X₂₁X₂₂X₂₃X₂₄X₂₅X₂₆X₂₇X₂₈X₂₉X₃₀ | |
| | | | FSQSGDLRRHQRTHTGEKPTGKK | | | |
| | | | TS | | | |
| gagcctcca | gag CCT | 1058 | LEPGEKPYKCPECGKSFSQLAHL | 1607 | X₁X₂X₃X₄X₅X₆X₇X₈X₉CX₁₀X₁₁CX₁₂X₁₃X₁₄X₁₅X₁₆QLAHLRAHX₁₇X₁₈X₁₉ | 2156 |
| ccccttcac | CCA CCC | | RAHQRTHTGEKPYKCPECGKSFS | | HX₂₀X₂₁X₂₂X₂₃X₂₄X₈X₉CX₁₀X₁₁CX₁₂X₁₃X₁₄X₁₅X₁₆SKKALTEHX₁₇X₁₈ | |
| aga | CTT CAC | | SKKALTEHQRTHTGEKPYKCPEC | | X₁₉HX₂₀X₂₁X₂₂X₂₃X₂₄X₈X₉CX₁₀X₁₁CX₁₂X₁₃X₁₄X₁₅X₁₆TTGALTEHX₁₇ | |
| | AGA | | GKSFSTTGALTEHQRTHTGEKPY | | X₁₈X₁₉HX₂₀X₂₁X₂₂X₂₃X₂₄X₈X₉CX₁₀X₁₁CX₁₂X₁₃X₁₄X₁₅X₁₆SKKHLAEH | |
| | | | KCPECGKSFSSKKHLAEHQRTHT | | X₁₇X₁₈X₁₉HX₂₀X₂₁X₂₂X₂₃X₂₄X₈X₉CX₁₀X₁₁CX₁₂X₁₃X₁₄X₁₅X₁₆TSHSLT | |
| | | | GEKPYKCPECGKSFSTSHSLTEH | | EHX₁₇X₁₈X₁₉HX₂₀X₂₁X₂₂X₂₃X₂₄X₈X₉CX₁₀X₁₁CX₁₂X₁₃X₁₄X₁₅X₁₆TKNS | |
| | | | QRTHTGEKPYKCPECGKSFSTKN | | LTEHX₁₇X₁₈X₁₉HX₂₀X₂₁X₂₂X₂₃X₂₄X₈X₉CX₁₀X₁₁CX₁₂X₁₃X₁₄X₁₅X₁₆RS | |
| | | | SLTEHQRTHTGEKPYKCPECGKS | | DNLVRHX₁₇X₁₈X₁₉HX₂₀X₂₁X₂₂X₂₃X₂₄X₂₅X₂₆X₂₇X₂₈X₂₉X₃₀ | |
| | | | FSRSDNLVRHQRTHTGEKPTGKK | | | |
| | | | TS | | | |
| ccggcagag | CCG GCA | 1059 | LEPGEKPYKCPECGKSFSTTGAL | 1608 | X₁X₂X₃X₄X₅X₆X₇X₈X₉CX₁₀X₁₁CX₁₂X₁₃X₁₄X₁₅X₁₆TTGALTEHX₁₇X₁₈X₁₉ | 2157 |
| cctccaccc | gag CCT | | TEHQRTHTGEKPYKCPECGKSFS | | HX₂₀X₂₁X₂₂X₂₃X₂₄X₈X₉CX₁₀X₁₁CX₁₂X₁₃X₁₄X₁₅X₁₆SKKHLAEHX₁₇X₁₈ | |
| ctt | CCA CCC | | SKKHLAEHQRTHTGEKPYKCPEC | | X₁₉HX₂₀X₂₁X₂₂X₂₃X₂₄X₈X₉CX₁₀X₁₁CX₁₂X₁₃X₁₄X₁₅X₁₆TSHSLTEHX₁₇ | |
| | CTT | | GKSFSTSHSLTEHQRTHTGEKPY | | X₁₈X₁₉HX₂₀X₂₁X₂₂X₂₃X₂₄X₈X₉CX₁₀X₁₁CX₁₂X₁₃X₁₄X₁₅X₁₆TKNSLTEH | |
| | | | KCPECGKSFSTKNSLTEHQRTHT | | X₁₇X₁₈X₁₉HX₂₀X₂₁X₂₂X₂₃X₂₄X₈X₉CX₁₀X₁₁CX₁₂X₁₃X₁₄X₁₅X₁₆RSDNLV | |
| | | | GEKPYKCPECGKSFSRSDNLVRH | | RHX₁₇X₁₈X₁₉HX₂₀X₂₁X₂₂X₂₃X₂₄X₈X₉CX₁₀X₁₁CX₁₂X₁₃X₁₄X₁₅X₁₆QSGD | |
| | | | QRTHTGEKPYKCPECGKSFSQSG | | LRRHX₁₇X₁₈X₁₉HX₂₀X₂₁X₂₂X₂₃X₂₄X₈X₉CX₁₀X₁₁CX₁₂X₁₃X₁₄X₁₅X₁₆RN | |
| | | | DLRRHQRTHTGEKPYKCPECGKS | | DTLTEHX₁₇X₁₈X₁₉HX₂₀X₂₁X₂₂X₂₃X₂₄X₂₅X₂₆X₂₇X₂₈X₂₉X₃₀ | |
| | | | FSRNDTLTEHQRTHTGEKPTGKK | | | |
| | | | TS | | | |
| gcagatctt | GCA GAT | 1060 | LEPGEKPYKCPECGKSFSRSDKL | 1609 | X₁X₂X₃X₄X₅X₆X₇X₈X₉CX₁₀X₁₁CX₁₂X₁₃X₁₄X₁₅X₁₆RSDKLTEHX₁₇X₁₈X₁₉ | 2158 |
| cccagagga | CTT CCC | | TEHQRTHTGEKPYKCPECGKSFS | | HX₂₀X₂₁X₂₂X₂₃X₂₄X₈X₉CX₁₀X₁₁CX₁₂X₁₃X₁₄X₁₅X₁₆QRAHLERHX₁₇X₁₈ | |
| cgg | AGA GGA | | QRAHLERHQRTHTGEKPYKCPEC | | X₁₉HX₂₀X₂₁X₂₂X₂₃X₂₄X₈X₉CX₁₀X₁₁CX₁₂X₁₃X₁₄X₁₅X₁₆QLAHLRAHX₁₇ | |
| | CGG | | GKSFSQLAHLRAHQRTHTGEKPY | | X₁₈X₁₉HX₂₀X₂₁X₂₂X₂₃X₂₄X₈X₉CX₁₀X₁₁CX₁₂X₁₃X₁₄X₁₅X₁₆SKKHLAEH | |
| | | | KCPECGKSFSSKKHLAEHQRTHT | | X₁₇X₁₈X₁₉HX₂₀X₂₁X₂₂X₂₃X₂₄X₈X₉CX₁₀X₁₁CX₁₂X₁₃X₁₄X₁₅X₁₆TTGALT | |
| | | | GEKPYKCPECGKSFSTTGALTEH | | EHX₁₇X₁₈X₁₉HX₂₀X₂₁X₂₂X₂₃X₂₄X₈X₉CX₁₀X₁₁CX₁₂X₁₃X₁₄X₁₅X₁₆TSGN | |
| | | | QRTHTGEKPYKCPECGKSFSTSG | | LVRHX₁₇X₁₈X₁₉HX₂₀X₂₁X₂₂X₂₃X₂₄X₈X₉CX₁₀X₁₁CX₁₂X₁₃X₁₄X₁₅X₁₆QS | |
| | | | NLVRHQRTHTGEKPYKCPECGKS | | GDLRRHX₁₇X₁₈X₁₉HX₂₀X₂₁X₂₂X₂₃X₂₄X₂₅X₂₆X₂₇X₂₈X₂₉X₃₀ | |
| | | | FSQSGDLRRHQRTHTGEKPTGKK | | | |
| | | | TS | | | |
| ccagcagat | CCA GCA | 114 | LEPGEKPYKCPECGKSFSQRAHL | 115 | X₁X₂X₃X₄X₅X₆X₇X₈X₉CX₁₀X₁₁CX₁₂X₁₃X₁₄X₁₅X₁₆QRAHLERHX₁₇X₁₈X₁₉ | 316 |
| cttcccaga | GAT CTT | | ERHQRTHTGEKPYKCPECGKSFS | | HX₂₀X₂₁X₂₂X₂₃X₂₄X₈X₉CX₁₀X₁₁CX₁₂X₁₃X₁₄X₁₅X₁₆QLAHLRAHX₁₇X₁₈ | |
| gga | CCC AGA | | QLAHLRAHQRTHTGEKPYKCPEC | | X₁₉HX₂₀X₂₁X₂₂X₂₃X₂₄X₈X₉CX₁₀X₁₁CX₁₂X₁₃X₁₄X₁₅X₁₆SKKHLAEHX₁₇ | |
| | GGA | | GKSFSSKKHLAEHQRTHTGEKPY | | X₁₈X₁₉HX₂₀X₂₁X₂₂X₂₃X₂₄X₈X₉CX₁₀X₁₁CX₁₂X₁₃X₁₄X₁₅X₁₆TTGALTEH | |
| | | | KCPECGKSFSTTGALTEHQRTHT | | X₁₇X₁₈X₁₉HX₂₀X₂₁X₂₂X₂₃X₂₄X₈X₉CX₁₀X₁₁CX₁₂X₁₃X₁₄X₁₅X₁₆TSGNLV | |
| | | | GEKPYKCPECGKSFSTSGNLVRH | | RHX₁₇X₁₈X₁₉HX₂₀X₂₁X₂₂X₂₃X₂₄X₈X₉CX₁₀X₁₁CX₁₂X₁₃X₁₄X₁₅X₁₆QSGD | |
| | | | QRTHTGEKPYKCPECGKSFSQSG | | LRRHX₁₇X₁₈X₁₉HX₂₀X₂₁X₂₂X₂₃X₂₄X₈X₉CX₁₀X₁₁CX₁₂X₁₃X₁₄X₁₅X₁₆TS | |
| | | | DLRRHQRTHTGEKPYKCPECGKS | | HSLTEHX₁₇X₁₈X₁₉HX₂₀X₂₁X₂₂X₂₃X₂₄X₂₅X₂₆X₂₇X₂₈X₂₉X₃₀ | |
| | | | FSTSHSLTEHQRTHTGEKPTGKK | | | |
| | | | TS | | | |
| ggcagagag | GGC AGA | 1061 | LEPGEKPYKCPECGKSFSRSDHL | 1610 | X₁X₂X₃X₄X₅X₆X₇X₈X₉CX₁₀X₁₁CX₁₂X₁₃X₁₄X₁₅X₁₆RSDHLTNHX₁₇X₁₈X₁₉ | 2159 |
| ggcactggg | GAG GGC | | TNHQRTHTGEKPYKCPECGKSFS | | HX₂₀X₂₁X₂₂X₂₃X₂₄X₈X₉CX₁₀X₁₁CX₁₂X₁₃X₁₄X₁₅X₁₆RSDKLVRHX₁₇X₁₈ | |
| agg | ACT ggg | | RSDKLVRHQRTHTGEKPYKCPEC | | X₁₉HX₂₀X₂₁X₂₂X₂₃X₂₄X₈X₉CX₁₀X₁₁CX₁₂X₁₃X₁₄X₁₅X₁₆THLDLIRHX₁₇ | |
| | AGG | | GKSFSTHLDIIRHQRTHTGEKPY | | X₁₈X₁₉HX₂₀X₂₁X₂₂X₂₃X₂₄X₈X₉CX₁₀X₁₁CX₁₂X₁₃X₁₄X₁₅X₁₆DPGHLVRH | |
| | | | KCPECGKSFSDPGHLVRHQRTHT | | X₁₇X₁₈X₁₉HX₂₀X₂₁X₂₂X₂₃X₂₄X₈X₉CX₁₀X₁₁CX₁₂X₁₃X₁₄X₁₅X₁₆RSDNLV | |
| | | | GEKPYKCPECGKSFSRSDNLVRH | | RHX₁₇X₁₈X₁₉HX₂₀X₂₁X₂₂X₂₃X₂₄X₈X₉CX₁₀X₁₁CX₁₂X₁₃X₁₄X₁₅X₁₆QLAH | |
| | | | QRTHTGEKPYKCPECGKSFSQLA | | LRAHX₁₇X₁₈X₁₉HX₂₀X₂₁X₂₂X₂₃X₂₄X₈X₉CX₁₀X₁₁CX₁₂X₁₃X₁₄X₁₅X₁₆DP | |
| | | | HLRAHQRTHTGEKPYKCPECGKS | | GHLVRHX₁₇X₁₈X₁₉HX₂₀X₂₁X₂₂X₂₃X₂₄X₂₅X₂₆X₂₇X₂₈X₂₉X₃₀ | |
| | | | FSDPGHLVRHQRTHTGEKPTGKK | | | |
| | | | TS | | | |
| gaaggcaga | GAA GGC | 1062 | LEPGEKPYKCPECGKSFSRSDKL | 1611 | X₁X₂X₃X₄X₅X₆X₇X₈X₉CX₁₀X₁₁CX₁₂X₁₃X₁₄X₁₅X₁₆RSDKLVRHX₁₇X₁₈X₁₉ | 2160 |
| gagggcact | AGA GAG | | VRHQRTHTGEKPYKCPECGKSFS | | HX₂₀X₂₁X₂₂X₂₃X₂₄X₈X₉CX₁₀X₁₁CX₁₂X₁₃X₁₄X₁₅X₁₆THLDLIRHX₁₇X₁₈ | |
| ggg | GGC ACT | | THLDLIRHQRTHTGEKPYKCPEC | | X₁₉HX₂₀X₂₁X₂₂X₂₃X₂₄X₈X₉CX₁₀X₁₁CX₁₂X₁₃X₁₄X₁₅X₁₆DPGHLVRHX₁₇ | |
| | GGG | | GKSFSDPGHLVRHQRTHTGEKPY | | X₁₈X₁₉HX₂₀X₂₁X₂₂X₂₃X₂₄X₈X₉CX₁₀X₁₁CX₁₂X₁₃X₁₄X₁₅X₁₆RSDNLVRH | |
| | | | KCPECGKSFSRSDNLVRHQRTHT | | X₁₇X₁₈X₁₉HX₂₀X₂₁X₂₂X₂₃X₂₄X₈X₉CX₁₀X₁₁CX₁₂X₁₃X₁₄X₁₅X₁₆QLAHLR | |
| | | | GEKPYKCPECGKSFSQLAHLRAH | | AHX₁₇X₁₈X₁₉HX₂₀X₂₁X₂₂X₂₃X₂₄X₈X₉CX₁₀X₁₁CX₁₂X₁₃X₁₄X₁₅X₁₆DPGH | |
| | | | QRTHTGEKPYKCPECGKSFSDPG | | LVRHX₁₇X₁₈X₁₉HX₂₀X₂₁X₂₂X₂₃X₂₄X₈X₉CX₁₀X₁₁CX₁₂X₁₃X₁₄X₁₅X₁₆QS | |
| | | | HLVRHQRTHTGEKPYKCPECGKS | | SNLVRHX₁₇X₁₈X₁₉HX₂₀X₂₁X₂₂X₂₃X₂₄X₂₅X₂₆X₂₇X₂₈X₂₉X₃₀ | |
| | | | FSQSSNLVRHQRTHTGEKPTGKK | | | |
| | | | TS | | | |
| gagggcact | GAG GGC | 1063 | LEPGEKPYKCPECGKSFSRADNL | 1612 | X₁X₂X₃X₄X₅X₆X₇X₈X₉CX₁₀X₁₁CX₁₂X₁₃X₁₄X₁₅X₁₆RADNLTEHX₁₇X₁₈X₁₉ | 2161 |
| gggaggagg | ACT ggg | | TEHQRTHTGEKPYKCPECGKSFS | | HX₂₀X₂₁X₂₂X₂₃X₂₄X₈X₉CX₁₀X₁₁CX₁₂X₁₃X₁₄X₁₅X₁₆RSDHLTNHX₁₇X₁₈ | |
| cag | AGG AGG | | RSDHLTNHQRTHTGEKPYKCPEC | | X₁₉HX₂₀X₂₁X₂₂X₂₃X₂₄X₈X₉CX₁₀X₁₁CX₁₂X₁₃X₁₄X₁₅X₁₆RSDHLTNHX₁₇ | |
| | CAG | | GKSFSRSDHLTNHQRTHTGEKPY | | X₁₈X₁₉HX₂₀X₂₁X₂₂X₂₃X₂₄X₈X₉CX₁₀X₁₁CX₁₂X₁₃X₁₄X₁₅X₁₆RSDKLVRH | |
| | | | KCPECGKSFSRSDKLVRHQRTHT | | X₁₇X₁₈X₁₉HX₂₀X₂₁X₂₂X₂₃X₂₄X₈X₉CX₁₀X₁₁CX₁₂X₁₃X₁₄X₁₅X₁₆THLDLI | |
| | | | GEKPYKCPECGKSFSTHLDLIRH | | RHX₁₇X₁₈X₁₉HX₂₀X₂₁X₂₂X₂₃X₂₄X₈X₉CX₁₀X₁₁CX₁₂X₁₃X₁₄X₁₅X₁₆DPGH | |
| | | | QRTHTGEKPYKCPECGKSFSDPG | | LVRHX₁₇X₁₈X₁₉HX₂₀X₂₁X₂₂X₂₃X₂₄X₈X₉CX₁₀X₁₁CX₁₂X₁₃X₁₄X₁₅X₁₆RS | |
| | | | HLVRHQRTHTGEKPYKCPECGKS | | DNLVRHX₁₇X₁₈X₁₉HX₂₀X₂₁X₂₂X₂₃X₂₄X₂₅X₂₆X₂₇X₂₈X₂₉X₃₀ | |
| | | | FSRSDNLVRHQRTHTGEKPTGKK | | | |
| | | | TS | | | |
| agagagggc | AGA GAG | 1064 | LEPGEKPYKCPECGKSFSRSDHL | 1613 | X₁X₂X₃X₄X₅X₆X₇X₈X₉CX₁₀X₁₁CX₁₂X₁₃X₁₄X₁₅X₁₆RSDHLTNHX₁₇X₁₈X₁₉ | 2162 |
| actgggagg | GGC ACT | | TNHQRTHTGEKPYKCPECGKSFS | | HX₂₀X₂₁X₂₂X₂₃X₂₄X₈X₉CX₁₀X₁₁CX₁₂X₁₃X₁₄X₁₅X₁₆RSDHLTNHX₁₇X₁₈ | |
| agg | ggg AGG | | RSDHLTNHQRTHTGEKPYKCPEC | | X₁₉HX₂₀X₂₁X₂₂X₂₃X₂₄X₈X₉CX₁₀X₁₁CX₁₂X₁₃X₁₄X₁₅X₁₆RSDKLVRHX₁₇ | |
| | AGG | | GKSFSRSDKLVRHQRTHTGEKPY | | X₁₈X₁₉HX₂₀X₂₁X₂₂X₂₃X₂₄X₈X₉CX₁₀X₁₁CX₁₂X₁₃X₁₄X₁₅X₁₆THLDLIRH | |
| | | | KCPECGKSFSTHLDLIRHQRTHT | | X₁₇X₁₈X₁₉HX₂₀X₂₁X₂₂X₂₃X₂₄X₈X₉CX₁₀X₁₁CX₁₂X₁₃X₁₄X₁₅X₁₆DPGHLV | |
| | | | GEKPYKCPECGKSFSDPGHLVRH | | RHX₁₇X₁₈X₁₉HX₂₀X₂₁X₂₂X₂₃X₂₄X₈X₉CX₁₀X₁₁CX₁₂X₁₃X₁₄X₁₅X₁₆RSDN | |
| | | | QRTHTGEKPYKCPECGKSFSRSD | | LVRHX₁₇X₁₈X₁₉HX₂₀X₂₁X₂₂X₂₃X₂₄X₈X₉CX₁₀X₁₁CX₁₂X₁₃X₁₄X₁₅X₁₆QL | |
| | | | NLVRHQRTHTGEKPYKCPECGKS | | AHLRAHX₁₇X₁₈X₁₉HX₂₀X₂₁X₂₂X₂₃X₂₄X₂₅X₂₆X₂₇X₂₈X₂₉X₃₀ | |
| | | | FSQLAHLRAHQRTHTGEKPTGKK | | | |
| | | | TS | | | |
| gggaggagg | ggg AGG | 1065 | LEPGEKPYKCPECGKSFSDPGHL | 1614 | X₁X₂X₃X₄X₅X₆X₇X₈X₉CX₁₀X₁₁CX₁₂X₁₃X₁₄X₁₅X₁₆DPGHLVRHX₁₇X₁₈X₁₉ | 2163 |
| cagtgggag | AGG CAG | | VRHQRTHTGEKPYKCPECGKSFS | | HX₂₀X₂₁X₂₂X₂₃X₂₄X₈X₉CX₁₀X₁₁CX₁₂X₁₃X₁₄X₁₅X₁₆RSDNLVRHX₁₇X₁₈ | |
| ggc | TGG GAG | | RSDNLVRHQRTHTGEKPYKCPEC | | X₁₉HX₂₀X₂₁X₂₂X₂₃X₂₄X₈X₉CX₁₀X₁₁CX₁₂X₁₃X₁₄X₁₅X₁₆RSDHLTTHX₁₇ | |
| | GGC | | GKSFSRSDHLTTHQRTHTGEKPY | | X₁₈X₁₉HX₂₀X₂₁X₂₂X₂₃X₂₄X₈X₉CX₁₀X₁₁CX₁₂X₁₃X₁₄X₁₅X₁₆RADNLTEH | |
| | | | KCPECGKSFSRADNLTEHQRTHT | | X₁₇X₁₈X₁₉HX₂₀X₂₁X₂₂X₂₃X₂₄X₈X₉CX₁₀X₁₁CX₁₂X₁₃X₁₄X₁₅X₁₆RSDHLT | |
| | | | GEKPYKCPECGKSFSRSDHLTNH | | NHX₁₇X₁₈X₁₉HX₂₀X₂₁X₂₂X₂₃X₂₄X₈X₉CX₁₀X₁₁CX₁₂X₁₃X₁₄X₁₅X₁₆RSDH | |
| | | | QRTHTGEKPYKCPECGKSFSRSD | | LTNHX₁₇X₁₈X₁₉HX₂₀X₂₁X₂₂X₂₃X₂₄X₈X₉CX₁₀X₁₁CX₁₂X₁₃X₁₄X₁₅X₁₆RS | |
| | | | HLTNHQRTHTGEKPYKCPECGKS | | DKLVRHX₁₇X₁₈KX₁₉HX₂₀X₂₁X₂₂X₂₃X₂₄X₂₅X₂₆X₂₇X₂₈X₂₉X₃₀ | |
| | | | FSRSDKLVRHQRTHTGEKPTGKK | | | |
| | | | TS | | | |
| ggcactggg | GGC ACT | 1066 | LEPGEKPYKCPECGKSFSRSDHL | 1615 | X₁X₂X₃X₄X₅X₆X₇X₈X₉CX₁₀X₁₁CX₁₂X₁₃X₁₄X₁₅X₁₆RSDHLTTHX₁₇X₁₈X₁₉ | 2164 |
| aggaggcag | ggg AGG | | TTHQRTHTGEKPYKCPECGKSFS | | HX₂₀X₂₁X₂₂X₂₃X₂₄X₈X₉CX₁₀X₁₁CX₁₂X₁₃X₁₄X₁₅X₁₆RADNLTEHX₁₇X₁₈ | |
| tgg | AGG CAG | | RADNLTEHQRTHTGEKPYKCPEC | | X₁₉HX₂₀X₂₁X₂₂X₂₃X₂₄X₈X₉CX₁₀X₁₁CX₁₂X₁₃X₁₄X₁₅X₁₆RSDHLTNHX₁₇ | |
| | TGG | | GKSFSRSDHLTNHQRTHTGEKPY | | X₁₈X₁₉HX₂₀X₂₁X₂₂X₂₃X₂₄X₈X₉CX₁₀X₁₁CX₁₂X₁₃X₁₄X₁₅X₁₆RSDHLTNH | |
| | | | KCPECGKSFSRSDHLTNHQRTHT | | X₁₇X₁₈X₁₉HX₂₀X₂₁X₂₂X₂₃X₂₄X₈X₉CX₁₀X₁₁CX₁₂X₁₃X₁₄X₁₅X₁₆RSDKLV | |
| | | | GEKPYKCPECGKSFSRSDKLVRH | | RHX₁₇X₁₈X₁₉HX₂₀X₂₁X₂₂X₂₃X₂₄X₈X₉CX₁₀X₁₁CX₁₂X₁₃X₁₄X₁₅X₁₆THLD | |
| | | | QRTHTGEKPYKCPECGKSFSTHL | | LIRHX₁₇X₁₈X₁₉HX₂₀X₂₁X₂₂X₂₃X₂₄X₈X₉CX₁₀X₁₁CX₁₂X₁₃X₁₄X₁₅X₁₆DP | |
| | | | DLIRHQRTHTGEKPYKCPECGKS | | GHLVRHX₁₇X₁₈X₁₉HX₂₀X₂₁X₂₂X₂₃X₂₄X₂₅X₂₆X₂₇X₂₈X₂₉X₃₀ | |
| | | | FSDPGHLVRHQRTHTGEKPTGKK | | | |
| | | | TS | | | |
| gagggcgga | GAG GGC | 1067 | LEPGEKPYKCPECGKSFSTKNSL | 1616 | X₁X₂X₃X₄X₅X₆X₇X₈X₉CX₁₀X₁₁CX₁₂X₁₃X₁₄X₁₅X₁₆TKNSLTEHX₁₇X₁₈X₁₉ | 2165 |
| gggcggggg | GGA ggg | | TEHQRTHTGEKPYKCPECGKSFS | | HX₂₀X₂₁X₂₂X₂₃X₂₄X₈X₉CX₁₀X₁₁CX₁₂X₁₃X₁₄X₁₅X₁₆RSDKLVRHX₁₇X₁₈ | |
| cct | CGG ggg | | RSDKLVRHQRTHTGEKPYKCPEC | | X₁₉HX₂₀X₂₁X₂₂X₂₃X₂₄X₈X₉CX₁₀X₁₁CX₁₂X₁₃X₁₄X₁₅X₁₆RSDKLTEHX₁₇ | |
| | CCT | | GKSFSRSDKLTEHQRTHTGEKPY | | X₁₈X₁₉HX₂₀X₂₁X₂₂X₂₃X₂₄X₈X₉CX₁₀X₁₁CX₁₂X₁₃X₁₄X₁₅X₁₆RSDKLVRH | |
| | | | KCPECGKSFSRSDKLVRHQRTHT | | X₁₇X₁₈X₁₉HX₂₀X₂₁X₂₂X₂₃X₂₄X₈X₉CX₁₀X₁₁CX₁₂X₁₃X₁₄X₁₅X₁₆QRAHLE | |
| | | | GEKPYKCPECGKSFSQRAHLERH | | RHX₁₇X₁₈X₁₉HX₂₀X₂₁X₂₂X₂₃X₂₄X₈X₉CX₁₀X₁₁CX₁₂X₁₃X₁₄X₁₅X₁₆DPGH | |
| | | | QRTHTGEKPYKCPECGKSFSDPG | | LVRHX₁₇X₁₈X₁₉HX₂₀X₂₁X₂₂X₂₃X₂₄X₈X₉CX₁₀X₁₁CX₁₂X₁₃X₁₄X₁₅X₁₆RS | |
| | | | HLVRHQRTHTGEKPYKCPECGKS | | DNLVRHX₁₇X₁₈X₁₉HX₂₀X₂₁X₂₂X₂₃X₂₄X₂₅X₂₆X₂₇X₂₈X₂₉X₃₀ | |
| | | | FSRSDNLVRHQRTHTGEKPTGKK | | | |
| | | | TS | | | |
| actgggagg | ACT ggg | 1068 | LEPGEKPYKCPECGKSFSRSDNL | 1617 | X₁X₂X₃X₄X₅X₆X₇X₈X₉CX₁₀X₁₁CX₁₂X₁₃X₁₄X₁₅X₁₆RSDNLVRHX₁₇X₁₈X₁₉ | 2166 |
| aggcagtgg | AGG AGG | | VRHQRTHTGEKPYKCPECGKSFS | | HX₂₀X₂₁X₂₂X₂₃X₂₄X₈X₉CX₁₀X₁₁CX₁₂X₁₃X₁₄X₁₅X₁₆RSDHLTTHX₁₇X₁₈ | |
| gag | CAG TGG | | RSDHLTTHQRTHTGEKPYKCPEC | | X₁₉HX₂₀X₂₁X₂₂X₂₃X₂₄X₈X₉CX₁₀X₁₁CX₁₂X₁₃X₁₄X₁₅X₁₆RADNLTEHX₁₇ | |
| | GAG | | GKSFSRADNLTEHQRTHTGEKPY | | X₁₈X₁₉HX₂₀X₂₁X₂₂X₂₃X₂₄X₈X₉CX₁₀X₁₁CX₁₂X₁₃X₁₄X₁₅X₁₆RSDHLTNH | |
| | | | KCPECGKSFSRSDHLTNHQRTHT | | X₁₇X₁₈X₁₉HX₂₀X₂₁X₂₂X₂₃X₂₄X₈X₉CX₁₀X₁₁CX₁₂X₁₃X₁₄X₁₅X₁₆RSDHLT | |
| | | | GEKPYKCPECGKSFSRSDHLTNH | | NHX₁₇X₁₈X₁₉HX₂₀X₂₁X₂₂X₂₃X₂₄X₈X₉CX₁₀X₁₁CX₁₂X₁₃X₁₄X₁₅X₁₆RSDK | |
| | | | QRTHTGEKPYKCPECGKSFSRSD | | LVRHX₁₇X₁₈X₁₉HX₂₀X₂₁X₂₂X₂₃X₂₄X₈X₉CX₁₀X₁₁CX₁₂X₁₃X₁₄X₁₅X₁₆TH | |
| | | | KLVRHQRTHTGEKPYKCPECGKS | | LDLIRHX₁₇X₁₈X₁₉HX₂₀X₂₁X₂₂X₂₃X₂₄X₂₅X₂₆X₂₇X₂₈X₂₉X₃₀ | |
| | | | FSTHLDLIRHQRTHTGEKPTGKK | | | |
| | | | TS | | | |
| tgaaaggaa | TGA AAG | 1069 | LEPGEKPYKCPECGKSFSDPGHL | 1618 | X₁X₂X₃X₄X₅X₆X₇X₈X₉CX₁₀X₁₁CX₁₂X₁₃X₁₄X₁₅X₁₆DPGHLVRHX₁₇X₁₈X₁₉ | 2167 |
| ggcagagag | GAA GGC | | VRHQRTHTGEKPYKCPECGKSFS | | HX₂₀X₂₁X₂₂X₂₃X₂₄X₈X₉CX₁₀X₁₁CX₁₂X₁₃X₁₄X₁₅X₁₆RSDNLVRHX₁₇X₁₈ | |
| ggc | AGA GAG | | RSDNLVRHQRTHTGEKPYKCPEC | | X₁₉HX₂₀X₂₁X₂₂X₂₃X₂₄X₈X₉CX₁₀X₁₁CX₁₂X₁₃X₁₄X₁₅X₁₆QLAHLRAHX₁₇ | |
| | GGC | | GKSFSQLAHLRAHQRTHTGEKPY | | X₁₈X₁₉HX₂₀X₂₁X₂₂X₂₃X₂₄X₈X₉CX₁₀X₁₁CX₁₂X₁₃X₁₄X₁₅X₁₆DPGHLVRH | |
| | | | KCPECGKSFSDPGHLVRHQRTHT | | X₁₇X₁₈X₁₉HX₂₀X₂₁X₂₂X₂₃X₂₄X₈X₉CX₁₀X₁₁CX₁₂X₁₃X₁₄X₁₅X₁₆QSSNLV | |
| | | | GEKPYKCPECGKSFSQSSNLVRH | | RHX₁₇X₁₈X₁₉HX₂₀X₂₁X₂₂X₂₃X₂₄X₈X₉CX₁₀X₁₁CX₁₂X₁₃X₁₄X₁₅X₁₆RKDN | |
| | | | QRTHTGEKPYKCPECGKSFSRKD | | LKNHX₁₇X₁₈X₁₉HX₂₀X₂₁X₂₂X₂₃X₂₄X₈X₉CX₁₀X₁₁CX₁₂X₁₃X₁₄X₁₅X₁₆QA | |
| | | | NLKNHQRTHTGEKPYKCPECGKS | | GHLASHX₁₇X₁₈X₁₉HX₂₀X₂₁X₂₂X₂₃X₂₄X₂₅X₂₆X₂₇X₂₈X₂₉X₃₀ | |
| | | | FSQAGHLASHQRTHTGEKPTGKK | | | |
| | | | TS | | | |
| aaggaaggc | AAG GAA | 1070 | LEPGEKPYKCPECGKSFSTHLDL | 1619 | X₁X₂X₃X₄X₅X₆X₇X₈X₉CX₁₀X₁₁CX₁₂X₁₃X₁₄X₁₅X₁₆THLDLIRHX₁₇X₁₈X₁₉ | 2168 |
| agagagggc | GGC AGA | | IRHQRTHTGEKPYKCPECGKSFS | | HX₂₀X₂₁X₂₂X₂₃X₂₄X₈X₉CX₁₀X₁₁CX₁₂X₁₃X₁₄X₁₅X₁₆DPGHLVRHX₁₇X₁₈ | |
| act | GAG GGC | | DPGHLVRHQRTHTGEKPYKCPEC | | X₁₉HX₂₀X₂₁X₂₂X₂₃X₂₄X₈X₉CX₁₀X₁₁CX₁₂X₁₃X₁₄X₁₅X₁₆RSDNLVRHX₁₇ | |
| | ACT | | GKSFSRSDNLVRHQRTHTGEKPY | | X₁₈X₁₉HX₂₀X₂₁X₂₂X₂₃X₂₄X₈X₉CX₁₀X₁₁CX₁₂X₁₃X₁₄X₁₅X₁₆QLAHLRAH | |
| | | | KCPECGKSFSQLAHLRAHQRTHT | | X₁₇X₁₈X₁₉HX₂₀X₂₁X₂₂X₂₃X₂₄X₈X₉CX₁₀X₁₁CX₁₂X₁₃X₁₄X₁₅X₁₆DPGHLV | |
| | | | GEKPYKCPECGKSFSDPGHLVRH | | RHX₁₇X₁₈X₁₉HX₂₀X₂₁X₂₂X₂₃X₂₄X₈X₉CX₁₀X₁₁CX₁₂X₁₃X₁₄X₁₅X₁₆QSSN | |
| | | | QRTHTGEKPYKCPECGKSFSQSS | | LVRHX₁₇X₁₈X₁₉HX₂₀X₂₁X₂₂X₂₃X₂₄X₈X₉CX₁₀X₁₁CX₁₂X₁₃X₁₄X₁₅X₁₆RK | |
| | | | NLVRHQRTHTGEKPYKCPECGKS | | DNLKNHX₁₇X₁₈X₁₉HX₂₀X₂₁X₂₂X₂₃X₂₄X₂₅X₂₆X₂₇X₂₈X₂₉X₃₀ | |
| | | | FSRKDNLKNHQRTHTGEKPTGKK | | | |
| | | | TS | | | |
| tgggagggc | TGG GAG | 1071 | LEPGEKPYKCPECGKSFSRSDKL | 1620 | X₁X₂X₃X₄X₅X₆X₇X₈X₉CX₁₀X₁₁CX₁₂X₁₃X₁₄X₁₅X₁₆RSDKLVRHX₁₇X₁₈X₁₉ | 2169 |
| ggagggcgg | GGC GGA | | VRHQRTHTGEKPYKCPECGKSFS | | HX₂₀X₂₁X₂₂X₂₃X₂₄X₈X₉CX₁₀X₁₁CX₁₂X₁₃X₁₄X₁₅X₁₆RSDKLTEHX₁₇X₁₈ | |
| ggg | ggg CGG | | RSDKLTEHQRTHTGEKPYKCPEC | | X₁₉HX₂₀X₂₁X₂₂X₂₃X₂₄X₈X₉CX₁₀X₁₁CX₁₂X₁₃X₁₄X₁₅X₁₆RSDKLVRHX₁₇ | |
| | GGG | | GKSFSRSDKLVRHQRTHTGEKPY | | X₁₈X₁₉HX₂₀X₂₁X₂₂X₂₃X₂₄X₈X₉CX₁₀X₁₁CX₁₂X₁₃X₁₄X₁₅X₁₆QRAHLERH | |
| | | | KCPECGKSFSQRAHLERHQRTHT | | X₁₇X₁₈X₁₉HX₂₀X₂₁X₂₂X₂₃X₂₄X₈X₉CX₁₀X₁₁CX₁₂X₁₃X₁₄X₁₅X₁₆DPGHLV | |
| | | | GEKPYKCPECGKSFSDPGHLVRH | | RHX₁₇X₁₈X₁₉HX₂₀X₂₁X₂₂X₂₃X₂₄X₈X₉CX₁₀X₁₁CX₁₂X₁₃X₁₄X₁₅X₁₆RSDN | |
| | | | QRTHTGEKPYKCPECGKSFSRSD | | VLVRHX₁₇X₁₈X₁₉HX₂₀X₂₁X₂₂X₂₃X₂₄X₈X₉CX₁₀X₁₁CX₁₂X₁₃X₁₄X₁₅X₁₆RS | |
| | | | NLVRHQRTHTGEKPYKCPECGKS | | DHLTTHX₁₇X₁₈X₁₉HX₂₀X₂₁X₂₂X₂₃X₂₄X₂₅X₂₆X₂₇X₂₈X₂₉X₃₀ | |
| | | | FSRSDHLTTHQRTHTGEKPTGKK | | | |
| | | | TS | | | |
| cagtgggag | CAG TGG | 1072 | LEPGEKPYKCPECGKSFSRSDKL | 1621 | X₁X₂X₃X₄X₅X₆X₇X₈X₉CX₁₀X₁₁CX₁₂X₁₃X₁₄X₁₅X₁₆RSDKLTEHX₁₇X₁₈X₁₉ | 2170 |
| ggcggaggg | GAG GGC | | TEHQRTHTGEKPYKCPECGKSFS | | HX₂₀X₂₁X₂₂X₂₃X₂₄X₈X₉CX₁₀X₁₁CX₁₂X₁₃X₁₄X₁₅X₁₆RSDKLVRHX₁₇X₁₈ | |
| cgg | GGA ggg | | RSDKLVRHQRTHTGEKPYKCPEC | | X₁₉HX₂₀X₂₁X₂₂X₂₃X₂₄X₈X₉CX₁₀X₁₁CX₁₂X₁₃X₁₄X₁₅X₁₆QRAHLERHX₁₇ | |
| | CGG | | GKSFSQRAHLERHQRTHTGEKPY | | X₁₈X₁₉HX₂₀X₂₁X₂₂X₂₃X₂₄X₈X₉CX₁₀X₁₁CX₁₂X₁₃X₁₄X₁₅X₁₆DPGHLVRH | |
| | | | KCPECGKSFSDPGHLVRHQRTHT | | X₁₇X₁₈X₁₉HX₂₀X₂₁X₂₂X₂₃X₂₄X₈X₉CX₁₀X₁₁CX₁₂X₁₃X₁₄X₁₅X₁₆RSDNLV | |
| | | | GEKPYKCPECGKSFSRSDNLVRH | | RHX₁₇X₁₈X₁₉HX₂₀X₂₁X₂₂X₂₃X₂₄X₈X₉CX₁₀X₁₁CX₁₂X₁₃X₁₄X₁₅X₁₆RSDH | |
| | | | QRTHTGEKPYKCPECGKSFSRSD | | LTTHX₁₇X₁₈X₁₉HX₂₀X₂₁X₂₂X₂₃X₂₄X₈X₉CX₁₀X₁₁CX₁₂X₁₃X₁₄X₁₅X₁₆RA | |
| | | | HLTTHQRTHTGEKPYKCPECGKS | | DNLTEHX₁₇X₁₈X₁₉HX₂₀X₂₁X₂₂X₂₃X₂₄X₂₅X₂₆X₂₇X₂₈X₂₉X₃₀ | |
| | | | FSRADNLTEHQRTHTGEKPTGKK | | | |
| | | | TS | | | |
| aggcagtgg | AGG CAG | 1073 | LEPGEKPYKCPECGKSFSRSDKL | 1622 | X₁X₂X₃X₄X₅X₆X₇X₈X₉CX₁₀X₁₁CX₁₂X₁₃X₁₄X₁₅X₁₆RSDKLVRHX₁₇X₁₈X₁₉ | 2171 |
| gagggcgga | TGG GAG | | VRHQRTHTGEKPYKCPECGKSFS | | HX₂₀X₂₁X₂₂X₂₃X₂₄X₈X₉CX₁₀X₁₁CX₁₂X₁₃X₁₄X₁₅X₁₆QRAHLERHX₁₇X₁₈ | |
| ggg | GGC GGA | | QRAHLERHQRTHTGEKPYKCPEC | | X₁₉HX₂₀X₂₁X₂₂X₂₃X₂₄X₈X₉CX₁₀X₁₁CX₁₂X₁₃X₁₄X₁₅X₁₆DPGHLVRHX₁₇ | |
| | GGG | | GKSFSDPGHLVRHQRTHTGEKPY | | X₁₈X₁₉HX₂₀X₂₁X₂₂X₂₃X₂₄X₈X₉CX₁₀X₁₁CX₁₂X₁₃X₁₄X₁₅X₁₆RSDNLVRH | |
| | | | KCPECGKSFSRSDNLVRHQRTHT | | X₁₇X₁₈X₁₉HX₂₀X₂₁X₂₂X₂₃X₂₄X₈X₉CX₁₀X₁₁CX₁₂X₁₃X₁₄X₁₅X₁₆RSDHLT | |
| | | | GEKPYKCPECGKSFSRSDHLTTH | | THX₁₇X₁₈X₁₉HX₂₀X₂₁X₂₂X₂₃X₂₄X₈X₉CX₁₀X₁₁CX₁₂X₁₃X₁₄X₁₅X₁₆RADN | |
| | | | QRTHTGEKPYKCPECGKSFSRAD | | LTEHX₁₇X₁₈X₁₉HX₂₀X₂₁X₂₂X₂₃X₂₄X₈X₉CX₁₀X₁₁CX₁₂X₁₃X₁₄X₁₅X₁₆RS | |
| | | | NLTEHQRTHTGEKPYKCPECGKS | | DHLTNHX₁₇X₁₈X₁₉HX₂₀X₂₁X₂₂X₂₃X₂₄X₂₅X₂₆X₂₇X₂₈X₂₉X₃₀ | |
| | | | FSRSDHLTNHQRTHTGEKPTGKK | | | |
| | | | TS | | | |
| aggaggcag | AGG AGG | 1074 | LEPGEKPYKCPECGKSFSQRAHL | 1623 | X₁X₂X₃X₄X₅X₆X₇X₈X₉CX₁₀X₁₁CX₁₂X₁₃X₁₄X₁₅X₁₆QRAHLERHX₁₇X₁₈X₁₉ | 2172 |
| tgggagggc | CAG TGG | | ERHQRTHTGEKPYKCPECGKSFS | | HX₂₀X₂₁X₂₂X₂₃X₂₄X₈X₉CX₁₀X₁₁CX₁₂X₁₃X₁₄X₁₅X₁₆DPGHLVRHX₁₇X₁₈ | |
| gga | GAG GGC | | DPGHLVRHQRTHTGEKPYKCPEC | | X₁₉HX₂₀X₂₁X₂₂X₂₃X₂₄X₈X₉CX₁₀X₁₁CX₁₂X₁₃X₁₄X₁₅X₁₆RSDNLVRHX₁₇ | |
| | GGA | | GKSFSRSDNLVRHQRTHTGEKPY | | X₁₈X₁₉HX₂₀X₂₁X₂₂X₂₃X₂₄X₈X₉CX₁₀X₁₁CX₁₂X₁₃X₁₄X₁₅X₁₆RSDHLTTH | |
| | | | KCPECGKSFSRSDHLTTHQRTHT | | X₁₇X₁₈X₁₉HX₂₀X₂₁X₂₂X₂₃X₂₄X₈X₉CX₁₀X₁₁CX₁₂X₁₃X₁₄X₁₅X₁₆RADNLT | |
| | | | GEKPYKCPECGKSFSRADNLTEH | | EHX₁₇X₁₈X₁₉HX₂₀X₂₁X₂₂X₂₃X₂₄X₈X₉CX₁₀X₁₁CX₁₂X₁₃X₁₄X₁₅X₁₆RSDH | |
| | | | QRTHTGEKPYKCPECGKSFSRSD | | LTNHX₁₇X₁₈X₁₉HX₂₀X₂₁X₂₂X₂₃X₂₄X₈X₉CX₁₀X₁₁CX₁₂X₁₃X₁₄X₁₅X₁₆RS | |
| | | | HLTNHQRTHTGEKPYKCPECGKS | | DHLTNHX₁₇X₁₈X₁₉HX₂₀X₂₁X₂₂X₂₃X₂₄X₂₅X₂₆X₂₇X₂₈X₂₉X₃₀ | |
| | | | FSRSDHLTNHQRTHTGEKPTGKK | | | |
| | | | TS | | | |
| gtttgaaag | GTT TGA | 110 | LEPGEKPYKCPECGKSFSRSDNL | 111 | X₁X₂X₃X₄X₅X₆X₇X₈X₉CX₁₀X₁₁CX₁₂X₁₃X₁₄X₁₅X₁₆RSDNLVRHX₁₇X₁₈X₁₉ | 315 |
| gaaggcaga | AAG GAA | | VRHQRTHTGEKPYKCPECGKSFS | | HX₂₀X₂₁X₂₂X₂₃X₂₄X₈X₉CX₁₀X₁₁CX₁₂X₁₃X₁₄X₁₅X₁₆QLAHLRAHX₁₇X₁₈ | |
| gag | GGC AGA | | QLAHLRAHQRTHTGEKPYKCPEC | | X₁₉HX₂₀X₂₁X₂₂X₂₃X₂₄X₈X₉CX₁₀X₁₁CX₁₂X₁₃X₁₄X₁₅X₁₆DPGHLVRHX₁₇ | |
| | GAG | | GKSFSDPGHLVRHQRTHTGEKPY | | X₁₈X₁₉HX₂₀X₂₁X₂₂X₂₃X₂₄X₈X₉CX₁₀X₁₁CX₁₂X₁₃X₁₄X₁₅X₁₆QSSNLVRH | |
| | | | KCPECGKSFSQSSNLVRHQRTHT | | X₁₇X₁₈X₁₉HX₂₀X₂₁X₂₂X₂₃X₂₄X₈X₉CX₁₀X₁₁CX₁₂X₁₃X₁₄X₁₅X₁₆RKDNLK | |
| | | | GEKPYKCPECGKSFSRKDNLKNH | | NHX₁₇X₁₈X₁₉HX₂₀X₂₁X₂₂X₂₃X₂₄X₈X₉CX₁₀X₁₁CX₁₂X₁₃X₁₄X₁₅X₁₆QAGH | |
| | | | QRTHTGEKPYKCPECGKSFSQAG | | LASHX₁₇X₁₈X₁₉HX₂₀X₂₁X₂₂X₂₃X₂₄X₈X₉CX₁₀X₁₁CX₁₂X₁₃X₁₄X₁₅X₁₆TS | |
| | | | HLASHQRTHTGEKPYKCPECGKS | | GSLVRHX₁₇X₁₈X₁₉HX₂₀X₂₁X₂₂X₂₃X₂₄X₂₅X₂₆X₂₇X₂₈X₂₉X₃₀ | |
| | | | FVSTSGSLVRHQRTHTGEKPTGK | | | |
| | | | TS | | | |
| acggtttga | ACG GTT | 1075 | LEPGEKPYKCPECGKSFSQLAHL | 1624 | X₁X₂X₃X₄X₅X₆X₇X₈X₉CX₁₀X₁₁CX₁₂X₁₃X₁₄X₁₅X₁₆QLAHLRAHX₁₇X₁₈X₁₉ | 2173 |
| aaggaaggc | TGA AAG | | RAHQRTHTGEKPYKCPECGKSFS | | HX₂₀X₂₁X₂₂X₂₃X₂₄X₈X₉CX₁₀X₁₁CX₁₂X₁₃X₁₄X₁₅X₁₆DPGHLVRHX₁₇X₁₈ | |
| aga | GAA GGC | | DPGHLVRHQRTHTGEKPYKCPEC | | X₁₉HX₂₀X₂₁X₂₂X₂₃X₂₄X₈X₉CX₁₀X₁₁CX₁₂X₁₃X₁₄X₁₅X₁₆QSSNLVRHX₁₇ | |
| | AGA | | GKSFSQSSNLVRHQRTHTGEKPY | | X₁₈X₁₉HX₂₀X₂₁X₂₂X₂₃X₂₄X₈X₉CX₁₀X₁₁CX₁₂X₁₃X₁₄X₁₅X₁₆RKDNLKNH | |
| | | | KCPECGKSFSRKDNLKNHQRTHT | | X₁₇X₁₈X₁₉HX₂₀X₂₁X₂₂X₂₃X₂₄X₈X₉CX₁₀X₁₁CX₁₂X₁₃X₁₄X₁₅X₁₆QAGHLA | |
| | | | GEKPYKCPECGKSFSQAGHLASH | | SHX₁₇X₁₈X₁₉HX₂₀X₂₁X₂₂X₂₃X₂₄X₈X₉CX₁₀X₁₁CX₁₂X₁₃X₁₄X₁₅X₁₆TSGS | |
| | | | QRTHTGEKPYKCPECGKSFSTSG | | LVRHX₁₇X₁₈X₁₉HX₂₀X₂₁X₂₂X₂₃X₂₄X₈X₉CX₁₀X₁₁CX₁₂X₁₃X₁₄X₁₅X₁₆RT | |
| | | | SLVRHQRTHTGEKPYKCPECGKS | | DTLRDHX₁₇X₁₈X₁₉HX₂₀X₂₁X₂₂X₂₃X₂₄X₂₅X₂₆X₂₇X₂₈X₂₉X₃₀ | |
| | | | FSRTDTLRDHQRTHTGEKPTGKK | | | |
| | | | TS | | | |
| aggacggtt | AGG ACG | 1076 | LEPGEKPYKCPECGKSFSDPGHL | 1625 | X₁X₂X₃X₄X₅X₆X₇X₈X₉CX₁₀X₁₁CX₁₂X₁₃X₁₄X₁₅X₁₆DPGHLVRHX₁₇X₁₈X₁₉ | 2174 |
| tgaaaggaa | GTT TGA | | VRHQRTHTGEKPYKCPECGKSFS | | HX₂₀X₂₁X₂₂X₂₃X₂₄X₈X₉CX₁₀X₁₁CX₁₂X₁₃X₁₄X₁₅X₁₆QSSNLVRHX₁₇X₁₈ | |
| ggc | AAG GAA | | QSSNLVRHQRTHTGEKPYKCPEC | | X₁₉HX₂₀X₂₁X₂₂X₂₃X₂₄X₈X₉CX₁₀X₁₁CX₁₂X₁₃X₁₄X₁₅X₁₆RKDNLKNHX₁₇ | |
| | GGC | | GKSFSRKDNLKNHQRTHTGEKPY | | X₁₈X₁₉HX₂₀X₂₁X₂₂X₂₃X₂₄X₈X₉CX₁₀X₁₁CX₁₂X₁₃X₁₄X₁₅X₁₆QAGHLASH | |
| | | | KCPECGKSFSQAGHLASHQRTHT | | X₁₇X₁₈X₁₉HX₂₀X₂₁X₂₂X₂₃X₂₄X₈X₉CXHX₁₁CX₁₂X₁₃X₁₄X₁₅X₁₆TSGSLV | |
| | | | GEKPYKCPECGKSFSTSGSLVRH | | RHX₁₇X₁₈X₁₉HX₂₀X₂₁X₂₂X₂₃X₂₄X₈X₉CX₁₀X₁₁CX₁₂X₁₃X₁₄X₁₅X₁₆RTDT | |
| | | | QRTHTGEKPYKCPECGKSFSRTD | | LRDHX₁₇X₁₈X₁₉HX₂₀X₂₁X₂₂X₂₃X₂₄X₈X₉CX₁₀X₁₁CX₁₂X₁₃X₁₄X₁₅X₁₆RS | |
| | | | TLRDHQRTHTGEKPYKCPECGKS | | DHLTNHX₁₇X₁₈X₁₉HX₂₀X₂₁X₂₂X₂₃X₂₄X₂₅X₂₆X₂₇X₂₈X₂₉X₃₀ | |
| | | | FSRSDHLTNHQRTHTGEKPTGKK | | | |
| | | | TS | | | |
| cagaggacg | CAG AGG | 1077 | LEPGEKPYKCPECGKSFSQSSNL | 1626 | X₁X₂X₃X₄X₅X₆X₇X₈X₉CX₁₀X₁₁CX₁₂X₁₃X₁₄X₁₅X₁₆QSSNLVRHX₁₇X₁₈X₁₉ | 2175 |
| gtttgaaag | ACG GTT | | VRHQRTHTGEKPYKCPECGKSFS | | HX₂₀X₂₁X₂₂X₂₃X₂₄X₈X₉CX₁₀X₁₁CX₁₂X₁₃X₁₄X₁₅X₁₆RKDNLKNHX₁₇X₁₈ | |
| gaa | TGA AAG | | RKDNLKNHQRTHTGEKPYKCPEC | | X₁₉HX₂₀X₂₁X₂₂X₂₃X₂₄X₈X₉CX₁₀X₁₁CX₁₂X₁₃X₁₄X₁₅X₁₆QAGHLASHX₁₇ | |
| | GAA | | GKSFSQAGHLASHQRTHTGEKPY | | X₁₈X₁₉HX₂₀X₂₁X₂₂X₂₃X₂₄X₈X₉CX₁₀X₁₁CX₁₂X₁₃X₁₄X₁₅X₁₆TSGSLVRH | |
| | | | KCPECGKSFSTSGSLVRHQRTHT | | X₁₇X₁₈X₁₉HX₂₀X₂₁X₂₂X₂₃X₂₄X₈X₉CX₁₀X₁₁CX₁₂X₁₃X₁₄X₁₅X₁₆RTDTLR | |
| | | | GEKPYKCPECGKSFSRTDTLRDH | | DHX₁₇X₁₈X₁₉HX₂₀X₂₁X₂₂X₂₃X₂₄X₈X₉CX₁₀X₁₁CX₁₂X₁₃X₁₄X₁₅X₁₆RSDH | |
| | | | QRTHTGEKPYKCPECGKSFSRSD | | LTNHX₁₇X₁₈X₁₉HX₂₀X₂₁X₂₂X₂₃X₂₄X₈X₉CX₁₀X₁₁CX₁₂X₁₃X₁₄X₁₅X₁₆RA | |
| | | | HLTNHQRTHTGEKPYKCPECGKS | | DNLTEHX₁₇X₁₈X₁₉HX₂₀X₂₁X₂₂X₂₃X₂₄X₂₅X₂₆X₂₇X₂₈X₂₉X₃₀ | |
| | | | FSRADNLTEHQRTHTGEKPTGKK | | | |
| | | | TS | | | |
| gggcgccca | ggg CGC | 1078 | LEPGEKPYKCPECGKSFSRSDHL | 1627 | X₁X₂X₃X₄X₅X₆X₇X₈X₉CX₁₀X₁₁CX₁₂X₁₃X₁₄X₁₅X₁₆RSDHLTNHX₁₇X₁₈X₁₉ | 2176 |
| gggtagggc | CCA GGG | | TNHQRTHTGEKPYKCPECGKSFS | | HX₂₀X₂₁X₂₂X₂₃X₂₄X₈X₉CX₁₀X₁₁CX₁₂X₁₃X₁₄X₁₅X₁₆DPGHLVRHX₁₇X₁₈ | |
| agg | TAG GGC | | DPGHLVRHQRTHTGEKPYKCPEC | | X₁₉HX₂₀X₂₁X₂₂X₂₃X₂₄X₈X₉CX₁₀X₁₁CX₁₂X₁₃X₁₄X₁₅X₁₆REDNLHTHX₁₇ | |
| | AGG | | GKSFSREDNLHTHQRTHTGEKPY | | X₁₈X₁₉HX₂₀X₂₁X₂₂X₂₃X₂₄X₈X₉CX₁₀X₁₁CX₁₂X₁₃X₁₄X₁₅X₁₆RSDKLVRH | |
| | | | KCPECGKSFSRSDKLVRHQRTHT | | X₁₇X₁₈X₁₉HX₂₀X₂₁X₂₂X₂₃X₂₄X₈X₉CX₁₀X₁₁CX₁₂X₁₃X₁₄X₁₅X₁₆TSHSLT | |
| | | | GEKPYKCPECGKSFSTSHSLTEH | | EHX₁₇X₁₈X₁₉HX₂₀X₂₁X₂₂X₂₃X₂₄X₈X₉CX₁₀X₁₁CX₁₂X₁₃X₁₄X₁₅X₁₆HTGH | |
| | | | QRTHTGEKPYKCPECGKSFSHTG | | LLEHX₁₇X₁₈X₁₉HX₂₀X₂₁X₂₂X₂₃X₂₄X₈X₉CX₁₀X₁₁CX₁₂X₁₃X₁₄X₁₅X₁₆RS | |
| | | | HLLEHQRTHTGEKPYKCPECGKS | | DKLVRHX₁₇X₁₈X₁₉HX₂₀X₂₁X₂₂X₂₃X₂₄X₂₅X₂₆X₂₇X₂₈X₂₉X₃₀ | |
| | | | FSRSDKLVRHQRTHTGEKPTGKK | | | |
| | | | TS | | | |
| cgcccaggg | CGC CCA | 1079 | LEPGEKPYKCPECGKSFSRSDHL | 1628 | X₁X₂X₃X₄X₅X₆X₇X₈X₉CX₁₀X₁₁CX₁₂X₁₃X₁₄X₁₅X₁₆RSDHLTTHX₁₇X₁₈X₁₉ | 2177 |
| tagggcagg | GGG TAG | | TTHQRTHTGEKPYKCPECGKSFS | | HX₂₀X₂₁X₂₂X₂₃X₂₄X₈X₉CX₁₀X₁₁CX₁₂X₁₃X₁₄X₁₅X₁₆RSDHLTNHX₁₇X₁₈ | |
| tgg | GGC AGG | | RSDHLTNHQRTHTGEKPYKCPEC | | X₁₉HX₂₀X₂₁X₂₂X₂₃X₂₄X₈X₉CX₁₀X₁₁CX₁₂X₁₃X₁₄X₁₅X₁₆DPGHLVRHX₁₇ | |
| | TGG | | GKSFSDPGHLVRHQRTHTGEKPY | | X₁₈X₁₉HX₂₀X₂₁X₂₂X₂₃X₂₄X₈X₉CX₁₀X₁₁CX₁₂X₁₃X₁₄X₁₅X₁₆REDNLHTH | |
| | | | KCPECGKSFSREDNLHTHQRTHT | | X₁₇X₁₈X₁₉HX₂₀X₂₁X₂₂X₂₃X₂₄X₈X₉CX₁₀X₁₁CX₁₂X₁₃X₁₄X₁₅X₁₆RSDKLV | |
| | | | GEKPYKCPECGKSFSRSDKLVRH | | RHX₁₇X₁₈X₁₉HX₂₀X₂₁X₂₂X₂₃X₂₄X₈X₉CX₁₀X₁₁CX₁₂X₁₃X₁₄X₁₅X₁₆TSHS | |
| | | | QRTHTGEKPYKCPECGKSFSTSH | | LTEHX₁₇X₁₈X₁₉HX₂₀X₂₁X₂₂X₂₃X₂₄X₈X₉CX₁₀X₁₁CX₁₂X₁₃X₁₄X₁₅X₁₆HT | |
| | | | SLTEHQRTHTGEKPYKCPECGKS | | GHLLEHX₁₇X₁₈X₁₉HX₂₀X₂₁X₂₂X₂₃X₂₄X₂₅X₂₆X₂₇X₂₈X₂₉X₃₀ | |
| | | | FSHTGHLLEHQRTHTGEKPTGKK | | | |
| | | | TS | | | |
| gggagggcg | ggg AGG | 1080 | LEPGEKPYKCPECGKSFSDPGHL | 1629 | X₁X₂X₃X₄X₅X₆X₇X₈X₉CX₁₀X₁₁CX₁₂X₁₃X₁₄X₁₅X₁₆DPGHLVRHX₁₇X₁₈X₁₉ | 2178 |
| gagggcggg | GCG GAG | | VRHQRTHTGEKPYKCPECGKSFS | | HX₂₀X₂₁X₂₂X₂₃X₂₄X₈X₉CX₁₀X₁₁CX₁₂X₁₃X₁₄X₁₅X₁₆RSDKLVRHX₁₇X₁₈ | |
| ggc | GGC GGG | | RSDKLVRHQRTHTGEKPYKCPEC | | X₁₉HX₂₀X₂₁X₂₂X₂₃X₂₄X₈X₉CX₁₀X₁₁CX₁₂X₁₃X₁₄X₁₅X₁₆DPGHLVRHX₁₇ | |
| | GGC | | GKSFSDPGHLVRHQRTHTGEKPY | | X₁₈X₁₉HX₂₀X₂₁X₂₂X₂₃X₂₄X₈X₉CX₁₀X₁₁CX₁₂X₁₃X₁₄X₁₅X₁₆RSDNLVRH | |
| | | | KCPECGKSFSRSDNLVRHQRTHT | | X₁₇X₁₈X₁₉HX₂₀X₂₁X₂₂X₂₃X₂₄X₈X₉CX₁₀X₁₁CX₁₂X₁₃X₁₄X₁₅X₁₆RSDDLV | |
| | | | GEKPYKCPECGKSFSRSDDLVRH | | RHX₁₇X₁₈X₁₉HX₂₀X₂₁X₂₂X₂₃X₂₄X₈X₉CX₁₀X₁₁CX₁₂X₁₃X₁₄X₁₅X₁₆RSDH | |
| | | | QRTHTGEKPYKCPECGKSFSRSD | | LTNHX₁₇X₁₈X₁₉HX₂₀X₂₁X₂₂X₂₃X₂₄X₈X₉CX₁₀X₁₁CX₁₂X₁₃X₁₄X₁₅X₁₆RS | |
| | | | HLTNHQRTHTGEKPYKCPECGKS | | DKLVRHX₁₇X₁₈X₁₉HX₂₀X₂₁X₂₂X₂₃X₂₄X₂₅X₂₆X₂₇X₂₈X₂₉X₃₀ | |
| | | | FSRSDKLVRHQRTHTGEKPTGKK | | | |
| | | | TS | | | |
| cggcgtgga | CGG CGT | 1081 | LEPGEKPYKCPECGKSFSTTGNL | 1630 | X₁X₂X₃X₄X₅X₆X₇X₈X₉CX₁₀X₁₁CX₁₂X₁₃X₁₄X₁₅X₁₆TTGNLTVHX₁₇X₁₈X₁₉ | 2179 |
| ggcagggag | GGA GGC | | TVHQRTHTGEKPYKCPECGKSFS | | HX₂₀X₂₁X₂₂X₂₃X₂₄X₈X₉CX₁₀X₁₁CX₁₂X₁₃X₁₄X₁₅X₁₆RSDNLVRHX₁₇X₁₈ | |
| aat | AGG gag | | RSDNLVRHQRTHTGEKPYKCPEC | | X₁₉HX₂₀X₂₁X₂₂X₂₃X₂₄X₈X₉CX₁₀X₁₁CX₁₂X₁₃X₁₄X₁₅X₁₆RSDHLTNHX₁₇ | |
| | AAT | | GKSFSRSDHLTNHQRTHTGEKPY | | X₁₈X₁₉HX₂₀X₂₁X₂₂X₂₃X₂₄X₈X₉CX₁₀X₁₁CX₁₂X₁₃X₁₄X₁₅X₁₆DPGHLVRH | |
| | | | KCPECGKSFSDPGHLVRHQRTHT | | X₁₇X₁₈X₁₉HX₂₀X₂₁X₂₂X₂₃X₂₄X₈X₉CX₁₀X₁₁CX₁₂X₁₃X₁₄X₁₅X₁₆QRAHLE | |
| | | | GEKPYKCPECGKSFSQRAHLERH | | RHX₁₇X₁₈X₁₉HX₂₀X₂₁X₂₂X₂₃X₂₄X₈X₉CX₁₀X₁₁CX₁₂X₁₃X₁₄X₁₅X₁₆SRRT | |
| | | | QRTHTGEKPYKCPECGKSFSSRR | | CRAHX₁₇X₁₈X₁₉HX₂₀X₂₁X₂₂X₂₃X₂₄X₈X₉CX₁₀X₁₁CX₁₂X₁₃X₁₄X₁₅X₁₆RS | |
| | | | TCRAHQRTHTGEKPYKCPECGKS | | DKLTEHX₁₇X₁₈X₁₉HX₂₀X₂₁X₂₂X₂₃X₂₄X₂₅X₂₆X₂₇X₂₈X₂₉X₃₀ | |
| | | | FSRSDKLTEHQRTHTGEKPTGKK | | | |
| | | | TS | | | |
| aggaaggca | AGG AAG | 1082 | LEPGEKPYKCPECGKSFSRNDAL | 1631 | X₁X₂X₃X₄X₅X₆X₇X₈X₉CX₁₀X₁₁CX₁₂X₁₃X₁₄X₁₅X₁₆RNDALTEHX₁₇X₁₈X₁₉ | 2180 |
| gagagggca | GCA gag | | TEHQRTHTGEKPYKCPECGKSFS | | HX₂₀X₂₁X₂₂X₂₃X₂₄X₈X₉CX₁₀X₁₁CX₁₂X₁₃X₁₄X₁₅X₁₆QSGDLRRHX₁₇X₁₈ | |
| ctg | AGG GCA | | QSGDLRRHQRTHTGEKPYKCPEC | | X₁₉HX₂₀X₂₁X₂₂X₂₃X₂₄X₈X₉CX₁₀X₁₁CX₁₂X₁₃X₁₄X₁₅X₁₆RSDHLTNHX₁₇ | |
| | CTG | | GKSFSRSDHLTNHQRTHTGEKPY | | X₁₈X₁₉HX₂₀X₂₁X₂₂X₂₃X₂₄X₈X₉CX₁₀X₁₁CX₁₂X₁₃X₁₄X₁₅X₁₆RSDNLVRH | |
| | | | KCPECGKSFSRSDNLVRHQRTHT | | X₁₇X₁₈X₁₉HX₂₀X₂₁X₂₂X₂₃X₂₄X₈X₉CX₁₀X₁₁CX₁₂X₁₃X₁₄X₁₅X₁₆QSGDLR | |
| | | | GEKPYKCPECGKSFSQSGDLRRH | | RHX₁₇X₁₈X₁₉HX₂₀X₂₁X₂₂X₂₃X₂₄X₈X₉CX₁₀X₁₁CX₁₂X₁₃X₁₄X₁₅X₁₆RKDN | |
| | | | QRTHTGEKPYKCPECGKSFSRKD | | LKNHX₁₇X₁₈X₁₉HX₂₀X₂₁X₂₂X₂₃X₂₄X₈X₉CX₁₀X₁₁CX₁₂X₁₃X₁₄X₁₅X₁₆RS | |
| | | | NLKNHQRTHTGEKPYKCPECGKS | | DHLTNHX₁₇X₁₈X₁₉HX₂₀X₂₁X₂₂X₂₃X₂₄X₂₅X₂₆X₂₇X₂₈X₂₉X₃₀ | |
| | | | FSRSDHLTNHQRTHTGEKPTGKK | | | |
| | | | TS | | | |
| tagggcagg | TAG GGC | 1083 | LEPGEKPYKCPECGKSFSSRRTC | 1632 | X₁X₂X₃X₄X₅X₆X₇X₈X₉CX₁₀X₁₁CX₁₂X₁₃X₁₄X₁₅X₁₆SRRTCRAHX₁₇X₁₈X₁₉ | 2181 |
| tggccgcgg | AGG TGG | | RAHQRTHTGEKPYKCPECGKSFS | | HX₂₀X₂₁X₂₂X₂₃X₂₄X₈X₉CX₁₀X₁₁CX₁₂X₁₃X₁₄X₁₅X₁₆RSDKLTEHX₁₇X₁₈ | |
| cgt | CCG CGG | | RSDKLTEHQRTHTGEKPYKCPEC | | X₁₉HX₂₀X₂₁X₂₂X₂₃X₂₄X₈X₉CX₁₀X₁₁CX₁₂X₁₃X₁₄X₁₅X₁₆RNDTLTEHX₁₇ | |
| | CGT | | GKSFSRNDTLTEHQRTHTGEKPY | | X₁₈X₁₉HX₂₀X₂₁X₂₂X₂₃X₂₄X₈X₉CX₁₀X₁₁CX₁₂X₁₃X₁₄X₁₅X₁₆RSDHLTTH | |
| | | | KCPECGKSFSRSDHLTTHQRTHT | | X₁₇X₁₈X₁₉HX₂₀X₂₁X₂₂X₂₃X₂₄X₈X₉CX₁₀X₁₁CX₁₂X₁₃X₁₄X₁₅X₁₆RSDHLT | |
| | | | GEKPYKCPECGKSFSRSDHLTNH | | NHX₁₇X₁₈X₁₉HX₂₀X₂₁X₂₂X₂₃X₂₄X₈X₉CX₁₀X₁₁CX₁₂X₁₃X₁₄X₁₅X₁₆DPGH | |
| | | | QRTHTGEKPYKCPECGKSFSDPG | | LVRHX₁₇X₁₈X₁₉HX₂₀X₂₁X₂₂X₂₃X₂₄X₈X₉CX₁₀X₁₁CX₁₂X₁₃X₁₄X₁₅X₁₆RE | |
| | | | HLVRHQRTHTGEKPYKCPECGKS | | DNLHTHX₁₇X₁₈X₁₉HX₂₀X₂₁X₂₂X₂₃X₂₄X₂₅X₂₆X₂₇X₂₈X₂₉X₃₀ | |
| | | | FSREDNLHTHQRTHTGEKPTGKK | | | |
| | | | TS | | | |
| gggtagggc | GGG TAG | 1084 | LEPGEKPYKCPECGKSFSRSDKL | 1633 | X₁X₂X₃X₄X₅X₆X₇X₈X₉CX₁₀X₁₁CX₁₂X₁₃X₁₄X₁₅X₁₆RSDKLTEHX₁₇X₁₈X₁₉ | 2182 |
| aggtggccg | GGC AGG | | TEHQRTHTGEKPYKCPECGKSFS | | HX₂₀X₂₁X₂₂X₂₃X₂₄X₈X₉CX₁₀X₁₁CX₁₂X₁₃X₁₄X₁₅X₁₆RNDTLTEHX₁₇X₁₈ | |
| cgg | TGG CCG | | RNDTLTEHQRTHTGEKPYKCPEC | | X₁₉HX₂₀X₂₁X₂₂X₂₃X₂₄X₈X₉CX₁₀X₁₁CX₁₂X₁₃X₁₄X₁₅X₁₆RSDHLTTHX₁₇ | |
| | CGG | | GKSFSRSDHLTTHQRTHTGEKPY | | X₁₈X₁₉HX₂₀X₂₁X₂₂X₂₃X₂₄X₈X₉CX₁₀X₁₁CX₁₂X₁₃X₁₄X₁₅X₁₆RSDHLTNH | |
| | | | KCPECGKSFSRSDHLTNHQRTHT | | X₁₇X₁₈X₁₉HX₂₀X₂₁X₂₂X₂₃X₂₄X₈X₉CX₁₀X₁₁CX₁₂X₁₃X₁₄X₁₅X₁₆DPGHLV | |
| | | | GEKPYKCPECGKSFSDPGHLVRH | | RHX₁₇X₁₈X₁₉HX₂₀X₂₁X₂₂X₂₃X₂₄X₈X₉CX₁₀X₁₁CX₁₂X₁₃X₁₄X₁₅X₁₆REDN | |
| | | | QRTHTGEKPYKCPECGKSFSRED | | LHTHX₁₇X₁₈X₁₉HX₂₀X₂₁X₂₂X₂₃X₂₄X₈X₉CX₁₀X₁₁CX₁₂X₁₃X₁₄X₁₅X₁₆RS | |
| | | | NLHTHQRTHTGEKPYKCPECGKS | | DKLVRHX₁₇X₁₈X9HX₂₀X₂₁X₂₂X₂₃X₂₄X₂₅X₂₆X₂₇X₂₈X₂₉X₃₀ | |
| | | | FSRSDKLVRHQRTHTGEKPTGKK | | | |
| | | | TS | | | |
| ccagggtag | CCA GGG | 1085 | LEPGEKPYKCPECGKSFSRNDTL | 1634 | X₁X₂X₃X₄X₅X₆X₇X₈X₉CX₁₀X₁₁CX₁₂X₁₃X₁₄X₁₅X₁₆RNDTLTEHX₁₇X₁₈X₁₉ | 2183 |
| ggcaggtgg | TAG GGC | | TEHQRTHTGEKPYKCPECGKSFS | | HX₂₀X₂₁X₂₂X₂₃X₂₄X₈X₉CX₁₀X₁₁CX₁₂X₁₃X₁₄X₁₅X₁₆RSDHLTTHX₁₇X₁₈ | |
| ccg | AGG TGG | | RSDHLTTHQRTHTGEKPYKCPEC | | X₁₉HX₂₀X₂₁X₂₂X₂₃X₂₄X₈X₉CX₁₀X₁₁CX₁₂X₁₃X₁₄X₁₅X₁₆RSDHLTNHX₁₇ | |
| | CCG | | GKSFSRSDHLTNHQRTHTGEKPY | | X₁₈X₁₉HX₂₀X₂₁X₂₂X₂₃X₂₄X₈X₉CX₁₀X₁₁CX₁₂X₁₃X₁₄X₁₅X₁₆DPGHLVRH | |
| | | | KCPECGKSFSDPGHLVRHQRTHT | | X₁₇X₁₈X₁₉HX₂₀X₂₁X₂₂X₂₃X₂₄X₈X₉CX₁₀X₁₁CX₁₂X₁₃X₁₄X₁₅X₁₆REDNLH | |
| | | | GEKPYKCPECGKSFSREDNLHTH | | THX₁₇X₁₈X₁₉HX₂₀X₂₁X₂₂X₂₃X₂₄X₈X₉CX₁₀X₁₁CX₁₂X₁₃X₁₄X₁₅X₁₆RSDK | |
| | | | QRTHTGEKPYKCPECGKSFSRSD | | LVRHX₁₇X₁₈X₁₉HX₂₀X₂₁X₂₂X₂₃X₂₄X₈X₉CX₁₀X₁₁CX₁₂X₁₃X₁₄X₁₅X₁₆TS | |
| | | | KLVRHQRTHTGEKPYKCPECGKS | | HSLTEHX₁₇X₁₈X₁₉HX₂₀X₂₁X₂₂X₂₃X₂₄X₂₅X₂₆X₂₇X₂₈X₂₉X₃₀ | |
| | | | FSTSHSLTEHQRTHTGEKPTGKK | | | |
| | | | TS | | | |
| gcggagggc | GCG GAG | 1086 | LEPGEKPYKCPECGKSFSRSDKL | 1635 | X₁X₂X₃X₄X₅X₆X₇X₈X₉CX₁₀X₁₁CX₁₂X₁₃X₁₄X₁₅X₁₆RSDKLTEHX₁₇X₁₈X₁₉ | 2184 |
| gggggcctt | GGC GGG | | TEHQRTHTGEKPYKCPECGKSFS | | HX₂₀X₂₁X₂₂X₂₃X₂₄X₈X₉CX₁₀X₁₁CX₁₂X₁₃X₁₄X₁₅X₁₆TTGALTEHX₁₇X₁₈ | |
| cgg | GGC CTT | | TTGALTEHQRTHTGEKPYKCPEC | | X₁₉HX₂₀X₂₁X₂₂X₂₃X₂₄X₈X₉CX₁₀X₁₁CX₁₂X₁₃X₁₄X₁₅X₁₆DPGHLVRHX₁₇ | |
| | CGG | | GKSFSDPGHLVRHQRTHTGEKPY | | X₁₈X₁₉HX₂₀X₂₁X₂₂X₂₃X₂₄X₈X₉CX₁₀X₁₁CX₁₂X₁₃X₁₄X₁₅X₁₆RSDKLVRH | |
| | | | KCPECGKSFSRSDKLVRHQRTHT | | X₁₇X₁₈X₁₉HX₂₀X₂₁X₂₂X₂₃X₂₄X₈X₉CX₁₀X₁₁CX₁₂X₁₃X₁₄X₁₅X₁₆DPGHLV | |
| | | | GEKPYKCPECGKSFSDPGHLVRH | | RHX₁₇X₁₈X₁₉HX₂₀X₂₁X₂₂X₂₃X₂₄X₈X₉CX₁₀X₁₁CX₁₂X₁₃X₁₄X₁₅X₁₆RSDN | |
| | | | QRTHTGEKPYKCPECGKSFSRSD | | LVRHX₁₇X₁₈X₁₉HX₂₀X₂₁X₂₂X₂₃X₂₄X₈X₉CX₁₀X₁₁CX₁₂X₁₃X₁₄X₁₅X₁₆RS | |
| | | | NLVRHQRTHTGEKPYKCPECGKS | | DDLVRHX₁₇X₁₈X₁₉HX₂₀X₂₁X₂₂X₂₃X₂₄X₂₅X₂₆X₂₇X₂₈X₂₉X₃₀ | |
| | | | FSRSDDLVRHQRTHTGEKPTGKK | | | |
| | | | TS | | | |
| gaaaggaag | GAA AGG | 1087 | LEPGEKPYKCPECGKSFSQSGDL | 1636 | X₁X₂X₃X₄X₅X₆X₇X₈X₉CX₁₀X₁₁CX₁₂X₁₃X₁₄X₁₅X₁₆QSGDLRRHX₁₇X₁₈X₁₉ | 2185 |
| gcagagagg | AAG GCA | | RRHQRTHTGEKPYKCPECGKSFS | | HX₂₀X₂₁X₂₂X₂₃X₂₄X₈X₉CX₁₀X₁₁CX₁₂X₁₃X₁₄X₁₅X₁₆RSDHLTNHX₁₇X₁₈ | |
| gca | gag AGG | | RSDHLTNHQRTHTGEKPYKCPEC | | X₁₉HX₂₀X₂₁X₂₂X₂₃X₂₄X₈X₉CX₁₀X₁₁CX₁₂X₁₃X₁₄X₁₅X₁₆RSDNLVRHX₁₇ | |
| | GCA | | GKSFSRSDNLVRHQRTHTGEKPY | | X₁₈X₁₉HX₂₀X₂₁X₂₂X₂₃X₂₄X₈X₉CX₁₀X₁₁CX₁₂X₁₃X₁₄X₁₅X₁₆QSGDLRRH | |
| | | | KCPECGKSFSQSGDLRRHQRTHT | | X₁₇X₁₈X₁₉HX₂₀X₂₁X₂₂X₂₃X₂₄X₈X₉CX₁₀X₁₁CX₁₂X₁₃X₁₄X₁₅X₁₆RKDNLK | |
| | | | GEKPYKCPECGKSFSRKDNLKNH | | NHX₁₇X₁₈X₁₉HX₂₀X₂₁X₂₂X₂₃X₂₄X₈X₉CX₁₀X₁₁CX₁₂X₁₃X₁₄X₁₅X₁₆RSDH | |
| | | | QRTHTGEKPYKCPECGKSFSRSD | | LTNHX₁₇X₁₈X₁₉HX₂₀X₂₁X₂₂X₂₃X₂₄X₈X₉CX₁₀X₁₁CX₁₂X₁₃X₁₄X₁₅X₁₆QS | |
| | | | HLTNHQRTHTGEKPYKCPECGKS | | SNLVRHX₁₇X₁₈X₁₉HX₂₀X₂₁X₂₂X₂₃X₂₄X₂₅X₂₆X₂₇X₂₈X₂₉X₃₀ | |
| | | | FSQSSNLVRHQRTHTGEKPTGKK | | | |
| | | | TS | | | |
| ggcagtggg | GGC AGT | 1088 | LEPGEKPYKCPECGKSFSDPGHL | 1637 | X₁X₂X₃X₄X₅X₆X₇X₈X₉CX₁₀X₁₁CX₁₂X₁₃X₁₄X₁₅X₁₆DPGHLVRHX₁₇X₁₈X₁₉ | 2186 |
| agggcggag | ggg AGG | | VRHQRTHTGEKPYKCPECGKSFS | | HX₂₀X₂₁X₂₂X₂₃X₂₄X₈X₉CX₁₀X₁₁CX₁₂X₁₃X₁₄X₁₅X₁₆RSDNLVRHX₁₇X₁₈ | |
| ggc | GCG GAG | | RSDNLVRHQRTHTGEKPYKCPEC | | X₁₉HX₂₀X₂₁X₂₂X₂₃X₂₄X₈X₉CX₁₀X₁₁CX₁₂X₁₃X₁₄X₁₅X₁₆RSDDLVRHX₁₇ | |
| | GGC | | GKSFSRSDDLVRHQRTHTGEKPY | | X₁₈X₁₉HX₂₀X₂₁X₂₂X₂₃X₂₄X₈X₉CX₁₀X₁₁CX₁₂X₁₃X₁₄X₁₅X₁₆RSDHLTNH | |
| | | | KCPECGKSSRSDHLVTNHQRTHT | | X₁₇X₁₈X₁₉HX₂₀X₂₁X₂₂X₂₃X₂₄X₈X₉CX₁₀X₁₁CX₁₂X₁₃X₁₄X₁₅X₁₆RSDKLV | |
| | | | GEKPYKCPECGKSFSRSDKLVRH | | RHX₁₇X₁₈X₁₉HX₂₀X₂₁X₂₂X₂₃X₂₄X₈X₉CX₁₀X₁₁CX₁₂X₁₃X₁₄X₁₅X₁₆HRTT | |
| | | | QRTHTGEKPYKCPECGKSFSHRT | | LTNHX₁₇X₁₈X₁₉HX₂₀X₂₁X₂₂X₂₃X₂₄X₈X₉CX₁₀X₁₁CX₁₂X₁₃X₁₄X₁₅X₁₆DP | |
| | | | TLTNHQRTHTGEKPYKCPECGKS | | GHLVRHX₁₇X₁₈X₁₉HX₂₀X₂₁X₂₂X₂₃X₂₄X₂₅X₂₆X₂₇X₂₈X₂₉X₃₀ | |
| | | | FSDPGHLVRHQRTHTGEKPTGKK | | | |
| | | | TS | | | |
| agtgggagg | AGT ggg | 1089 | LEPGEKPYKCPECGKSFSRSDKL | 1638 | X₁X₂X₃X₄X₅X₆X₇X₈X₉CX₁₀X₁₁CX₁₂X₁₃X₁₄X₁₅X₁₆RSDKLVRHX₁₇X₁₈X₁₉ | 2187 |
| gcggagggc | AGG GCG | | VRHQRTHTGEKPYKCPECGKSFS | | HX₂₀X₂₁X₂₂X₂₃X₂₄X₈X₉CX₁₀X₁₁CX₁₂X₁₃X₁₄X₁₅X₁₆DPGHLVRHX₁₇X₁₈ | |
| ggg | GAG GGC | | DPGHLVRHQRTHTGEKPYKCPEC | | X₁₉HX₂₀X₂₁X₂₂X₂₃X₂₄X₈X₉CX₁₀X₁₁CX₁₂X₁₃X₁₄X₁₅X₁₆RSDNLVRHX₁₇ | |
| | GGG | | GKSFSRSDNLVRHQRTHTGEKPY | | X₁₈X₁₉HX₂₀X₂₁X₂₂X₂₃X₂₄X₈X₉CX₁₀X₁₁CX₁₂X₁₃X₁₄X₁₅X₁₆RSDDLVRH | |
| | | | KCPECGKSFSRSDDLVRHQRTHT | | X₁₇X₁₈X₁₉HX₂₀X₂₁X₂₂X₂₃X₂₄X₈X₉CX₁₀X₁₁CX₁₂X₁₃X₁₄X₁₅X₁₆RSDHLT | |
| | | | GEKPYKCPECGKSFSRSDHLTNH | | NHX₁₇X₁₈X₁₉HX₂₀X₂₁X₂₂X₂₃X₂₄X₈X₉CX₁₀X₁₁CX₁₂X₁₃X₁₄X₁₅X₁₆RSDK | |
| | | | QRTHTGEKPYKCPECGKSFSRSD | | LVRHX₁₇X₁₈X₁₉HX₂₀X₂₁X₂₂X₂₃X₂₄X₈X₉CX₁₀X₁₁CX₁₂X₁₃X₁₄X₁₅X₁₆HR | |
| | | | KLVRHQRTHTGEKPYKCPECGKS | | TTLTNHX₁₇X₁₈X₁₉HX₂₀X₂₁X₂₂X₂₃X₂₄X₂₅X₂₆X₂₇X₂₈X₂₉X₃₀ | |
| | | | FSHRTTLTNHQRTHTGEKPTGKK | | | |
| | | | TS | | | |
| agggcggag | AGG GCG | 1090 | LEPGEKPYKCPECGKSFSTTGAL | 1639 | X₁X₂X₃X₄X₅X₆X₇X₈X₉CX₁₀X₁₁CX₁₂X₁₃X₁₄X₁₅X₁₆TTGALTEHX₁₇X₁₈X₁₉ | 2188 |
| ggcgggggc | GAG GGC | | TEHQRTHTGEKPYKCPECGKSFS | | HX₂₀X₂₁X₂₂X₂₃X₂₄X₈X₉CX₁₀X₁₁CX₁₂X₁₃X₁₄X₁₅X₁₆DPGHLVRHX₁₇X₁₈ | |
| ctt | GGG GGC | | DPGHLVRHQRTHTGEKPYKCPEC | | X₁₉HX₂₀X₂₁X₂₂X₂₃X₂₄X₈X₉CX₁₀X₁₁CX₁₂X₁₃X₁₄X₁₅X₁₆RSDKLVRHX₁₇ | |
| | CTT | | GKSFSRSDKLVRHQRTHTGEKPY | | X₁₈X₁₉HX₂₀X₂₁X₂₂X₂₃X₂₄X₈X₉CX₁₀X₁₁CX₁₂X₁₃X₁₄X₁₅X₁₆DPGHLVRH | |
| | | | KCPECGKSFSDPGHLVRHQRTHT | | X₁₇X₁₈X₁₉HX₂₀X₂₁X₂₂X₂₃X₂₄X₈X₉CX₁₀X₁₁CX₁₂X₁₃X₁₄X₁₅X₁₆RSDNLV | |
| | | | GEKYKCPEVCGKSFSRSDNLVRH | | RHX₁₇X₁₈X₁₉HX₂₀X₂₁X₂₂X₂₃X₂₄X₈X₉CX₁₀X₁₁CX₁₂X₁₃X₁₄X₁₅X₁₆RSDD | |
| | | | QRTHTGEKPYKCPECGKSFSRSD | | LVRHX₁₇X₁₈X₁₉HX₂₀X₂₁X₂₂X₂₃X₂₄X₈X₉CX₁₀X₁₁CX₁₂X₁₃X₁₄X₁₅X₁₆RS | |
| | | | DLVRHQRTHTGEKPYKCPECGKS | | DHLTNHX₁₇X₁₈X₁₉HX₂₀X₂₁X₂₂X₂₃X₂₄X₂₅X₂₆X₂₇X₂₈X₂₉X₃₀ | |
| | | | FSRSDHLTNHQRTHTGEKPTGKK | | | |
| | | | TS | | | |
| aaggcagag | AAG GCA | 1091 | LEPGEKPYKCPECGKSFSQRAHL | 1640 | X₁X₂X₃X₄X₅X₆X₇X₈X₉CX₁₀X₁₁CX₁₂X₁₃X₁₄X₁₅X₁₆QRAHLERHX₁₇X₁₈X₁₉ | 2189 |
| agggcactg | gag AGG | | ERHQRTHTGEKPYKCPECGKSFS | | HX₂₀X₂₁X₂₂X₂₃X₂₄X₈X₉CX₁₀X₁₁CX₁₂X₁₃X₁₄X₁₅X₁₆RNDALTEHX₁₇X₁₈ | |
| gga | GCA CTG | | RNDALTEHQRTHTGEKPYKCPEC | | X₁₉HX₂₀X₂₁X₂₂X₂₃X₂₄X₈X₉CX₁₀X₁₁CX₁₂X₁₃X₁₄X₁₅X₁₆QSGDLRRHX₁₇ | |
| | GGA | | GKSFSQSGDLRRHQRTHTGEKPY | | X₁₈X₁₉HX₂₀X₂₁X₂₂X₂₃X₂₄X₈X₉CX₁₀X₁₁CX₁₂X₁₃X₁₄X₁₅X₁₆RSDHLTNH | |
| | | | KCPECGKSFSRSDHLTNHQRTHT | | X₁₇X₁₈X₁₉HX₂₀X₂₁X₂₂X₂₃X₂₄X₈X₉CX₁₀X₁₁CX₁₂X₁₃X₁₄X₁₅X₁₆RSDNLV | |
| | | | GEKPYKCPECGKSFSRSDNLVRH | | RHX₁₇X₁₈X₁₉HX₂₀X₂₁X₂₂X₂₃X₂₄X₈X₉CX₁₀X₁₁CX₁₂X₁₃X₁₄X₁₅X₁₆QSGD | |
| | | | QRTHTGEKPYKCPECGKSFSQSG | | LRRHX₁₇X₁₈X₁₉HX₂₀X₂₁X₂₂X₂₃X₂₄X₈X₉CX₁₀X₁₁CX₁₂X₁₃X₁₄X₁₅X₁₆RK | |
| | | | DLRRHQRTHTGEKPYKCPECGKS | | DNLKNHX₁₇X₁₈X₁₉HX₂₀X₂₁X₂₂X₂₃X₂₄X₂₅X₂₆X₂₇X₂₈X₂₉X₃₀ | |
| | | | FSRKDNLKNHQRTHTGEKPTGKK | | | |
| | | | TS | | | |
| ccgcggcgt | CCG CGG | 102 | LEPGEKPYKCPECGKSFSRSDNL | 103 | X₁X₂X₃X₄X₅X₆X₇X₈X₉CX₁₀X₁₁CX₁₂X₁₃X₁₄X₁₅X₁₆RSDNLVRHX₁₇X₁₈X₁₉ | 313 |
| ggaggcagg | CGT GGA | | VRHQRTHTGEKPYKCPECGKSFS | | HX₂₀X₂₁X₂₂X₂₃X₂₄X₈X₉CX₁₀X₁₁CX₁₂X₁₃X₁₄X₁₅X₁₆RSDHLTNHX₁₇X₁₈ | |
| gag | GGC AGG | | RSDHLTNHQRTHTGEKPYKCPEC | | X₁₉HX₂₀X₂₁X₂₂X₂₃X₂₄X₈X₉CX₁₀X₁₁CX₁₂X₁₃X₁₄X₁₅X₁₆DPGHLVRHX₁₇ | |
| | GAG | | GKSFSDPGHLVRHQRTHTGEKPY | | X₁₈X₁₉HX₂₀X₂₁X₂₂X₂₃X₂₄X₈X₉CX₁₀X₁₁CX₁₂X₁₃X₁₄X₁₅X₁₆QRAHLERH | |
| | | | KCPECGKSFSQRAHLERHQRTHT | | X₁₇X₁₈X₁₉HX₂₀X₂₁X₂₂X₂₃X₂₄X₈X₉CX₁₀X₁₁CX₁₂X₁₃X₁₄X₁₅X₁₆SRRTCR | |
| | | | GEKPYKCPECGKSFSSRRTCRAH | | AHX₁₇X₁₈X₁₉HX₂₀X₂₁X₂₂X₂₃X₂₄X₈X₉CX₁₀X₁₁CX₁₂X₁₃X₁₄X₁₅X₁₆RSDK | |
| | | | QRTHTGEKPYKCPECGKSFSRSD | | LTEHX₁₇X₁₈X₁₉HX₂₀X₂₁X₂₂X₂₃X₂₄X₈X₉CX₁₀X₁₁CX₁₂X₁₃X₁₄X₁₅X₁₆RN | |
| | | | KLTEHQRTHTGEKPYKCPECGKS | | DTLTEHX₁₇X₁₈X₁₉HX₂₀X₂₁X₂₂X₂₃X₂₄X₂₅X₂₆X₂₇X₂₈X₂₉X₃₀ | |
| | | | FSRNDTLTEHQRTHTGEKPTGKK | | | |
| | | | TS | | | |
| cgtggaggc | CGT GGA | 1092 | LEPGEKPYKCPECGKSFSRSDDL | 1641 | X₁X₂X₃X₄X₅X₆X₇X₈X₉CX₁₀X₁₁CX₁₂X₁₃X₁₄X₁₅X₁₆RSDDLVRHX₁₇X₁₈X₁₉ | 2190 |
| agggagaat | GGC AGG | | VRHQRTHTGEKPYKCPECGKSFS | | HX₂₀X₂₁X₂₂X₂₃X₂₄X₈X₉CX₁₀X₁₁CX₁₂X₁₃X₁₄X₁₅X₁₆TTGNLTVHX₁₇X₁₈ | |
| gcg | gag AAT | | TTGNLTVHQRTHTGEKPYKCPEC | | X₁₉HX₂₀X₂₁X₂₂X₂₃X₂₄X₈X₉CX₁₀X₁₁CX₁₂X₁₃X₁₄X₁₅X₁₆RSDNLVRHX₁₇ | |
| | GCG | | GKSFSRSDNLVRHQRTHTGEKPY | | X₁₈X₁₉HX₂₀X₂₁X₂₂X₂₃X₂₄X₈X₉CX₁₀X₁₁CX₁₂X₁₃X₁₄X₁₅X₁₆RSDHLTNH | |
| | | | KCPECGKSFSRSDHLTNHQRTHT | | X₁₇X₁₈X₁₉HX₂₀X₂₁X₂₂X₂₃X₂₄X₈X₉CX₁₀X₁₁CX₁₂X₁₃X₁₄X₁₅X₁₆DPGHLV | |
| | | | GEKPYKCPECGKSFSDPGHLVRH | | RHX₁₇X₁₈X₁₉HX₂₀X₂₁X₂₂X₂₃X₂₄X₈X₉CX₁₀X₁₁CX₁₂X₁₃X₁₄X₁₅X₁₆QRAH | |
| | | | QRTHTGEKPYKCPECGKSFSQRA | | LERHX₁₇X₁₈X₁₉HX₂₀X₂₁X₂₂X₂₃X₂₄X₈X₉CX₁₀X₁₁CX₁₂X₁₃X₁₄X₁₅X₁₆SR | |
| | | | HLERHQRTHTGEKPYKCPECGKS | | RTCRAHX₁₇X₁₈X₁₉HX₂₀X₂₁X₂₂X₂₃X₂₄X₂₅X₂₆X₂₇X₂₈X₂₉X₃₀ | |
| | | | FSSRRTCRAHQRTHTGEKPTGKK | | | |
| | | | TS | | | |
| gcagagagg | GCA gag | 1093 | LEPGEKPYKCPECGKSFSQRAHL | 1642 | X₁X₂X₃X₄X₅X₆X₇X₈X₉CX₁₀X₁₁CX₁₂X₁₃X₁₄X₁₅X₁₆QRAHLERHX₁₇X₁₈X₁₉ | 2191 |
| gcactggga | AGG GCA | | ERHQRTHTGEKPYKCPECGKSFS | | HX₂₀X₂₁X₂₂X₂₃X₂₄X₈X₉CX₁₀X₁₁CX₁₂X₁₃X₁₄X₁₅X₁₆QRAHLERHX₁₇X₁₈ | |
| gga | CTG GGA | | QRAHLERHQRTHTGEKPYKCPEC | | X₁₉HX₂₀X₂₁X₂₂X₂₃X₂₄X₈X₉CX₁₀X₁₁CX₁₂X₁₃X₁₄X₁₅X₁₆RNDALTEHX₁₇ | |
| | GGA | | GKSFSRNDALTEHQRTHTGEKPY | | X₁₈X₁₉HX₂₀X₂₁X₂₂X₂₃X₂₄X₈X₉CX₁₀X₁₁CX₁₂X₁₃X₁₄X₁₅X₁₆QSGDLRRH | |
| | | | KCPECGKSFSQSGDLRRHQRTHT | | X₁₇X₁₈X₁₉HX₂₀X₂₁X₂₂X₂₃X₂₄X₈X₉CX₁₀X₁₁CX₁₂X₁₃X₁₄X₁₅X₁₆RSDHLT | |
| | | | GEKPYKCPECGKSFSRSDHLTNH | | NHX₁₇X₁₈X₁₉HX₂₀X₂₁X₂₂X₂₃X₂₄X₈X₉CX₁₀X₁₁CX₁₂X₁₃X₁₄X₁₅X₁₆RSDN | |
| | | | QRTHTGEKPYKCPECGKSFSRSD | | LVRHX₁₇X₁₈X₁₉HX₂₀X₂₁X₂₂X₂₃X₂₄X₈X₉CX₁₀X₁₁CX₁₂X₁₃X₁₄X₁₅X₁₆QS | |
| | | | NLVRHQRTHTGEKPYKCPECGKS | | GDLRRHX₁₇X₁₈X₁₉HX₂₀X₂₁X₂₂X₂₃X₂₄X₂₅X₂₆X₂₇X₂₈X₂₉X₃₀ | |
| | | | FSQSGDLRRHQRTHTGEKPTGKK | | | |
| | | | TS | | | |
| gagagggca | gag AGG | 1094 | LEPGEKPYKCPECGKSFSDPGHL | 1643 | X₁X₂X₃X₄X₅X₆X₇X₈X₉CX₁₀X₁₁CX₁₂X₁₃X₁₄X₁₅X₁₆DPGHLVRHX₁₇X₁₈X₁₉ | 2192 |
| ctgggagga | GCA CTG | | VRHQRTHTGEKPYKCPECGKSFS | | HX₂₀X₂₁X₂₂X₂₃X₂₄X₈X₉CX₁₀X₁₁CX₁₂X₁₃X₁₄X₁₅X₁₆QRAHLERHX₁₇X₁₈ | |
| ggc | GGA GGA | | QRAHLERHQRTHTGEKPYKCPEC | | X₁₉HX₂₀X₂₁X₂₂X₂₃X₂₄X₈X₉CX₁₀X₁₁CX₁₂X₁₃X₁₄X₁₅X₁₆QRAHLERHX₁₇ | |
| | GGC | | GKSFSQRAHLERHQRTHTGEKPY | | X₁₈X₁₉HX₂₀X₂₁X₂₂X₂₃X₂₄X₈X₉CX₁₀X₁₁CX₁₂X₁₃X₁₄X₁₅X₁₆RNDALTEH | |
| | | | KCPECGKSFSRNDALTEHQRTHT | | X₁₇X₁₈X₁₉HX₂₀X₂₁X₂₂X₂₃X₂₄X₈X₉CX₁₀X₁₁CX₁₂X₁₃X₁₄X₁₅X₁₆QSGDLR | |
| | | | GEKPYKCPECGKSFSQSGDLRRH | | RHX₁₇X₁₈X₁₉HX₂₀X₂₁X₂₂X₂₃X₂₄X₈X₉CX₁₀X₁₁CX₁₂X₁₃X₁₄X₁₅X₁₆RSDH | |
| | | | QRTHTGEKPYKCPECGKSFSRSD | | LTNHX₁₇X₁₈X₁₉HX₂₀X₂₁X₂₂X₂₃X₂₄X₈X₉CX₁₀X₁₁CX₁₂X₁₃X₁₄X₁₅X₁₆RS | |
| | | | HLTNHQRTHTGEKPYKCPECGKS | | DNLVRHX₁₇X₁₈X₁₉HX₂₀X₂₁X₂₂X₂₃X₂₄X₂₅X₂₆X₂₇X₂₈X₂₉X₃₀ | |
| | | | FSRSDNLVRHQRTHTGEKPTGKK | | | |
| | | | TS | | | |
| aggtggccg | AGG TGG | 1095 | LEPGEKPYKCPECGKSFSDPGHL | 1644 | X₁X₂X₃X₄X₅X₆X₇X₈X₉CX₁₀X₁₁CX₁₂X₁₃X₁₄X₁₅X₁₆DPGHLVRHX₁₇X₁₈X₁₉ | 2193 |
| cggcgtgga | CCG CGG | | VRHQRTHTGEKPYKCPECGKSFS | | HX₂₀X₂₁X₂₂X₂₃X₂₄X₈X₉CX₁₀X₁₁CX₁₂X₁₃X₁₄X₁₅X₁₆QRAHLERHX₁₇X₁₈ | |
| ggc | CGT GGA | | QRAHLERHQRTHTGEKPYKCPEC | | X₁₉HX₂₀X₂₁X₂₂X₂₃X₂₄X₈X₉CX₁₀X₁₁CX₁₂X₁₃X₁₄X₁₅X₁₆SRRTCRAHX₁₇ | |
| | GGC | | GKSFSSRRTCRAHQRTHTGEKPY | | X₁₈X₁₉HX₂₀X₂₁X₂₂X₂₃X₂₄X₈X₉CX₁₀X₁₁CX₁₂X₁₃X₁₄X₁₅X₁₆RSDKLTEH | |
| | | | KCPECGKSFSRSDKLTEHQRTHT | | X₁₇X₁₈X₁₉HX₂₀X₂₁X₂₂X₂₃X₂₄X₈X₉CX₁₀X₁₁CX₁₂X₁₃X₁₄X₁₅X₁₆RNDTLT | |
| | | | GEKPYKCPECGKSFSRNDTLTEH | | EHX₁₇X₁₈X₁₉HX₂₀X₂₁X₂₂X₂₃X₂₄X₈X₉CX₁₀X₁₁CX₁₂X₁₃X₁₄X₁₅X₁₆RSDH | |
| | | | QRTHTGEKPYKCPECGKSFSRSD | | LTTHX₁₇X₁₈X₁₉HX₂₀X₂₁X₂₂X₂₃X₂₄X₈X₉CX₁₀X₁₁CX₁₂X₁₃X₁₄X₁₅X₁₆RS | |
| | | | HLTTHQRTHTGEKPYKCPECGKS | | DHLTNHX₁₇X₁₈X₁₉HX₂₀X₂₁X₂₂X₂₃X₂₄X₂₅X₂₆X₂₇X₂₈X₂₉X₃₀ | |
| | | | FSRSDHLTNHQRTHTGEKPTGKK | | | |
| | | | TS | | | |
| tggccgcgg | TGG CCG | 1096 | LEPGEKPYKCPECGKSFSRSDHL | 1645 | X₁X₂X₃X₄X₅X₆X₇X₈X₉CX₁₀X₁₁CX₁₂X₁₃X₁₄X₁₅X₁₆RSDHLTNHX₁₇X₁₈X₁₉ | 2194 |
| cgtggaggc | CGG CGT | | TNHQRTHTGEKPYKCPECGKSFS | | HX₂₀X₂₁X₂₂X₂₃X₂₄X₈X₉CX₁₀X₁₁CX₁₂X₁₃X₁₄X₁₅X₁₆DPGHLVRHX₁₇X₁₈ | |
| agg | GGA GGC | | DPGHLVRHQRTHTGEKPYKCPEC | | X₁₉HX₂₀X₂₁X₂₂X₂₃X₂₄X₈X₉CX₁₀X₁₁CX₁₂X₁₃X₁₄X₁₅X₁₆QRAHLERHX₁₇ | |
| | AGG | | GKSFSQRAHLERHQRTHTGEKPY | | X₁₈X₁₉HX₂₀X₂₁X₂₂X₂₃X₂₄X₈X₉CX₁₀X₁₁CX₁₂X₁₃X₁₄X₁₅X₁₆SRRTCRAH | |
| | | | KCPECGKSFSSRRTCRAHQRTHT | | X₁₇X₁₈X₁₉HX₂₀X₂₁X₂₂X₂₃X₂₄X₈X₉CX₁₀X₁₁CX₁₂X₁₃X₁₄X₁₅X₁₆RSDKLT | |
| | | | GEKPYKCPECGKSFSRSDKLTEH | | EHX₁₇X₁₈X₁₉HX₂₀X₂₁X₂₂X₂₃X₂₄X₈X₉CX₁₀X₁₁CX₁₂X₁₃X₁₄X₁₅X₁₆RNDT | |
| | | | QRTHTGEKPYKCPECGKSFSRND | | LTEHX₁₇X₁₈X₁₉HX₂₀X₂₁X₂₂X₂₃X₂₄X₈X₉CX₁₀X₁₁CX₁₂X₁₃X₁₄X₁₅X₁₆RS | |
| | | | TLTEHQRTHTGEKPYKCPECGKS | | DHLTTHX₁₇X₁₈X₁₉HX₂₀X₂₁X₂₂X₂₃X₂₄X₂₅X₂₆X₂₇X₂₈X₂₉X₃₀ | |
| | | | FSRSDHLTTHQRTHTGEKPTGKK | | | |
| | | | TS | | | |
| ggcaggtgg | GGC AGG | 1097 | LEPGEKPYKCPECGKSFSQRAHL | 1646 | X₁X₂X₃X₄X₅X₆X₇X₈X₉CX₁₀X₁₁CX₁₂X₁₃X₁₄X₁₅X₁₆QRAHLERHX₁₇X₁₈X₁₉ | 2195 |
| ccgcggcgt | TGG CCG | | ERHQRTHTGEKPYKCPECGKSFS | | HX₂₀X₂₁X₂₂X₂₃X₂₄X₈X₉CX₁₀X₁₁CX₁₂X₁₃X₁₄X₁₅X₁₆SRRTCRAHX₁₇X₁₈ | |
| gga | CGG CGT | | SRRTCRAHQRTHTGEKPYKCPEC | | X₁₉HX₂₀X₂₁X₂₂X₂₃X₂₄X₈X₉CX₁₀X₁₁CX₁₂X₁₃X₁₄X₁₅X₁₆RSDKLTEHX₁₇ | |
| | GGA | | GKSFSRSDKLTEHQRTHTGEKPY | | X₁₈X₁₉HX₂₀X₂₁X₂₂X₂₃X₂₄X₈X₉CX₁₀X₁₁CX₁₂X₁₃X₁₄X₁₅X₁₆RNDTLTEH | |
| | | | KCPECGKSFSRNDTLTEHQRTHT | | X₁₇X₁₈X₁₉HX₂₀X₂₁X₂₂X₂₃X₂₄X₈X₉CX₁₀X₁₁CX₁₂X₁₃X₁₄X₁₅X₁₆RSDHLT | |
| | | | GEKPYKCPECGKSFSRSDHLTTH | | THX₁₇X₁₈X₁₉HX₂₀X₂₁X₂₂X₂₃X₂₄X₈X₉CX₁₀X₁₁CX₁₂X₁₃X₁₄X₁₅X₁₆RSDH | |
| | | | QRTHTGEKPYKCPECGKSFSRSD | | LTNHX₁₇X₁₈X₁₉HX₂₀X₂₁X₂₂X₂₃X₂₄X₈X₉CX₁₀X₁₁CX₁₂X₁₃X₁₄X₁₅X₁₆DP | |
| | | | HLTNHQRTHTGEKPYKCPECGKS | | GHLVRHX₁₇X₁₈X₁₉HX₂₀X₂₁X₂₂X₂₃X₂₄X₂₅X₂₆X₂₇X₂₈X₂₉X₃₀ | |
| | | | FSDPGHLVRHQRTHTGEKPTGKK | | | |
| | | | TS | | | |
| ggaggcagg | GGA GGC | 1098 | LEPGEKPYKCPECGKSFSTHLDL | 1647 | X₁X₂X₃X₄X₅X₆X₇X₈X₉CX₁₀X₁₁CX₁₂X₁₃X₁₄X₁₅X₁₆THLDLIRHX₁₇X₁₈X₁₉ | 2196 |
| gagaatgcg | AGG gag | | IRHQRTHTGEKPYKCPECGKSFS | | HX₂₀X₂₁X₂₂X₂₃X₂₄X₈X₉CX₁₀X₁₁CX₁₂X₁₃X₁₄X₁₅X₁₆RSDDLVRHX₁₇X₁₈ | |
| act | AAT gcg | | RSDDLVRHQRTHTGEKPYKCPEC | | X₁₉HX₂₀X₂₁X₂₂X₂₃X₂₄X₈X₉CX₁₀X₁₁CX₁₂X₁₃X₁₄X₁₅X₁₆TTGNLTVHX₁₇ | |
| | ACT | | GKSFSTTGNLTVHQRTHTGEKPY | | X₁₈X₁₉HX₂₀X₂₁X₂₂X₂₃X₂₄X₈X₉CX₁₀X₁₁CX₁₂X₁₃X₁₄X₁₅X₁₆RSDNLVRH | |
| | | | KCPECGKSFSRSDNLVRHQRTHT | | X₁₇X₁₈X₁₉HX₂₀X₂₁X₂₂X₂₃X₂₄X₈X₉CX₁₀X₁₁CX₁₂X₁₃X₁₄X₁₅X₁₆RSDHLT | |
| | | | GEKPYKCPECGKSFSRSDHLTNH | | NHX₁₇X₁₈X₁₉HX₂₀X₂₁X₂₂X₂₃X₂₄X₈X₉CX₁₀X₁₁CX₁₂X₁₃X₁₄X₁₅X₁₆DPGH | |
| | | | QRTHTGEKPYKCPECGKSFSDPG | | LVRHX₁₇X₁₈X₁₉HX₂₀X₂₁X₂₂X₂₃X₂₄X₈X₉CX₁₀X₁₁CX₁₂X₁₃X₁₄X₁₅X₁₆QR | |
| | | | HLVRHQRTHTGEKPYKCPECGKS | | AHLERHX₁₇X₁₃X₁₉HX₂₀X₂₁X₂₂X₂₃X₂₄X₂₅X₂₆X₂₇X₂₈X₂₉X₃₀ | |
| | | | FSQRAHLERHQRTHTGEKPTGKK | | | |
| | | | TS | | | |
| gcactggga | GCA CTG | 1099 | LEPGEKPYKCPECGKSFSRSDKL | 1648 | X₁X₂X₃X₄X₅X₆X₇X₈X₉CX₁₀X₁₁CX₁₂X₁₃X₁₄X₁₅X₁₆RSDKLVRHX₁₇X₁₈X₁₉ | 2197 |
| ggaggcagt | GGA GGA | | VRHQRTHTGEKPYKCPECGKSFS | | HX₂₀X₂₁X₂₂X₂₃X₂₄X₈X₉CX₁₀X₁₁CX₁₂X₁₃X₁₄X₁₅X₁₆HRTTLTNHX₁₇X₁₈ | |
| ggg | GGC AGT | | HRTTLTNHQRTHTGEKPYKCPEC | | X₁₉HX₂₀X₂₁X₂₂X₂₃X₂₄X₈X₉CX₁₀X₁₁CX₁₂X₁₃X₁₄X₁₅X₁₆DPGHLVRHX₁₇ | |
| | GGG | | GKSFSDPGHLVRHQRTHTGEKPY | | X₁₈X₁₉HX₂₀X₂₁X₂₂X₂₃X₂₄X₈X₉CX₁₀X₁₁CX₁₂X₁₃X₁₄X₁₅X₁₆QRAHLERH | |
| | | | KCPECGKSFSQRAHLERHQRTHT | | X₁₇X₁₈X₁₉HX₂₀X₂₁X₂₂X₂₃X₂₄X₈X₉CX₁₀X₁₁CX₁₂X₁₃X₁₄X₁₅X₁₆QRAHLE | |
| | | | GEKPYKCPECGKSFSQRAHLERH | | RHX₁₇X₁₈X₁₉HX₂₀X₂₁X₂₂X₂₃X₂₄X₈X₉CX₁₀X₁₁CX₁₂X₁₃X₁₄X₁₅X₁₆RNDA | |
| | | | QRTHTGEKPYKCPECGKSFSRND | | LTEHX₁₇X₁₈X₁₉HX₂₀X₂₁X₂₂X₂₃X₂₄X₈X₉CX₁₀X₁₁CX₁₂X₁₃X₁₄X₁₅X₁₆QS | |
| | | | ALTEHQRTHTGEKPYKCPECGKS | | GDLRRHX₁₇X₁₈X₁₉HX₂₀X₂₁X₂₂X₂₃X₂₄X₂₅X₂₆X₂₇X₂₈X₂₉X₃₀ | |
| | | | FSQSGDLRRHQRTHTGEKPTGKK | | | |
| | | | TS | | | |
| ggaggcagt | GGA GGC | 1100 | LEPGEKPYKCPECGKSFSRSDNL | 1649 | X₁X₂X₃X₄X₅X₆X₇X₈X₉CX₁₀X₁₁CX₁₂X₁₃X₁₄X₁₅X₁₆RSDNLVRHX₁₇X₁₈X₁₉ | 2198 |
| gggagggcg | AGT ggg | | VRHQRTHTGEKPYKCPECGKSFS | | HX₂₀X₂₁X₂₂X₂₃X₂₄X₈X₉CX₁₀X₁₁CX₁₂X₁₃X₁₄X₁₅X₁₆RSDDLVRHX₁₇X₁₈ | |
| gag | AGG GCG | | RSDDLVRHQRTHTGEKPYKCPEC | | X₁₉HX₂₀X₂₁X₂₂X₂₃X₂₄X₈X₉CX₁₀X₁₁CX₁₂X₁₃X₁₄X₁₅X₁₆RSDHLTNHX₁₇ | |
| | GAG | | GKSFSRSDHLTNHQRTHTGEKPY | | X₁₈X₁₉HX₂₀X₂₁X₂₂X₂₃X₂₄X₈X₉CX₁₀X₁₁CX₁₂X₁₃X₁₄X₁₅X₁₆RSDKLVRH | |
| | | | KCPECGKSFSRSDKLVRHQRTHT | | X₁₇X₁₈X₁₉HX₂₀X₂₁X₂₂X₂₃X₂₄X₈X₉CX₁₀X₁₁CX₁₂X₁₃X₁₄X₁₅X₁₆HRTTLT | |
| | | | GEKPYKCPECGKSFSHRTTLTNH | | NHX₁₇X₁₈X₁₉HX₂₀X₂₁X₂₂X₂₃X₂₄X₈X₉CX₁₀X₁₁CX₁₂X₁₃X₁₄X₁₅X₁₆DPGH | |
| | | | QRTHTGEKPYKCPECGKSFSDPG | | LVRHX₁₇X₁₈X₁₉HX₂₀X₂₁X₂₂X₂₃X₂₄X₈X₉CX₁₀X₁₁CX₁₂X₁₃X₁₄X₁₅X₁₆QR | |
| | | | HLVRHQRTHTGEKPYKCPECGKS | | AHLERHX₁₇X₁₈X₁₉HX₂₀X₂₁X₂₂X₂₃X₂₄X₂₅X₂₆X₂₇X₂₈X₂₉X₃₀ | |
| | | | FSQRAHLERHQRTHTGEKPTGKK | | | |
| | | | TS | | | |
| agggcactg | AGG GCA | 1101 | LEPGEKPYKCPECGKSFSHRTTL | 1650 | X₁X₂X₃X₄X₅X₆X₇X₈X₉CX₁₀X₁₁CX₁₂X₁₃X₁₄X₁₅X₁₆HRTTLTNHX₁₇X₁₈X₁₉ | 2199 |
| ggaggaggc | CTG GGA | | TNHQRTHTGEKPYKCPECGKSFS | | HX₂₀X₂₁X₂₂X₂₃X₂₄X₈X₉CX₁₀X₁₁CX₁₂X₁₃X₁₄X₁₅X₁₆DPGHLVRHX₁₇X₁₈ | |
| agt | GGA GGC | | DPGHLVRHQRTHTGEKPYKCPEC | | X₁₉HX₂₀X₂₁X₂₂X₂₃X₂₄X₈X₉CX₁₀X₁₁CX₁₂X₁₃X₁₄X₁₅X₁₆QRAHLERHX₁₇ | |
| | AGT | | GKSFSQRAHLERHQRTHTGEKPY | | X₁₈X₁₉HX₂₀X₂₁X₂₂X₂₃X₂₄X₈X₉CX₁₀X₁₁CX₁₂X₁₃X₁₄X₁₅X₁₆QRAHLERH | |
| | | | KCPECGKSFSQRAHLERHQRTHT | | X₁₇X₁₈X₁₉HX₂₀X₂₁X₂₂X₂₃X₂₄X₈X₉CX₁₀X₁₁CX₁₂X₁₃X₁₄X₁₅X₁₆RNDALT | |
| | | | GEKPYKCPECGKSFSRNDALTEH | | EHX₁₇X₁₈X₁₉HX₂₀X₂₁X₂₂X₂₃X₂₄X₈X₉CX₁₀X₁₁CX₁₂X₁₃X₁₄X₁₅X₁₆QSGD | |
| | | | QRTHTGEKPYKCPECGKSFSQSG | | LRRHX₁₇X₁₈X₁₉HX₂₀X₂₁X₂₂X₂₃X₂₄X₈X₉CX₁₀X₁₁CX₁₂X₁₃X₁₄X₁₅X₁₆RS | |
| | | | DLRRHQRTHTGEKPYKCPECGKS | | DHLTNHX₁₇X₁₈X₁₉HX₂₀X₂₁X₂₂X₂₃X₂₄X₂₅X₂₆X₂₇X₂₈X₂₉X₃₀ | |
| | | | FSRSDHLTNHQRTHTGEKPTGKK | | | |
| | | | TS | | | |
| ctgggagga | CTG GGA | 1102 | LEPGEKPYKCPECGKSFSRSDHL | 1651 | X₁X₂X₃X₄X₅X₆X₇X₈X₉CX₁₀X₁₁CX₁₂X₁₃X₁₄X₁₅X₁₆RSDHLTNHX₁₇X₁₈X₁₉ | 2200 |
| ggcagtggg | GGA GGC | | TNHQRTHTGEKPYKCPECGKSFS | | HX₂₀X₂₁X₂₂X₂₃X₂₄X₈X₉CX₁₀X₁₁CX₁₂X₁₃X₁₄X₁₅X₁₆RSDKLVRHX₁₇X₁₈ | |
| agg | AGT ggg | | RSDKLVRHQRTHTGEKPYKCPEC | | X₁₉HX₂₀X₂₁X₂₂X₂₃X₂₄X₈X₉CX₁₀X₁₁CX₁₂X₁₃X₁₄X₁₅X₁₆HRTTLTNHX₁₇ | |
| | AGG | | GKSFSHRTTLTNHQRTHTGEKPY | | X₁₈X₁₉HX₂₀X₂₁X₂₂X₂₃X₂₄X₈X₉CX₁₀X₁₁CX₁₂X₁₃X₁₄X₁₅X₁₆DPGHLVRH | |
| | | | KCPECGKSFSDPGHLVRHQRTHT | | X₁₇X₁₈X₁₉HX₂₀X₂₁X₂₂X₂₃X₂₄X₈X₉CX₁₀X₁₁CX₁₂X₁₃X₁₄X₁₅X₁₆QRAHLE | |
| | | | GEKPYKCPECGKSFSQRAHLERH | | RHX₁₇X₁₈X₁₉HX₂₀X₂₁X₂₂X₂₃X₂₄X₈X₉CX₁₀X₁₁CX₁₂X₁₃X₁₄X₁₅X₁₆QRAH | |
| | | | QRTHTGEKPYKCPECGKSFSQRA | | LERHX₁₇X₁₈X₁₉HX₂₀X₂₁X₂₂X₂₃X₂₄X₈X₉CX₁₀X₁₁CX₁₂X₁₃X₁₄X₁₅X₁₆RN | |
| | | | HLERHQRTHTGEKPYKCPECGKS | | DALTEHX₁₇X₁₈X₁₉HX₂₀X₂₁X₂₂X₂₃X₂₄X₂₅X₂₆X₂₇X₂₈X₂₉X₃₀ | |
| | | | FSRNDALTEHQRTHTGEKPTGKK | | | |
| | | | TS | | | |
| ggtgggcgc | GGT ggg | 1103 | LEPGEKPYKCPECGKSFSDPGHL | 1652 | X₁X₂X₃X₄X₅X₆X₇X₈X₉CX₁₀X₁₁CX₁₂X₁₃X₁₄X₁₅X₁₆DPGHLVRHX₁₇X₁₈X₁₉ | 2201 |
| ccagggtag | CGC CCA | | VRHQRTHTGEKPYKCPECGKSFS | | HX₂₀X₂₁X₂₂X₂₃X₂₄X₈X₉CX₁₀X₁₁CX₁₂X₁₃X₁₄X₁₅X₁₆REDNLHTHX₁₇X₁₈ | |
| ggc | GGG TAG | | REDNLHTHQRTHTGEKPYKCPEC | | X₁₉HX₂₀X₂₁X₂₂X₂₃X₂₄X₈X₉CX₁₀X₁₁CX₁₂X₁₃X₁₄X₁₅X₁₆RSDKLVRHX₁₇ | |
| | GGC | | GKSFSRSDKLVRHQRTHTGEKPY | | X₁₈X₁₉HX₂₀X₂₁X₂₂X₂₃X₂₄X₈X₉CX₁₀X₁₁CX₁₂X₁₃X₁₄X₁₅X₁₆TSHSLTEH | |
| | | | KCPECGKSFSTSHSLTEHQRTHT | | X₁₇X₁₈X₁₉HX₂₀X₂₁X₂₂X₂₃X₂₄X₈X₉CX₁₀X₁₁CX₁₂X₁₃X₁₄X₁₅X₁₆HTGHLL | |
| | | | GEKPYKCPECGKSFSHTGHLLEH | | EHX₁₇X₁₈X₁₉HX₂₀X₂₁X₂₂X₂₃X₂₄X₈X₉CX₁₀X₁₁CX₁₂X₁₃X₁₄X₁₅X₁₆RSDK | |
| | | | QRTHTGEKPYKCPECGKSFSRSD | | LVRHX₁₇X₁₈X₁₉HX₂₀X₂₁X₂₂X₂₃X₂₄X₈X₉CX₁₀X₁₁CX₁₂X₁₃X₁₄X₁₅X₁₆TS | |
| | | | KLVRHQRTHTGEKPYKCPECGKS | | GHLVRHX₁₇X₁₈X₁₉HX₂₀X₂₁X₂₂X₂₃X₂₄X₂₅X₂₆X₂₇X₂₈X₂₉X₃₀ | |
| | | | FSTSGHLVRHQRTHTGEKPTGKK | | | |
| | | | TS | | | |
| cggggtggg | CGG GGT | 1104 | LEPGEKPYKCPECGKSFSREDNL | 1653 | X₁X₂X₃X₄X₅X₆X₇X₈X₉CX₁₀X₁₁CX₁₂X₁₃X₁₄X₁₅X₁₆REDNLHTHX₁₇X₁₈X₁₉ | 2202 |
| cgcccaggg | ggg CGC | | HTHQRTHTGEKPYKCPECGKSFS | | HX₂₀X₂₁X₂₂X₂₃X₂₄X₈X₉CX₁₀X₁₁CX₁₂X₁₃X₁₄X₁₅X₁₆RSDKLVRHX₁₇X₁₈ | |
| tag | CCA GGG | | RSDKLVRHQRTHTGEKPYKCPEC | | X₁₉HX₂₀X₂₁X₂₂X₂₃X₂₄X₈X₉CX₁₀X₁₁CX₁₂X₁₃X₁₄X₁₅X₁₆TSHSLTEHX₁₇ | |
| | TAG | | GKSFSTSHSLTEHQRTHTGEKPY | | X₁₈X₁₉HX₂₀X₂₁X₂₂X₂₃X₂₄X₈X₉CX₁₀X₁₁CX₁₂X₁₃X₁₄X₁₅X₁₆HTGHLLEH | |
| | | | KCPECGKSFSHTGHLLEHQRTHT | | X₁₇X₁₈X₁₉HX₂₀X₂₁X₂₂X₂₃X₂₄X₈X₉CX₁₀X₁₁CX₁₂X₁₃X₁₄X₁₅X₁₆RSDKLV | |
| | | | GEKPYKCPECGKSFSRSDKLVRH | | RHX₁₇X₁₈X₁₉HX₂₀X₂₁X₂₂X₂₃X₂₄X₈X₉CX₁₀X₁₁CX₁₂X₁₃X₁₄X₁₅X₁₆TSGH | |
| | | | QRTHTGEKPYKCPECGKSFSTSG | | LVRHX₁₇X₁₈X₁₉HX₂₀X₂₁X₂₂X₂₃X₂₄X₈X₉CX₁₀X₁₁CX₁₂X₁₃X₁₄X₁₅X₁₆RS | |
| | | | HLVRHQRTHTGEKPYKCPECGKS | | DKLTEHX₁₇X₁₈X₁₉HX₂₀X₂₁X₂₂X₂₃X₂₄X₂₅X₂₆X₂₇X₂₈X₂₉X₃₀ | |
| | | | FSRSDKLTEHQRTHTGEKPTGKK | | | |
| | | | TS | | | |
| ggcgggggc | GGC GGG | 1105 | LEPGEKPYKCPECGKSFSRSDKL | 1654 | X₁X₂X₃X₄X₅X₆X₇X₈X₉CX₁₀X₁₁CX₁₂X₁₃X₁₄X₁₅X₁₆RSDKLVRHX₁₇X₁₈X₁₉ | 2203 |
| cttcggggt | GGC CTT | | VRHQRTHTGEKPYKCPECGKSFS | | HX₂₀X₂₁X₂₂X₂₃X₂₄X₈X₉CX₁₀X₁₁CX₁₂X₁₃X₁₄X₁₅X₁₆TSGHLVRHX₁₇X₁₈ | |
| ggg | CGG GGT | | TSGHLVRHQRTHTGEKPYKCPEC | | X₁₉HX₂₀X₂₁X₂₂X₂₃X₂₄X₈X₉CX₁₀X₁₁CX₁₂X₁₃X₁₄X₁₅X₁₆RSDKLTEHX₁₇ | |
| | GGG | | GKSFSRSDKLTEHQRTHTGEKPY | | X₁₈X₁₉HX₂₀X₂₁X₂₂X₂₃X₂₄X₈X₉CX₁₀X₁₁CX₁₂X₁₃X₁₄X₁₅X₁₆TTGALTEH | |
| | | | KCPECGKSFSTTGALTEHQRTHT | | X₁₇X₁₈X₁₉HX₂₀X₂₁X₂₂X₂₃X₂₄X₈X₉CX₁₀X₁₁CX₁₂X₁₃X₁₄X₁₅X₁₆DPGHLV | |
| | | | GEKPYKCPECGKSFSDPGHLVRH | | RHX₁₇X₁₈X₁₉HX₂₀X₂₁X₂₂X₂₃X₂₄X₈X₉CX₁₀X₁₁CX₁₂X₁₃X₁₄X₁₅X₁₆RSDK | |
| | | | QRTHTGEKPYKCPECGKSFSRSD | | LVRHX₁₇X₁₈X₁₉HX₂₀X₂₁X₂₂X₂₃X₂₄X₈X₉CX₁₀X₁₁CX₁₂X₁₃X₁₄X₁₅X₁₆DP | |
| | | | KLVRHQRTHTGEKPYKCPECGKS | | GHLVRHX₁₇X₁₈X₁₉HX₂₀X₂₁X₂₂X₂₃X₂₄X₂₅X₂₆X₂₇X₂₈X₂₉X₃₀ | |
| | | | FSDPGHLVRHQRTHTGEKPTGKK | | | |
| | | | TS | | | |
| gagggcggg | GAG GGC | 1106 | LEPGEKPYKCPECGKSFSTSGHL | 1655 | X₁X₂X₃X₄X₅X₆X₇X₈X₉CX₁₀X₁₁CX₁₂X₁₃X₁₄X₁₅X₁₆TSGHLVRHX₁₇X₁₈X₁₉ | 2204 |
| ggccttcgg | GGG GGC | | VRHQRTHTGEKPYKCPECGKSFS | | HX₂₀X₂₁X₂₂X₂₃X₂₄X₈X₉CX₁₀X₁₁CX₁₂X₁₃X₁₄X₁₅X₁₆RSDKLTEHX₁₇X₁₈ | |
| ggt | CTT CGG | | RSDKLTEHQRTHTGEKPYKCPEC | | X₁₉HX₂₀X₂₁X₂₂X₂₃X₂₄X₈X₉CX₁₀X₁₁CX₁₂X₁₃X₁₄X₁₅X₁₆TTGALTEHX₁₇ | |
| | GGT | | GKSFSTTGALTEHQRTHTGEKPY | | X₁₈X₁₉HX₂₀X₂₁X₂₂X₂₃X₂₄X₈X₉CX₁₀X₁₁CX₁₂X₁₃X₁₄X₁₅X₁₆DPGHLVRH | |
| | | | KCPECGKSFSDPGHLVRHQRTHT | | X₁₇X₁₈X₁₉HX₂₀X₂₁X₂₂X₂₃X₂₄X₈X₉CX₁₀X₁₁CX₁₂X₁₃X₁₄X₁₅X₁₆RSDKLV | |
| | | | GEKPYKCPECGKSFSRSDKLVRH | | RHX₁₇X₁₈X₁₉HX₂₀X₂₁X₂₂X₂₃X₂₄X₈X₉CX₁₀X₁₁CX₁₂X₁₃X₁₄X₁₅X₁₆DPGH | |
| | | | QRTHTGEKPYKCPECGKSFSDPG | | LVRHX₁₇X₁₈X₁₉HX₂₀X₂₁X₂₂X₂₃X₂₄X₈X₉CX₁₀X₁₁CX₁₂X₁₃X₁₄X₁₅X₁₆RS | |
| | | | HLVRHQRTHTGEKPYKCPECGKS | | DNLVRHX₁₇X₁₈X₁₉HX₂₀X₂₁X₂₂X₂₃X₂₄X₂₅X₂₆X₂₇X₂₈X₂₉X₃₀ | |
| | | | FSRSDNLVRHQRTHTGEKPTGKK | | | |
| | | | TS | | | |
| gggggcctt | GGG GGC | 1107 | LEPGEKPYKCPECGKSFSHTGHL | 1656 | X₁X₂X₃X₄X₅X₆X₇X₈X₉CX₁₀X₁₁CX₁₂X₁₃X₁₄X₁₅X₁₆HTGHLLEHX₁₇X₁₈X₁₉ | 2205 |
| cggggtggg | CTT CGG | | LEHQRTHTGEKPYKCPECGKSFS | | HX₂₀X₂₁X₂₂X₂₃X₂₄X₈X₉CX₁₀X₁₁CX₁₂X₁₃X₁₄X₁₅X₁₆RSDKLVRHX₁₇X₁₈ | |
| cgc | GGT ggg | | RSDKLVRHQRTHTGEKPYKCPEC | | X₁₉HX₂₀X₂₁X₂₂X₂₃X₂₄X₈X₉CX₁₀X₁₁CX₁₂X₁₃X₁₄X₁₅X₁₆TSGHLVRHX₁₇ | |
| | CGC | | GKSFSTSGHLVRHQRTHTGEKPY | | X₁₈X₁₉HX₂₀X₂₁X₂₂X₂₃X₂₄X₈X₉CX₁₀X₁₁CX₁₂X₁₃X₁₄X₁₅X₁₆RSDKLTEH | |
| | | | KCPECGKSFSRSDKLTEHQRTHT | | X₁₇X₁₈X₁₉HX₂₀X₂₁X₂₂X₂₃X₂₄X₈X₉CX₁₀X₁₁CX₁₂X₁₃X₁₄X₁₅X₁₆TTGALT | |
| | | | GEKPYKCPECGKSFSTTGALTEH | | EHX₁₇X₁₈X₁₉HX₂₀X₂₁X₂₂X₂₃X₂₄X₈X₉CX₁₀X₁₁CX₁₂X₁₃X₁₄X₁₅X₁₆DPGH | |
| | | | QRTHTGEKPYKCPECGKSFSDPG | | LVRHX₁₇X₁₈X₁₉HX₂₀X₂₁X₂₂X₂₃X₂₄X₈X₉CX₁₀X₁₁CX₁₂X₁₃X₁₄X₁₅X₁₆RS | |
| | | | HLVRHQRTHTGEKPYKCPECGKS | | DKLVRHX₁₇X₁₈X₁₉HX₂₀X₂₁X₂₂X₂₃X₂₄X₂₅X₂₆X₂₇X₂₈X₂₉X₃₀ | |
| | | | FSRSDKLVRHQRTHTGEKPTGKK | | | |
| | | | TS | | | |
| ggaggaggc | GGA GGA | 1108 | LEPGEKPYKCPECGKSFSRSDDL | 1657 | X₁X₂X₃X₄X₅X₆X₇X₈X₉CX₁₀X₁₁CX₁₂X₁₃X₁₄X₁₅X₁₆RSDDLVRHX₁₇X₁₈X₁₉ | 2206 |
| agtgggagg | GGC AGT | | VRHQRTHTGEKPYKCPECGKSFS | | HX₂₀X₂₁X₂₂X₂₃X₂₄X₈X₉CX₁₀X₁₁CX₁₂X₁₃X₁₄X₁₅X₁₆RSDHLTNHX₁₇X₁₈ | |
| gcg | ggg AGG | | RSDHLTNHQRTHTGEKPYKCPEC | | X₁₉HX₂₀X₂₁X₂₂X₂₃X₂₄X₈X₉CX₁₀X₁₁CX₁₂X₁₃X₁₄X₁₅X₁₆RSDKLVRHX₁₇ | |
| | GCG | | GKSFSRSDKLVRHQRTHTGEKPY | | X₁₈X₁₉HX₂₀X₂₁X₂₂X₂₃X₂₄X₈X₉CX₁₀X₁₁CX₁₂X₁₃X₁₄X₁₅X₁₆HRTTLTNH | |
| | | | KCPECGKSFSHRTTLTNHQRTHT | | X₁₇X₁₈X₁₉HX₂₀X₂₁X₂₂X₂₃X₂₄X₈X₉CX₁₀X₁₁CX₁₂X₁₃X₁₄X₁₅X₁₆DPGHLV | |
| | | | GEKPYKCPECGKSFSDPGHLVRH | | RHX₁₇X₁₈X₁₉HX₂₀X₂₁X₂₂X₂₃X₂₄X₈X₉CX₁₀X₁₁CX₁₂X₁₃X₁₄X₁₅X₁₆QRAH | |
| | | | QRTHTGEKPYKCPECGKSFSQRA | | LERHX₁₇X₁₈X₁₉HX₂₀X₂₁X₂₂X₂₃X₂₄X₈X₉CX₁₀X₁₁CX₁₂X₁₃X₁₄X₁₅X₁₆QR | |
| | | | HLERHQRTHTGEKPYKCPECGKS | | AHLERHX₁₇X₁₈X₁₉HX₂₀X₂₁X₂₂X₂₃X₂₄X₂₅X₂₆X₂₇X₂₈X₂₉X₃₀ | |
| | | | FSQRAHLERHQRTHTGEKPTGKK | | | |
| | | | TS | | | |
| ggccttcgg | GGC CTT | 1109 | LEPGEKPYKCPECGKSFSTSHSL | 1658 | X₁X₂X₃X₄X₅X₆X₇X₈X₉CX₁₀X₁₁CX₁₂X₁₃X₁₄X₁₅X₁₆TSHSLTEHX₁₇X₁₈X₁₉ | 2207 |
| ggtgggcgc | CGG GGT | | TEHQRTHTGEKPYKCPECGKSFS | | HX₂₀X₂₁X₂₂X₂₃X₂₄X₈X₉CX₁₀X₁₁CX₁₂X₁₃X₁₄X₁₅X₁₆HTGHLLEHX₁₇X₁₈ | |
| cca | ggg CGC | | HTGHLLEHQRTHTGEKPYKCPEC | | X₁₉HX₂₀X₂₁X₂₂X₂₃X₂₄X₈X₉CX₁₀X₁₁CX₁₂X₁₃X₁₄X₁₅X₁₆RSDKLVRHX₁₇ | |
| | CCA | | GKSFSRSDKLVRHQRTHTGEKPY | | X₁₈X₁₉HX₂₀X₂₁X₂₂X₂₃X₂₄X₈X₉CX₁₀X₁₁CX₁₂X₁₃X₁₄X₁₅X₁₆TSGHLVRH | |
| | | | KCPECGKSFSTSGHLVRHQRTHT | | X₁₇X₁₈X₁₉HX₂₀X₂₁X₂₂X₂₃X₂₄X₈X₉CX₁₀X₁₁CX₁₂X₁₃X₁₄X₁₅X₁₆RSDKLT | |
| | | | GEKPYKCPECGKSFSRSDKLTEH | | EHX₁₇X₁₈X₁₉HX₂₀X₂₁X₂₂X₂₃X₂₄X₈X₉CX₁₀X₁₁CX₁₂X₁₃X₁₄X₁₅X₁₆TTGA | |
| | | | QRTHTGEKPYKCPECGKSFSTTG | | LTEHX₁₇X₁₈X₁₉HX₂₀X₂₁X₂₂X₂₃X₂₄X₈X₉CX₁₀X₁₁CX₁₂X₁₃X₁₄X₁₅X₁₆DP | |
| | | | ALTEHQRTHTGEKPYKCPECGKS | | GHLVRHX₁₇X₁₈X₁₉HX₂₀X₂₁X₂₂X₂₃X₂₄X₂₅X₂₆X₂₇X₂₈X₂₉X₃₀ | |
| | | | FSDPGHLVRHQRTHTGEKPTGKK | | | |
| | | | TS | | | |
| cttcggggt | CTT CGG | 1110 | LEPGEKPYKCPECGKSFSRSDKL | 1659 | X₁X₂X₃X₄X₅X₆X₇X₈X₉CX₁₀X₁₁CX₁₂X₁₃X₁₄X₁₅X₁₆RSDKLVRHX₁₇X₁₈X₁₉ | 2208 |
| gggcgccca | GGT ggg | | VRHQRTHTGEKPYKCPECGKSFS | | HX₂₀X₂₁X₂₂X₂₃X₂₄X₈X₉CX₁₀X₁₁CX₁₂X₁₃X₁₄X₁₅X₁₆TSHSLTEHX₁₇X₁₈ | |
| ggg | CGC CCA | | TSHSLTEHQRTHTGEKPYKCPEC | | X₁₉HX₂₀X₂₁X₂₂X₂₃X₂₄X₈X₉CX₁₀X₁₁CX₁₂X₁₃X₁₄X₁₅X₁₆HTGHLLEHX₁₇ | |
| | GGG | | GKSFSHTGHLLEHQRTHTGEKPY | | X₁₈X₁₉HX₂₀X₂₁X₂₂X₂₃X₂₄X₈X₉CX₁₀X₁₁CX₁₂X₁₃X₁₄X₁₅X₁₆RSDKLVRH | |
| | | | KCPECGKSFSRSDKLVRHQRTHT | | X₁₇X₁₈X₁₉HX₂₀X₂₁X₂₂X₂₃X₂₄X₈X₉CX₁₀X₁₁CX₁₂X₁₃X₁₄X₁₅X₁₆TSGHLV | |
| | | | GEKPYKCPECGKSFSTSGHLVRH | | RHX₁₇X₁₈X₁₉HX₂₀X₂₁X₂₂X₂₃X₂₄X₈X₉CX₁₀X₁₁CX₁₂X₁₃X₁₄X₁₅X₁₆RSDK | |
| | | | QRTHTGEKPYKCPECGKSFSRSD | | LTEHX₁₇X₁₈X₁₉HX₂₀X₂₁X₂₂X₂₃X₂₄X₈X₉CX₁₀X₁₁CX₁₂X₁₃X₁₄X₁₅X₁₆TT | |
| | | | KLTEHQRTHTGEKPYKCPECGKS | | GALTEHX₁₇X₁₈X₁₉HX₂₀X₂₁X₂₂X₂₃X₂₄X₂₅X₂₆X₂₇X₂₈X₂₉X₃₀ | |
| | | | FSTTGALTEHQRTHTGEKPTGKK | | | |
| | | | TS | | | |
| cagagaggg | CAG AGA | 1111 | LEPGEKPYKCPECGKSFSRSDNL | 1660 | X₁X₂X₃X₄X₅X₆X₇X₈X₉CX₁₀X₁₁CX₁₂X₁₃X₁₄X₁₅X₁₆RSDNLVRHX₁₇X₁₈X₁₉ | 2209 |
| cactgggag | ggg CAC | | VRHQRTHTGEKPYKCPECGKSFS | | HX₂₀X₂₁X₂₂X₂₃X₂₄X₈X₉CX₁₀X₁₁CX₁₂X₁₃X₁₄X₁₅X₁₆RSDNLVRHX₁₇X₁₈ | |
| gag | TGG GAG | | RSDNLVRHQRTHTGEKPYKCPEC | | X₁₉HX₂₀X₂₁X₂₂X₂₃X₂₄X₈X₉CX₁₀X₁₁CX₁₂X₁₃X₁₄X₁₅X₁₆RSDHLTTHX₁₇ | |
| | GAG | | GKSFSRSDHLTTHQRTHTGEKPY | | X₁₈X₁₉HX₂₀X₂₁X₂₂X₂₃X₂₄X₈X₉CX₁₀X₁₁CX₁₂X₁₃X₁₄X₁₅X₁₆SKKALTEH | |
| | | | KCPECGKSFSSKKALTEHQRTHT | | X₁₇X₁₈X₁₉HX₂₀X₂₁X₂₂X₂₃X₂₄X₈X₉CX₁₀X₁₁CX₁₂X₁₃X₁₄X₁₅X₁₆RSDKLV | |
| | | | GEKPYKCPECGKSFSRSDKLVRH | | RHX₁₇X₁₈X₁₉HX₂₀X₂₁X₂₂X₂₃X₂₄X₈X₉CX₁₀X₁₁CX₁₂X₁₃X₁₄X₁₅X₁₆QLAH | |
| | | | QRTHTGEKPYKCPECGKSFSQLA | | LRAHX₁₇X₁₈X₁₉HX₂₀X₂₁X₂₂X₂₃X₂₄X₈X₉CX₁₀X₁₁CX₁₂X₁₃X₁₄X₁₅X₁₆RA | |
| | | | HLRAHQRTHTGEKPYKCPECGKS | | DNLTEHX₁₇X₁₈X₁₉HX₂₀X₂₁X₂₂X₂₃X₂₄X₂₅X₂₆X₂₇X₂₈X₂₉X₃₀ | |
| | | | FSRADNLTEHQRTHTGEKPTGKK | | | |
| | | | TS | | | |
| agagggcac | AGA ggg | 1112 | LEPGEKPYKCPECGKSFSQSGDL | 1661 | X₁X₂X₃X₄X₅X₆X₇X₈X₉CX₁₀X₁₁CX₁₂X₁₃X₁₄X₁₅X₁₆QSGDLRRHX₁₇X₁₈X₁₉ | 2210 |
| tgggaggag | CAC TGG | | RRHQRTHTGEKPYKCPECGKSFS | | HX₂₀X₂₁X₂₂X₂₃X₂₄X₈X₉CX₁₀X₁₁CX₁₂X₁₃X₁₄X₁₅X₁₆RSDNLVRHX₁₇X₁₈ | |
| gca | GAG GAG | | RSDNLVRHQRTHTGEKPYKCPEC | | X₁₉HX₂₀X₂₁X₂₂X₂₃X₂₄X₈X₉CX₁₀X₁₁CX₁₂X₁₃X₁₄X₁₅X₁₆RSDNLVRHX₁₇ | |
| | GCA | | GKSFSRSDNLVRHQRTHTGEKPY | | X₁₈X₁₉HX₂₀X₂₁X₂₂X₂₃X₂₄X₈X₉CX₁₀X₁₁CX₁₂X₁₃X₁₄X₁₅X₁₆RSDHLTTH | |
| | | | KCPECGKSFSRSDHLTTHQRTHT | | X₁₇X₁₈X₁₉HX₂₀X₂₁X₂₂X₂₃X₂₄X₈X₉CX₁₀X₁₁CX₁₂X₁₃X₁₄X₁₅X₁₆SKKALT | |
| | | | GEKPYKCPECGKSFSSKKALTEH | | EHX₁₇X₁₈X₁₉HX₂₀X₂₁X₂₂X₂₃X₂₄X₈X₉CX₁₀X₁₁CX₁₂X₁₃X₁₄X₁₅X₁₆RSDK | |
| | | | QRTHTGEKPYKCPECGKSFSRSD | | LVRHX₁₇X₁₈X₁₉HX₂₀X₂₁X₂₂X₂₃X₂₄X₈X₉CX₁₀X₁₁CX₁₂X₁₃X₁₄X₁₅X₁₆QL | |
| | | | KLVRHQRTHTGEKPYKCPECGKS | | AHLRAHX₁₇X₁₈X₁₉HX₂₀X₂₁X₂₂X₂₃X₂₄X₂₅X₂₆X₂₇X₂₈X₂₉X₃₀ | |
| | | | FSQLAHLRAHQRTHTGEKPTGKK | | | |
| | | | TS | | | |
| gggcactgg | ggg CAC | 1113 | LEPGEKPYKCPECGKSFSRSDEL | 1662 | X₁X₂X₃X₄X₅X₆X₇X₈X₉CX₁₀X₁₁CX₁₂X₁₃X₁₄X₁₅X₁₆RSDELVRHX₁₇X₁₈X₁₉ | 2211 |
| gaggaggca | TGG GAG | | VRHQRTHTGEKPYKCPECGKSFS | | HX₂₀X₂₁X₂₂X₂₃X₂₄X₈X₉CX₁₀X₁₁CX₁₂X₁₃X₁₄X₁₅X₁₆QSGDLRRHX₁₇X₁₈ | |
| gtg | GAG GCA | | QSGDLRRHQRTHTGEKPYKCPEC | | X₁₉HX₂₀X₂₁X₂₂X₂₃X₂₄X₈X₉CX₁₀X₁₁CX₁₂X₁₃X₁₄X₁₅X₁₆RSDNLVRHX₁₇ | |
| | GTG | | GKSFSRSDNLVRHQRTHTGEKPY | | X₁₈X₁₉HX₂₀X₂₁X₂₂X₂₃X₂₄X₈X₉CX₁₀X₁₁CX₁₂X₁₃X₁₄X₁₅X₁₆RSDNLVRH | |
| | | | KCPECGKSFSRSDNLVRHQRTHT | | X₁₇X₁₈X₁₉HX₂₀X₂₁X₂₂X₂₃X₂₄X₈X₉CX₁₀X₁₁CX₁₂X₁₃X₁₄X₁₅X₁₆RSDHLT | |
| | | | GEKPYKCPECGKSFSRSDHLTTH | | THX₁₇X₁₈X₁₉HX₂₀X₂₁X₂₂X₂₃X₂₄X₈X₉CX₁₀X₁₁CX₁₂X₁₃X₁₄X₁₅X₁₆SKKA | |
| | | | QRTHTGEKPYKCPECGKSFSSKK | | LTEHX₁₇X₁₈X₁₉HX₂₀X₂₁X₂₂X₂₃X₂₄X₈X₉CX₁₀X₁₁CX₁₂X₁₃X₁₄X₁₅X₁₆RS | |
| | | | ALTEHQRTHTGEKPYKCPECGKS | | DKLVRHX₁₇X₁₈X₁₉HX₂₀X₂₁X₂₂X₂₃X₂₄X₂₅X₂₆X₂₇X₂₈X₂₉X₃₀ | |
| | | | FSRSDKLVRHQRTHTGEKPTGKK | | | |
| | | | TS | | | |
| aggcagaga | AGG CAG | 1114 | LEPGEKPYKCPECGKSFSRSDNL | 1663 | X₁X₂X₃X₄X₅X₆X₇X₈X₉CX₁₀X₁₁CX₁₂X₁₃X₁₄X₁₅X₁₆RSDNLVRHX₁₇X₁₈X₁₉ | 2212 |
| gggcactgg | AGA ggg | | VRHQRTHTGEKPYKCPECGKSFS | | HX₂₀X₂₁X₂₂X₂₃X₂₄X₈X₉CX₁₀X₁₁CX₁₂X₁₃X₁₄X₁₅X₁₆RSDHLTTHX₁₇X₁₈ | |
| gag | CAC TGG | | RSDHLTTHQRTHTGEKPYKCPEC | | X₁₉HX₂₀X₂₁X₂₂X₂₃X₂₄X₈X₉CX₁₀X₁₁CX₁₂X₁₃X₁₄X₁₅X₁₆SKKALTEHX₁₇ | |
| | GAG | | GKSFSSKKALTEHQRTHTGEKPY | | X₁₈X₁₉HX₂₀X₂₁X₂₂X₂₃X₂₄X₈X₉CX₁₀X₁₁CX₁₂X₁₃X₁₄X₁₅X₁₆RSDKLVRH | |
| | | | KCPECGKSFSRSDKLVRHQRTHT | | X₁₇X₁₈X₁₉HX₂₀X₂₁X₂₂X₂₃X₂₄X₈X₉CX₁₀X₁₁CX₁₂X₁₃X₁₄X₁₅X₁₆QLAHLR | |
| | | | GEKPYKCPECGKSFSQLAHLRAH | | AHX₁₇X₁₈X₁₉HX₂₀X₂₁X₂₂X₂₃X₂₄X₈X₉CX₁₀X₁₁CX₁₂X₁₃X₁₄X₁₅X₁₆RADN | |
| | | | QRTHTGEKPYKCPECGKSFSRAD | | LTEHX₁₇X₁₈X₁₉HX₂₀X₂₁X₂₂X₂₃X₂₄X₈X₉CX₁₀X₁₁CX₁₂X₁₃X₁₄X₁₅X₁₆RS | |
| | | | NLTEHQRTHTGEKPYKCPECGKS | | DHLTNHX₁₇X₁₈X₁₉HX₂₀X₂₁X₂₂X₂₃X₂₄X₂₅X₂₆X₂₇X₂₈X₂₉X₃₀ | |
| | | | FSRSDHLTNHQRTHTGEKPTGKK | | | |
| | | | TS | | | |
| gaggaggca | GAG GAG | 1115 | LEPGEKPYKCPECGKSFSRSDKL | 1664 | X₁X₂X₃X₄X₅X₆X₇X₈X₉CX₁₀X₁₁CX₁₂X₁₃X₁₄X₁₅X₁₆RSDKLTEHX₁₇X₁₈X₁₉ | 2213 |
| gtgggaggg | GCA GTG | | TEHQRTHTGEKPYKCPECGKSFS | | HX₂₀X₂₁X₂₂X₂₃X₂₄X₈X₉CX₁₀X₁₁CX₁₂X₁₃X₁₄X₁₅X₁₆RSDKLVRHX₁₇X₁₈ | |
| cgg | GGA ggg | | RSDKLVRHQRTHTGEKPYKCPEC | | X₁₉HX₂₀X₂₁X₂₂X₂₃X₂₄X₈X₉CX₁₀X₁₁CX₁₂X₁₃X₁₄X₁₅X₁₆QRAHLERHX₁₇ | |
| | CGG | | GKSFSQRAHLERHQRTHTGEKPY | | X₁₈X₁₉HX₂₀X₂₁X₂₂X₂₃X₂₄X₈X₉CX₁₀X₁₁CX₁₂X₁₃X₁₄X₁₅X₁₆RSDELVRH | |
| | | | KCPECGKSFSRSDELVRHQRTHT | | X₁₇X₁₈X₁₉HX₂₀X₂₁X₂₂X₂₃X₂₄X₈X₉CX₁₀X₁₁CX₁₂X₁₃X₁₄X₁₅X₁₆QSGDLR | |
| | | | GEKPYKCPECGKSFSQSGDLRRH | | RHX₁₇X₁₈X₁₉HX₂₀X₂₁X₂₂X₂₃X₂₄X₈X₉CX₁₀X₁₁CX₁₂X₁₃X₁₄X₁₅X₁₆RSDN | |
| | | | QRTHTGEKPYKCPECGKSFSRSD | | LVRHX₁₇X₁₈X₁₉HX₂₀X₂₁X₂₂X₂₃X₂₄X₈X₉CX₁₀X₁₁CX₁₂X₁₃X₁₄X₁₅X₁₆RS | |
| | | | NLVRHQRTHTGEKPYKCPECGKS | | DNLVRHX₁₇X₁₈X₁₉HX₂₀X₂₁X₂₂X₂₃X₂₄X₂₅X₂₆X₂₇X₂₈X₂₉X₃₀ | |
| | | | FSRSDNLVRHQRTHTGEKPTGKK | | | |
| | | | TS | | | |
| tgggaggag | TGG GAG | 1116 | LEPGEKPYKCPECGKSFSRSDKL | 1665 | X₁X₂X₃X₄X₅X₆X₇X₈X₉CX₁₀X₁₁CX₁₂X₁₃X₁₄X₁₅X₁₆RSDKLVRHX₁₇X₁₈X₁₉ | 2214 |
| gcagtggga | GAG GCA | | VRHQRTHTGEKPYKCPECGKSFS | | HX₂₀X₂₁X₂₂X₂₃X₂₄X₈X₉CX₁₀X₁₁CX₁₂X₁₃X₁₄X₁₅X₁₆QRAHLERHX₁₇X₁₈ | |
| ggg | GTG GGA | | QRAHLERHQRTHTGEKPYKCPEC | | X₁₉HX₂₀X₂₁X₂₂X₂₃X₂₄X₈X₉CX₁₀X₁₁CX₁₂X₁₃X₁₄X₁₅X₁₆RSDELVRHX₁₇ | |
| | GGG | | GKSFSRSDELVRHQRTHTGEKPY | | X₁₈X₁₉HX₂₀X₂₁X₂₂X₂₃X₂₄X₈X₉CX₁₀X₁₁CX₁₂X₁₃X₁₄X₁₅X₁₆QSGDLRRH | |
| | | | KCPECGKSFSQSGDLRRHQRTHT | | X₁₇X₁₈X₁₉HX₂₀X₂₁X₂₂X₂₃X₂₄X₈X₉CX₁₀X₁₁CX₁₂X₁₃X₁₄X₁₅X₁₆RSDNLV | |
| | | | GEKPYKCPECGKSFSRSDNLVRH | | RHX₁₇X₁₈X₁₉HX₂₀X₂₁X₂₂X₂₃X₂₄X₈X₉CX₁₀X₁₁CX₁₂X₁₃X₁₄X₁₅X₁₆RSDN | |
| | | | QRTHTGEKPYKCPECGKSFSRSD | | LVRHX₁₇X₁₈X₁₉HX₂₀X₂₁X₂₂X₂₃X₂₄X₈X₉CX₁₀X₁₁CX₁₂X₁₃X₁₄X₁₅X₁₆RS | |
| | | | NLVRHQRTHTGEKPYKCPECGKS | | DHLTTHX₁₇X₁₈X₁₉HX₂₀X₂₁X₂₂X₂₃X₂₄X₂₅X₂₆X₂₇X₂₈X₂₉X₃₀ | |
| | | | FSRSDHLTTHQRTHTGEKPTGKK | | | |
| | | | TS | | | |
| gaggcagtg | GAG GCA | 1117 | LEPGEKPYKCPECGKSFSRSDHL | 1666 | X₁X₂X₃X₄X₅X₆X₇X₈X₉CX₁₀X₁₁CX₁₂X₁₃X₁₄X₁₅X₁₆RSDHLTNHX₁₇X₁₈X₁₉ | 2215 |
| ggagggcgg | GTG GGA | | TNHQRTHTGEKPYKCPECGKSFS | | HX₂₀X₂₁X₂₂X₂₃X₂₄X₈X₉CX₁₀X₁₁CX₁₂X₁₃X₁₄X₁₅X₁₆RSDKLTEHX₁₇X₁₈ | |
| agg | ggg CGG | | RSDKLTEHQRTHTGEKPYKCPEC | | X₁₉HX₂₀X₂₁X₂₂X₂₃X₂₄X₈X₉CX₁₀X₁₁CX₁₂X₁₃X₁₄X₁₅X₁₆RSDKLVRHX₁₇ | |
| | AGG | | GKSFSRSDKLVRHQRTHTGEKPY | | X₁₈X₁₉HX₂₀X₂₁X₂₂X₂₃X₂₄X₈X₉CX₁₀X₁₁CX₁₂X₁₃X₁₄X₁₅X₁₆QRAHLERH | |
| | | | KCPECGKSFSQRAHLERHQRTHT | | X₁₇X₁₈X₁₉HX₂₀X₂₁X₂₂X₂₃X₂₄X₈X₉CX₁₀X₁₁CX₁₂X₁₃X₁₄X₁₅X₁₆RSDELV | |
| | | | GEKPYKCPECGKSFSRSDELVRH | | RHX₁₇X₁₈X₁₉HX₂₀X₂₁X₂₂X₂₃X₂₄X₈X₉CX₁₀X₁₁CX₁₂X₁₃X₁₄X₁₅X₁₆QSGD | |
| | | | QRTHTGEKPYKCPECGKSFSQSG | | LRRHX₁₇X₁₈X₁₉HX₂₀X₂₁X₂₂X₂₃X₂₄X₈X₉CX₁₀X₁₁CX₁₂X₁₃X₁₄X₁₅X₁₆RS | |
| | | | DLRRHQRTHTGEKPYKCPECGKS | | DNLVRHX₁₇X₁₈X₁₉HX₂₀X₂₁X₂₂X₂₃X₂₄X₂₅X₂₆X₂₇X₂₈X₂₉X₃₀ | |
| | | | FSRSDNLVRHQRTHTGEKPTGKK | | | |
| | | | TS | | | |
| cactgggag | CAC TGG | 1118 | LEPGEKPYKCPECGKSFSQRAHL | 1667 | X₁X₂X₃X₄X₅X₆X₇X₈X₉CX₁₀X₁₁CX₁₂X₁₃X₁₄X₁₅X₁₆QRAHLERHX₁₇X₁₈X₁₉ | 2216 |
| gaggcagtg | GAG GAG | | ERHQRTHTGEKPYKCPECGKSFS | | HX₂₀X₂₁X₂₂X₂₃X₂₄X₈X₉CX₁₀X₁₁CX₁₂X₁₃X₁₄X₁₅X₁₆RSDELVRHX₁₇X₁₈ | |
| gga | GCA GTG | | RSDELVRHQRTHTGEKPYKCPEC | | X₁₉HX₂₀X₂₁X₂₂X₂₃X₂₄X₈X₉CX₁₀X₁₁CX₁₂X₁₃X₁₄X₁₅X₁₆QSGDLRRHX₁₇ | |
| | GGA | | GKSFSQSGDLRRHQRTHTGEKPY | | X₁₈X₁₉HX₂₀X₂₁X₂₂X₂₃X₂₄X₈X₉CX₁₀X₁₁CX₁₂X₁₃X₁₄X₁₅X₁₆RSDNLVRH | |
| | | | KCPECGKSFSRSDNLVRHQRTHT | | X₁₇X₁₈X₁₉HX₂₀X₂₁X₂₂X₂₃X₂₄X₈X₉CX₁₀X₁₁CX₁₂X₁₃X₁₄X₁₅X₁₆RSDNLV | |
| | | | GEKPYKCPECGKSFSRSDNLVRH | | RHX₁₇X₁₈X₁₉HX₂₀X₂₁X₂₂X₂₃X₂₄X₈X₉CX₁₀X₁₁CX₁₂X₁₃X₁₄X₁₅X₁₆RSDH | |
| | | | QRTHTGEKPYKCPECGKSFSRSD | | LTTHX₁₇X₁₈X₁₉HX₂₀X₂₁X₂₂X₂₃X₂₄X₈X₉CX₁₀X₁₁CX₁₂X₁₃X₁₄X₁₅X₁₆SK | |
| | | | HLTTHQRTHTGEKPYKCPECGKS | | KALTEHX₁₇X₁₈X₁₉HX₂₀X₂₁X₂₂X₂₃X₂₄X₂₅X₂₆X₂₇X₂₈X₂₉X₃₀ | |
| | | | FSSKKALTEHQRTHTGEKPTGKK | | | |
| | | | TS | | | |
| aaaggaagg | AAA GGA | 1119 | LEPGEKPYKCPECGKSFSSKKAL | 1668 | X₁X₂X₃X₄X₅X₆X₇X₈X₉CX₁₀X₁₁CX₁₂X₁₃X₁₄X₁₅X₁₆SKKALTEHX₁₇X₁₈X₁₉ | 2217 |
| cagagaggg | AGG CAG | | TEHQRTHTGEKPYKCPECGKSFS | | HX₂₀X₂₁X₂₂X₂₃X₂₄X₈X₉CX₁₀X₁₁CX₁₂X₁₃X₁₄X₁₅X₁₆RSDKLVRHX₁₇X₁₈ | |
| cac | AGA ggg | | RSDKLVRHQRTHTGEKPYKCPEC | | X₁₉HX₂₀X₂₁X₂₂X₂₃X₂₄X₈X₉CX₁₀X₁₁CX₁₂X₁₃X₁₄X₁₅X₁₆QLAHLRAHX₁₇ | |
| | CAC | | GKSFSQLAHLRAHQRTHTGEKPY | | X₁₈X₁₉HX₂₀X₂₁X₂₂X₂₃X₂₄X₈X₉CX₁₀X₁₁CX₁₂X₁₃X₁₄X₁₅X₁₆RADNLTEH | |
| | | | KCPECGKSFSRADNLTEHQRTHT | | X₁₇X₁₈X₁₉HX₂₀X₂₁X₂₂X₂₃X₂₄X₈X₉CX₁₀X₁₁CX₁₂X₁₃X₁₄X₁₅X₁₆RSDHLT | |
| | | | GEKPYKCPECGKSFSRSDHLTNH | | NHX₁₇X₁₈X₁₉HX₂₀X₂₁X₂₂X₂₃X₂₄X₈X₉CX₁₀X₁₁CX₁₂X₁₃X₁₄X₁₅X₁₆QRAH | |
| | | | QRTHTGEKPYKCPECGKSFSQRA | | LERHX₁₇X₁₈X₁₉HX₂₀X₂₁X₂₂X₂₃X₂₄X₈X₉CX₁₀X₁₁CX₁₂X₁₃X₁₄X₁₅X₁₆QR | |
| | | | HLERHQRTHTGEKPYKCPECGKS | | ANLRAHX₁₇X₁₈X₁₉HX₂₀X₂₁X₂₂X₂₃X₂₄X₂₅X₂₆X₂₇X₂₈X₂₉X₃₀ | |
| | | | FSQRANLRAHQRTHTGEKPTGKK | | | |
| | | | TS | | | |
| ggaaggcag | GGA AGG | 1120 | LEPGEKPYKCPECGKSFSRSDHL | 1669 | X₁X₂X₃X₄X₅X₆X₇X₈X₉CC10X₁₁CX₁₂X₁₃X₁₄X₁₅X₁₆RSDHLTTHX₁₇X₁₈X₁₉ | 2218 |
| agagggcac | CAG AGA | | TTHQRTHTGEKPYKCPECGKSFS | | HX₂₀X₂₁X₂₂X₂₃X₂₄X₈X₉CX₁₀X₁₁CX₁₂X₁₃X₁₄X₁₅X₁₆SKKALTEHX₁₇X₁₈ | |
| tgg | ggg CAC | | SKKALTEHQRTHTGEKPYKCPEC | | X₁₉HX₂₀X₂₁X₂₂X₂₃X₂₄X₈X₉CX₁₀X₁₁CX₁₂X₁₃X₁₄X₁₅X₁₆RSDKLVRHX₁₇ | |
| | TGG | | GKSFSRSDKLVRHQRTHTGEKPY | | X₁₈X₁₉HX₂₀X₂₁X₂₂X₂₃X₂₄X₈X₉CX₁₀X₁₁CX₁₂X₁₃X₁₄X₁₅X₁₆QLAHLRAH | |
| | | | KCPECGKSFSQLAHLRAHQRTHT | | X₁₇X₁₈X₁₉HX₂₀X₂₁X₂₂X₂₃X₂₄X₈X₉CX₁₀X₁₁CX₁₂X₁₃X₁₄X₁₅X₁₆RADNLT | |
| | | | GEKPYKCPECGKSFSRADNLTEH | | EHX₁₇X₁₈X₁₉HX₂₀X₂₁X₂₂X₂₃X₂₄X₈X₉CX₁₀X₁₁CX₁₂X₁₃X₁₄X₁₅X₁₆RSDH | |
| | | | QRTHTGEKPYKCPECGKSFSRSD | | LTNHX₁₇X₁₈X₁₉HX₂₀X₂₁X₂₂X₂₃X₂₄X₈X₉CX₁₀X₁₁CX₁₂X₁₃X₁₄X₁₅X₁₆QR | |
| | | | HLTNHQRTHTGEKPYKCPECGKS | | AHLERHX₁₇X₁₈X₁₉HX₂₀X₂₁X₂₂X₂₃X₂₄X₂₅X₂₆X₂₇X₂₈X₂₉X₃₀ | |
| | | | FSQRAHLERHQRTHTGEKPTGKK | | | |
| | | | TS | | | |
| gtgggaggg | GTG GGA | 1121 | LEPGEKPYKCPECGKSFSRSDKL | 1670 | X₁X₂X₃X₄X₅X₆X₇X₈X₉CX₁₀X₁₁CX₁₂X₁₃X₁₄X₁₅X₁₆RSDKLVRHX₁₇X₁₈X₁₉ | 2219 |
| cggagggcg | ggg CGG | | VRHQRTHTGEKPYKCPECGKSFS | | HX₂₀X₂₁X₂₂X₂₃X₂₄X₈X₉CX₁₀X₁₁CX₁₂X₁₃X₁₄X₁₅X₁₆RSDDLVRHX₁₇X₁₈ | |
| ggg | AGG GCG | | RSDDLVRHQRTHTGEKPYKCPEC | | X₁₉HX₂₀X₂₁X₂₂X₂₃X₂₄X₈X₉CX₁₀X₁₁CX₁₂X₁₃X₁₄X₁₅X₁₆RSDHLTNHX₁₇ | |
| | GGG | | GKSFSRSDHLTNHQRTHTGEKPY | | X₁₈X₁₉HX₂₀X₂₁X₂₂X₂₃X₂₄X₈X₉CX₁₀X₁₁CX₁₂X₁₃X₁₄X₁₅X₁₆RSDKLTEH | |
| | | | KCPECGKSFSRSDKLTEHQRTHT | | X₁₇X₁₈X₁₉HX₂₀X₂₁X₂₂X₂₃X₂₄X₈X₉CX₁₀X₁₁CX₁₂X₁₃X₁₄X₁₅X₁₆RSDKLV | |
| | | | GEKPYKCPECGKSFSRSDKLVRH | | RHX₁₇X₁₈X₁₉HX₂₀X₂₁X₂₂X₂₃X₂₄X₈X₉CX₁₀X₁₁CX₁₂X₁₃X₁₄X₁₅X₁₆QRAH | |
| | | | QRTHTGEKPYKCPECGKSFSQRA | | LERHX₁₇X₁₈X₁₉HX₂₀X₂₁X₂₂X₂₃X₂₄X₈X₉CX₁₀X₁₁CX₁₂X₁₃X₁₄X₁₅X₁₆RS | |
| | | | HLERHQRTHTGEKPYKCPECGKS | | DELVRHX₁₇X₁₈X₁₉HX₂₀X₂₁X₂₂X₂₃X₂₄X₂₅X₂₆X₂₇X₂₈X₂₉X₃₀ | |
| | | | FSRSDELVRHQRTHTGEKPTGKK | | | |
| | | | TS | | | |
| gcagtggga | GCA GTG | 1122 | LEPGEKPYKCPECGKSFSRSDDL | 1671 | X₁X₂X₃X₄X₅X₆X₇X₈X₉CX₁₀X₁₁CX₁₂X₁₃X₁₄X₁₅X₁₆RSDDLVRHX₁₇X₁₈X₁₉ | 2220 |
| gggcggagg | GGA ggg | | VRHQRTHTGEKPYKCPECGKSFS | | HX₂₀X₂₁X₂₂X₂₃X₂₄X₈X₉CX₁₀X₁₁CX₁₂X₁₃X₁₄X₁₅X₁₆RSDHLTNHX₁₇X₁₈ | |
| gcg | CGG AGG | | RSDHLTNHQRTHTGEKPYKCPEC | | X₁₉HX₂₀X₂₁X₂₂X₂₃X₂₄X₈X₉CX₁₀X₁₁CX₁₂X₁₃X₁₄X₁₅X₁₆RSDKLTEHX₁₇ | |
| | GCG | | GKSFSRSDKLTEHQRTHTGEKPY | | X₁₈X₁₉HX₂₀X₂₁X₂₂X₂₃X₂₄X₈X₉CX₁₀X₁₁CX₁₂X₁₃X₁₄X₁₅X₁₆RSDKLVRH | |
| | | | KCPECGKSFSRSDKLVRHQRTHT | | X₁₇X₁₈X₁₉HX₂₀X₂₁X₂₂X₂₃X₂₄X₈X₉CX₁₀X₁₁CX₁₂X₁₃X₁₄X₁₅X₁₆QRAHLE | |
| | | | GEKPYKCPECGKSFSQRAHLERH | | RHX₁₇X₁₈X₁₉HX₂₀X₂₁X₂₂X₂₃X₂₄X₈X₉CX₁₀X₁₁CX₁₂X₁₃X₁₄X₁₅X₁₆RSDE | |
| | | | QRTHTGEKPYKCPECGKSFSRSD | | LVRHX₁₇X₁₈X₁₉HX₂₀X₂₁X₂₂X₂₃X₂₄X₈X₉CX₁₀X₁₁CX₁₂X₁₃X₁₄X₁₅X₁₆QS | |
| | | | ELVRHQRTHTGEKPYKCPECGKS | | GDLRRHX₁₇X₁₈X₁₉HX₂₀X₂₁X₂₂X₂₃X₂₄X₂₅X₂₆X₂₇X₂₈X₂₉X₃₀ | |
| | | | FSQSGDLRRHQRTHTGEKPTGKK | | | |
| | | | TS | | | |
| ggagggcgg | GGA ggg | 1123 | LEPGEKPYKCPECGKSFSDCRDL | 1672 | X₁X₂X₃X₄X₅X₆X₇X₈X₉CX₁₀X₁₁CX₁₂X₁₃X₁₄X₁₅X₁₆DCRDLARHX₁₇X₁₈X₁₉ | 2221 |
| agggcgggg | CGG AGG | | ARHQRTHTGEKPYKCPECGKSFS | | HX₂₀X₂₁X₂₂X₂₃X₂₄X₈X₉CX₁₀X₁₁CX₁₂X₁₃X₁₄X₁₅X₁₆RSDKLVRHX₁₇X₁₈ | |
| gcc | GCG GGG | | RSDKLVRHQRTHTGEKPYKCPEC | | X₁₉HX₂₀X₂₁X₂₂X₂₃X₂₄X₈X₉CX₁₀X₁₁CX₁₂X₁₃X₁₄X₁₅X₁₆RSDDLVRHX₁₇ | |
| | GCC | | GKSFSRSDDLVRHQRTHTGEKPY | | X₁₈X₁₉HX₂₀X₂₁X₂₂X₂₃X₂₄X₈X₉CX₁₀X₁₁CX₁₂X₁₃X₁₄X₁₅X₁₆RSDHLTNH | |
| | | | KCPECGKSFSRSDHLTNHQRTHT | | X₁₇X₁₈X₁₉HX₂₀X₂₁X₂₂X₂₃X₂₄X₈X₉CX₁₀X₁₁CX₁₂X₁₃X₁₄X₁₅X₁₆RSDKLT | |
| | | | GEKPYKCPECGKSFSRSDKLTEH | | EHX₁₇X₁₈X₁₉HX₂₀X₂₁X₂₂X₂₃X₂₄X₈X₉CX₁₀X₁₁CX₁₂X₁₃X₁₄X₁₅X₁₆RSDK | |
| | | | QRTHTGEKPYKCPECGKSFSRSD | | LVRHX₁₇X₁₈X₁₉HX₂₀X₂₁X₂₂X₂₃X₂₄X₈X₉CX₁₀X₁₁CX₁₂X₁₃X₁₄X₁₅X₁₆QR | |
| | | | KLVRHQRTHTGEKPYKCPECGKS | | AHLERHX₁₇X₁₈X₁₉HX₂₀X₂₁X₂₂X₂₃X₂₄X₂₅X₂₆X₂₇X₂₈X₂₉X₃₀ | |
| | | | FSQRAHLERHQRTHTGEKPTGKK | | | |
| | | | TS | | | |
| cgcggcgtg | CGC GGC | 1124 | LEPGEKPYKCPECGKSFSQLAHL | 1673 | X₁X₂X₃X₄X₅X₆X₇X₈X₉CX₁₀X₁₁CX₁₂X₁₃X₁₄X₁₅X₁₆QLAHLRAHX₁₇X₁₈X₁₉ | 2222 |
| gaggcaggg | GTG GAG | | RAHQRTHTGEKPYKCPECGKSFS | | HX₂₀X₂₁X₂₂X₂₃X₂₄X₈X₉CX₁₀X₁₁CX₁₂X₁₃X₁₄X₁₅X₁₆RSDKLVRHX₁₇X₁₈ | |
| aga | GCA ggg | | RSDKLVRHQRTHTGEKPYKCPEC | | X₁₉HX₂₀X₂₁X₂₂X₂₃X₂₄X₈X₉CX₁₀X₁₁CX₁₂X₁₃X₁₄X₁₅X₁₆QSGDLRRHX₁₇ | |
| | AGA | | GKSFSQSGDLRRHQRTHTGEKPY | | X₁₈X₁₉HX₂₀X₂₁X₂₂X₂₃X₂₄X₈X₉CX₁₀X₁₁CX₁₂X₁₃X₁₄X₁₅X₁₆RSDNLVRH | |
| | | | KCPECGKSFSRSDNLVRHQRTHT | | X₁₇X₁₈X₁₉HX₂₀X₂₁X₂₂X₂₃X₂₄X₈X₉CX₁₀X₁₁CX₁₂X₁₃X₁₄X₁₅X₁₆RSDELV | |
| | | | GEKPYKCPECGKSFSRSDELVRH | | RHX₁₇X₁₈X₁₉HX₂₀X₂₁X₂₂X₂₃X₂₄X₈X₉CX₁₀X₁₁CX₁₂X₁₃X₁₄X₁₅X₁₆DPGH | |
| | | | QRTHTGEKPYKCPECGKSFSDPG | | LVRHX₁₇X₁₈X₁₉HX₂₀X₂₁X₂₂X₂₃X₂₄X₈X₉CX₁₀X₁₁CX₁₂X₁₃X₁₄X₁₅X₁₆HT | |
| | | | HLVRHQRTHTGEKPYKCPECGKS | | GHLLEHX₁₇X₁₈X₁₉HX₂₀X₂₁X₂₂X₂₃X₂₄X₂₅X₂₆X₂₇X₂₈X₂₉X₃₀ | |
| | | | FSHTGHLLEHQRTHTGEKPTGKK | | | |
| | | | TS | | | |
| ggccgcggc | GGC CGC | 1125 | LEPGEKPYKCPECGKSFSRSDKL | 1674 | X₁X₂X₃X₄X₅X₆X₇X₈X₉CX₁₀X₁₁CX₁₂X₁₃X₁₄X₁₅X₁₆RSDKLVRHX₁₇X₁₈X₁₉ | 2223 |
| gtggaggca | GGC GTG | | VRHQRTHTGEKPYKCPECGKSFS | | HX₂₀X₂₁X₂₂X₂₃X₂₄X₈X₉CX₁₀X₁₁CX₁₂X₁₃X₁₄X₁₅X₁₆QSGDLRRHX₁₇X₁₈ | |
| ggg | GAG GCA | | QSGDLRRHQRTHTGEKPYKCPEC | | X₁₉HX₂₀X₂₁X₂₂X₂₃X₂₄X₈X₉CX₁₀X₁₁CX₁₂X₁₃X₁₄X₁₅X₁₆RSDNLVRHX₁₇ | |
| | GGG | | GKSFSRSDNLVRHQRTHTGEKPY | | X₁₈X₁₉HX₂₀X₂₁X₂₂X₂₃X₂₄X₈X₉CX₁₀X₁₁CX₁₂X₁₃X₁₄X₁₅X₁₆RSDELVRH | |
| | | | KCPECGKSFSRSDELVRHQRTHT | | X₁₇X₁₈X₁₉HX₂₀X₂₁X₂₂X₂₃X₂₄X₈X₉CX₁₀X₁₁CX₁₂X₁₃X₁₄X₁₅X₁₆DPGHLV | |
| | | | GEKPYKCPECGKSFSDPGHLVRH | | RHX₁₇X₁₈X₁₉HX₂₀X₂₁X₂₂X₂₃X₂₄X₈X₉CX₁₀X₁₁CX₁₂X₁₃X₁₄X₁₅X₁₆HTGH | |
| | | | QRTHTGEKPYKCPECGKSFSHTG | | LLEHX₁₇X₁₈X₁₉HX₂₀X₂₁X₂₂X₂₃X₂₄X₈X₉CX₁₀X₁₁CX₁₂X₁₃X₁₄X₁₅X₁₆DP | |
| | | | HLLEHQRTHTGEKPYKCPECGKS | | GHLVRHX₁₇X₁₈X₁₉HX₂₀X₂₁X₂₂X₂₃X₂₄X₂₅X₂₆X₂₇X₂₈X₂₉X₃₀ | |
| | | | FSDPGHLVRHQRTHTGEKPTGKK | | | |
| | | | TS | | | |
| ggcgtggag | GGC GTG | 1126 | LEPGEKPYKCPECGKSFSRRDEL | 1675 | X₁X₂X₃X₄X₅X₆X₇X₈X₉CX₁₀X₁₁CX₁₂X₁₃X₁₄X₁₅X₁₆RRDELNVHX₁₇X₁₈X₁₉ | 2224 |
| gcagggaga | GAG GCA | | NVHQRTHTGEKPYKCPECGKSFS | | HX₂₀X₂₁X₂₂X₂₃X₂₄X₈X₉CX₁₀X₁₁CX₁₂X₁₃X₁₄X₁₅X₁₆QLAHLRAHX₁₇X₁₈ | |
| atg | ggg AGA | | QLAHLRAHQRTHTGEKPYKCPEC | | X₁₉HX₂₀X₂₁X₂₂X₂₃X₂₄X₈X₉CX₁₀X₁₁CX₁₂X₁₃X₁₄X₁₅X₁₆RSDKLVRHX₁₇ | |
| | ATG | | GKSFSRSDKLVRHQRTHTGEKPY | | X₁₈X₁₉HX₂₀X₂₁X₂₂X₂₃X₂₄X₈X₉CX₁₀X₁₁CX₁₂X₁₃X₁₄X₁₅X₁₆QSGDLRRH | |
| | | | KCPECGKSFSQSGDLRRHQRTHT | | X₁₇X₁₈X₁₉HX₂₀X₂₁X₂₂X₂₃X₂₄X₈X₉CX₁₀X₁₁CX₁₂X₁₃X₁₄X₁₅X₁₆RSDNLV | |
| | | | GEKPYKCPECGKSFSRSDNLVRH | | RHX₁₇X₁₈X₁₉HX₂₀X₂₁X₂₂X₂₃X₂₄X₈X₉CX₁₀X₁₁CX₁₂X₁₃X₁₄X₁₅X₁₆RSDE | |
| | | | QRTHTGEKPYKCPECGKSFSRSD | | LVRHX₁₇X₁₈X₁₉HX₂₀X₂₁X₂₂X₂₃X₂₄X₈X₉CX₁₀X₁₁CX₁₂X₁₃X₁₄X₁₅X₁₆DP | |
| | | | ELVRHQRTHTGEKPYKCPECGKS | | GHLVRHX₁₇X₁₈X₁₉HX₂₀X₂₁X₂₂X₂₃X₂₄X₂₅X₂₆X₂₇X₂₈X₂₉X₃₀ | |
| | | | FSDPGHLVRHQRTHTGEKPTGKK | | | |
| | | | TS | | | |
| gtggaggca | GTG GAG | 1127 | LEPGEKPYKCPECGKSFSQSGHL | 1676 | X₁X₂X₃X₄X₅X₆X₇X₈X₉CX₁₀X₁₁CX₁₂X₁₃X₁₄X₁₅X₁₆QSGHLTEHX₁₇X₁₈X₁₉ | 2225 |
| gggagaatg | GCA ggg | | TEHQRTHTGEKPYKCPECGKSFS | | HX₂₀X₂₁X₂₂X₂₃X₂₄X₈X₉CX₁₀X₁₁CX₁₂X₁₃X₁₄X₁₅X₁₆RRDELNVHX₁₇X₁₈ | |
| cga | AGA ATG | | RRDELNVHQRTHTGEKPYKCPEC | | X₁₉HX₂₀X₂₁X₂₂X₂₃X₂₄X₈X₉CX₁₀X₁₁CX₁₂X₁₃X₁₄X₁₅X₁₆QLAHLRAHX₁₇ | |
| | CGA | | GKSFSQLAHLRAHQRTHTGEKPY | | X₁₈X₁₉HX₂₀X₂₁X₂₂X₂₃X₂₄X₈X₉CX₁₀X₁₁CX₁₂X₁₃X₁₄X₁₅X₁₆RSDKLVRH | |
| | | | KCPECGKSFSRSDKLVRHQRTHT | | X₁₇X₁₈X₁₉HX₂₀X₂₁X₂₂X₂₃X₂₄X₈X₉CX₁₀X₁₁CX₁₂X₁₃X₁₄X₁₅X₁₆QSGDLR | |
| | | | GEKPYKCPECGKSFSQSGDLRRH | | RHX₁₇X₁₈X₁₉HX₂₀X₂₁X₂₂X₂₃X₂₄X₈X₉CX₁₀X₁₁CX₁₂X₁₃X₁₄X₁₅X₁₆RSDN | |
| | | | QRTHTGEKPYKCPECGKSFSRSD | | LVRHX₁₇X₁₈X₁₉HX₂₀X₂₁X₂₂X₂₃X₂₄X₈X₉CX₁₀X₁₁CX₁₂X₁₃X₁₄X₁₅X₁₆RS | |
| | | | NLVRHQRTHTGEKPYKCPECGKS | | DELVRHX₁₇X₁₈X₁₉HX₂₀X₂₁X₂₂X₂₃X₂₄X₂₅X₂₆X₂₇X₂₈X₂₉X₃₀ | |
| | | | FSRSDELVRHQRTHTGEKPTGKK | | | |
| | | | TS | | | |
| ggggtgggc | GGG GTG | 1128 | LEPGEKPYKCPECGKSFSRSDHL | 1677 | X₁X₂X₃X₄X₅X₆X₇X₈X₉CX₁₀X₁₁CX₁₂X₁₃X₁₄X₁₅X₁₆RSDHLTNHX₁₇X₁₈X₁₉ | 2226 |
| gcccagggt | GGC GCC | | TNHQRTHTGEKPYKCPECGKSFS | | HX₂₀X₂₁X₂₂X₂₃X₂₄X₈X₉CX₁₀X₁₁CX₁₂X₁₃X₁₄X₁₅X₁₆TSGHLVRHX₁₇X₁₈ | |
| agg | CAG GGT | | TSGHLVRHQRTHTGEKPYKCPEC | | X₁₉HX₂₀X₂₁X₂₂X₂₃X₂₄X₈X₉CX₁₀X₁₁CX₁₂X₁₃X₁₄X₁₅X₁₆RADNLTEHX₁₇ | |
| | AGG | | GKSFSRADNLTEHQRTHTGEKPY | | X₁₈X₁₉HX₂₀X₂₁X₂₂X₂₃X₂₄X₈X₉CX₁₀X₁₁CX₁₂X₁₃X₁₄X₁₅X₁₆DCRDLARH | |
| | | | KCPECGKSFSDCRDLARHQRTHT | | X₁₇X₁₈X₁₉HX₂₀X₂₁X₂₂X₂₃X₂₄X₈X₉CX₁₀X₁₁CX₁₂X₁₃X₁₄X₁₅X₁₆DPGHLV | |
| | | | GEKPYKCPECGKSFSDPGHLVRH | | RHX₁₇X₁₈X₁₉HX₂₀X₂₁X₂₂X₂₃X₂₄X₈X₉CX₁₀X₁₁CX₁₂X₁₃X₁₄X₁₅X₁₆RSDE | |
| | | | QRTHTGEKPYKCPECGKSFSRSD | | LVRHX₁₇X₁₈X₁₉HX₂₀X₂₁X₂₂X₂₃X₂₄X₈X₉CX₁₀X₁₁CX₁₂X₁₃X₁₄X₁₅X₁₆RS | |
| | | | ELVRHQRTHTGEKPYKCPECGKS | | DKLVRHX₁₇X₁₈X₁₉HX₂₀X₂₁X₂₂X₂₃X₂₄X₂₅X₂₆X₂₇X₂₈X₂₉X₃₀ | |
| | | | FSRSDKLVRHQRTHTGEKPTGKK | | | |
| | | | TS | | | |
| gtgggcgcc | GTG GGC | 1129 | LEPGEKPYKCPECGKSFSQSGDL | 1678 | X₁X₂X₃X₄X₅X₆X₇X₈X₉CX₁₀X₁₁CX₁₂X₁₃X₁₄X₁₅X₁₆QSGDLRRHX₁₇X₁₈X₁₉ | 2227 |
| cagggtagg | GCC CAG | | RRHQRTHTGEKPYKCPECGKSFS | | HX₂₀X₂₁X₂₂X₂₃X₂₄X₈X₉CX₁₀X₁₁CX₁₂X₁₃X₁₄X₁₅X₁₆RSDHLTNHX₁₇X₁₈ | |
| gca | GGT AGG | | RSDHLTNHQRTHTGEKPYKCPEC | | X₁₉HX₂₀X₂₁X₂₂X₂₃X₂₄X₈X₉CX₁₀X₁₁CX₁₂X₁₃X₁₄X₁₅X₁₆TSGHLVRHX₁₇ | |
| | GCA | | GKSFSTSGHLVRHQRTHTGEKPY | | X₁₈X₁₉HX₂₀X₂₁X₂₂X₂₃X₂₄X₈X₉CX₁₀X₁₁CX₁₂X₁₃X₁₄X₁₅X₁₆RADNLTEH | |
| | | | KCPECGKSFSRADNLTEHQRTHT | | X₁₇X₁₈X₁₉HX₂₀X₂₁X₂₂X₂₃X₂₄X₈X₉CX₁₀X₁₁CX₁₂X₁₃X₁₄X₁₅X₁₆DCRDLA | |
| | | | GEKPYKCPECGKSFSDCRDLARH | | RHX₁₇X₁₈X₁₉HX₂₀X₂₁X₂₂X₂₃X₂₄X₈X₉CX₁₀X₁₁CX₁₂X₁₃X₁₄X₁₅X₁₆DPGH | |
| | | | QRTHTGEKPYKCPECGKSFSDPG | | LVRHX₁₇X₁₈X₁₉HX₂₀X₂₁X₂₂X₂₃X₂₄X₈X₉CX₁₀X₁₁CX₁₂X₁₃X₁₄X₁₅X₁₆RS | |
| | | | HLVRHQRTHTGEKPYKCPECGKS | | DELVRHX₁₇X₁₈X₁₉HX₂₀X₂₁X₂₂X₂₃X₂₄X₂₅X₂₆X₂₇X₂₈X₂₉X₃₀ | |
| | | | FSRSDELVRHQRTHTGEKPTGKK | | | |
| | | | TS | | | |
| gcaggtggc | GCA GGT | 1130 | LEPGEKPYKCPECGKSFSRSDNL | 1679 | X₁X₂X₃X₄X₅X₆X₇X₈X₉CX₁₀X₁₁CX₁₂X₁₃X₁₄X₁₅X₁₆RSDNLVRHX₁₇X₁₈X₁₉ | 2228 |
| cgcggcgtg | GGC CGC | | VRHQRTHTGEKPYKCPECGKSFS | | HX₂₀X₂₁X₂₂X₂₃X₂₄X₈X₉CX₁₀X₁₁CX₁₂X₁₃X₁₄X₁₅X₁₆RSDELVRHX₁₇X₁₈ | |
| gag | GGC GTG | | RSDELVRHQRTHTGEKPYKCPEC | | X₁₉HX₂₀X₂₁X₂₂X₂₃X₂₄X₈X₉CX₁₀X₁₁CX₁₂X₁₃X₁₄X₁₅X₁₆DPGHLVRHX₁₇ | |
| | GAG | | GKSFSDPGHLVRHQRTHTGEKPY | | X₁₈X₁₉HX₂₀X₂₁X₂₂X₂₃X₂₄X₈X₉CX₁₀X₁₁CX₁₂X₁₃X₁₄X₁₅X₁₆HTGHLLEH | |
| | | | KCPECGKSFSHTGHLLEHQRTHT | | X₁₇X₁₈X₁₉HX₂₀X₂₁X₂₂X₂₃X₂₄X₈X₉CX₁₀X₁₁CX₁₂X₁₃X₁₄X₁₅X₁₆DPGHLV | |
| | | | GEKPYKCPECGKSFSDPGHLVRH | | RHX₁₇X₁₈X₁₉HX₂₀X₂₁X₂₂X₂₃X₂₄X₈X₉CX₁₀X₁₁CX₁₂X₁₃X₁₄X₁₅X₁₆TSGH | |
| | | | QRTHTGEKPYKCPECGKSFSTSG | | LVRHX₁₇X₁₈X₁₉HX₂₀X₂₁X₂₂X₂₃X₂₄X₈X₉CX₁₀X₁₁CX₁₂X₁₃X₁₄X₁₅X₁₆QS | |
| | | | HLVRHQRTHTGEKPYKCPECGKS | | GDLRRHX₁₇X₁₈X₁₉HX₂₀X₂₁X₂₂X₂₃X₂₄X₂₅X₂₆X₂₇X₂₈X₂₉X₃₀ | |
| | | | FSQSGDLRRHQRTHTGEKPTGKK | | | |
| | | | TS | | | |
| ggtggccgc | GGT GGC | 1131 | LEPGEKPYKCPECGKSFSQSGDL | 1680 | X₁X₂X₃X₄X₅X₆X₇X₈X₉CX₁₀X₁₁CX₁₂X₁₃X₁₄X₁₅X₁₆QSGDLRRHX₁₇X₁₈X₁₉ | |
| ggcgtggag | CGC GGC | | RRHQRTHTGEKPYKCPECGKSFS | | HX₂₀X₂₁X₂₂X₂₃X₂₄X₈X₉CX₁₀X₁₁CX₁₂X₁₃X₁₄X₁₅X₁₆RSDNLVRHX₁₇X₁₈ | 2229 |
| gca | GTG GAG | | RSDNLVRHQRTHTGEKPYKCPEC | | X₁₉HX₂₀X₂₁X₂₂X₂₃X₂₄X₈X₉CX₁₀X₁₁CX₁₂X₁₃X₁₄X₁₅X₁₆RSDELVRHX₁₇ | |
| | GCA | | GKSFSRSDELVRHQRTHTGEKPY | | X₁₈X₁₉HX₂₀X₂₁X₂₂X₂₃X₂₄X₈X₉CX₁₀X₁₁CX₁₂X₁₃X₁₄X₁₅X₁₆DPGHLVRH | |
| | | | KCPECGKSFSDPGHLVRHQRTHT | | X₁₇X₁₈X₁₉HX₂₀X₂₁X₂₂X₂₃X₂₄X₈X₉CX₁₀X₁₁CX₁₂X₁₃X₁₄X₁₅X₁₆HTGHLL | |
| | | | GEKPYKCPECGKSFSHTGHLLEH | | EHX₁₇X₁₈X₁₉HX₂₀X₂₁X₂₂X₂₃X₂₄X₈X₉CX₁₀X₁₁CX₁₂X₁₃X₁₄X₁₅X₁₆DPGH | |
| | | | QRTHTGEKPYKCPECGKSFSDPG | | LVRHX₁₇X₁₈X₁₉HX₂₀X₂₁X₂₂X₂₃X₂₄X₈X₉CX₁₀X₁₁CX₁₂X₁₃X₁₄X₁₅X₁₆TS | |
| | | | HLVRHQRTHTGEKPYKCPECGKS | | GHLVRHX₁₇X₁₈X₁₉HX₂₀X₂₁X₂₂X₂₃X₂₄X₂₅X₂₆X₂₇X₂₈X₂₉X₃₀ | |
| | | | FSTSGHLVRHQRTHTGEKPTGKK | | | |
| | | | TS | | | |
| agggcaggt | AGG GCA | 1132 | LEPGEKPYKCPECGKSFSRSDEL | 1681 | X₁X₂X₃X₄X₅X₆X₇X₈X₉CX₁₀X₁₁CX₁₂X₁₃X₁₄X₁₅X₁₆RSDELVRHX₁₇X₁₈X₁₉ | 2230 |
| ggccgcggc | GGT GGC | | VRHQRTHTGEKPYKCPECGKSFS | | HX₂₀X₂₁X₂₂X₂₃X₂₄X₈X₉CX₁₀X₁₁CX₁₂X₁₃X₁₄X₁₅X₁₆DPGHLVRHX₁₇X₁₈ | |
| gtg | CGC GGC | | DPGHLVRHQRTHTGEKPYKCPEC | | X₁₉HX₂₀X₂₁X₂₂X₂₃X₂₄X₈X₉CX₁₀X₁₁CX₁₂X₁₃X₁₄X₁₅X₁₆HTGHLLEHX₁₇ | |
| | GTG | | GKSFSHTGHLLEHQRTHTGEKPY | | X₁₈X₁₉HX₂₀X₂₁X₂₂X₂₃X₂₄X₈X₉CX₁₀X₁₁CX₁₂X₁₃X₁₄X₁₅X₁₆DPGHLVRH | |
| | | | KCPECGKSFSDPGHLVRHQRTHT | | X₁₇X₁₈X₁₉HX₂₀X₂₁X₂₂X₂₃X₂₄X₈X₉CX₁₀X₁₁CX₁₂X₁₃X₁₄X₁₅X₁₆TSGHLV | |
| | | | GEKPYKCPECGKSFSTSGHLVRH | | RHX₁₇X₁₈X₁₉HX₂₀X₂₁X₂₂X₂₃X₂₄X₈X₉CX₁₀X₁₁CX₁₂X₁₃X₁₄X₁₅X₁₆QSGD | |
| | | | QRTHTGEKPYKCPECGKSFSQSG | | LRRHX₁₇X₁₈X₁₉HX₂₀X₂₁X₂₂X₂₃X₂₄X₈X₉CX₁₀X₁₁CX₁₂X₁₃X₁₄X₁₅X₁₆RS | |
| | | | DLRRHQRTHTGEKPYKCPECGKS | | DHLTNHX₁₇X₁₈X₁₉HX₂₀X₂₁X₂₂X₂₃X₂₄X₂₅X₂₆X₂₇X₂₈X₂₉X₃₀ | |
| | | | FSRSDHLTNHQRTHTGEKPTGKK | | | |
| | | | TS | | | |
| gcccagggt | GCC CAG | 1133 | LEPGEKPYKCPECGKSFSDPGHL | 1682 | X₁X₂X₃X₄X₅X₆X₇X₈X₉CX₁₀X₁₁CX₁₂X₁₃X₁₄X₁₅X₁₆DPGHLVRHX₁₇X₁₈X₁₉ | 2231 |
| agggcaggt | GGT AGG | | VRHQRTHTGEKPYKCPECGKSFS | | HX₂₀X₂₁X₂₂X₂₃X₂₄X₈X₉CX₁₀X₁₁CX₁₂X₁₃X₁₄X₁₅X₁₆TSGHLVRHX₁₇X₁₈ | |
| ggc | GCA GGT | | TSGHLVRHQRTHTGEKPYKCPEC | | X₁₉HX₂₀X₂₁X₂₂X₂₃X₂₄X₈X₉CX₁₀X₁₁CX₁₂X₁₃X₁₄X₁₅X₁₆QSGDLRRHX₁₇ | |
| | GGC | | GKSFSQSGDLRRHQRTHTGEKPY | | X₁₈X₁₉HX₂₀X₂₁X₂₂X₂₃X₂₄X₈X₉CX₁₀X₁₁CX₁₂X₁₃X₁₄X₁₅X₁₆RSDHLTNH | |
| | | | KCPECGKSFSRSDHLTNHQRTHT | | X₁₇X₁₈X₁₉HX₂₀X₂₁X₂₂X₂₃X₂₄X₈X₉CX₁₀X₁₁CX₁₂X₁₃X₁₄X₁₅X₁₆TSGHLV | |
| | | | GEKPYKCPECGKSFSTSGHLVRH | | RHX₁₇X₁₈X₁₉HX₂₀X₂₁X₂₂X₂₃X₂₄X₈X₉CX₁₀X₁₁CX₁₂X₁₃X₁₄X₁₅X₁₆RADN | |
| | | | QRTHTGEKPYKCPECGKSFSRAD | | LTEHX₁₇X₁₈X₁₉HX₂₀X₂₁X₂₂X₂₃X₂₄X₈X₉CX₁₀X₁₁CX₁₂X₁₃X₁₄X₁₅X₁₆DC | |
| | | | NLTEHQRTHTGEKPYKCPECGKS | | RDLARHX₁₇X₁₈X₁₉HX₂₀X₂₁X₂₂X₂₃X₂₄X₂₅X₂₆X₂₇X₂₈X₂₉X₃₀ | |
| | | | FSDCRDLARHQRTHTGEKPTGKK | | | |
| | | | TS | | | |
| ggcgcccag | GGC GCC | 1134 | LEPGEKPYKCPECGKSFSTSGHL | 1683 | X₁X₂X₃X₄X₅X₆X₇X₈X₉CX₁₀X₁₁CX₁₂X₁₃X₁₄X₁₅X₁₆TSGHLVRHX₁₇X₁₈X₁₉ | 2232 |
| ggtagggca | CAG GGT | | VRHQRTHTGEKPYKCPECGKSFS | | HX₂₀X₂₁X₂₂X₂₃X₂₄X₈X₉CX₁₀X₁₁CX₁₂X₁₃X₁₄X₁₅X₁₆QSGDLRRHX₁₇X₁₈ | |
| ggt | AGG GCA | | QSGDLRRHQRTHTGEKPYKCPEC | | X₁₉HX₂₀X₂₁X₂₂X₂₃X₂₄X₈X₉CX₁₀X₁₁CX₁₂X₁₃X₁₄X₁₅X₁₆RSDHLTNHX₁₇ | |
| | GGT | | GKSFSRSDHLTNHQRTHTGEKPY | | X₁₈X₁₉HX₂₀X₂₁X₂₂X₂₃X₂₄X₈X₉CX₁₀X₁₁CX₁₂X₁₃X₁₄X₁₅X₁₆TSGHLVRH | |
| | | | KCPECGKSFSTSGHLVRHQRTHT | | X₁₇X₁₈X₁₉HX₂₀X₂₁X₂₂X₂₃X₂₄X₈X₉CX₁₀X₁₁CX₁₂X₁₃X₁₄X₁₅X₁₆RADNLT | |
| | | | GEKPYKCPECGKSFSRADNLTEH | | EHX₁₇X₁₈X₁₉HX₂₀X₂₁X₂₂X₂₃X₂₄X₈X₉CX₁₀X₁₁CX₁₂X₁₃X₁₄X₁₅X₁₆DCRD | |
| | | | QRTHTGEKPYKCPECGKSFSDCR | | LARHX₁₇X₁₈X₁₉HX₂₀X₂₁X₂₂X₂₃X₂₄X₈X₉CX₁₀X₁₁CX₁₂X₁₃X₁₄X₁₅X₁₆DP | |
| | | | DLARHQRTHTGEKPYKCPECGKS | | GHLVRHX₁₇X₁₈X₁₉HX₂₀X₂₁X₂₂X₂₃X₂₄X₂₅X₂₆X₂₇X₂₈X₂₉X₃₀ | |
| | | | FSDPGHLVRHQRTHTGEKPTGKK | | | |
| | | | TS | | | |
| cagggtagg | CAG GGT | 1135 | LEPGEKPYKCPECGKSFSHTGHL | 1684 | X₁X₂X₃X₄X₅X₆X₇X₈X₉CX₁₀X₁₁CX₁₂X₁₃X₁₄X₁₅X₁₆HTGHLLEHX₁₇X₁₈X₁₉ | 2233 |
| gcaggtggc | AGG GCA | | LEHQRTHTGEKPYKCPECGKSFS | | HX₂₀X₂₁X₂₂X₂₃X₂₄X₈X₉CX₁₀X₁₁CX₁₂X₁₃X₁₄X₁₅X₁₆DPGHLVRHX₁₇X₁₈ | |
| cgc | GGT GGC | | DPGHLVRHQRTHTGEKPYKCPEC | | X₁₉HX₂₀X₂₁X₂₂X₂₃X₂₄X₈X₉CX₁₀X₁₁CX₁₂X₁₃X₁₄X₁₅X₁₆TSGHLVRHX₁₇ | |
| | CGC | | GKSFSTSGHLVRHQRTHTGEKPY | | X₁₈X₁₉HX₂₀X₂₁X₂₂X₂₃X₂₄X₈X₉CX₁₀X₁₁CX₁₂X₁₃X₁₄X₁₅X₁₆QSGDLRRH | |
| | | | KCPECGKSFSQSGDLRRHQRTHT | | X₁₇X₁₈X₁₉HX₂₀X₂₁X₂₂X₂₃X₂₄X₈X₉CX₁₀X₁₁CX₁₂X₁₃X₁₄X₁₅X₁₆RSDHLT | |
| | | | GEKPYKCPECGKSFSRSDHLTNH | | NHX₁₇X₁₈X₁₉HX₂₀X₂₁X₂₂X₂₃X₂₄X₈X₉CX₁₀X₁₁CX₁₂X₁₃X₁₄X₁₅X₁₆TSGH | |
| | | | QRTHTGEKPYKCPECGKSFSTSG | | LVRHX₁₇X₁₈X₁₉HX₂₀X₂₁X₂₂X₂₃X₂₄X₈X₉CX₁₀X₁₁CX₁₂X₁₃X₁₄X₁₅X₁₆RA | |
| | | | HLVRHQRTHTGEKPYKCPECGKS | | DNLTEHX₁₇X₁₈X₁₉HX₂₀X₂₁X₂₂X₂₃X₂₄X₂₅X₂₆X₂₇X₂₈X₂₉X₃₀ | |
| | | | FSRADNLTEHQRTHTGEKPTGKK | | | |
| | | | TS | | | |
| ggtagggca | GGT AGG | 1136 | LEPGEKPYKCPECGKSFSDPGHL | 1685 | X₁X₂X₃X₄X₅X₆X₇X₈X₉CX₁₀X₁₁CX₁₂X₁₃X₁₄X₁₅X₁₆DPGHLVRHX₁₇X₁₈X₁₉ | 2234 |
| ggtggccgc | GCA GGT | | VRHQRTHTGEKPYKCPECGKSFS | | HX₂₀X₂₁X₂₂X₂₃X₂₄X₈X₉CX₁₀X₁₁CX₁₂X₁₃X₁₄X₁₅X₁₆HTGHLLEHX₁₇X₁₈ | |
| ggc | GGC CGC | | HTGHLLEHQRTHTGEKPYKCPEC | | X₁₉HX₂₀X₂₁X₂₂X₂₃X₂₄X₈X₉CX₁₀X₁₁CX₁₂X₁₃X₁₄X₁₅X₁₆DPGHLVRHX₁₇ | |
| | GGC | | GKSFSDPGHLVRHQRTHTGEKPY | | X₁₈X₁₉HX₂₀X₂₁X₂₂X₂₃X₂₄X₈X₉CX₁₀X₁₁CX₁₂X₁₃X₁₄X₁₅X₁₆TSGHLVRH | |
| | | | KCPECGKSFSTSGHLVRHQRTHT | | X₁₇X₁₈X₁₉HX₂₀X₂₁X₂₂X₂₃X₂₄X₈X₉CX₁₀X₁₁CX₁₂X₁₃X₁₄X₁₅X₁₆QSGDLR | |
| | | | GEKPYKCPECGKSFSQSGDLRRH | | RHX₁₇X₁₈X₁₉HX₂₀X₂₁X₂₂X₂₃X₂₄X₈X₉CX₁₀X₁₁CX₁₂X₁₃X₁₄X₁₅X₁₆RSDH | |
| | | | QRTHTGEKPYKCPECGKSFSRSD | | VLTNHX₁₇X₁₈X₁₉HX₂₀X₂₁X₂₂X₂₃X₂₄X₈X₉CX₁₀X₁₁CX₁₂X₁₃X₁₄X₁₅X₁₆TS | |
| | | | HLTNHQRTHTGEKPYKCPECGKS | | GHLVRHX₁₇X₁₈X₁₉HX₂₀X₂₁X₂₂X₂₃X₂₄X₂₅X₂₆X₂₇X₂₈X₂₉X₃₀ | |
| | | | FSTSGHLVRHQRTHTGEKPTGKK | | | |
| | | | TS | | | |
| agggtaggg | AGG GTA | 1137 | LEPGEKPYKCPECGKSFSRSDDL | 1686 | X₁X₂X₃X₄X₅X₆X₇X₈X₉CX₁₀X₁₁CX₁₂X₁₃X₁₄X₁₅X₁₆RSDDLVRHX₁₇X₁₈X₁₉ | 2235 |
| caggtggcc | ggg CAG | | VRHQRTHTGEKPYKCPECGKSFS | | HX₂₀X₂₁X₂₂X₂₃X₂₄X₈X₉CX₁₀X₁₁CX₁₂X₁₃X₁₄X₁₅X₁₆DCRDLARHX₁₇X₁₈ | |
| gcg | GTG GCC | | DCRDLARHQRTHTGEKPYKCPEC | | X₁₉HX₂₀X₂₁X₂₂X₂₃X₂₄X₈X₉CX₁₀X₁₁CX₁₂X₁₃X₁₄X₁₅X₁₆RSDELVRHX₁₇ | |
| | GCG | | GKSFSRSDELVRHQRTHTGEKPY | | X₁₈X₁₉HX₂₀X₂₁X₂₂X₂₃X₂₄X₈X₉CX₁₀X₁₁CX₁₂X₁₃X₁₄X₁₅X₁₆RADNLTEH | |
| | | | KCPECGKSFSRADNLTEHQRTHT | | X₁₇X₁₈X₁₉HX₂₀X₂₁X₂₂X₂₃X₂₄X₈X₉CX₁₀X₁₁CX₁₂X₁₃X₁₄X₁₅X₁₆RSDKLV | |
| | | | GEKPYKCPECGKSFSRSDKLVRH | | RHX₁₇X₁₈X₁₉HX₂₀X₂₁X₂₂X₂₃X₂₄X₈X₉CX₁₀X₁₁CX₁₂X₁₃X₁₄X₁₅X₁₆QSSS | |
| | | | QRTHTGEKPYKCPECGKSFSQSS | | LVRHX₁₇X₁₈X₁₉HX₂₀X₂₁X₂₂X₂₃X₂₄X₈X₉CX₁₀X₁₁CX₁₂X₁₃X₁₄X₁₅X₁₆RS | |
| | | | SLVRHQRTHTGEKPYKCPECGKS | | DHLTNHX₁₇X₁₈X₁₉HX₂₀X₂₁X₂₂X₂₃X₂₄X₂₅X₂₆X₂₇X₂₈X₂₉X₃₀ | |
| | | | FSRSDHLTNHQRTHTGEKPTGKK | | | |
| | | | TS | | | |
| cccagggta | CCC AGG | 1138 | LEPGEKPYKCPECGKSFSDCRDL | 1687 | X₁X₂X₃X₄X₅X₆X₇X₈X₉CX₁₀X₁₁CX₁₂X₁₃X₁₄X₁₅X₁₆DCRDLARHX₁₇X₁₈X₁₉ | 2236 |
| gggcaggtg | GTA ggg | | ARHQRTHTGEKPYKCPECGKSFS | | HX₂₀X₂₁X₂₂X₂₃X₂₄X₈X₉CX₁₀X₁₁CX₁₂X₁₃X₁₄X₁₅X₁₆RSDELVRHX₁₇X₁₈ | |
| gcc | CAG GTG | | RSDELVRHQRTHTGEKPYKCPEC | | X₁₉HX₂₀X₂₁X₂₂X₂₃X₂₄X₈X₉CX₁₀X₁₁CX₁₂X₁₃X₁₄X₁₅X₁₆RADNLTEHX₁₇ | |
| | GCC | | GKSFSRADNLTEHQRTHTGEKPY | | X₁₈X₁₉HX₂₀X₂₁X₂₂X₂₃X₂₄X₈X₉CX₁₀X₁₁CX₁₂X₁₃X₁₄X₁₅X₁₆RSDKLVRH | |
| | | | KCPECGKSFSRSDKLVRHQRTHT | | X₁₇X₁₈X₁₉HX₂₀X₂₁X₂₂X₂₃X₂₄X₈X₉CX₁₀X₁₁CX₁₂X₁₃X₁₄X₁₅X₁₆QSSSLV | |
| | | | GEKPYKCPECGKSFSQSSSLVRH | | RHX₁₇X₁₈X₁₉HX₂₀X₂₁X₂₂X₂₃X₂₄X₈X₉CX₁₀X₁₁CX₁₂X₁₃X₁₄X₁₅X₁₆RSDH | |
| | | | QRTHTGEKPYKCPECGKSFSRSD | | LTNHX₁₇X₁₈X₁₉HX₂₀X₂₁X₂₂X₂₃X₂₄X₈X₉CX₁₀X₁₁CX₁₂X₁₃X₁₄X₁₅X₁₆SK | |
| | | | HLTNHQRTHTGEKPYKCPECGKS | | KHLAEHX₁₇X₁₈X₁₉HX₂₀X₂₁X₂₂X₂₃X₂₄X₂₅X₂₆X₂₇X₂₈X₂₉X₃₀ | |
| | | | FSSKKHLAEHQRTHTGEKPTGKK | | | |
| | | | TS | | | |
| gtagggcag | GTA ggg | 1139 | LEPGEKPYKCPECGKSFSRSDDL | 1688 | X₁X₂X₃X₄X₅X₆X₇X₈X₉CX₁₀X₁₁CX₁₂X₁₃X₁₄X₁₅X₁₆RSDDLVRHX₁₇X₁₈X₁₉ | 2237 |
| gtggccgcg | CAG GTG | | VRHQRTHTGEKPYKCPECGKSFS | | HX₂₀X₂₁X₂₂X₂₃X₂₄X₈X₉CX₁₀X₁₁CX₁₂X₁₃X₁₄X₁₅X₁₆RSDDLVRHX₁₇X₁₈ | |
| gcg | GCC GCG | | RSDDLVRHQRTHTGEKPYKCPEC | | X₁₉HX₂₀X₂₁X₂₂X₂₃X₂₄X₈X₉CX₁₀X₁₁CX₁₂X₁₃X₁₄X₁₅X₁₆DCRDLARHX₁₇ | |
| | GCG | | GKSFSDCRDLARHQRTHTGEKPY | | X₁₈X₁₉HX₂₀X₂₁X₂₂X₂₃X₂₄X₈X₉CX₁₀X₁₁CX₁₂X₁₃X₁₄X₁₅X₁₆RSDELVRH | |
| | | | KCPECGKSFSRSDELVRHQRTHT | | X₁₇X₁₈X₁₉HX₂₀X₂₁X₂₂X₂₃X₂₄X₈X₉CX₁₀X₁₁CX₁₂X₁₃X₁₄X₁₅X₁₆RADNLT | |
| | | | GEKPYKCPECGKSFSRADNLTEH | | EHX₁₇X₁₈X₁₉HX₂₀X₂₁X₂₂X₂₃X₂₄X₈X₉CX₁₀X₁₁CX₁₂X₁₃X₁₄X₁₅X₁₆RSDK | |
| | | | QRTHTGEKPYKCPECGKSFSRSD | | LVRHX₁₇X₁₈X₁₉HX₂₀X₂₁X₂₂X₂₃X₂₄X₈X₉CX₁₀X₁₁CX₁₂X₁₃X₁₄X₁₅X₁₆QS | |
| | | | KLVRHQRTHTGEKPYKCPECGKS | | SSLVRHX₁₇X₁₈X₁₉HX₂₀X₂₁X₂₂X₂₃X₂₄X₂₅X₂₆X₂₇X₂₈X₂₉X₃₀ | |
| | | | FSQSSSLVRHQRTHTGEKPTGKK | | | |
| | | | TS | | | |
| gggcaggtg | ggg CAG | 1140 | LEPGEKPYKCPECGKSFSRSDHL | 1689 | X₁X₂X₃X₄X₅X₆X₇X₈X₉CX₁₀X₁₁CX₁₂X₁₃X₁₄X₁₅X₁₆RSDHLTTHX₁₇X₁₈X₁₉ | 2238 |
| gccgcggcg | GTG GCC | | TTHQRTHTGEKPYKCPECGKSFS | | HX₂₀X₂₁X₂₂X₂₃X₂₄X₈X₉CX₁₀X₁₁CX₁₂X₁₃X₁₄X₁₅X₁₆RSDDLVRHX₁₇X₁₈ | |
| tgg | GCG GCG | | RSDDLVRHQRTHTGEKPYKCPEC | | X₁₉HX₂₀X₂₁X₂₂X₂₃X₂₄X₈X₉CX₁₀X₁₁CX₁₂X₁₃X₁₄X₁₅X₁₆RSDDLVRHX₁₇ | |
| | TGG | | GKSFSRSDDLVRHQRTHTGEKPY | | X₁₈X₁₉HX₂₀X₂₁X₂₂X₂₃X₂₄X₈X₉CX₁₀X₁₁CX₁₂X₁₃X₁₄X₁₅X₁₆DCRDLARH | |
| | | | KCPECGKSFSDCRDLARHQRTHT | | X₁₇X₁₈X₁₉HX₂₀X₂₁X₂₂X₂₃X₂₄X₈X₉CX₁₀X₁₁CX₁₂X₁₃X₁₄X₁₅X₁₆RSDELV | |
| | | | GEKPYKCPECGKSFSRSDELVRH | | RHX₁₇X₁₈X₁₉HX₂₀X₂₁X₂₂X₂₃X₂₄X₈X₉CX₁₀X₁₁CX₁₂X₁₃X₁₄X₁₅X₁₆RADN | |
| | | | QRTHTGEKPYKCPECGKSFSRAD | | LTEHX₁₇X₁₈X₁₉HX₂₀X₂₁X₂₂X₂₃X₂₄X₈X₉CX₁₀X₁₁CX₁₂X₁₃X₁₄X₁₅X₁₆RS | |
| | | | NLTEHQRTHTGEKPYKCPECGKS | | DKLVRHX₁₇X₁₈X₁₉HX₂₀X₂₁X₂₂X₂₃X₂₄X₂₅X₂₆X₂₇X₂₈X₂₉X₃₀ | |
| | | | FSRSDKLVRHQRTHTGEKPTGKK | | | |
| | | | TS | | | |
| gtggccgcg | GTG GCC | 1141 | LEPGEKPYKCPECGKSFSRADNL | 1690 | X₁X₂X₃X₄X₅X₆X₇X₈X₉CX₁₀X₁₁CX₁₂X₁₃X₁₄X₁₅X₁₆RADNLTEHX₁₇X₁₈X₁₉ | 2239 |
| gcgtggagg | GCG GCG | | TEHQRTHTGEKPYKCPECGKSFS | | HX₂₀X₂₁X₂₂X₂₃X₂₄X₈X₉CX₁₀X₁₁CX₁₂X₁₃X₁₄X₁₅X₁₆RSDHLTNHX₁₇X₁₈ | |
| cag | TGG AGG | | RSDHLTNHQRTHTGEKPYKCPEC | | X₁₉HX₂₀X₂₁X₂₂X₂₃X₂₄X₈X₉CX₁₀X₁₁CX₁₂X₁₃X₁₄X₁₅X₁₆RSDHLTTHX₁₇ | |
| | CAG | | GKSFSRSDHLTTHQRTHTGEKPY | | X₁₈X₁₉HX₂₀X₂₁X₂₂X₂₃X₂₄X₈X₉CX₁₀X₁₁CX₁₂X₁₃X₁₄X₁₅X₁₆RSDDLVRH | |
| | | | KCPECGKSFSRSDDLVRHQRTHT | | X₁₇X₁₈X₁₉HX₂₀X₂₁X₂₂X₂₃X₂₄X₈X₉CX₁₀X₁₁CX₁₂X₁₃X₁₄X₁₅X₁₆RSDDLV | |
| | | | GEKPYKCPECGKSFSRSDDLVRH | | RHX₁₇X₁₈X₁₉HX₂₀X₂₁X₂₂X₂₃X₂₄X₈X₉CX₁₀X₁₁CX₁₂X₁₃X₁₄X₁₅X₁₆DCRD | |
| | | | QRTHTGEKPYKCPECGKSFSDCR | | LARHX₁₇X₁₈X₁₉HX₂₀X₂₁X₂₂X₂₃X₂₄X₈X₉CX₁₀X₁₁CX₁₂X₁₃X₁₄X₁₅X₁₆RS | |
| | | | DLARHQRTHTGEKPYKCPECGKS | | DELVRHX₁₇X₁₈X₁₉HX₂₀X₂₁X₂₂X₂₃X₂₄X₂₅X₂₆X₂₇X₂₈X₂₉X₃₀ | |
| | | | FSRSDELVRHQRTHTGEKPTGKK | | | |
| | | | TS | | | |
| caggtggcc | CAG GTG | 1142 | LEPGEKPYKCPECGKSFSRSDHL | 1691 | X₁X₂X₃X₄X₅X₆X₇X₈X₉CX₁₀X₁₁CX₁₂X₁₃X₁₄X₁₅X₁₆RSDHLTNHX₁₇X₁₈X₁₉ | 2240 |
| gcggcgtgg | GCC GCG | | TNHQRTHTGEKPYKCPECGKSFS | | HX₂₀X₂₁X₂₂X₂₃X₂₄X₈X₉CX₁₀X₁₁CX₁₂X₁₃X₁₄X₁₅X₁₆RSDHLTTHX₁₇X₁₈ | |
| agg | GCG TGG | | RSDHLTTHQRTHTGEKPYKCPEC | | X₁₉HX₂₀X₂₁X₂₂X₂₃X₂₄X₈X₉CX₁₀X₁₁CX₁₂X₁₃X₁₄X₁₅X₁₆RSDDLVRHX₁₇ | |
| | AGG | | GKSFSRSDDLVRHQRTHTGEKPY | | X₁₈X₁₉HX₂₀X₂₁X₂₂X₂₃X₂₄X₈X₉CX₁₀X₁₁CX₁₂X₁₃X₁₄X₁₅X₁₆RSDDLVRH | |
| | | | KCPECGKSFSRSDDLVRHQRTHT | | X₁₇X₁₈X₁₉HX₂₀X₂₁X₂₂X₂₃X₂₄X₈X₉CX₁₀X₁₁CX₁₂X₁₃X₁₄X₁₅X₁₆DCRDLA | |
| | | | GEKPYKCPECGKSFSDCRDLARH | | RHX₁₇X₁₈X₁₉HX₂₀X₂₁X₂₂X₂₃X₂₄X₈X₉CX₁₀X₁₁CX₁₂X₁₃X₁₄X₁₅X₁₆RSDE | |
| | | | QRTHTGEKPYKCPECGKSFSRSD | | LVRHX₁₇X₁₈X₁₉HX₂₀X₂₁X₂₂X₂₃X₂₄X₈X₉CX₁₀X₁₁CX₁₂X₁₃X₁₄X₁₅X₁₆RA | |
| | | | ELVRHQRTHTGEKPYKCPECGKS | | DNLTEHX₁₇X₁₈X₁₉HX₂₀X₂₁X₂₂X₂₃X₂₄X₂₅X₂₆X₂₇X₂₈X₂₉X₃₀ | |
| | | | FSRADNLTEHQRTHTGEKPTGKK | | | |
| | | | TS | | | |
| gcgcccagg | gcg CCC | 1143 | LEPGEKPYKCPECGKSFSRSDEL | 1692 | X₁X₂X₃X₄X₅X₆X₇X₈X₉CX₁₀X₁₁CX₁₂X₁₃X₁₄X₁₅X₁₆RSDELVRHX₁₇X₁₈X₁₉ | 2241 |
| gtagggcag | AGG GTA | | VRHQRTHTGEKPYKCPECGKSFS | | HX₂₀X₂₁X₂₂X₂₃X₂₄X₈X₉CX₁₀X₁₁CX₁₂X₁₃X₁₄X₁₅X₁₆RADNLTEHX₁₇X₁₈ | |
| gtg | ggg CAG | | RADNLTEHQRTHTGEKPYKCPEC | | X₁₉HX₂₀X₂₁X₂₂X₂₃X₂₄X₈X₉CX₁₀X₁₁CX₁₂X₁₃X₁₄X₁₅X₁₆RSDKLVRHX₁₇ | |
| | GTG | | GKSFSRSDKLVRHQRTHTGEKPY | | X₁₈X₁₉HX₂₀X₂₁X₂₂X₂₃X₂₄X₈X₉CX₁₀X₁₁CX₁₂X₁₃X₁₄X₁₅X₁₆QSSSLVRH | |
| | | | KCPECGKSFSQSSSLVRHQRTHT | | X₁₇X₁₈X₁₉HX₂₀X₂₁X₂₂X₂₃X₂₄X₈X₉CX₁₀X₁₁CX₁₂X₁₃X₁₄X₁₅X₁₆RSDHLT | |
| | | | GEKPYKCPECGKSFSRSDHLTNH | | NHX₁₇X₁₈X₁₉HX₂₀X₂₁X₂₂X₂₃X₂₄X₈X₉CX₁₀X₁₁CX₁₂X₁₃X₁₄X₁₅X₁₆SKKH | |
| | | | QRTHTGEKPYKCPECGKSFSSKK | | LAEHX₁₇X₁₈X₁₉HX₂₀X₂₁X₂₂X₂₃X₂₄X₈X₉CX₁₀X₁₁CX₁₂X₁₃X₁₄X₁₅X₁₆RS | |
| | | | HLAEHQRTHTGEKPYKCPECGKS | | DDLVRHX₁₇X₁₈X₁₉HX₂₀X₂₁X₂₂X₂₃X₂₄X₂₅X₂₆X₂₇X₂₈X₂₉X₃₀ | |
| | | | FSRSDDLVRHQRTHTGEKPTGKK | | | |
| | | | TS | | | |
| gggtgggcg | GGG TGG | 1144 | LEPGEKPYKCPECGKSFSRSDKL | 1693 | X₁X₂X₃X₄X₅X₆X₇X₈X₉CX₁₀X₁₁CX₁₂X₁₃X₁₄X₁₅X₁₆RSDKLVRHX₁₇X₁₈X₁₉ | 2242 |
| cccagggta | gcg CCC | | VRHQRTHTGEKPYKCPECGKSFS | | HX₂₀X₂₁X₂₂X₂₃X₂₄X₈X₉CX₁₀X₁₁CX₁₂X₁₃X₁₄X₁₅X₁₆QSSSLVRHX₁₇X₁₈ | |
| ggg | AGG GTA | | QSSSLVRHQRTHTGEKPYKCPEC | | X₁₉HX₂₀X₂₁X₂₂X₂₃X₂₄X₈X₉CX₁₀X₁₁CX₁₂X₁₃X₁₄X₁₅X₁₆RSDHLTNHX₁₇ | |
| | GGG | | GKSFSRSDHLTNHQRTHTGEKPY | | X₁₈X₁₉HX₂₀X₂₁X₂₂X₂₃X₂₄X₈X₉CX₁₀X₁₁CX₁₂X₁₃X₁₄X₁₅X₁₆SKKHLAEH | |
| | | | KCPECGKSFSSKKHLAEHQRTHT | | X₁₇X₁₈X₁₉HX₂₀X₂₁X₂₂X₂₃X₂₄X₈X₉CX₁₀X₁₁CX₁₂X₁₃X₁₄X₁₅X₁₆RSDDLV | |
| | | | GEKPYKCPECGKSFSRSDDLVRH | | RHX₁₇X₁₈X₁₉HX₂₀X₂₁X₂₂X₂₃X₂₄X₈X₉CX₁₀X₁₁CX₁₂X₁₃X₁₄X₁₅X₁₆RSDH | |
| | | | QRTHTGEKPYKCPECGKSFSRSD | | LTTHX₁₇X₁₈X₁₉HX₂₀X₂₁X₂₂X₂₃X₂₄X₈X₉CX₁₀X₁₁CX₁₂X₁₃X₁₄X₁₅X₁₆RS | |
| | | | HLTTHQRTHTGEKPYKCPECGKS | | DKLVRHX₁₇X₁₈X₁₉HX₂₀X₂₁X₂₂X₂₃X₂₄X₂₅X₂₆X₂₇X₂₈X₂₉X₃₀ | |
| | | | FSRSDKLVRHQRTHTGEKPTGKK | | | |
| | | | TS | | | |
| tgggcgccc | TGG gcg | 1145 | LEPGEKPYKCPECGKSFSRADNL | 1694 | X₁X₂X₃X₄X₅X₆X₇X₈X₉CX₁₀X₁₁CX₁₂X₁₃X₁₄X₁₅X₁₆RADNLTEHX₁₇X₁₈X₁₉ | 2243 |
| agggtaggg | CCC AGG | | TEHQRTHTGEKPYKCPECGKSFS | | HX₂₀X₂₁X₂₂X₂₃X₂₄X₈X₉CX₁₀X₁₁CX₁₂X₁₃X₁₄X₁₅X₁₆RSDKLVRHX₁₇X₁₈ | |
| cag | GTA ggg | | RSDKLVRHQRTHTGEKPYKCPEC | | X₁₉HX₂₀X₂₁X₂₂X₂₃X₂₄X₈X₉CX₁₀X₁₁CX₁₂X₁₃X₁₄X₁₅X₁₆QSSSLVRHX₁₇ | |
| | CAG | | GKSFSQSSSLVRHQRTHTGEKPY | | X₁₈X₁₉HX₂₀X₂₁X₂₂X₂₃X₂₄X₈X₉CX₁₀X₁₁CX₁₂X₁₃X₁₄X₁₅X₁₆RSDHLTNH | |
| | | | KCPECGKSFSRSDHLTNHQRTHT | | X₁₇X₁₈X₁₉HX₂₀X₂₁X₂₂X₂₃X₂₄X₈X₉CX₁₀X₁₁CX₁₂X₁₃X₁₄X₁₅X₁₆SKKHLA | |
| | | | GEKPYKCPECGKSFSSKKHLAEH | | EHX₁₇X₁₈X₁₉HX₂₀X₂₁X₂₂X₂₃X₂₄X₈X₉CX₁₀X₁₁CX₁₂X₁₃X₁₄X₁₅X₁₆RSDD | |
| | | | QRTHTGEKPYKCPECGKSFSRSD | | LVRHX₁₇X₁₈X₁₉HX₂₀X₂₁X₂₂X₂₃X₂₄X₈X₉CX₁₀X₁₁CX₁₂X₁₃X₁₄X₁₅X₁₆RS | |
| | | | DLVRHQRTHTGEKPYKCPECGKS | | DHLTTHX₁₇X₁₈X₁₉HX₂₀X₂₁X₂₂X₂₃X₂₄X₂₅X₂₆X₂₇X₂₈X₂₉X₃₀ | |
| | | | FSRSDHLTTHQRTHTGEKPTGKK | | | |
| | | | TS | | | |
| gcggcgtgg | GCG GCG | 1146 | LEPGEKPYKCPECGKSFSQSSNL | 1695 | X₁X₂X₃X₄X₅X₆X₇X₈X₉CX₁₀X₁₁CX₁₂X₁₃X₁₄X₁₅X₁₆QSSNLVRHX₁₇X₁₈X₁₉ | 2244 |
| aggcaggga | TGG AGG | | VRHQRTHTGEKPYKCPECGKSFS | | HX₂₀X₂₁X₂₂X₂₃X₂₄X₈X₉CX₁₀X₁₁CX₁₂X₁₃X₁₄X₁₅X₁₆QRAHLERHX₁₇X₁₈ | |
| gaa | CAG GGA | | QRAHLERHQRTHTGEKPYKCPEC | | X₁₉HX₂₀X₂₁X₂₂X₂₃X₂₄X₈X₉CX₁₀X₁₁CX₁₂X₁₃X₁₄X₁₅X₁₆RADNLTEHX₁₇ | |
| | GAA | | GKSFSRADNLTEHQRTHTGEKPY | | X₁₈X₁₉HX₂₀X₂₁X₂₂X₂₃X₂₄X₈X₉CX₁₀X₁₁CX₁₂X₁₃X₁₄X₁₅X₁₆RSDHLTNH | |
| | | | KCPECGKSFSRSDHLTNHQRTHT | | X₁₇X₁₈X₁₉HX₂₀X₂₁X₂₂X₂₃X₂₄X₈X₉CX₁₀X₁₁CX₁₂X₁₃X₁₄X₁₅X₁₆RSDHLT | |
| | | | GEKPYKCPECGKSFSRSDHLTTH | | THX₁₇X₁₈X₁₉HX₂₀X₂₁X₂₂X₂₃X₂₄X₈X₉CX₁₀X₁₁CX₁₂X₁₃X₁₄X₁₅X₁₆RSDD | |
| | | | QRTHTGEKPYKCPECGKSFSRSD | | LVRHX₁₇X₁₈X₁₉HX₂₀X₂₁X₂₂X₂₃X₂₄X₈X₉CX₁₀X₁₁CX₁₂X₁₃X₁₄X₁₅X₁₆RS | |
| | | | DLVRHQRTHTGEKPYKCPECGKS | | DDLVRHX₁₇X₁₈X₁₉HX₂₀X₂₁X₂₂X₂₃X₂₄X₂₅X₂₆X₂₇X₂₈X₂₉X₃₀ | |
| | | | FSRSDDLVRHQRTHTGEKPTGKK | | | |
| | | | TS | | | |
| gccgcggcg | GCC GCG | 1147 | LEPGEKPYKCPECGKSFSQRAHL | 1696 | X₁X₂X₃X₄X₅X₆X₇X₈X₉CX₁₀X₁₁CX₁₂X₁₃X₁₄X₁₅X₁₆QRAHLERHX₁₇X₁₈X₁₉ | 2245 |
| tggaggcag | GCG TGG | | ERHQRTHTGEKPYKCPECGKSFS | | HX₂₀X₂₁X₂₂X₂₃X₂₄X₈X₉CX₁₀X₁₁CX₁₂X₁₃X₁₄X₁₅X₁₆RADNLTEHX₁₇X₁₈ | |
| gga | AGG CAG | | RADNLTEHQRTHTGEKPYKCPEC | | X₁₉HX₂₀X₂₁X₂₂X₂₃X₂₄X₈X₉CX₁₀X₁₁CX₁₂X₁₃X₁₄X₁₅X₁₆RSDHLTNHX₁₇ | |
| | GGA | | GKSFSRSDHLTNHQRTHTGEKPY | | X₁₈X₁₉HX₂₀X₂₁X₂₂X₂₃X₂₄X₈X₉CX₁₀X₁₁CX₁₂X₁₃X₁₄X₁₅X₁₆RSDHLTTH | |
| | | | KCPECGKSFSRSDHLTTHQRTHT | | X₁₇X₁₈X₁₉HX₂₀X₂₁X₂₂X₂₃X₂₄X₈X₉CX₁₀X₁₁CX₁₂X₁₃X₁₄X₁₅X₁₆RSDDLV | |
| | | | GEKPYKCPECGKSFSRSDDLVRH | | RHX₁₇X₁₈X₁₉HX₂₀X₂₁X₂₂X₂₃X₂₄X₈X₉CX₁₀X₁₁CX₁₂X₁₃X₁₄X₁₅X₁₆RSDD | |
| | | | QRTHTGEKPYKCPECGKSFSRSD | | LVRHX₁₇X₁₈X₁₉HX₂₀X₂₁X₂₂X₂₃X₂₄X₈X₉CX₁₀X₁₁CX₁₂X₁₃X₁₄X₁₅X₁₆DC | |
| | | | DLVRHQRTHTGEKPYKCPECGKS | | RDLARHX₁₇X₁₈X₁₉HX₂₀X₂₁X₂₂X₂₃X₂₄X₂₅X₂₆X₂₇X₂₈X₂₉X₃₀ | |
| | | | FSDCRDLARHQRTHTGEKPTGKK | | | |
| | | | TS | | | |
| aaccctcgt | AAC CCT | 1148 | LEPGEKPYKCPECGKSFSTSGNL | 1697 | X₁X₂X₃X₄X₅X₆X₇X₈X₉CX₁₀X₁₁CX₁₂X₁₃X₁₄X₁₅X₁₆TSGNLTEHX₁₇X₁₈X₁₉ | 2246 |
| cgacatgga | CGT CGA | | TEHQRTHTGEKPYKCPECGKSFS | | HX₂₀X₂₁X₂₂X₂₃X₂₄X₈X₉CX₁₀X₁₁CX₁₂X₁₃X₁₄X₁₅X₁₆QRAHLERHX₁₇X₁₈ | |
| cat | CAT GGA | | QRAHLERHQRTHTGEKPYKCPEC | | X₁₉HX₂₀X₂₁X₂₂X₂₃X₂₄X₈X₉CX₁₀X₁₁CX₁₂X₁₃X₁₄X₁₅X₁₆TSGNLTEHX₁₇ | |
| | CAT | | GKSFSTSGNLTEHQRTHTGEKPY | | X₁₈X₁₉HX₂₀X₂₁X₂₂X₂₃X₂₄X₈X₉CX₁₀X₁₁CX₁₂X₁₃X₁₄X₁₅X₁₆QSGHLTEH | |
| | | | KCPECGKSFSQSGHLTEHQRTHT | | X₁₇X₁₈X₁₉HX₂₀X₂₁X₂₂X₂₃X₂₄X₈X₉CX₁₀X₁₁CX₁₂X₁₃X₁₄X₁₅X₁₆SRRTCR | |
| | | | GEKPYKCPECGKSFSSRRTCRAH | | AHX₁₇X₁₈X₁₉HX₂₀X₂₁X₂₂X₂₃X₂₄X₈X₉CX₁₀X₁₁CX₁₂X₁₃X₁₄X₁₅X₁₆TKNS | |
| | | | QRTHTGEKPYKCPECGKSFSTKN | | LTEHX₁₇X₁₈X₁₉HX₂₀X₂₁X₂₂X₂₃X₂₄X₈X₉CX₁₀X₁₁CX₁₂X₁₃X₁₄X₁₅X₁₆DS | |
| | | | SLTEHQRTHTGEKPYKCPECGKS | | GNLRVHX₁₇X₁₈X₁₉HX₂₀X₂₁X₂₂X₂₃X₂₄X₂₅X₂₆X₂₇X₂₈X₂₉X₃₀ | |
| | | | FSDSGNLRVHQRTHTGEKPTGKK | | | |
| | | | TS | | | |
| cctcgtcga | CCT CGT | 1149 | LEPGEKPYKCPECGKSFSDPGHL | 1698 | X₁X₂X₃X₄X₅X₆X₇X₈X₉CX₁₀X₁₁CX₁₂X₁₃X₁₄X₁₅X₁₆DPGHLVRHX₁₇X₁₈X₁₉ | 2247 |
| catggacat | CGA CAT | | VRHQRTHTGEKPYKCPECGKSFS | | HX₂₀X₂₁X₂₂X₂₃X₂₄X₈X₉CX₁₀X₁₁CX₁₂X₁₃X₁₄X₁₅X₁₆TSGNLTEHX₁₇X₁₈ | |
| ggc | GGA CAT | | TSGNLTEHQRTHTGEKPYKCPEC | | X₁₉HX₂₀X₂₁X₂₂X₂₃X₂₄X₈X₉CX₁₀X₁₁CX₁₂X₁₃X₁₄X₁₅X₁₆QRAHLERHX₁₇ | |
| | GGC | | GKSFSQRAHLERHQRTHTGEKPY | | X₁₈X₁₉HX₂₀X₂₁X₂₂X₂₃X₂₄X₈X₉CX₁₀X₁₁CX₁₂X₁₃X₁₄X₁₅X₁₆TSGNLTEH | |
| | | | KCPECGKSFSTSGNLTEHQRTHT | | X₁₇X₁₈X₁₉HX₂₀X₂₁X₂₂X₂₃X₂₄X₈X₉CX₁₀X₁₁CX₁₂X₁₃X₁₄X₁₅X₁₆QSGHLT | |
| | | | GEKPYKCPECGKSFSQSGHLTEH | | EHX₁₇X₁₈X₁₉HX₂₀X₂₁X₂₂X₂₃X₂₄X₈X₉CX₁₀X₁₁CX₁₂X₁₃X₁₄X₁₅X₁₆SRRT | |
| | | | QRTHTGEKPYKCPECGKSFSSRR | | CRAHX₁₇X₁₈X₁₉HX₂₀X₂₁X₂₂X₂₃X₂₄X₈X₉CX₁₀X₁₁CX₁₂X₁₃X₁₄X₁₅X₁₆TK | |
| | | | TCRAHQRTHTGEKPYKCPECGKS | | NSLTEHX₁₇X₁₈X₁₉HX₂₀X₂₁X₂₂X₂₃X₂₄X₂₅X₂₆X₂₇X₂₈X₂₉X₃₀ | |
| | | | FSTKNSLTEHQRTHTGEKPTGKK | | | |
| | | | TS | | | |
| catggacat | CAT GGA | 1150 | LEPGEKPYKCPECGKSFSRADNL | 1699 | X₁X₂X₃X₄X₅X₆X₇X₈X₉CX₁₀X₁₁CX₁₂X₁₃X₁₄X₁₅X₁₆RADNLTEHX₁₇X₁₈X₁₉ | 2248 |
| ggccgacta | CAT GGC | | TEHQRTHTGEKPYKCPECGKSFS | | HX₂₀X₂₁X₂₂X₂₃X₂₄X₈X₉CX₁₀X₁₁CX₁₂X₁₃X₁₄X₁₅X₁₆QNSTLTEHX₁₇X₁₈ | |
| cag | CGA CTA | | QNSTLTEHQRTHTGEKPYKCPEC | | X₁₉HX₂₀X₂₁X₂₂X₂₃X₂₄X₈X₉CX₁₀X₁₁CX₁₂X₁₃X₁₄X₁₅X₁₆QSGHLTEHX₁₇ | |
| | CAG | | GKSFSQSGHLTEHQRTHTGEKPY | | X₁₈X₁₉HX₂₀X₂₁X₂₂X₂₃X₂₄X₈X₉CX₁₀X₁₁CX₁₂X₁₃X₁₄X₁₅X₁₆DPGHLVRH | |
| | | | KCPECGKSFSDPGHLVRHQRTHT | | X₁₇X₁₈X₁₉HX₂₀X₂₁X₂₂X₂₃X₂₄X₈X₉CX₁₀X₁₁CX₁₂X₁₃X₁₄X₁₅X₁₆TSGNLT | |
| | | | GEKPYKCPECGKSFSTSGNLTEH | | EHX₁₇X₁₈X₁₉HX₂₀X₂₁X₂₂X₂₃X₂₄X₈X₉CX₁₀X₁₁CX₁₂X₁₃X₁₄X₁₅X₁₆QRAH | |
| | | | QRTHTGEKPYKCPECGKSFSQRA | | LERHX₁₇X₁₈X₁₉HX₂₀X₂₁X₂₂X₂₃X₂₄X₈X₉CX₁₀X₁₁CX₁₂X₁₃X₁₄X₁₅X₁₆TS | |
| | | | HLERHQRTHTGEKPYKCPECGKS | | GNLTEHX₁₇X₁₈X₁₉HX₂₀X₂₁X₂₂X₂₃X₂₄X₂₅X₂₆X₂₇X₂₈X₂₉X₃₀ | |
| | | | FSTSGNLTEHQRTHTGEKPTGKK | | | |
| | | | TS | | | |
| caaaaccct | CAA AAC | 1151 | LEPGEKPYKCPECGKSFSQRAHL | 1700 | X₁X₂X₃X₄X₅X₆X₇X₈X₉CX₁₀X₁₁CX₁₂X₁₃X₁₄X₁₅X₁₆QRAHLERHX₁₇X₁₈X₁₉ | 2249 |
| cgtcgacat | CCT CGT | | ERHQRTHTGEKPYKCPECGKSFS | | HX₂₀X₂₁X₂₂X₂₃X₂₄X₈X₉CX₁₀X₁₁CX₁₂X₁₃X₁₄X₁₅X₁₆TSGNLTEHX₁₇X₁₈ | |
| gga | CGA CAT | | TSGNLTEHQRTHTGEKPYKCPEC | | X₁₉HX₂₀X₂₁X₂₂X₂₃X₂₄X₈X₉CX₁₀X₁₁CX₁₂X₁₃X₁₄X₁₅X₁₆QSGHLTEHX₁₇ | |
| | GGA | | GKSFSQSGHLTEHQRTHTGEKPY | | X₁₈X₁₉HX₂₀X₂₁X₂₂X₂₃X₂₄X₈X₉CX₁₀X₁₁CX₁₂X₁₃X₁₄X₁₅X₁₆SRRTCRAH | |
| | | | KCPECGKSFSSRRTCRAHQRTHT | | X₁₇X₁₈X₁₉HX₂₀X₂₁X₂₂X₂₃X₂₄X₈X₉CX₁₀X₁₁CX₁₂X₁₃X₁₄X₁₅X₁₆TKNSLT | |
| | | | GEKPYKCPECGKSFSTKNSLTEH | | EHX₁₇X₁₈X₁₉HX₂₀X₂₁X₂₂X₂₃X₂₄X₈X₉CX₁₀X₁₁CX₁₂X₁₃X₁₄X₁₅X₁₆DSGN | |
| | | | QRTHTGEKPYKCPECGKSFSDSG | | LRVHX₁₇X₁₈X₁₉HX₂₀X₂₁X₂₂X₂₃X₂₄X₈X₉CX₁₀X₁₁CX₁₂X₁₃X₁₄X₁₅X₁₆QS | |
| | | | NLRVHQRTHTGEKPYKCPECGKS | | GNLTEHX₁₇X₁₈X₁₉HX₂₀X₂₁X₂₂X₂₃X₂₄X₂₅X₂₆X₂₇X₂₈X₂₉X₃₀ | |
| | | | FSQSGNLTEHQRTHTGEKPTGKK | | | |
| | | | TS | | | |
| cgtcgacat | CGT CGA | 1152 | LEPGEKPYKCPECGKSFSQSGHL | 1701 | X₁X₂X₃X₄X₅X₆X₇X₈X₉CX₁₀X₁₁CX₁₂X₁₃X₁₄X₁₅X₁₆QSGHLTEHX₁₇X₁₈X₁₉ | 2250 |
| ggacatggc | CAT GGA | | TEHQRTHTGEKPYKCPECGKSFS | | HX₂₀X₂₁X₂₂X₂₃X₂₄X₈X₉CX₁₀X₁₁CX₁₂X₁₃X₁₄X₁₅X₁₆DPGHLVRHX₁₇X₁₈ | |
| cga | CAT GGC | | DPGHLVRHQRTHTGEKPYKCPEC | | X₁₉HX₂₀X₂₁X₂₂X₂₃X₂₄X₈X₉CX₁₀X₁₁CX₁₂X₁₃X₁₄X₁₅X₁₆TSGNLTEHX₁₇ | |
| | CGA | | GKSFSTSGNLTEHQRTHTGEKPY | | X₁₈X₁₉HX₂₀X₂₁X₂₂X₂₃X₂₄X₈X₉CX₁₀X₁₁CX₁₂X₁₃X₁₄X₁₅X₁₆QRAHLERH | |
| | | | KCPECGKSFSQRAHLERHQRTHT | | X₁₇X₁₈X₁₉HX₂₀X₂₁X₂₂X₂₃X₂₄X₈X₉CX₁₀X₁₁CX₁₂X₁₃X₁₄X₁₅X₁₆TSGNLT | |
| | | | GEKPYKCPECGKSFSTSGNLTEH | | EHX₁₇X₁₈X₁₉HX₂₀X₂₁X₂₂X₂₃X₂₄X₈X₉CX₁₀X₁₁CX₁₂X₁₃X₁₄X₁₅X₁₆QSGH | |
| | | | QRTHTGEKPYKCPECGKSFSQSG | | LTEHX₁₇X₁₈X₁₉HX₂₀X₂₁X₂₂X₂₃X₂₄X₈X₉CX₁₀X₁₁CX₁₂X₁₃X₁₄X₁₅X₁₆SR | |
| | | | HLTEHQRTHTGEKPYKCPECGKS | | RTCRAHX₁₇X₁₈X₁₉HX₂₀X₂₁X₂₂X₂₃X₂₄X₂₅X₂₆X₂₇X₂₈X₂₉X₃₀ | |
| | | | FSSRRTCRAHQRTHTGEKPTGKK | | | |
| | | | TS | | | |
| cgacatgga | CGA CAT | 1153 | LEPGEKPYKCPECGKSFSQNSTL | 1702 | XX₂X₃X₄X₅X₆X₇X₈X₉CX₁₀X₁₁CX₁₂X₁₃X₁₄X₁₅X₁₆QNSTLTEHX₁₇X₁₈X₁₉ | 2251 |
| catggccga | GGA CAT | | TEHQRTHTGEKPYKCPECGKSFS | | HX₂₀X₂₁X₂₂X₂₃X₂₄X₈X₉CX₁₀X₁₁CX₁₂X₁₃X₁₄X₁₅X₁₆QSGHLTEHX₁₇X₁₈ | |
| cta | GGC CGA | | QSGHLTEHQRTHTGEKPYKCPEC | | X₁₉HX₂₀X₂₁X₂₂X₂₃X₂₄X₈X₉CX₁₀X₁₁CX₁₂X₁₃X₁₄X₁₅X₁₆DPGHLVRHX₁₇ | |
| | CTA | | GKSFSDPGHLVRHQRTHTGEKPY | | X₁₈X₁₉HX₂₀X₂₁X₂₂X₂₃X₂₄X₈X₉CX₁₀X₁₁CX₁₂X₁₃X₁₄X₁₅X₁₆TSGNLTEH | |
| | | | KCPECGKSFSTSGNLTEHQRTHT | | X₁₇X₁₈X₁₉HX₂₀X₂₁X₂₂X₂₃X₂₄X₈X₉CX₁₀X₁₁CX₁₂X₁₃X₁₄X₁₅X₁₆QRAHLE | |
| | | | GEKPYKCPECGKSFSQRAHLERH | | RHX₁₇X₁₈X₁₉HX₂₀X₂₁X₂₂X₂₃X₂₄X₈X₉CX₁₀X₁₁CX₁₂X₁₃X₁₄X₁₅X₁₆TSGN | |
| | | | QRTHTGEKPYKCPECGKSFSTSG | | LTEHX₁₇X₁₈X₁₉HX₂₀X₂₁X₂₂X₂₃X₂₄X₈X₉CX₁₀X₁₁CX₁₂X₁₃X₁₄X₁₅X₁₆QS | |
| | | | NLTEHQRTHTGEKPYKCPECGKS | | GHLTEHX₁₇X₁₈KX₁₉HX₂₀X₂₁X₂₂X₂₃X₂₄X₂₅X₂₆X₂₇X₂₈X₂₉X₃₀ | |
| | | | FSQSGHLTEHQRTHTGEKPTGKK | | | |
| | | | TS | | | |
| gtcgacatg | GTC GAC | 1154 | LEPGEKPYKCPECGKSFSDPGNL | 1703 | X₁X₂X₃X₄X₅X₆X₇X₈X₉CX₁₀X₁₁CX₁₂X₁₃X₁₄X₁₅X₁₆DPGNLVRHX₁₇X₁₈X₁₉ | 2252 |
| gacatggcc | ATG GAC | | VRHQRTHTGEKPYKCPECGKSFS | | HX₂₀X₂₁X₂₂X₂₃X₂₄X₈X₉CX₁₀X₁₁CX₁₂X₁₃X₁₄X₁₅X₁₆DCRDLARHX₁₇X₁₈ | |
| gac | ATG GCC | | DCRDLARHQRTHTGEKPYKCPEC | | X₁₉HX₂₀X₂₁X₂₂X₂₃X₂₄X₈X₉CX₁₀X₁₁CX₁₂X₁₃X₁₄X₁₅X₁₆RRDELNVHX₁₇ | |
| | GAC | | GKSFSRRDELNVHQRTHTGEKPY | | X₁₈X₁₉HX₂₀X₂₁X₂₂X₂₃X₂₄X₈X₉CX₁₀X₁₁CX₁₂X₁₃X₁₄X₁₅X₁₆DPGNLVRH | |
| | | | KCPECGKSFSDPGNLVRHQRTHT | | X₁₇X₁₈X₁₉HX₂₀X₂₁X₂₂X₂₃X₂₄X₈X₉CX₁₀X₁₁CX₁₂X₁₃X₁₄X₁₅X₁₆RRDELN | |
| | | | GEKPYKCPECGKSFSRRDELNVH | | VHX₁₇X₁₈X₁₉HX₂₀X₂₁X₂₂X₂₃X₂₄X₈X₉CX₁₀X₁₁CX₁₂X₁₃X₁₄X₁₅X₁₆DPGN | |
| | | | QRTHTGEKPYKCPECGKSFSDPG | | LVRHX₁₇X₁₈X₁₉HX₂₀X₂₁X₂₂X₂₃X₂₄X₈X₉CX₁₀X₁₁CX₁₂X₁₃X₁₄X₁₅X₁₆DP | |
| | | | NLVRHQRTHTGEKPYKCPECGKS | | GALVRHX₁₇X₁₈X₁₉HX₂₀X₂₁X₂₂X₂₃X₂₄X₂₅X₂₆X₂₇X₂₈X₂₉X₃₀ | |
| | | | FSDPGALVRHQRTHTGEKPTGKK | | | |
| | | | TS | | | |
| gtgctgcac | gtg CTG | 1155 | LEPGEKPYKCPECGKSFSTKNSL | 1704 | X₁X₂X₃X₄X₅X₆X₇X₈X₉CX₁₀X₁₁CX₁₂X₁₃X₁₄X₁₅X₁₆TKNSLTEHX₁₇X₁₈X₁₉ | 2253 |
| tggacccag | CAC TGG | | TEHQRTHTGEKPYKCPECGKSFS | | HX₂₀X₂₁X₂₂X₂₃X₂₄X₈X₉CX₁₀X₁₁CX₁₂X₁₃X₁₄X₁₅X₁₆RADNLTEHX₁₇X₁₈ | |
| cct | ACC CAG | | RADNLTEHQRTHTGEKPYKCPEC | | X₁₉HX₂₀X₂₁X₂₂X₂₃X₂₄X₈X₉CX₁₀X₁₁CX₁₂X₁₃X₁₄X₁₅X₁₆DKKDLTRHX₁₇ | |
| | CCT | | GKSFSDKKDLTRHQRTHTGEKPY | | X₁₈X₁₉HX₂₀X₂₁X₂₂X₂₃X₂₄X₈X₉CX₁₀X₁₁CX₁₂X₁₃X₁₄X₁₅X₁₆RSDHLTTH | |
| | | | KCPECGKSFSRSDHLTTHQRTHT | | X₁₇X₁₈X₁₉HX₂₀X₂₁X₂₂X₂₃X₂₄X₈X₉CX₁₀X₁₁CX₁₂X₁₃X₁₄X₁₅X₁₆SKKALT | |
| | | | GEKPYKCPECGKSFSSKKALTEH | | EHX₁₇X₁₈X₁₉HX₂₀X₂₁X₂₂X₂₃X₂₄X₈X₉CX₁₀X₁₁CX₁₂X₁₃X₁₄X₁₅X₁₆RNDA | |
| | | | QRTHTGEKPYKCPECGKSFSRND | | LTEHX₁₇X₁₈X₁₉HX₂₀X₂₁X₂₂X₂₃X₂₄X₈X₉CX₁₀X₁₁CX₁₂X₁₃X₁₄X₁₅X₁₆RS | |
| | | | ALTEHQRTHTGEKPYKCPECGKS | | DELVRHX₁₇X₁₈X₁₉HX₂₀X₂₁X₂₂X₂₃X₂₄X₂₅X₂₆X₂₇X₂₈X₂₉X₃₀ | |
| | | | FSRSDELVRHQRTHTGEKPTGKK | | | |
| | | | TS | | | |
| acagtgctg | ACA gtg | 1156 | LEPGEKPYKCPECGKSFSRADNL | 1705 | X₁X₂X₃X₄X₅X₆X₇X₈X₉CX₁₀X₁₁CX₁₂X₁₃X₁₄X₁₅X₁₆RADNLTEHX₁₇X₁₈X₁₉ | 2254 |
| cactggacc | CTG CAC | | TEHQRTHTGEKPYKCPECGKSFS | | HX₂₀X₂₁X₂₂X₂₃X₂₄X₈X₉CX₁₀X₁₁CX₁₂X₁₃X₁₄X₁₅X₁₆DKKDLTRHX₁₇X₁₈ | |
| cag | TGG ACC | | DKKDLTRHQRTHTGEKPYKCPEC | | X₁₉HX₂₀X₂₁X₂₂X₂₃X₂₄X₈X₉CX₁₀X₁₁CX₁₂X₁₃X₁₄X₁₅X₁₆RSDHLTTHX₁₇ | |
| | CAG | | GKSFSRSDHLTTHQRTHTGEKPY | | X₁₈X₁₉HX₂₀X₂₁X₂₂X₂₃X₂₄X₈X₉CX₁₀X₁₁CX₁₂X₁₃X₁₄X₁₅X₁₆SKKALTEH | |
| | | | KCPECGKSFSSKKALTEHQRTHT | | X₁₇X₁₈X₁₉HX₂₀X₂₁X₂₂X₂₃X₂₄X₈X₉CX₁₀X₁₁CX₁₂X₁₃X₁₄X₁₅X₁₆RNDALT | |
| | | | GEKPYKCPECGKSFSRNDALTEH | | EHX₁₇X₁₈X₁₉HX₂₀X₂₁X₂₂X₂₃X₂₄X₈X₉CX₁₀X₁₁CX₁₂X₁₃X₁₄X₁₅X₁₆RSDE | |
| | | | QRTHTGEKPYKCPECGKSFSRSD | | LVRHX₁₇X₁₈X₁₉HX₂₀X₂₁X₂₂X₂₃X₂₄X₈X₉CX₁₀X₁₁CX₁₂X₁₃X₁₄X₁₅X₁₆SP | |
| | | | ELVRHQRTHTGEKPYKCPECGKS | | ADLTRHX₁₇X₁₈X₁₉HX₂₀X₂₁X₂₂X₂₃X₂₄X₂₅X₂₆X₂₇X₂₈X₂₉X₃₀ | |
| | | | FSSPADLTRHQRTHTGEKPTGKK | | | |
| | | | TS | | | |
| ctgcactgg | CTG CAC | 1157 | LEPGEKPYKCPECGKSFSSPADL | 1706 | X₁X₂X₃X₄X₅X₆X₇X₈X₉CX₁₀X₁₁CX₁₂X₁₃X₁₄X₁₅X₁₆SPADLTRHX₁₇X₁₈X₁₉ | 2255 |
| acccagcct | TGG ACC | | TRHQRTHTGEKPYKCPECGKSFS | | HX₂₀X₂₁X₂₂X₂₃X₂₄X₈X₉CX₁₀X₁₁CX₁₂X₁₃X₁₄X₁₅X₁₆TKNSLTEHX₁₇X₁₈ | |
| aca | CAG CCT | | TKNSLTEHQRTHTGEKPYKCPEC | | X₁₉HX₂₀X₂₁X₂₂X₂₃X₂₄X₈X₉CX₁₀X₁₁CX₁₂X₁₃X₁₄X₁₅X₁₆RADNLTEHX₁₇ | |
| | ACA | | GKSFSRADNLTEHQRTHTGEKPY | | X₁₈X₁₉HX₂₀X₂₁X₂₂X₂₃X₂₄X₈X₉CX₁₀X₁₁CX₁₂X₁₃X₁₄X₁₅X₁₆DKKDLTRH | |
| | | | KCPECGKSFSDKKDLTRHQRTHT | | X₁₇X₁₈X₁₉HX₂₀X₂₁X₂₂X₂₃X₂₄X₈X₉CX₁₀X₁₁CX₁₂X₁₃X₁₄X₁₅X₁₆RSDHLT | |
| | | | GEKPYKCPECGKSFSRSDHLTTH | | THX₁₇X₁₈X₁₉HX₂₀X₂₁X₂₂X₂₃X₂₄X₈X₉CX₁₀X₁₁CX₁₂X₁₃X₁₄X₁₅X₁₆SKKA | |
| | | | QRTHTGEKPYKCPECGKSFSSKK | | LTEHX₁₇X₁₈X₁₉HX₂₀X₂₁X₂₂X₂₃X₂₄X₈X₉CX₁₀X₁₁CX₁₂X₁₃X₁₄X₁₅X₁₆RN | |
| | | | ALTEHQRTHTGEKPYKCPECGKS | | DALTEHX₁₇X₁₈X₁₉HX₂₀X₂₁X₂₂X₂₃X₂₄X₂₅X₂₆X₂₇X₂₈X₂₉X₃₀ | |
| | | | FSRNDALTEHQRTHTGEKPTGKK | | | |
| | | | TS | | | |
| cactggacc | CAC TGG | 1158 | LEPGEKPYKCPECGKSFSTSHSL | 1707 | X₁X₂X₃X₄X₅X₆X₇X₈X₉CX₁₀X₁₁CX₁₂X₁₃X₁₄X₁₅X₁₆TSHSLTEHX₁₇X₁₈X₁₉ | 2256 |
| cagcctaca | ACC CAG | | TEHQRTHTGEKPYKCPECGKSFS | | HX₂₀X₂₁X₂₂X₂₃X₂₄X₈X₉CX₁₀X₁₁CX₁₂X₁₃X₁₄X₁₅X₁₆SPADLTRHX₁₇X₁₈ | |
| cca | CCT ACA | | SPADLTRHQRTHTGEKPYKCPEC | | X₁₉HX₂₀X₂₁X₂₂X₂₃X₂₄X₈X₉CX₁₀X₁₁CX₁₂X₁₃X₁₄X₁₅X₁₆TKNSLTEHX₁₇ | |
| | CCA | | GKSFSTKNSLTEHQRTHTGEKPY | | X₁₈X₁₉HX₂₀X₂₁X₂₂X₂₃X₂₄X₈X₉CX₁₀X₁₁CX₁₂X₁₃X₁₄X₁₅X₁₆RADNLTEH | |
| | | | KCPECGKSFSRADNLTEHQRTHT | | X₁₇X₁₈X₁₉HX₂₀X₂₁X₂₂X₂₃X₂₄X₈X₉CX₁₀X₁₁CX₁₂X₁₃X₁₄X₁₅X₁₆DKKDLT | |
| | | | GEKPYKCPECGKSFSDKKDLTRH | | RHX₁₇X₁₈X₁₉HX₂₀X₂₁X₂₂X₂₃X₂₄X₈X₉CX₁₀X₁₁CX₁₂X₁₃X₁₄X₁₅X₁₆RSDH | |
| | | | QRTHTGEKPYKCPECGKSFSRSD | | LTTHX₁₇X₁₈X₁₉HX₂₀X₂₁X₂₂X₂₃X₂₄X₈X₉CX₁₀X₁₁CX₁₂X₁₃X₁₄X₁₅X₁₆SK | |
| | | | HLTTHQRTHTGEKPYKCPECGKS | | KALTEHX₁₇X₁₈X₁₉HX₂₀X₂₁X₂₂X₂₃X₂₄X₂₅X₂₆X₂₇X₂₈X₂₉X₃₀ | |
| | | | FSSKKALTEHQRTHTGEKPTGKK | | | |
| | | | TS | | | |
| actacagtg | ACT ACA | 1159 | LEPGEKPYKCPECGKSFSDKKDL | 1708 | X₁X₂X₃X₄X₅X₆X₇X₈X₉CX₁₀X₁₁CX₁₂X₁₃X₁₄X₁₅X₁₆DKKDLTRHX₁₇X₁₈X₁₉ | 2257 |
| ctgcactgg | gtg CTG | | TRHQRTHTGEKPYKCPECGKSFS | | HX₂₀X₂₁X₂₂X₂₃X₂₄X₈X₉CX₁₀X₁₁CX₁₂X₁₃X₁₄X₁₅X₁₆RSDHLTTHX₁₇X₁₈ | |
| acc | CAC TGG | | RSDHLTTHQRTHTGEKPYKCPEC | | X₁₉HX₂₀X₂₁X₂₂X₂₃X₂₄X₈X₉CX₁₀X₁₁CX₁₂X₁₃X₁₄X₁₅X₁₆SKKALTEHX₁₇ | |
| | ACC | | GKSFSSKKALTEHQRTHTGEKPY | | X₁₈X₁₉HX₂₀X₂₁X₂₂X₂₃X₂₄X₈X₉CX₁₀X₁₁CX₁₂X₁₃X₁₄X₁₅X₁₆RNDALTEH | |
| | | | KCPECGKSFSRNDALTEHQRTHT | | X₁₇X₁₈X₁₉HX₂₀X₂₁X₂₂X₂₃X₂₄X₈X₉CX₁₀X₁₁CX₁₂X₁₃X₁₄X₁₅X₁₆RSDELV | |
| | | | GEKPYKCPECGKSFSRSDELVRH | | RHX₁₇X₁₈X₁₉HX₂₀X₂₁X₂₂X₂₃X₂₄X₈X₉CX₁₀X₁₁CX₁₂X₁₃X₁₄X₁₅X₁₆SPAD | |
| | | | QRTHTGEKPYKCPECGKSFSSPA | | LTRHX₁₇X₁₈X₁₉HX₂₀X₂₁X₂₂X₂₃X₂₄X₈X₉CX₁₀X₁₁CX₁₂X₁₃X₁₄X₁₅X₁₆TH | |
| | | | DLTRHQRTHTGEKPYKCPECGKS | | LDLIRHX₁₇X₁₈X₁₉HX₂₀X₂₁X₂₂X₂₃X₂₄X₂₅X₂₆X₂₇X₂₈X₂₉X₃₀ | |
| | | | FSTHLDLIRHQRTHTGEKPTGKK | | | |
| | | | TS | | | |
| acatggccg | ACA TGG | 1160 | LEPGEKPYKCPECGKSFSRNDAL | 1709 | X₁X₂X₃X₄X₅X₆X₇X₈X₉CX₁₀X₁₁CX₁₂X₁₃X₁₄X₁₅X₁₆RNDALTEHX₁₇X₁₈X₁₉ | 2258 |
| actacagtg | CCG ACT | | TEHQRTHTGEKPYKCPECGKSFS | | HX₂₀X₂₁X₂₂X₂₃X₂₄X₈X₉CX₁₀X₁₁CX₁₂X₁₃X₁₄X₁₅X₁₆RSDELVRHX₁₇X₁₈ | |
| ctg | ACA gtg | | RSDELVRHQRTHTGEKPYKCPEC | | X₁₉HX₂₀X₂₁X₂₂X₂₃X₂₄X₈X₉CX₁₀X₁₁CX₁₂X₁₃X₁₄X₁₅X₁₆SPADLTRHX₁₇ | |
| | CTG | | GKSFSSPADLTRHQRTHTGEKPY | | X₁₈X₁₉HX₂₀X₂₁X₂₂X₂₃X₂₄X₈X₉CX₁₀X₁₁CX₁₂X₁₃X₁₄X₁₅X₁₆THLDLIRH | |
| | | | KCPECGKSFSTHLDLIRHQRTHT | | X₁₇X₁₈X₁₉HX₂₀X₂₁X₂₂X₂₃X₂₄X₈X₉CX₁₀X₁₁CX₁₂X₁₃X₁₄X₁₅X₁₆RNDTLT | |
| | | | GEKPYKCPECGKSFSRNDTLTEH | | EHX₁₇X₁₈X₁₉HX₂₀X₂₁X₂₂X₂₃X₂₄X₈X₉CX₁₀X₁₁CX₁₂X₁₃X₁₄X₁₅X₁₆RSDH | |
| | | | QRTHTGEKPYKCPECGKSFSRSD | | LTTHX₁₇X₁₈X₁₉HX₂₀X₂₁X₂₂X₂₃X₂₄X₈X₉CX₁₀X₁₁CX₁₂X₁₃X₁₄X₁₅X₁₆SP | |
| | | | HLTTHQRTHTGEKPYKCPECGKS | | ADLTRHX₁₇X₁₈X₁₉HX₂₀X₂₁X₂₂X₂₃X₂₄X₂₅X₂₆X₂₇X₂₈X₂₉X₃₀ | |
| | | | FSSPADLTRHQRTHTGEKPTGKK | | | |
| | | | TS | | | |
| tggacatgg | TGG ACA | 1161 | LEPGEKPYKCPECGKSFSRSDEL | 1710 | X₁X₂X₃X₄X₅X₆X₇X₈X₉CX₁₀X₁₁CX₁₂X₁₃X₁₄X₁₅X₁₆RSDELVRHX₁₇X₁₈X₁₉ | 2259 |
| ccgactaca | TGG CCG | | VRHQRTHTGEKPYKCPECGKSFS | | HX₂₀X₂₁X₂₂X₂₃X₂₄X₈X₉CX₁₀X₁₁CX₁₂X₁₃X₁₄X₁₅X₁₆SPADLTRHX₁₇X₁₈ | |
| gtg | ACT ACA | | SPADLTRHQRTHTGEKPYKCPEC | | X₁₉HX₂₀X₂₁X₂₂X₂₃X₂₄X₈X₉CX₁₀X₁₁CX₁₂X₁₃X₁₄X₁₅X₁₆THLDLIRHX₁₇ | |
| | GTG | | GKSFSTHLDLIRHQRTHTGEKPY | | X₁₈X₁₉HX₂₀X₂₁X₂₂X₂₃X₂₄X₈X₉CX₁₀X₁₁CX₁₂X₁₃X₁₄X₁₅X₁₆RNDTLTEH | |
| | | | KCPECGKSFSRNDTLTEHQRTHT | | X₁₇X₁₈X₁₉HX₂₀X₂₁X₂₂X₂₃X₂₄X₈X₉CX₁₀X₁₁CX₁₂X₁₃X₁₄X₁₅X₁₆RSDHLT | |
| | | | GEKPYKCPECGKSFSRSDHLTTH | | THX₁₇X₁₈X₁₉HX₂₀X₂₁X₂₂X₂₃X₂₄X₈X₉CX₁₀X₁₁CX₁₂X₁₃X₁₄X₁₅X₁₆SPAD | |
| | | | QRTHTGEKPYKCPECGKSFSSPA | | LTRHX₁₇X₁₈X₁₉HX₂₀X₂₁X₂₂X₂₃X₂₄X₈X₉CX₁₀X₁₁CX₁₂X₁₃X₁₄X₁₅X₁₆RS | |
| | | | DLTRHQRTHTGEKPYKCPECGKS | | DHLTTHX₁₇X₁₈X₁₉HX₂₀X₂₁X₂₂X₂₃X₂₄X₂₅X₂₆X₂₇X₂₈X₂₉X₃₀ | |
| | | | FSRSDHLTTHQRTHTGEKPTGKK | | | |
| | | | TS | | | |
| cagcctaca | CAG CCT | 1162 | LEPGEKPYKCPECGKSFSTTGNL | 1711 | X₁X₂X₃X₄X₅X₆X₇X₈X₉CX₁₀X₁₁CX₁₂X₁₃X₁₄X₁₅X₁₆TTGNLTVHX₁₇X₁₈X₁₉ | 2260 |
| ccaccctgg | ACA CCA | | TVHQRTHTGEKPYKCPECGKSFS | | HX₂₀X₂₁X₂₂X₂₃X₂₄X₈X₉CX₁₀X₁₁CX₁₂X₁₃X₁₄X₁₅X₁₆RSDHLTTHX₁₇X₁₈ | |
| aat | CCC TGG | | RSDHLTTHQRTHTGEKPYKCPEC | | X₁₉HX₂₀X₂₁X₂₂X₂₃X₂₄X₈X₉CX₁₀X₁₁CX₁₂X₁₃X₁₄X₁₅X₁₆SKKHLAEHX₁₇ | |
| | AAT | | GKSFSSKKHLAEHQRTHTGEKPY | | X₁₈X₁₉HX₂₀X₂₁X₂₂X₂₃X₂₄X₈X₉CX₁₀X₁₁CX₁₂X₁₃X₁₄X₁₅X₁₆TSHSLTEH | |
| | | | KCPECGKSFSTSHSLTEHQRTHT | | X₁₇X₁₈X₁₉HX₂₀X₂₁X₂₂X₂₃X₂₄X₈X₉CX₁₀X₁₁CX₁₂X₁₃X₁₄X₁₅X₁₆SPADLT | |
| | | | GEKPYKCPECGKSFSSPADLTRH | | RHX₁₇X₁₈X₁₉HX₂₀X₂₁X₂₂X₂₃X₂₄X₈X₉CX₁₀X₁₁CX₁₂X₁₃X₁₄X₁₅X₁₆TKNS | |
| | | | QRTHTGEKPYKCPECGKSFSTKN | | LTEHX₁₇X₁₈X₁₉HX₂₀X₂₁X₂₂X₂₃X₂₄X₈X₉CX₁₀X₁₁CX₁₂X₁₃X₁₄X₁₅X₁₆RA | |
| | | | SLTEHQRTHTGEKPYKCPECGKS | | DNLTEHX₁₇X₁₈X₁₉HX₂₀X₂₁X₂₂X₂₃X₂₄X₂₅X₂₆X₂₇X₂₈X₂₉X₃₀ | |
| | | | FSRADNLTEHQRTHTGEKPTGKK | | | |
| | | | TS | | | |
| acatggaca | ACA TGG | 1163 | LEPGEKPYKCPECGKSFSSPADL | 1712 | X₁X₂X₃X₄X₅X₆X₇X₈X₉CX₁₀X₁₁CX₁₂X₁₃X₁₄X₁₅X₁₆SPADLTRHX₁₇X₁₈X₁₉ | 2261 |
| tggccgact | ACA TGG | | TRHQRTHTGEKPYKCPECGKSFS | | HX₂₀X₂₁X₂₂X₂₃X₂₄X₈X₉CX₁₀X₁₁CX₁₂X₁₃X₁₄X₁₅X₁₆THLDLIRHX₁₇X₁₈ | |
| aca | CCG ACT | | THLDLIRHQRTHTGEKPYKCPEC | | X₁₉HX₂₀X₂₁X₂₂X₂₃X₂₄X₈X₉CX₁₀X₁₁CX₁₂X₁₃X₁₄X₁₅X₁₆RNDTLTEHX₁₇ | |
| | ACA | | GKSFSRNDTLTEHQRTHTGEKPY | | X₁₈X₁₉HX₂₀X₂₁X₂₂X₂₃X₂₄X₈X₉CX₁₀X₁₁CX₁₂X₁₃X₁₄X₁₅X₁₆RSDHLTTH | |
| | | | KCPECGKSFSRSDHLTTHQRTHT | | X₁₇X₁₈X₁₉HX₂₀X₂₁X₂₂X₂₃X₂₄X₈X₉CX₁₀X₁₁CX₁₂X₁₃X₁₄X₁₅X₁₆SPADLT | |
| | | | GEKPYKCPECGKSFSSPADLTRH | | RHX₁₇X₁₈X₁₉HX₂₀X₂₁X₂₂X₂₃X₂₄X₈X₉CX₁₀X₁₁CX₁₂X₁₃X₁₄X₁₅X₁₆RSDH | |
| | | | QRTHTGEKPYKCPECGKSFSRSD | | LTTHX₁₇X₁₈X₁₉HX₂₀X₂₁X₂₂X₂₃X₂₄X₈X₉CX₁₀X₁₁CX₁₂X₁₃X₁₄X₁₅X₁₆SP | |
| | | | HLTTHQRTHTGEKPYKCPECGKS | | ADLTRHX₁₇X₁₈X₁₉HX₂₀X₂₁X₂₂X₂₃X₂₄X₂₅X₂₆X₂₇X₂₈X₂₉X₃₀ | |
| | | | FSSPADLTRHQRTHTGEKPTGKK | | | |
| | | | TS | | | |
| tggacccag | TGG ACC | 1164 | LEPGEKPYKCPECGKSFSSKKHL | 1713 | X₁X₂X₃X₄X₅X₆X₇X₈X₉CX₁₀X₁₁CX₁₂X₁₃X₁₄X₁₅X₁₆SKKHLAEHX₁₇X₁₈X₁₉ | 2262 |
| cctacacca | CAG CCT | | AEHQRTHTGEKPYKCPECGKSFS | | HX₂₀X₂₁X₂₂X₂₃X₂₄X₈X₉CX₁₀X₁₁CX₁₂X₁₃X₁₄X₁₅X₁₆TSHSLTEHX₁₇X₁₈ | |
| ccc | ACA CCA | | TSHSLTEHQRTHTGEKPYKCPEC | | X₁₉HX₂₀X₂₁X₂₂X₂₃X₂₄X₈X₉CX₁₀X₁₁CX₁₂X₁₃X₁₄X₁₅X₁₆SPADLTRHX₁₇ | |
| | CCC | | GKSFSSPADLTRHQRTHTGEKPY | | X₁₈X₁₉HX₂₀X₂₁X₂₂X₂₃X₂₄X₈X₉CX₁₀X₁₁CX₁₂X₁₃X₁₄X₁₅X₁₆TKNSLTEH | |
| | | | KCPECGKSFSTKNSLTEHQRTHT | | X₁₇X₁₈X₁₉HX₂₀X₂₁X₂₂X₂₃X₂₄X₈X₉CX₁₀X₁₁CX₁₂X₁₃X₁₄X₁₅X₁₆RADNLT | |
| | | | GEKPYKCPECGKSFSRADNLTEH | | EHX₁₇X₁₈X₁₉HX₂₀X₂₁X₂₂X₂₃X₂₄X₈X₉CX₁₀X₁₁CX₁₂X₁₃X₁₄X₁₅X₁₆DKKD | |
| | | | QRTHTGEKPYKCPECGKSFSDKK | | LTRHX₁₇X₁₈X₁₉HX₂₀X₂₁X₂₂X₂₃X₂₄X₈X₉CX₁₀X₁₁CX₁₂X₁₃X₁₄X₁₅X₁₆RS | |
| | | | DLTRHQRTHTGEKPYKCPECGKS | | DHLTTHX₁₇X₁₈X₁₉HX₂₀X₂₁X₂₂X₂₃X₂₄X₂₅X₂₆X₂₇X₂₈X₂₉X₃₀ | |
| | | | FSRSDHLTTHQRTHTGEKPTGKK | | | |
| | | | TS | | | |
| acccagcct | ACC CAG | 1165 | LEPGEKPYKCPECGKSFSRSDHL | 1714 | X₁X₂X₃X₄X₅X₆X₇X₈X₉CX₁₀X₁₁CX₁₂X₁₃X₁₄X₁₅X₁₆RSDHLTTHX₁₇X₁₈X₁₉ | 2263 |
| acaccaccc | CCT ACA | | TTHQRTHTGEKPYKCPECGKSFS | | HX₂₀X₂₁X₂₂X₂₃X₂₄X₈X₉CX₁₀X₁₁CX₁₂X₁₃X₁₄X₁₅X₁₆SKKHLAEHX₁₇X₁₈ | |
| tgg | CCA CCC | | SKKHLAEHQRTHTGEKPYKCPEC | | X₁₉HX₂₀X₂₁X₂₂X₂₃X₂₄X₈X₉CX₁₀X₁₁CX₁₂X₁₃X₁₄X₁₅X₁₆TSHSLTEHX₁₇ | |
| | TGG | | GKSFSTSHSLTEHQRTHTGEKPY | | X₁₈X₁₉HX₂₀X₂₁X₂₂X₂₃X₂₄X₈X₉CX₁₀X₁₁CX₁₂X₁₃X₁₄X₁₅X₁₆SPADLTRH | |
| | | | KCPECGKSFSSPADLTRHQRTHT | | X₁₇X₁₈X₁₉HX₂₀X₂₁X₂₂X₂₃X₂₄X₈X₉CX₁₀X₁₁CX₁₂X₁₃X₁₄X₁₅X₁₆TKNSLT | |
| | | | GEKPYKCPECGKSFSTKNSLTEH | | EHX₁₇X₁₈X₁₉HX₂₀X₂₁X₂₂X₂₃X₂₄X₈X₉CX₁₀X₁₁CX₁₂X₁₃X₁₄X₁₅X₁₆RADN | |
| | | | QRTHTGEKPYKCPECGKSFSRAD | | LTEHX₁₇X₁₈X₁₉HX₂₀X₂₁X₂₂X₂₃X₂₄X₈X₉CX₁₀X₁₁CX₁₂X₁₃X₁₄X₁₅X₁₆DK | |
| | | | NLTEHQRTHTGEKPYKCPECGKS | | KDLTRHX₁₇X₁₈X₁₉HX₂₀X₂₁X₂₂X₂₃X₂₄X₂₅X₂₆X₂₇X₂₈X₂₉X₃₀ | |
| | | | FSDKKDLTRHQRTHTGEKPTGKK | | | |
| | | | TS | | | |
| ccgactaca | CCG ACT | 1166 | LEPGEKPYKCPECGKSFSRSDHL | 1715 | X₁X₂X₃X₄X₅X₆X₇X₈X₉CX₁₀X₁₁CX₁₂X₁₃X₁₄X₁₅X₁₆RSDHLTTHX₁₇X₁₈X₁₉ | 2264 |
| gtgctgcac | ACA gtg | | TTHQRTHTGEKPYKCPECGKSFS | | HX₂₀X₂₁X₂₂X₂₃X₂₄X₈X₉CX₁₀X₁₁CX₁₂X₁₃X₁₄X₁₅X₁₆SKKALTEHX₁₇X₁₈ | |
| tgg | CTG CAC | | SKKALTEHQRTHTGEKPYKCPEC | | X₁₉HX₂₀X₂₁X₂₂X₂₃X₂₄X₈X₉CX₁₀X₁₁CX₁₂X₁₃X₁₄X₁₅X₁₆RNDALTEHX₁₇ | |
| | TGG | | GKSFSRNDALTEHQRTHTGEKPY | | X₁₈X₁₉HX₂₀X₂₁X₂₂X₂₃X₂₄X₈X₉CX₁₀X₁₁CX₁₂X₁₃X₁₄X₁₅X₁₆RSDELVRH | |
| | | | KCPECGKSFSRSDELVRHQRTHT | | X₁₇X₁₈X₁₉HX₂₀X₂₁X₂₂X₂₃X₂₄X₈X₉CX₁₀X₁₁CX₁₂X₁₃X₁₄X₁₅X₁₆SPADLT | |
| | | | GEKPYKCPECGKSFSSPADLTRH | | RHX₁₇X₁₈X₁₉HX₂₀X₂₁X₂₂X₂₃X₂₄X₈X₉CX₁₀X₁₁CX₁₂X₁₃X₁₄X₁₅X₁₆THLD | |
| | | | QRTHTGEKPYKCPECGKSFSTHL | | LIRHX₁₇X₁₈X₁₉HX₂₀X₂₁X₂₂X₂₃X₂₄X₈X₉CX₁₀X₁₁CX₁₂X₁₃X₁₄X₁₅X₁₆RN | |
| | | | DLIRHQRTHTGEKPYKCPECGKS | | DTLTEHX₁₇X₁₈X₁₉HX₂₀X₂₁X₂₂X₂₃X₂₄X₂₅X₂₆X₂₇X₂₈X₂₉X₃₀ | |
| | | | FSRNDTLTEHQRTHTGEKPTGKK | | | |
| | | | TS | | | |
| tggccgact | TGG CCG | 1167 | LEPGEKPYKCPECGKSFSSKKAL | 1716 | X₁X₂X₃X₄X₅X₆X₇X₈X₉CX₁₀X₁₁CX₁₂X₁₃X₁₄X₁₅X₁₆SKKALTEHX₁₇X₁₈X₁₉ | 2265 |
| acagtgctg | ACT ACA | | TEHQRTHTGEKPYKCPECGKSFS | | HX₂₀X₂₁X₂₂X₂₃X₂₄X₈X₉CX₁₀X₁₁CX₁₂X₁₃X₁₄X₁₅X₁₆RNDALTEHX₁₇X₁₈ | |
| cac | gtg CTG | | RNDALTEHQRTHTGEKPYKCPEC | | X₁₉HX₂₀X₂₁X₂₂X₂₃X₂₄X₈X₉CX₁₀X₁₁CX₁₂X₁₃X₁₄X₁₅X₁₆RSDELVRHX₁₇ | |
| | CAC | | GKSFSRSDELVRHQRTHTGEKPY | | X₁₈X₁₉HX₂₀X₂₁X₂₂X₂₃X₂₄X₈X₉CX₁₀X₁₁CX₁₂X₁₃X₁₄X₁₅X₁₆SPADLTRH | |
| | | | KCPECGKSFSSPADLTRHQRTHT | | X₁₇X₁₈X₁₉HX₂₀X₂₁X₂₂X₂₃X₂₄X₈X₉CX₁₀X₁₁CX₁₂X₁₃X₁₄X₁₅X₁₆THLDLI | |
| | | | GEKPYKCPECGKSFSTHLDLIRH | | RHX₁₇X₁₈X₁₉HX₂₀X₂₁X₂₂X₂₃X₂₄X₈X₉CX₁₀X₁₁CX₁₂X₁₃X₁₄X₁₅X₁₆RNDT | |
| | | | QRTHTGEKPYKCPECGKSFSRND | | LTEHX₁₇X₁₈X₁₉HX₂₀X₂₁X₂₂X₂₃X₂₄X₈X₉CX₁₀X₁₁CX₁₂X₁₃X₁₄X₁₅X₁₆RS | |
| | | | TLTEHQRTHTGEKPYKCPECGKS | | DHLTTHX₁₇X₁₈X₁₉HX₂₀X₂₁X₂₂X₂₃X₂₄X₂₅X₂₆X₂₇X₂₈X₂₉X₃₀ | |
| | | | FSRSDHLTTHQRTHTGEKPTGKK | | | |
| | | | TS | | | |
| agtgctgca | AGT GCT | 1168 | LEPGEKPYKCPECGKSFSDCRDL | 1717 | X₁X₂X₃X₄X₅X₆X₇X₈X₉CX₁₀X₁₁CX₁₂X₁₃X₁₄X₁₅X₁₆DCRDLARHX₁₇X₁₈X₁₉ | 2266 |
| ctggaccca | GCA CTG | | ARHQRTHTGEKPYKCPECGKSFS | | HX₂₀X₂₁X₂₂X₂₃X₂₄X₈X₉CX₁₀X₁₁CX₁₂X₁₃X₁₄X₁₅X₁₆TSHSLTEHX₁₇X₁₈ | |
| gcc | GAC CCA | | TSHSLTEHQRTHTGEKPYKCPEC | | X₁₉HX₂₀X₂₁X₂₂X₂₃X₂₄X₈X₉CX₁₀X₁₁CX₁₂X₁₃X₁₄X₁₅X₁₆DPGNLVRHX₁₇ | |
| | GCC | | GKSFSDPGNLVRHQRTHTGEKPY | | X₁₈X₁₉HX₂₀X₂₁X₂₂X₂₃X₂₄X₈X₉CX₁₀X₁₁CX₁₂X₁₃X₁₄X₁₅X₁₆RNDALTEH | |
| | | | KCPECGKSFSRNDALTEHQRTHT | | X₁₇X₁₈X₁₉HX₂₀X₂₁X₂₂X₂₃X₂₄X₈X₉CX₁₀X₁₁CX₁₂X₁₃X₁₄X₁₅X₁₆QSGDLR | |
| | | | GEKPYKCPECGKSFSQSGDLRRH | | RHX₁₇X₁₈X₁₉HX₂₀X₂₁X₂₂X₂₃X₂₄X₈X₉CX₁₀X₁₁CX₁₂X₁₃X₁₄X₁₅X₁₆TSGE | |
| | | | QRTHTGEKPYKCPECGKSFSTSG | | LVRHX₁₇X₁₈X₁₉HX₂₀X₂₁X₂₂X₂₃X₂₄X₈X₉CX₁₀X₁₁CX₁₂X₁₃X₁₄X₁₅X₁₆HR | |
| | | | ELVRHQRTHTGEKPYKCPECGKS | | TTLTNHX₁₇X₁₈X₁₉HX₂₀X₂₁X₂₂X₂₃X₂₄X₂₅X₂₆X₂₇X₂₈X₂₉X₃₀ | |
| | | | FSHRTTLTNHQRTHTGEKPTGKK | | | |
| | | | TS | | | |
| ctacaccac | CTA CAC | 1169 | LEPGEKPYKCPECGKSFSQAGHL | 1718 | X₁X₂X₃X₄X₅X₆X₇X₈X₉CX₁₀X₁₁CX₁₂X₁₃X₁₄X₁₅X₁₆QAGHLASHX₁₇X₁₈X₁₉ | 2267 |
| cctggaatt | CAC CCT | | ASHQRTHTGEKPYKCPECGKSFS | | HX₂₀X₂₁X₂₂X₂₃X₂₄X₈X₉CX₁₀X₁₁CX₁₂X₁₃X₁₄X₁₅X₁₆HKNALQNHX₁₇X₁₈ | |
| tga | GGA ATT | | HKNALQNHQRTHTGEKPYKCPEC | | X₁₉HX₂₀X₂₁X₂₂X₂₃X₂₄X₈X₉CX₁₀X₁₁CX₁₂X₁₃X₁₄X₁₅X₁₆QRAHLERHX₁₇ | |
| | TGA | | GKSFSQRAHLERHQRTHTGEKPY | | X₁₈X₁₉HX₂₀X₂₁X₂₂X₂₃X₂₄X₈X₉CX₁₀X₁₁CX₁₂X₁₃X₁₄X₁₅X₁₆TKNSLTEH | |
| | | | KCPECGKSFSTKNSLTEHQRTHT | | X₁₇X₁₈X₁₉HX₂₀X₂₁X₂₂X₂₃X₂₄X₈X₉CX₁₀X₁₁CX₁₂X₁₃X₁₄X₁₅X₁₆SKKALT | |
| | | | GEKPYKCPECGKSFSSKKALTEH | | EHX₁₇X₁₈X₁₉HX₂₀X₂₁X₂₂X₂₃X₂₄X₈X₉CX₁₀X₁₁CX₁₂X₁₃X₁₄X₁₅X₁₆SKKA | |
| | | | QRTHTGEKPYKCPECGKSFSSKK | | LTEHX₁₇X₁₈X₁₉HX₂₀X₂₁X₂₂X₂₃X₂₄X₈X₉CX₁₀X₁₁CX₁₂X₁₃X₁₄X₁₅X₁₆QN | |
| | | | ALTEHQRTHTGEKPYKCPECGKS | | STLTEHX₁₇X₁₈X₁₉HX₂₀X₂₁X₂₂X₂₃X₂₄X₂₅X₂₆X₂₇X₂₈X₂₉X₃₀ | |
| | | | FSQNSTLTEHQRTHTGEKPTGKK | | | |
| | | | TS | | | |
| agcctacac | AGC CTA | 1170 | LEPGEKPYKCPECGKSFSHKNAL | 1719 | X₁X₂X₃X₄X₅X₆X₇X₈X₉CX₁₀X₁₁CX₁₂X₁₃X₁₄X₁₅X₁₆HKNALQNHX₁₇X₁₈X₁₉ | 2268 |
| caccctgga | CAC CAC | | QNHQRTHTGEKPYKCPECGKSFS | | HX₂₀X₂₁X₂₂X₂₃X₂₄X₈X₉CX₁₀X₁₁CX₁₂X₁₃X₁₄X₁₅X₁₆QRAHLERHX₁₇X₁₈ | |
| att | CCT GGA | | QRAHLERHQRTHTGEKPYKCPEC | | X₁₉HX₂₀X₂₁X₂₂X₂₃X₂₄X₈X₉CX₁₀X₁₁CX₁₂X₁₃X₁₄X₁₅X₁₆TKNSLTEHX₁₇ | |
| | ATT | | GKSFSTKNSLTEHQRTHTGEKPY | | X₁₈X₁₉HX₂₀X₂₁X₂₂X₂₃X₂₄X₈X₉CX₁₀X₁₁CX₁₂X₁₃X₁₄X₁₅X₁₆SKKALTEH | |
| | | | KCPECGKSFSSKKALTEHQRTHT | | X₁₇X₁₈X₁₉HX₂₀X₂₁X₂₂X₂₃X₂₄X₈X₉CX₁₀X₁₁CX₁₂X₁₃X₁₄X₁₅X₁₆SKKALT | |
| | | | GEKPYKCPECGKSFSSKKALTEH | | EHX₁₇X₁₈X₁₉HX₂₀X₂₁X₂₂X₂₃X₂₄X₈X₉CX₁₀X₁₁CX₁₂X₁₃X₁₄X₁₅X₁₆QNST | |
| | | | QRTHTGEKPYKCPECGKSFSQNS | | LTEHX₁₇X₁₈X₁₉HX₂₀X₂₁X₂₂X₂₃X₂₄X₈X₉CX₁₀X₁₁CX₁₂X₁₃X₁₄X₁₅X₁₆ER | |
| | | | TLTEHQRTHTGEKPYKCPECGKS | | SHLREHX₁₇X₁₈X₁₉HX₂₀X₂₁X₂₂X₂₃X₂₄X₂₅X₂₆X₂₇X₂₈X₂₉X₃₀ | |
| | | | FSERSHLREHQRTHTGEKPTGKK | | | |
| | | | TS | | | |
| caccaccct | CAC CAC | 1171 | LEPGEKPYKCPECGKSFSQSSNL | 1720 | X₁X₂X₃X₄X₅X₆X₇X₈X₉CX₁₀X₁₁CX₁₂X₁₃X₁₄X₁₅X₁₆QSSNLVRHX₁₇X₁₈X₁₉ | 2269 |
| ggaatttga | CCT GGA | | VRHQRTHTGEKPYKCPECGKSFS | | HX₂₀X₂₁X₂₂X₂₃X₂₄X₈X₉CX₁₀X₁₁CX₁₂X₁₃X₁₄X₁₅X₁₆QAGHLASHX₁₇X₁₈ | |
| gaa | ATT TGA | | QAGHLASHQRTHTGEKPYKCPEC | | X₁₉HX₂₀X₂₁X₂₂X₂₃X₂₄X₈X₉CX₁₀X₁₁CX₁₂X₁₃X₁₄X₁₅X₁₆HKNALQNHX₁₇ | |
| | GAA | | GKSFSHKNALQNHQRTHTGEKPY | | X₁₈X₁₉HX₂₀X₂₁X₂₂X₂₃X₂₄X₈X₉CX₁₀X₁₁CX₁₂X₁₃X₁₄X₁₅X₁₆QRAHLERH | |
| | | | KCPECGKSFSQRAHLERHQRTHT | | X₁₇X₁₈X₁₉HX₂₀X₂₁X₂₂X₂₃X₂₄X₈X₉CX₁₀X₁₁CX₁₂X₁₃X₁₄X₁₅X₁₆TKNSLT | |
| | | | GEKPYKCPECGKSFSTKNSLTEH | | EHX₁₇X₁₈X₁₉HX₂₀X₂₁X₂₂X₂₃X₂₄X₈X₉CX₁₀X₁₁CX₁₂X₁₃X₁₄X₁₅X₁₆SKKA | |
| | | | QRTHTGEKPYKCPECGKSFSSKK | | LTEHX₁₇X₁₈X₁₉HX₂₀X₂₁X₂₂X₂₃X₂₄X₈X₉CX₁₀X₁₁CX₁₂X₁₃X₁₄X₁₅X₁₆SK | |
| | | | ALTEHQRTHTGEKPYKCPECGKS | | KALTEHX₁₇X₁₃X₁₉HX₂₀X₂₁X₂₂X₂₃X₂₄X₂₅X₂₆X₂₇X₂₈X₂₉X₃₀ | |
| | | | FSSKKALTEHQRTHTGEKPTGKK | | | |
| | | | TS | | | |
| ggacccagc | GGA CCC | 1172 | LEPGEKPYKCPECGKSFSTKNSL | 1721 | X₁X₂X₃X₄X₅X₆X₇X₈X₉CX₁₀X₁₁CX₁₂X₁₃X₁₄X₁₅X₁₆TKNSLTEHX₁₇X₁₈X₁₉ | 2270 |
| ctacaccac | AGC CTA | | TEHQRTHTGEKPYKCPECGKSFS | | HX₂₀X₂₁X₂₂X₂₃X₂₄X₈X₉CX₁₀X₁₁CX₁₂X₁₃X₁₄X₁₅X₁₆SKKALTEHX₁₇X₁₈ | |
| cct | CAC CAC | | SKKALTEHQRTHTGEKPYKCPEC | | X₁₉HX₂₀X₂₁X₂₂X₂₃X₂₄X₈X₉CX₁₀X₁₁CX₁₂X₁₃X₁₄X₁₅X₁₆SKKALTEHX₁₇ | |
| | CCT | | GKSFSSKKALTEHQRTHTGEKPY | | X₁₈X₁₉HX₂₀X₂₁X₂₂X₂₃X₂₄X₈X₉CX₁₀X₁₁CX₁₂X₁₃X₁₄X₁₅X₁₆QNSTLTEH | |
| | | | KCPECGKSFSQNSTLTEHQRTHT | | X₁₇X₁₈X₁₉HX₂₀X₂₁X₂₂X₂₃X₂₄X₈X₉CX₁₀X₁₁CX₁₂X₁₃X₁₄X₁₅X₁₆ERSHLR | |
| | | | GEKPYKCPECGKSFSERSHLREH | | EHX₁₇X₁₈X₁₉HX₂₀X₂₁X₂₂X₂₃X₂₄X₈X₉CX₁₀X₁₁CX₁₂X₁₃X₁₄X₁₅X₁₆SKKH | |
| | | | QRTHTGEKPYKCPECGKSFSSKK | | LAEHX₁₇X₁₈X₁₉HX₂₀X₂₁X₂₂X₂₃X₂₄X₈X₉CX₁₀X₁₁CX₁₂X₁₃X₁₄X₁₅X₁₆QR | |
| | | | HLAEHQRTHTGEKPYKCPECGKS | | AHLERHX₁₇X₁₈X₁₉HX₂₀X₂₁X₂₂X₂₃X₂₄X₂₅X₂₆X₂₇X₂₈X₂₉X₃₀ | |
| | | | FSQRAHLERHQRTHTGEKPTGKK | | | |
| | | | TS | | | |
| cccagccta | CCC AGC | 1173 | LEPGEKPYKCPECGKSFSQRAHL | 1722 | X₁X₂X₃X₄X₅X₆X₇X₈X₉CX₁₀X₁₁CX₁₂X₁₃X₁₄X₁₅X₁₆QRAHLERHX₁₇X₁₈X₁₉ | 2271 |
| caccaccct | CTA CAC | | ERHQRTHTGEKPYKCPECGKSFS | | HX₂₀X₂₁X₂₂X₂₃X₂₄X₈X₉CX₁₀X₁₁CX₁₂X₁₃X₁₄X₁₅X₁₆TKNSLTEHX₁₇X₁₈ | |
| gga | CAC CCT | | TKNSLTEHQRTHTGEKPYKCPEC | | X₁₉HX₂₀X₂₁X₂₂X₂₃X₂₄X₈X₉CX₁₀X₁₁CX₁₂X₁₃X₁₄X₁₅X₁₆SKKALTEHX₁₇ | |
| | GGA | | GKSFSSKKALTEHQRTHTGEKPY | | X₁₈X₁₉HX₂₀X₂₁X₂₂X₂₃X₂₄X₈X₉CX₁₀X₁₁CX₁₂X₁₃X₁₄X₁₅X₁₆SKKALTEH | |
| | | | KCPECGKSFSSKKALTEHQRTHT | | X₁₇X₁₈X₁₉HX₂₀X₂₁X₂₂X₂₃X₂₄X₈X₉CX₁₀X₁₁CX₁₂X₁₃X₁₄X₁₅X₁₆QNSTLT | |
| | | | GEKPYKCPECGKSFSQNSTLTEH | | EHX₁₇X₁₈X₁₉HX₂₀X₂₁X₂₂X₂₃X₂₄X₈X₉CX₁₀X₁₁CX₁₂X₁₃X₁₄X₁₅X₁₆ERSH | |
| | | | QRTHTGEKPYKCPECGKSFSERS | | LREHX₁₇X₁₈X₁₉HX₂₀X₂₁X₂₂X₂₃X₂₄X₈X₉CX₁₀X₁₁CX₁₂X₁₃X₁₄X₁₅X₁₆SK | |
| | | | HLREHQRTHTGEKPYKCPECGKS | | KHLAEHX₁₇X₁₈X₁₉HX₂₀X₂₁X₂₂X₂₃X₂₄X₂₅X₂₆X₂₇X₂₈X₂₉X₃₀ | |
| | | | FSSKKHLAEHQRTHTGEKPTGKK | | | |
| | | | TS | | | |
| actggaccc | ACT GGA | 1174 | LEPGEKPYKCPECGKSFSSKKAL | 1723 | X₁X₂X₃X₄X₅X₆X₇X₈X₉CX₁₀X₁₁CX₁₂X₁₃X₁₄X₁₅X₁₆SKKALTEHX₁₇X₁₈X₁₉ | 2272 |
| agcctacac | CCC AGC | | TEHQRTHTGEKPYKCPECGKSFS | | HX₂₀X₂₁X₂₂X₂₃X₂₄X₈X₉CX₁₀X₁₁CX₁₂X₁₃X₁₄X₁₅X₁₆SKKALTEHX₁₇X₁₈ | |
| cac | CTA CAC | | SKKALTEHQRTHTGEKPYKCPEC | | X₁₉HX₂₀X₂₁X₂₂X₂₃X₂₄X₈X₉CX₁₀X₁₁CX₁₂X₁₃X₁₄X₁₅X₁₆QNSTLTEHX₁₇ | |
| | CAC | | GKSFSQNSTLTEHQRTHTGEKPY | | X₁₈X₁₉HX₂₀X₂₁X₂₂X₂₃X₂₄X₈X₉CX₁₀X₁₁CX₁₂X₁₃X₁₄X₁₅X₁₆ERSHLREH | |
| | | | KCPECGKSFSERSHLREHQRTHT | | X₁₇X₁₈X₁₉HX₂₀X₂₁X₂₂X₂₃X₂₄X₈X₉CX₁₀X₁₁CX₁₂X₁₃X₁₄X₁₅X₁₆SKKHLA | |
| | | | GEKPYKCPECGKSFSSKKHLAEH | | EHX₁₇X₁₈X₁₉HX₂₀X₂₁X₂₂X₂₃X₂₄X₈X₉CX₁₀X₁₁CX₁₂X₁₃X₁₄X₁₅X₁₆QRAH | |
| | | | QRTHTGEKPYKCPECGKSFSQRA | | LERHX₁₇X₁₈X₁₉HX₂₀X₂₁X₂₂X₂₃X₂₄X₈X₉CX₁₀X₁₁CX₁₂X₁₃X₁₄X₁₅X₁₆TH | |
| | | | HLERHQRTHTGEKPYKCPECGKS | | LDLIRHX₁₇X₁₈X₁₉HX₂₀X₂₁X₂₂X₂₃X₂₄X₂₅X₂₆X₂₇X₂₈X₂₉X₃₀ | |
| | | | FSTHLDLIRHQRTHTGEKPTGKK | | | |
| | | | TS | | | |
| tggtaggtg | TGG TAG | 1175 | LEPGEKPYKCPECGKSFSRSDEL | 1724 | X₁X₂X₃X₄X₅X₆X₇X₈X₉CX₁₀X₁₁CX₁₂X₁₃X₁₄X₁₅X₁₆RSDELVRHX₁₇X₁₈X₁₉ | 2273 |
| ggggcagat | GTG GGG | | VRHQRTHTGEKPYKCPECGKSFS | | HX₂₀X₂₁X₂₂X₂₃X₂₄X₈X₉CX₁₀X₁₁CX₁₂X₁₃X₁₄X₁₅X₁₆TSGNLVRHX₁₇X₁₈ | |
| gtg | GCA GAT | | TSGNLVRHQRTHTGEKPYKCPEC | | X₁₉HX₂₀X₂₁X₂₂X₂₃X₂₄X₈X₉CX₁₀X₁₁CX₁₂X₁₃X₁₄X₁₅X₁₆QSGDLRRHX₁₇ | |
| | GTG | | GKSFSQSGDLRRHQRTHTGEKPY | | X₁₈X₁₉HX₂₀X₂₁X₂₂X₂₃X₂₄X₈X₉CX₁₀X₁₁CX₁₂X₁₃X₁₄X₁₅X₁₆RSDKLVRH | |
| | | | KCPECGKSFSRSDKLVRHQRTHT | | X₁₇X₁₈X₁₉HX₂₀X₂₁X₂₂X₂₃X₂₄X₈X₉CX₁₀X₁₁CX₁₂X₁₃X₁₄X₁₅X₁₆RSDELV | |
| | | | GEKPYKCPECGKSFSRSDELVRH | | RHX₁₇X₁₈X₁₉HX₂₀X₂₁X₂₂X₂₃X₂₄X₈X₉CX₁₀X₁₁CX₁₂X₁₃X₁₄X₁₅X₁₆REDN | |
| | | | QRTHTGEKPYKCPECGKSFSRED | | LHTHX₁₇X₁₈X₁₉HX₂₀X₂₁X₂₂X₂₃X₂₄X₈X₉CX₁₀X₁₁CX₁₂X₁₃X₁₄X₁₅X₁₆RS | |
| | | | NLHTHQRTHTGEKPYKCPECGKS | | DHLTTHX₁₇X₁₈X₁₉HX₂₀X₂₁X₂₂X₂₃X₂₄X₂₅X₂₆X₂₇X₂₈X₂₉X₃₀ | |
| | | | FSRSDHLTTHQRTHTGEKPTGKK | | | |
| | | | TS | | | |
| taggtgggg | TAG GTG | 1176 | LEPGEKPYKCPECGKSFSSKKHL | 1725 | X₁X₂X₃X₄X₅X₆X₇X₈X₉CX₁₀X₁₁CX₁₂X₁₃X₁₄X₁₅X₁₆SKKHLAEHX₁₇X₁₈X₁₉ | 2274 |
| gcagatgtg | GGG GCA | | AEHQRTHTGEKPYKCPECGKSFS | | HX₂₀X₂₁X₂₂X₂₃X₂₄X₈X₉CX₁₀X₁₁CX₁₂X₁₃X₁₄X₁₅X₁₆RSDELVRHX₁₇X₁₈ | |
| ccc | GAT gtg | | RSDELVRHQRTHTGEKPYKCPEC | | X₁₉HX₂₀X₂₁X₂₂X₂₃X₂₄X₈X₉CX₁₀X₁₁CX₁₂X₁₃X₁₄X₁₅X₁₆TSGNLVRHX₁₇ | |
| | CCC | | GKSFSTSGNLVRHQRTHTGEKPY | | X₁₈X₁₉HX₂₀X₂₁X₂₂X₂₃X₂₄X₈X₉CX₁₀X₁₁CX₁₂X₁₃X₁₄X₁₅X₁₆QSGDLRRH | |
| | | | KCPECGKSFSQSGDLRRHQRTHT | | X₁₇X₁₈X₁₉HX₂₀X₂₁X₂₂X₂₃X₂₄X₈X₉CX₁₀X₁₁CX₁₂X₁₃X₁₄X₁₅X₁₆RSDKLV | |
| | | | GEKPYKCPECGKSFSRSDKLVRH | | RHX₁₇X₁₈X₁₉HX₂₀X₂₁X₂₂X₂₃X₂₄X₈X₉CX₁₀X₁₁CX₁₂X₁₃X₁₄X₁₅X₁₆RSDE | |
| | | | QRTHTGEKPYKCPECGKSFSRSD | | LVRHX₁₇X₁₈X₁₉HX₂₀X₂₁X₂₂X₂₃X₂₄X₈X₉CX₁₀X₁₁CX₁₂X₁₃X₁₄X₁₅X₁₆RE | |
| | | | ELVRHQRTHTGEKPYKCPECGKS | | DNLHTHX₁₇X₁₈X₁₉HX₂₀X₂₁X₂₂X₂₃X₂₄X₂₅X₂₆X₂₇X₂₈X₂₉X₃₀ | |
| | | | FSREDNLHTHQRTHTGEKPTGKK | | | |
| | | | TS | | | |
| gatgggcaa | GAT ggg | 1177 | LEPGEKPYKCPECGKSFSRSDKL | 1726 | X₁X₂X₃X₄X₅X₆X₇X₈X₉CX₁₀X₁₁CX₁₂X₁₃X₁₄X₁₅X₁₆RSDKLVRHX₁₇X₁₈X₁₉ | 2275 |
| tggtaggtg | CAA TGG | | VRHQRTHTGEKPYKCPECGKSFS | | HX₂₀X₂₁X₂₂X₂₃X₂₄X₈X₉CX₁₀X₁₁CX₁₂X₁₃X₁₄X₁₅X₁₆RSDELVRHX₁₇X₁₈ | |
| ggg | TAG GTG | | RSDELVRHQRTHTGEKPYKCPEC | | X₁₉HX₂₀X₂₁X₂₂X₂₃X₂₄X₈X₉CX₁₀X₁₁CX₁₂X₁₃X₁₄X₁₅X₁₆REDNLHTHX₁₇ | |
| | GGG | | GKSFSREDNLHTHQRTHTGEKPY | | X₁₈X₁₉HX₂₀X₂₁X₂₂X₂₃X₂₄X₈X₉CX₁₀X₁₁CX₁₂X₁₃X₁₄X₁₅X₁₆RSDHLTTH | |
| | | | KCPECGKSFSRSDHLTTHQRTHT | | X₁₇X₁₈X₁₉HX₂₀X₂₁X₂₂X₂₃X₂₄X₈X₉CX₁₀X₁₁CX₁₂X₁₃X₁₄X₁₅X₁₆QSGNLT | |
| | | | GEKPYKCPECGKSFSQSGNLTEH | | EHX₁₇X₁₈X₁₉HX₂₀X₂₁X₂₂X₂₃X₂₄X₈X₉CX₁₀X₁₁CX₁₂X₁₃X₁₄X₁₅X₁₆RSDK | |
| | | | QRTHTGEKPYKCPECGKSFSRSD | | LVRHX₁₇X₁₈X₁₉HX₂₀X₂₁X₂₂X₂₃X₂₄X₈X₉CX₁₀X₁₁CX₁₂X₁₃X₁₄X₁₅X₁₆TS | |
| | | | KLVRHQRTHTGEKPYKCPECGKS | | GNLVRHX₁₇X₁₈X₁₉HX₂₀X₂₁X₂₂X₂₃X₂₄X₂₅X₂₆X₂₇X₂₈X₂₉X₃₀ | |
| | | | FSTSGNLVRHQRTHTGEKPTGKK | | | |
| | | | TS | | | |
| gggcaatgg | ggg CAA | 1178 | LEPGEKPYKCPECGKSFSQSGDL | 1727 | X₁X₂X₃X₄X₅X₆X₇X₈X₉CX₁₀X₁₁CX₁₂X₁₃X₁₄X₁₅X₁₆QSGDLRRHX₁₇X₁₈X₁₉ | 2276 |
| taggtgggg | TGG TAG | | RRHQRTHTGEKPYKCPECGKSFS | | HX₂₀X₂₁X₂₂X₂₃X₂₄X₈X₉CX₁₀X₁₁CX₁₂X₁₃X₁₄X₁₅X₁₆RSDKLVRHX₁₇X₁₈ | |
| gca | GTG GGG | | RSDKLVRHQRTHTGEKPYKCPEC | | X₁₉HX₂₀X₂₁X₂₂X₂₃X₂₄X₈X₉CX₁₀X₁₁CX₁₂X₁₃X₁₄X₁₅X₁₆RSDELVRHX₁₇ | |
| | GCA | | GKSFSRSDELVRHQRTHTGEKPY | | X₁₈X₁₉HX₂₀X₂₁X₂₂X₂₃X₂₄X₈X₉CX₁₀X₁₁CX₁₂X₁₃X₁₄X₁₅X₁₆REDNLHTH | |
| | | | KCPECGKSFSREDNLHTHQRTHT | | X₁₇X₁₈X₁₉HX₂₀X₂₁X₂₂X₂₃X₂₄X₈X₉CX₁₀X₁₁CX₁₂X₁₃X₁₄X₁₅X₁₆RSDHLT | |
| | | | GEKPYKCPECGKSFSRSDHLTTH | | THX₁₇X₁₈X₁₉HX₂₀X₂₁X₂₂X₂₃X₂₄X₈X₉CX₁₀X₁₁CX₁₂X₁₃X₁₄X₁₅X₁₆QSGN | |
| | | | QRTHTGEKPYKCPECGKSFSQSG | | LTEHX₁₇X₁₈X₁₉HX₂₀X₂₁X₂₂X₂₃X₂₄X₈X₉CX₁₀X₁₁CX₁₂X₁₃X₁₄X₁₅X₁₆RS | |
| | | | NLTEHQRTHTGEKPYKCPECGKS | | DKLVRHX₁₇X₁₈X₁₉HX₂₀X₂₁X₂₂X₂₃X₂₄X₂₅X₂₆X₂₇X₂₈X₂₉X₃₀ | |
| | | | FSRSDKLVRHQRTHTGEKPTGKK | | | |
| | | | TS | | | |
| caatggtag | CAA TGG | 1179 | LEPGEKPYKCPECGKSFSTSGNL | 1728 | X₁X₂X₃X₄X₅X₆X₇X₈X₉CX₁₀X₁₁CX₁₂X₁₃X₁₄X₁₅X₁₆TSGNLVRHX₁₇X₁₈X₁₉ | 2277 |
| gtgggggca | TAG GTG | | VRHQRTHTGEKPYKCPECGKSFS | | HX₂₀X₂₁X₂₂X₂₃X₂₄X₈X₉CX₁₀X₁₁CX₁₂X₁₃X₁₄X₁₅X₁₆QSGDLRRHX₁₇X₁₈ | |
| gat | GGG GCA | | QSGDLRRHQRTHTGEKPYKCPEC | | X₁₉HX₂₀X₂₁X₂₂X₂₃X₂₄X₈X₉CX₁₀X₁₁CX₁₂X₁₃X₁₄X₁₅X₁₆RSDKLVRHX₁₇ | |
| | GAT | | GKSFSRSDKLVRHQRTHTGEKPY | | X₁₈X₁₉HX₂₀X₂₁X₂₂X₂₃X₂₄X₈X₉CX₁₀X₁₁CX₁₂X₁₃X₁₄X₁₅X₁₆RSDELVRH | |
| | | | KCPECGKSFSRSDELVRHQRTHT | | X₁₇X₁₈X₁₉HX₂₀X₂₁X₂₂X₂₃X₂₄X₈X₉CX₁₀X₁₁CX₁₂X₁₃X₁₄X₁₅X₁₆REDNLH | |
| | | | GEKPYKCPECGKSFSREDNLHTH | | THX₁₇X₁₈X₁₉HX₂₀X₂₁X₂₂X₂₃X₂₄X₈X₉CX₁₀X₁₁CX₁₂X₁₃X₁₄X₁₅X₁₆RSDH | |
| | | | QRTHTGEKPYKCPECGKSFSRSD | | LTTHX₁₇X₁₈X₁₉HX₂₀X₂₁X₂₂X₂₃X₂₄X₈X₉CX₁₀X₁₁CX₁₂X₁₃X₁₄X₁₅X₁₆QS | |
| | | | HLTTHQRTHTGEKPYKCPECGKS | | GNLTEHX₁₇X₁₈X₁₉HX₂₀X₂₁X₂₂X₂₃X₂₄X₂₅X₂₆X₂₇X₂₈X₂₉X₃₀ | |
| | | | FSQSGNLTEHQRTHTGEKPTGKK | | | |
| | | | TS | | | |
| gtgggggca | GTG GGG | 1180 | LEPGEKPYKCPECGKSFSRSDHL | 1729 | X₁X₂X₃X₄X₅X₆X₇X₈X₉CX₁₀X₁₁CX₁₂X₁₃X₁₄X₁₅X₁₆RSDHLTNHX₁₇X₁₈X₁₉ | 2278 |
| gatgtgccc | GCA GAT | | TNHQRTHTGEKPYKCPECGKSFS | | HX₂₀X₂₁X₂₂X₂₃X₂₄X₈X₉CX₁₀X₁₁CX₁₂X₁₃X₁₄X₁₅X₁₆SKKHLAEHX₁₇X₁₈ | |
| agg | gtg CCC | | SKKHLAEHQRTHTGEKPYKCPEC | | X₁₉HX₂₀X₂₁X₂₂X₂₃X₂₄X₈X₉CX₁₀X₁₁CX₁₂X₁₃X₁₄X₁₅X₁₆RSDELVRHX₁₇ | |
| | AGG | | GKSFSRSDELVRHQRTHTGEKPY | | X₁₈X₁₉HX₂₀X₂₁X₂₂X₂₃X₂₄X₈X₉CX₁₀X₁₁CX₁₂X₁₃X₁₄X₁₅X₁₆TSGNLVRH | |
| | | | KCPECGKSFSTSGNLVRHQRTHT | | X₁₇X₁₈X₁₉HX₂₀X₂₁X₂₂X₂₃X₂₄X₈X₉CX₁₀X₁₁CX₁₂X₁₃X₁₄X₁₅X₁₆QSGDLR | |
| | | | GEKPYKCPECGKSFSQSGDLRRH | | RHX₁₇X₁₈X₁₉HX₂₀X₂₁X₂₂X₂₃X₂₄X₈X₉CX₁₀X₁₁CX₁₂X₁₃X₁₄X₁₅X₁₆RSDK | |
| | | | QRTHTGEKPYKCPECGKSFSRSD | | LVRHX₁₇X₁₈X₁₉HX₂₀X₂₁X₂₂X₂₃X₂₄X₈X₉CX₁₀X₁₁CX₁₂X₁₃X₁₄X₁₅X₁₆RS | |
| | | | KLVRHQRTHTGEKPYKCPECGKS | | DELVRHX₁₇X₁₈X₁₉HX₂₀X₂₁X₂₂X₂₃X₂₄X₂₅X₂₆X₂₇X₂₈X₂₉X₃₀ | |
| | | | FSRSDELVRHQRTHTGEKPTGKK | | | |
| | | | TS | | | |
| gacgatggg | GAC GAT | 1181 | LEPGEKPYKCPECGKSFSRSDEL | 1730 | X₁X₂X₃X₄X₅X₆X₇X₈X₉CX₁₀X₁₁CX₁₂X₁₃X₁₄X₁₅X₁₆RSDELVRHX₁₇X₁₈X₁₉ | 2279 |
| caatggtag | ggg CAA | | VRHQRTHTGEKPYKCPECGKSFS | | HX₂₀X₂₁X₂₂X₂₃X₂₄X₈X₉CX₁₀X₁₁CX₁₂X₁₃X₁₄X₁₅X₁₆REDNLHTHX₁₇X₁₈ | |
| gtg | TGG TAG | | REDNLHTHQRTHTGEKPYKCPEC | | X₁₉HX₂₀X₂₁X₂₂X₂₃X₂₄X₈X₉CX₁₀X₁₁CX₁₂X₁₃X₁₄X₁₅X₁₆RSDHLTTHX₁₇ | |
| | GTG | | GKSFSRSDHLTTHQRTHTGEKPY | | X₁₈X₁₉HX₂₀X₂₁X₂₂X₂₃X₂₄X₈X₉CX₁₀X₁₁CX₁₂X₁₃X₁₄X₁₅X₁₆QSGNLTEH | |
| | | | KCPECGKSFSQSGNLTEHQRTHT | | X₁₇X₁₈X₁₉HX₂₀X₂₁X₂₂X₂₃X₂₄X₈X₉CX₁₀X₁₁CX₁₂X₁₃X₁₄X₁₅X₁₆RSDKLV | |
| | | | GEKPYKCPECGKSFSRSDKLVRH | | RHX₁₇X₁₈X₁₉HX₂₀X₂₁X₂₂X₂₃X₂₄X₈X₉CX₁₀X₁₁CX₁₂X₁₃X₁₄X₁₅X₁₆TSGN | |
| | | | QRTHTGEKPYKCPECGKSFSTSG | | LVRHX₁₇X₁₈X₁₉HX₂₀X₂₁X₂₂X₂₃X₂₄X₈X₉CX₁₀X₁₁CX₁₂X₁₃X₁₄X₁₅X₁₆DP | |
| | | | NLVRHQRTHTGEKPYKCPECGKS | | GNLVRHX₁₇X₁₈X₁₉HX₂₀X₂₁X₂₂X₂₃X₂₄X₂₅X₂₆X₂₇X₂₈X₂₉X₃₀ | |
| | | | FSDPGNLVRHQRTHTGEKPTGKK | | | |
| | | | TS | | | |
| gttgacgat | GTT GAC | 1182 | LEPGEKPYKCPECGKSFSREDNL | 1731 | X₁X₂X₃X₄X₅X₆X₇X₈X₉CX₁₀X₁₁CX₁₂X₁₃X₁₄X₁₅X₁₆REDNLHTHX₁₇X₁₈X₁₉ | 2280 |
| gggcaatgg | GAT ggg | | HTHQRTHTGEKPYKCPECGKSFS | | HX₂₀X₂₁X₂₂X₂₃X₂₄X₈X₉CX₁₀X₁₁CX₁₂X₁₃X₁₄X₁₅X₁₆RSDHLTTHX₁₇X₁₈ | |
| tag | CAA TGG | | RSDHLTTHQRTHTGEKPYKCPEC | | X₁₉HX₂₀X₂₁X₂₂X₂₃X₂₄X₈X₉CX₁₀X₁₁CX₁₂X₁₃X₁₄X₁₅X₁₆QSGNLTEHX₁₇ | |
| | TAG | | GKSFSQSGNLTEHQRTHTGEKPY | | X₁₈X₁₉HX₂₀X₂₁X₂₂X₂₃X₂₄X₈X₉CX₁₀X₁₁CX₁₂X₁₃X₁₄X₁₅X₁₆RSDKLVRH | |
| | | | KCPECGKSFSRSDKLVRHQRTHT | | X₁₇X₁₈X₁₉HX₂₀X₂₁X₂₂X₂₃X₂₄X₈X₉CX₁₀X₁₁CX₁₂X₁₃X₁₄X₁₅X₁₆TSGNLV | |
| | | | GEKPYKCPECGKSFSTSGNLVRH | | RHX₁₇X₁₈X₁₉HX₂₀X₂₁X₂₂X₂₃X₂₄X₈X₉CX₁₀X₁₁CX₁₂X₁₃X₁₄X₁₅X₁₆DPGN | |
| | | | QRTHTGEKPYKCPECGKSFSDPG | | LVRHX₁₇X₁₈X₁₉HX₂₀X₂₁X₂₂X₂₃X₂₄X₈X₉CX₁₀X₁₁CX₁₂X₁₃X₁₄X₁₅X₁₆TS | |
| | | | NLVRHQRTHTGEKPYKCPECGKS | | GSLVRHX₁₇X₁₈X₁₉HX₂₀X₂₁X₂₂X₂₃X₂₄X₂₅X₂₆X₂₇X₂₈X₂₉X₃₀ | |
| | | | FSTSGSLVRHQRTHTGEKPTGKK | | | |
| | | | TS | | | |
| gcaggtgtt | GCA GGT | 1183 | LEPGEKPYKCPECGKSFSQSGNL | 1732 | X₁X₂X₃X₄X₅X₆X₇X₈X₉CX₁₀X₁₁CX₁₂X₁₃X₁₄X₁₅X₁₆QSGNLTEHX₁₇X₁₈X₁₉ | 2281 |
| gacgatggg | GTT GAC | | TEHQRTHTGEKPYKCPECGKSFS | | HX₂₀X₂₁X₂₂X₂₃X₂₄X₈X₉CX₁₀X₁₁CX₁₂X₁₃X₁₄X₁₅X₁₆RSDKLVRHX₁₇X₁₈ | |
| caa | GAT ggg | | RSDKLVRHQRTHTGEKPYKCPEC | | X₁₉HX₂₀X₂₁X₂₂X₂₃X₂₄X₈X₉CX₁₀X₁₁CX₁₂X₁₃X₁₄X₁₅X₁₆TSGNLVRHX₁₇ | |
| | CAA | | GKSFSTSGNLVRHQRTHTGEKPY | | X₁₈X₁₉HX₂₀X₂₁X₂₂X₂₃X₂₄X₈X₉CX₁₀X₁₁CX₁₂X₁₃X₁₄X₁₅X₁₆DPGNLVRH | |
| | | | KCPECGKSFSDPGNLVRHQRTHT | | X₁₇X₁₈X₁₉HX₂₀X₂₁X₂₂X₂₃X₂₄X₈X₉CX₁₀X₁₁CX₁₂X₁₃X₁₄X₁₅X₁₆TSGSLV | |
| | | | GEKPYKCPECGKSFSTSGSLVRH | | RHX₁₇X₁₈X₁₉HX₂₀X₂₁X₂₂X₂₃X₂₄X₈X₉CX₁₀X₁₁CX₁₂X₁₃X₁₄X₁₅X₁₆TSGH | |
| | | | QRTHTGEKPYKCPECGKSFSTSG | | LVRHX₁₇X₁₈X₁₉HX₂₀X₂₁X₂₂X₂₃X₂₄X₈X₉CX₁₀X₁₁CX₁₂X₁₃X₁₄X₁₅X₁₆QS | |
| | | | HLVRHQRTHTGEKPYKCPECGKS | | GDLRRHX₁₇X₁₈X₁₉HX₂₀X₂₁X₂₂X₂₃X₂₄X₂₅X₂₆X₂₇X₂₈X₂₉X₃₀ | |
| | | | FSQSGDLRRHQRTHTGEKPTGKK | | | |
| | | | TS | | | |
| ggtgttgac | GGT GTT | 1184 | LEPGEKPYKCPECGKSFSRSDHL | 1733 | X₁X₂X₃X₄X₅X₆X₇X₈X₉CX₁₀X₁₁CX₁₂X₁₃X₁₄X₁₅X₁₆RSDHLTTHX₁₇X₁₈X₁₉ | 2282 |
| gatgggcaa | GAC GAT | | TTHQRTHTGEKPYKCPECGKSFS | | HX₂₀X₂₁X₂₂X₂₃X₂₄X₈X₉CX₁₀X₁₁CX₁₂X₁₃X₁₄X₁₅X₁₆QSGNLTEHX₁₇X₁₈ | |
| tgg | ggg CAA | | QSGNLTEHQRTHTGEKPYKCPEC | | X₁₉HX₂₀X₂₁X₂₂X₂₃X₂₄X₈X₉CX₁₀X₁₁CX₁₂X₁₃X₁₄X₁₅X₁₆RSDKLVRHX₁₇ | |
| | TGG | | GKSFSRSDKLVRHQRTHTGEKPY | | X₁₈X₁₉HX₂₀X₂₁X₂₂X₂₃X₂₄X₈X₉CX₁₀X₁₁CX₁₂X₁₃X₁₄X₁₅X₁₆TSGNLVRH | |
| | | | KCPECGKSFSTSGNLVRHQRTHT | | X₁₇X₁₈X₁₉HX₂₀X₂₁X₂₂X₂₃X₂₄X₈X₉CX₁₀X₁₁CX₁₂X₁₃X₁₄X₁₅X₁₆DPGNLV | |
| | | | GEKPYKCPECGKSFSDPGNLVRH | | RHX₁₇X₁₈X₁₉HX₂₀X₂₁X₂₂X₂₃X₂₄X₈X₉CX₁₀X₁₁CX₁₂X₁₃X₁₄X₁₅X₁₆TSGS | |
| | | | QRTHTGEKPYKCPECGKSFSTSG | | LVRHX₁₇X₁₈X₁₉HX₂₀X₂₁X₂₂X₂₃X₂₄X₈X₉CX₁₀X₁₁CX₁₂X₁₃X₁₄X₁₅X₁₆TS | |
| | | | SLVRHQRTHTGEKPYKCPECGKS | | GHLVRHX₁₇X₁₈X₁₉HX₂₀X₂₁X₂₂X₂₃X₂₄X₂₅X₂₆X₂₇X₂₈X₂₉X₃₀ | |
| | | | FSTSGHLVRHQRTHTGEKPTGKK | | | |
| | | | TS | | | |
| gcaatggta | GCA ATG | 1185 | LEPGEKPYKCPECGKSFSQLAHL | 1734 | X₁X₂X₃X₄X₅X₆X₇X₈X₉CX₁₀X₁₁CX₁₂X₁₃X₁₄X₁₅X₁₆QLAHLRAHX₁₇X₁₈X₁₉ | 2283 |
| ggtgggggc | GTA GGT | | RAHQRTHTGEKPYKCPECGKSFS | | HX₂₀X₂₁X₂₂X₂₃X₂₄X₈X₉CX₁₀X₁₁CX₁₂X₁₃X₁₄X₁₅X₁₆DPGHLVRHX₁₇X₁₈ | |
| aga | GGG GGC | | DPGHLVRHQRTHTGEKPYKCPEC | | X₁₉HX₂₀X₂₁X₂₂X₂₃X₂₄X₈X₉CX₁₀X₁₁CX₁₂X₁₃X₁₄X₁₅X₁₆RSDKLVRHX₁₇ | |
| | AGA | | GKSFSRSDKLVRHQRTHTGEKPY | | X₁₈X₁₉HX₂₀X₂₁X₂₂X₂₃X₂₄X₈X₉CX₁₀X₁₁CX₁₂X₁₃X₁₄X₁₅X₁₆TSGHLVRH | |
| | | | KCPECGKSFSTSGHLVRHQRTHT | | X₁₇X₁₈X₁₉HX₂₀X₂₁X₂₂X₂₃X₂₄X₈X₉CX₁₀X₁₁CX₁₂X₁₃X₁₄X₁₅X₁₆QSSSLV | |
| | | | GEKPYKCPECGKSFSQSSSLVRH | | RHX₁₇X₁₈X₁₉HX₂₀X₂₁X₂₂X₂₃X₂₄X₈X₉CX₁₀X₁₁CX₁₂X₁₃X₁₄X₁₅X₁₆RRDE | |
| | | | QRTHTGEKPYKCPECGKSFSRRD | | LNVHX₁₇X₁₈X₁₉HX₂₀X₂₁X₂₂X₂₃X₂₄X₈X₉CX₁₀X₁₁CX₁₂X₁₃X₁₄X₁₅X₁₆QS | |
| | | | ELNVHQRTHTGEKPYKCPECGKS | | GDLRRHX₁₇X₁₈X₁₉HX₂₀X₂₁X₂₂X₂₃X₂₄X₂₅X₂₆X₂₇X₂₈X₂₉X₃₀ | |
| | | | FSQSGDLRRHQRTHTGEKPTGKK | | | |
| | | | TS | | | |
| tgggcaatg | TGG GCA | 1186 | LEPGEKPYKCPECGKSFSDPGHL | 1735 | X₁X₂X₃X₄X₅X₆X₇X₈X₉CX₁₀X₁₁CX₁₂X₁₃X₁₄X₁₅X₁₆DPGHLVRHX₁₇X₁₈X₁₉ | 2284 |
| gtaggtggg | ATG GTA | | VRHQRTHTGEKPYKCPECGKSFS | | HX₂₀X₂₁X₂₂X₂₃X₂₄X₈X₉CX₁₀X₁₁CX₁₂X₁₃X₁₄X₁₅X₁₆RSDKLVRHX₁₇X₁₈ | |
| ggc | GGT GGG | | RSDKLVRHQRTHTGEKPYKCPEC | | X₁₉HX₂₀X₂₁X₂₂X₂₃X₂₄X₈X₉CX₁₀X₁₁CX₁₂X₁₃X₁₄X₁₅X₁₆TSGHLVRHX₁₇ | |
| | GGC | | GKSFSTSGHLVRHQRTHTGEKPY | | X₁₈X₁₉HX₂₀X₂₁X₂₂X₂₃X₂₄X₈X₉CX₁₀X₁₁CX₁₂X₁₃X₁₄X₁₅X₁₆QSSSLVRH | |
| | | | KCPECGKSFSQSSSLVRHQRTHT | | X₁₇X₁₈X₁₉HX₂₀X₂₁X₂₂X₂₃X₂₄X₈X₉CX₁₀X₁₁CX₁₂X₁₃X₁₄X₁₅X₁₆RRDELN | |
| | | | GEKPYKCPECGKSFSRRDELNVH | | VHX₁₇X₁₈X₁₉HX₂₀X₂₁X₂₂X₂₃X₂₄X₈X₉CX₁₀X₁₁CX₁₂X₁₃X₁₄X₁₅X₁₆4SGD | |
| | | | QRTHTGEKPYKCPECGKSFSQSG | | LRRHX₁₇X₁₈X₁₉HX₂₀X₂₁X₂₂X₂₃X₂₄X₈X₉CX₁₀X₁₁CX₁₂X₁₃X₁₄X₁₅X₁₆RS | |
| | | | DLRRHQRTHTGEKPYKCPECGKS | | DHLTTHX₁₇X₁₈X₁₉HX₂₀X₂₁X₂₂X₂₃X₂₄X₂₅X₂₆X₂₇X₂₈X₂₉X₃₀ | |
| | | | FSRSDHLTTHQRTHTGEKPTGKK | | | |
| | | | TS | | | |
| tgacgatgg | TGA CGA | 1187 | LEPGEKPYKCPECGKSFSTSGHL | 1736 | X₁X₂X₃X₄X₅X₆X₇X₈X₉CX₁₀X₁₁CX₁₂X₁₃X₁₄X₁₅X₁₆TSGHLVRHX₁₇X₁₈X₁₉ | |
| gcaatggta | TGG GCA | | VRHQRTHTGEKPYKCPECGKSFS | | HX₂₀X₂₁X₂₂X₂₃X₂₄X₈X₉CX₁₀X₁₁CX₁₂X₁₃X₁₄X₁₅X₁₆QSSSLVRHX₁₇X₁₈ | 2285 |
| ggt | ATG GTA | | QSSSLVRHQRTHTGEKPYKCPEC | | X₁₉HX₂₀X₂₁X₂₂X₂₃X₂₄X₈X₉CX₁₀X₁₁CX₁₂X₁₃X₁₄X₁₅X₁₆RRDELNVHX₁₇ | |
| | GGT | | GKSFSRRDELNVHQRTHTGEKPY | | X₁₈X₁₉HX₂₀X₂₁X₂₂X₂₃X₂₄X₈X₉CX₁₀X₁₁CX₁₂X₁₃X₁₄X₁₅X₁₆QSGDLRRH | |
| | | | KCPECGKSFSQSGDLRRHQRTHT | | X₁₇X₁₈X₁₉HX₂₀X₂₁X₂₂X₂₃X₂₄X₈X₉CX₁₀X₁₁CX₁₂X₁₃X₁₄X₁₅X₁₆RSDHLT | |
| | | | GEKPYKCPECGKSFSRSDHLTTH | | THX₁₇X₁₈X₁₉HX₂₀X₂₁X₂₂X₂₃X₂₄X₈X₉CX₁₀X₁₁CX₁₂X₁₃X₁₄X₁₅X₁₆QSGH | |
| | | | QRTHTGEKPYKCPECGKSFSQSG | | LTEHX₁₇X₁₈X₁₉HX₂₀X₂₁X₂₂X₂₃X₂₄X₈X₉CX₁₀X₁₁CX₁₂X₁₃X₁₄X₁₅X₁₆QA | |
| | | | HLTEHQRTHTGEKPYKCPECGKS | | GHLASHX₁₇X₁₈X₁₉HX₂₀X₂₁X₂₂X₂₃X₂₄X₂₅X₂₆X₂₇X₂₈X₂₉X₃₀ | |
| | | | FSQAGHLASHQRTHTGEKPTGKK | | | |
| | | | TS | | | |
| cgatgggca | CGA TGG | 1188 | LEPGEKPYKCPECGKSFSRSDKL | 1737 | X₁X₂X₃X₄X₅X₆X₇X₈X₉CX₁₀X₁₁CX₁₂X₁₃X₁₄X₁₅X₁₆RSDKLVRHX₁₇X₁₈X₁₉ | 2286 |
| atggtaggt | GCA ATG | | VRHQRTHTGEKPYKCPECGKSFS | | HX₂₀X₂₁X₂₂X₂₃X₂₄X₈X₉CX₁₀X₁₁CX₁₂X₁₃X₁₄X₁₅X₁₆TSGHLVRHX₁₇X₁₈ | |
| ggg | GTA GGT | | TSGHLVRHQRTHTGEKPYKCPEC | | X₁₉HX₂₀X₂₁X₂₂X₂₃X₂₄X₈X₉CX₁₀X₁₁CX₁₂X₁₃X₁₄X₁₅X₁₆QSSSLVRHX₁₇ | |
| | GGG | | GKSFSQSSSLVRHQRTHTGEKPY | | X₁₈X₁₉HX₂₀X₂₁X₂₂X₂₃X₂₄X₈X₉CX₁₀X₁₁CX₁₂X₁₃X₁₄X₁₅X₁₆RRDELNVH | |
| | | | KCPECGKSFSRRDELNVHQRTHT | | X₁₇X₁₈X₁₉HX₂₀X₂₁X₂₂X₂₃X₂₄X₈X₉CX₁₀X₁₁CX₁₂X₁₃X₁₄X₁₅X₁₆QSGDLR | |
| | | | GEKPYKCPECGKSFSQSGDLRRH | | RHX₁₇X₁₈X₁₉HX₂₀X₂₁X₂₂X₂₃X₂₄X₈X₉CX₁₀X₁₁CX₁₂X₁₃X₁₄X₁₅X₁₆RSDH | |
| | | | QRTHTGEKPYKCPECGKSFSRSD | | LTTHX₁₇X₁₈X₁₉HX₂₀X₂₁X₂₂X₂₃X₂₄X₈X₉CX₁₀X₁₁CX₁₂X₁₃X₁₄X₁₅X₁₆QS | |
| | | | HLTTHQRTHTGEKPYKCPECGKS | | GHLTEHX₁₇X₁₈X₁₉HX₂₀X₂₁X₂₂X₂₃X₂₄X₂₅X₂₆X₂₇X₂₈X₂₉X₃₀ | |
| | | | FSQSGHLTEHQRTHTGEKPTGKK | | | |
| | | | TS | | | |
| ggcaatggt | GGC AAT | 1189 | LEPGEKPYKCPECGKSFSRADNL | 1738 | X₁X₂X₃X₄X₅X₆X₇X₈X₉CX₁₀X₁₁CX₁₂X₁₃X₁₄X₁₅X₁₆RADNLTEHX₁₇X₁₈X₁₉ | 2287 |
| aggtggggg | GGT AGG | | TEHQRTHTGEKPYKCPECGKSFS | | HX₂₀X₂₁X₂₂X₂₃X₂₄X₈X₉CX₁₀X₁₁CX₁₂X₁₃X₁₄X₁₅X₁₆RSDKLVRHX₁₇X₁₈ | |
| cag | TGG ggg | | RSDKLVRHQRTHTGEKPYKCPEC | | X₁₉HX₂₀X₂₁X₂₂X₂₃X₂₄X₈X₉CX₁₀X₁₁CX₁₂X₁₃X₁₄X₁₅X₁₆RSDHLTTHX₁₇ | |
| | CAG | | GKSFSRSDHLTTHQRTHTGEKPY | | X₁₈X₁₉HX₂₀X₂₁X₂₂X₂₃X₂₄X₈X₉CX₁₀X₁₁CX₁₂X₁₃X₁₄X₁₅X₁₆RSDHLTNH | |
| | | | KCPECGKSFSRSDHLTNHQRTHT | | X₁₇X₁₈X₁₉HX₂₀X₂₁X₂₂X₂₃X₂₄X₈X₉CX₁₀X₁₁CX₁₂X₁₃X₁₄X₁₅X₁₆TSGHLV | |
| | | | GEKPYKCPECGKSFSTSGHLVRH | | RHX₁₇X₁₈X₁₉HX₂₀X₂₁X₂₂X₂₃X₂₄X₈X₉CX₁₀X₁₁CX₁₂X₁₃X₁₄X₁₅X₁₆TTGN | |
| | | | QRTHTGEKPYKCPECGKSFSTTG | | LTVHX₁₇X₁₈X₁₉HX₂₀X₂₁X₂₂X₂₃X₂₄X₈X₉CX₁₀X₁₁CX₁₂X₁₃X₁₄X₁₅X₁₆DP | |
| | | | NLTVHQRTHTGEKPYKCPECGKS | | GHLVRHX₁₇X₁₈X₁₉HX₂₀X₂₁X₂₂X₂₃X₂₄X₂₅X₂₆X₂₇X₂₈X₂₉X₃₀ | |
| | | | FSDPGHLVRHQRTHTGEKPTGKK | | | |
| | | | TS | | | |
| atgggcaat | ATG GGC | 1190 | LEPGEKPYKCPECGKSFSRSDKL | 1739 | XX₂X₃X₄X₅X₆X₇X₈X₉CX₁₀X₁₁CX₁₂X₁₃X₁₄X₁₅X₁₆RSDKLVRHX₁₇X₁₈X₁₉ | 2288 |
| ggtaggtgg | AAT GGT | | VRHQRTHTGEKPYKCPECGKSFS | | HX₂₀X₂₁X₂₂X₂₃X₂₄X₈X₉CX₁₀X₁₁CX₁₂X₁₃X₁₄X₁₅X₁₆RSDHLTTHX₁₇X₁₈ | |
| ggg | AGG TGG | | RSDHLTTHQRTHTGEKPYKCPEC | | X₁₉HX₂₀X₂₁X₂₂X₂₃X₂₄X₈X₉CX₁₀X₁₁CX₁₂X₁₃X₁₄X₁₅X₁₆RSDHLTNHX₁₇ | |
| | GGG | | GKSFSRSDHLTNHQRTHTGEKPY | | X₁₈X₁₉HX₂₀X₂₁X₂₂X₂₃X₂₄X₈X₉CX₁₀X₁₁CX₁₂X₁₃X₁₄X₁₅X₁₆TSGHLVRH | |
| | | | KCPECGKSFSTSGHLVRHQRTHT | | X₁₇X₁₈X₁₉HX₂₀X₂₁X₂₂X₂₃X₂₄X₈X₉CX₁₀X₁₁CX₁₂X₁₃X₁₄X₁₅X₁₆TTGNLT | |
| | | | GEKPYKCPECGKSFSTTGNLTVH | | VHX₁₇X₁₈X₁₉HX₂₀X₂₁X₂₂X₂₃X₂₄X₈X₉CX₁₀X₁₁CX₁₂X₁₃X₁₄X₁₅X₁₆DPGH | |
| | | | QRTHTGEKPYKCPECGKSFSDPG | | LVRHX₁₇X₁₈X₁₉HX₂₀X₂₁X₂₂X₂₃X₂₄X₈X₉CX₁₀X₁₁CX₁₂X₁₃X₁₄X₁₅X₁₆RR | |
| | | | HLVRHQRTHTGEKPYKCPECGKS | | DELNVHX₁₇X₁₈X₁₉HX₂₀X₂₁X₂₂X₂₃X₂₄X₂₅X₂₆X₂₇X₂₈X₂₉X₃₀ | |
| | | | FSRRDELNVHQRTHTGEKPTGKK | | | |
| | | | TS | | | |
| aatggtagg | AAT GGT | 1191 | LEPGEKPYKCPECGKSFSRRDEL | 1740 | X₁X₂X₃X₄X₅X₆X₇X₈X₉CX₁₀X₁₁CX₁₂X₁₃X₁₄X₁₅X₁₆RRDELNVHX₁₇X₁₈X₁₉ | 2289 |
| tgggggcag | AGG TGG | | NVHQRTHTGEKPYKCPECGKSFS | | HX₂₀X₂₁X₂₂X₂₃X₂₄X₈X₉CX₁₀X₁₁CX₁₂X₁₃X₁₄X₁₅X₁₆RADNLTEHX₁₇X₁₈ | |
| atg | ggg CAG | | RADNLTEHQRTHTGEKPYKCPEC | | X₁₉HX₂₀X₂₁X₂₂X₂₃X₂₄X₈X₉CX₁₀X₁₁CX₁₂X₁₃X₁₄X₁₅X₁₆RSDKLVRHX₁₇ | |
| | ATG | | GKSFSRSDKLVRHQRTHTGEKPY | | X₁₈X₁₉HX₂₀X₂₁X₂₂X₂₃X₂₄X₈X₉CX₁₀X₁₁CX₁₂X₁₃X₁₄X₁₅X₁₆RSDHLTTH | |
| | | | KCPECGKSFSRSDHLTTHQRTHT | | X₁₇X₁₈X₁₉HX₂₀X₂₁X₂₂X₂₃X₂₄X₈X₉CX₁₀X₁₁CX₁₂X₁₃X₁₄X₁₅X₁₆RSDHLT | |
| | | | GEKPYKCPECGKSFSRSDHLTNH | | NHX₁₇X₁₈X₁₉HX₂₀X₂₁X₂₂X₂₃X₂₄X₈X₉CX₁₀X₁₁CX₁₂X₁₃X₁₄X₁₅X₁₆TSGH | |
| | | | QRTHTGEKPYKCPECGKSFSTSG | | LVRHX₁₇X₁₈X₁₉HX₂₀X₂₁X₂₂X₂₃X₂₄X₈X₉CX₁₀X₁₁CX₁₂X₁₃X₁₄X₁₅X₁₆TT | |
| | | | HLVRHQRTHTGEKPYKCPECGKS | | GNLTVHX₁₇X₁₈X₁₉HX₂₀X₂₁X₂₂X₂₃X₂₄X₂₅X₂₆X₂₇X₂₈X₂₉X₃₀ | |
| | | | FSTTGNLTVHQRTHTGEKPTGKK | | | |
| | | | TS | | | |
| acgatgggc | ACG ATG | 1192 | LEPGEKPYKCPECGKSFSRSDHL | 1741 | X₁X₂X₃X₄X₅X₆X₇X₈X₉CX₁₀X₁₁CX₁₂X₁₃X₁₄X₁₅X₁₆RSDHLTTHX₁₇X₁₈X₁₉ | 2290 |
| aatggtagg | GGC AAT | | TTHQRTHTGEKPYKCPECGKSFS | | HX₂₀X₂₁X₂₂X₂₃X₂₄X₈X₉CX₁₀X₁₁CX₁₂X₁₃X₁₄X₁₅X₁₆RSDHLTNHX₁₇X₁₈ | |
| tgg | GGT AGG | | RSDHLTNHQRTHTGEKPYKCPEC | | X₁₉HX₂₀X₂₁X₂₂X₂₃X₂₄X₈X₉CKX₁₀X₁₁CX₁₂X₁₃X₁₄X₁₅X₁₆TSGHLVRHX₁₇ | |
| | TGG | | GKSFSTSGHLVRHQRTHTGEKPY | | X₁₈X₁₉HX₂₀X₂₁X₂₂X₂₃X₂₄X₈X₉CX₁₀X₁₁CX₁₂X₁₃X₁₄X₁₅X₁₆TTGNLTVH | |
| | | | KCPECGKSFSTTGNLTVHQRTHT | | X₁₇X₁₈X₁₉HX₂₀X₂₁X₂₂X₂₃X₂₄X₈X₉CX₁₀X₁₁CX₁₂X₁₃X₁₄X₁₅X₁₆DPGHLV | |
| | | | GEKPYKCPECGKSFSDPGHLVRH | | RHX₁₇X₁₈X₁₉HX₂₀X₂₁X₂₂X₂₃X₂₄X₈X₉CX₁₀X₁₁CX₁₂X₁₃X₁₄X₁₅X₁₆RRDE | |
| | | | QRTHTGEKPYKCPECGKSFSRRD | | LNVHX₁₇X₁₈X₁₉HX₂₀X₂₁X₂₂X₂₃X₂₄X₈X₉CX₁₀X₁₁CX₁₂X₁₃X₁₄X₁₅X₁₆RT | |
| | | | ELNVHQRTHTGEKPYKCPECGKS | | DTLRDHX₁₇X₁₈X₁₉HX₂₀X₂₁X₂₂X₂₃X₂₄X₂₅X₂₆X₂₇X₂₈X₂₉X₃₀ | |
| | | | FSRTDTLRDHQRTHTGEKPTGKK | | | |
| | | | TS | | | |
| gtgggggca | GTG GGG | 1193 | LEPGEKPYKCPECGKSFSRSDKL | 1742 | X₁X₂X₃X₄X₅X₆X₇X₈X₉CX₁₀X₁₁CX₁₂X₁₃X₁₄X₁₅X₁₆RSDKLVRHX₁₇X₁₈X₁₉ | 2291 |
| ggtgtgcct | GCA GGT | | VRHQRTHTGEKPYKCPECGKSFS | | HX₂₀X₂₁X₂₂X₂₃X₂₄X₈X₉CX₁₀X₁₁CX₁₂X₁₃X₁₄X₁₅X₁₆TKNSLTEHX₁₇X₁₈ | |
| ggg | gtg CCT | | TKNSLTEHQRTHTGEKPYKCPEC | | X₁₉HX₂₀X₂₁X₂₂X₂₃X₂₄X₈X₉CX₁₀X₁₁CX₁₂X₁₃X₁₄X₁₅X₁₆RSDELVRHX₁₇ | |
| | GGG | | GKSFSRSDELVRHQRTHTGEKPY | | X₁₈X₁₉HX₂₀X₂₁X₂₂X₂₃X₂₄X₈X₉CX₁₀X₁₁CX₁₂X₁₃X₁₄X15KX₁₆TSGHLVRH | |
| | | | KCPECGKSFSTSGHLVRHQRTHT | | X₁₇X₁₈X₁₉HX₂₀X₂₁X₂₂X₂₃X₂₄X₈X₉CX₁₀X₁₁CX₁₂X₁₃X₁₄X₁₅X₁₆QSGDLR | |
| | | | GEKPYKCPECGKSFSQSGDLRRH | | RHX₁₇X₁₈X₁₉HX₂₀X₂₁X₂₂X₂₃X₂₄X₈X₉CX₁₀X₁₁CX₁₂X₁₃X₁₄X₁₅X₁₆RSDK | |
| | | | QRTHTGEKPYKCPECGKSFSRSD | | LVRHX₁₇X₁₈X₁₉HX₂₀X₂₁X₂₂X₂₃X₂₄X₈X₉CX₁₀X₁₁CX₁₂X₁₃X₁₄X₁₅X₁₆RS | |
| | | | KLVRHQRTHTGEKPYKCPECGKS | | DELVRHX₁₇X₁₈X₁₉HX₂₀X₂₁X₂₂X₂₃X₂₄X₂₅X₂₆X₂₇X₂₈X₂₉X₃₀ | |
| | | | FSRSDELVRHQRTHTGEKPTGKK | | | |
| | | | TS | | | |
| ccagtgggg | CCA GTG | 1194 | LEPGEKPYKCPECGKSFSTKNSL | 1743 | X₁X₂X₃X₄X₅X₆X₇X₈X₉CX₁₀X₁₁CX₁₂X₁₃X₁₄X₁₅X₁₆TKNSLTEHX₁₇X₁₈X₁₉ | 2292 |
| gcaggtgtg | GGG GCA | | TEHQRTHTGEKPYKCPECGKSFS | | HX₂₀X₂₁X₂₂X₂₃X₂₄X₈X₉CX₁₀X₁₁CX₁₂X₁₃X₁₄X₁₅X₁₆RSDELVRHX₁₇X₁₈ | |
| cct | GGT gtg | | RSDELVRHQRTHTGEKPYKCPEC | | X₁₉HX₂₀X₂₁X₂₂X₂₃X₂₄X₈X₉CX₁₀X₁₁CX₁₂X₁₃X₁₄X₁₅X₁₆TSGHLVRHX₁₇ | |
| | CCT | | GKSFSTSGHLVRHQRTHTGEKPY | | X₁₈X₁₉HX₂₀X₂₁X₂₂X₂₃X₂₄X₈X₉CX₁₀X₁₁CX₁₂X₁₃X₁₄X₁₅X₁₆QSGDLRRH | |
| | | | KCPECGKSFSQSGDLRRHQRTHT | | X₁₇X₁₈X₁₉HX₂₀X₂₁X₂₂X₂₃X₂₄X₈X₉CX₁₀X₁₁CX₁₂X₁₃X₁₄X₁₅X₁₆RSDKLV | |
| | | | GEKPYKCPECGKSFSRSDKLVRH | | RHX₁₇X₁₈X₁₉HX₂₀X₂₁X₂₂X₂₃X₂₄X₈X₉CX₁₀X₁₁CX₁₂X₁₃X₁₄X₁₅X₁₆RSDE | |
| | | | QRTHTGEKPYKCPECGKSFSRSD | | LVRHX₁₇X₁₈X₁₉HX₂₀X₂₁X₂₂X₂₃X₂₄X₈X₉CX₁₀X₁₁CX₁₂X₁₃X₁₄X₁₅X₁₆TS | |
| | | | ELVRHQRTHTGEKPYKCPECGKS | | HSLTEHX₁₇X₁₈X₁₉HX₂₀X₂₁X₂₂X₂₃X₂₄X₂₅X₂₆X₂₇X₂₈X₂₉X₃₀ | |
| | | | FSTSHSLTEHQRTHTGEKPTGKK | | | |
| | | | TS | | | |
| gtgccagtg | gtg CCA | 1195 | LEPGEKPYKCPECGKSFSRSDEL | 1744 | X₁X₂X₃X₄X₅X₆X₇X₈X₉CX₁₀X₁₁CX₁₂X₁₃X₁₄X₁₅X₁₆RSDELVRHX₁₇X₁₈X₁₉ | 2293 |
| ggggcaggt | GTG GGG | | VRHQRTHTGEKPYKCPECGKSFS | | HX₂₀X₂₁X₂₂X₂₃X₂₄X₈X₉CX₁₀X₁₁CX₁₂X₁₃X₁₄X₁₅X₁₆TSGHLVRHX₁₇X₁₈ | |
| gtg | GCA GGT | | TSGHLVRHQRTHTGEKPYKCPEC | | X₁₉HX₂₀X₂₁X₂₂X₂₃X₂₄X₈X₉CX₁₀X₁₁CX₁₂X₁₃X₁₄X₁₅X₁₆QSGDLRRHX₁₇ | |
| | GTG | | GKSFSQSGDLRRHQRTHTGEKPY | | X₁₈X₁₉HX₂₀X₂₁X₂₂X₂₃X₂₄X₈X₉CX₁₀X₁₁CX₁₂X₁₃X₁₄X₁₅X₁₆RSDKLVRH | |
| | | | KCPECGKSFSRSDKLVRHQRTHT | | X₁₇X₁₈X₁₉HX₂₀X₂₁X₂₂X₂₃X₂₄X₈X₉CX₁₀X₁₁CX₁₂X₁₃X₁₄X₁₅X₁₆RSDELV | |
| | | | GEKPYKCPECGKSFSRSDELVRH | | RHX₁₇X₁₈X₁₉HX₂₀X₂₁X₂₂X₂₃X₂₄X₈X₉CX₁₀X₁₁CX₁₂X₁₃X₁₄X₁₅X₁₆TSHS | |
| | | | QRTHTGEKPYKCPECGKSFSTSH | | LTEHX₁₇X₁₈X₁₉HX₂₀X₂₁X₂₂X₂₃X₂₄X₈X₉CX₁₀X₁₁CX₁₂X₁₃X₁₄X₁₅X₁₆RS | |
| | | | SLTEHQRTHTGEKPYKCPECGKS | | DELVRHX₁₇X₁₈X₁₉HX₂₀X₂₁X₂₂X₂₃X₂₄X₂₅X₂₆X₂₇X₂₈X₂₉X₃₀ | |
| | | | FSRSDELVRHQRTHTGEKPTGKK | | | |
| | | | TS | | | |
| ccaggtgtg | CCA GGT | 1196 | LEPGEKPYKCPECGKSFSQSGDL | 1745 | X₁X₂X₃X₄X₅X₆X₇X₈X₉CX₁₀X₁₁CX₁₂X₁₃X₁₄X₁₅X₁₆QSGDLRRHX₁₇X₁₈X₁₉ | 2294 |
| ccagtgggg | gtg CCA | | RRHQRTHTGEKPYKCPECGKSFS | | HX₂₀X₂₁X₂₂X₂₃X₂₄X₈X₉CX₁₀X₁₁CX₁₂X₁₃X₁₄X₁₅X₁₆RSDKLVRHX₁₇X₁₈ | |
| gca | GTG GGG | | RSDKLVRHQRTHTGEKPYKCPEC | | X₁₉HX₂₀X₂₁X₂₂X₂₃X₂₄X₈X₉CX₁₀X₁₁CX₁₂X₁₃X₁₄X₁₅X₁₆RSDELVRHX₁₇ | |
| | GCA | | GKSFSRSDELVRHQRTHTGEKPY | | X₁₈X₁₉HX₂₀X₂₁X₂₂X₂₃X₂₄X₈X₉CX₁₀X₁₁CX₁₂X₁₃X₁₄X₁₅X₁₆TSHSLTEH | |
| | | | KCPECGKSFSTSHSLTEHQRTHT | | X₁₇X₁₈X₁₉HX₂₀X₂₁X₂₂X₂₃X₂₄X₈X₉CX₁₀X₁₁CX₁₂X₁₃X₁₄X₁₅X₁₆RSDELV | |
| | | | GEKPYKCPECGKSFSRSDELVRH | | RHX₁₇X₁₈X₁₉HX₂₀X₂₁X₂₂X₂₃X₂₄X₈X₉CX₁₀X₁₁CX₁₂X₁₃X₁₄X₁₅X₁₆TSGH | |
| | | | QRTHTGEKPYKCPECGKSFSTSG | | LVRHX₁₇X₁₈X₁₉HX₂₀X₂₁X₂₂X₂₃X₂₄X₈X₉CX₁₀X₁₁CX₁₂X₁₃X₁₄X₁₅X₁₆TS | |
| | | | HLVRHQRTHTGEKPYKCPECGKS | | HSLTEHX₁₇X₁₈X₁₉HX₂₀X₂₁X₂₂X₂₃X₂₄X₂₅X₂₆X₂₇X₂₈X₂₉X₃₀ | |
| | | | FSTSHSLTEHQRTHTGEKPTGKK | | | |
| | | | TS | | | |
| ggtgtgcca | GGT gtg | 1197 | LEPGEKPYKCPECGKSFSTSGHL | 1746 | X₁X₂X₃X₄X₅X₆X₇X₈X₉CX₁₀X₁₁CX₁₂X₁₃X₁₄X₁₅X₁₆TSGHLVRHX₁₇X₁₈X₁₉ | 2295 |
| gtgggggca | CCA GTG | | VRHQRTHTGEKPYKCPECGKSFS | | HX₂₀X₂₁X₂₂X₂₃X₂₄X₈X₉CX₁₀X₁₁CX₁₂X₁₃X₁₄X₁₅X₁₆QSGDLRRHX₁₇X₁₈ | |
| ggt | GGG GCA | | QSGDLRRHQRTHTGEKPYKCPEC | | X₁₉HX₂₀X₂₁X₂₂X₂₃X₂₄X₈X₉CX₁₀X₁₁CX₁₂X₁₃X₁₄X₁₅X₁₆RSDKLVRHX₁₇ | |
| | GGT | | GKSFSRSDKLVRHQRTHTGEKPY | | X₁₈X₁₉HX₂₀X₂₁X₂₂X₂₃X₂₄X₈X₉CX₁₀X₁₁CX₁₂X₁₃X₁₄X₁₅X₁₆RSDELVRH | |
| | | | KCPECGKSFSRSDELVRHQRTHT | | X₁₇X₁₈X₁₉HX₂₀X₂₁X₂₂X₂₃X₂₄X₈X₉CX₁₀X₁₁CX₁₂X₁₃X₁₄X₁₅X₁₆TSHSLT | |
| | | | GEKPYKCPECGKSFSTSHSLTEH | | EHX₁₇X₁₈X₁₉HX₂₀X₂₁X₂₂X₂₃X₂₄X₈X₉CX₁₀X₁₁CX₁₂X₁₃X₁₄X₁₅X₁₆RSDE | |
| | | | QRTHTGEKPYKCPECGKSFSRSD | | LVRHX₁₇X₁₈X₁₉HX₂₀X₂₁X₂₂X₂₃X₂₄X₈X₉CX₁₀X₁₁CX₁₂X₁₃X₁₄X₁₅X₁₆TS | |
| | | | ELVRHQRTHTGEKPYKCPECGKS | | GHLVRHX₁₇X₁₈X₁₉HX₂₀X₂₁X₂₂X₂₃X₂₄X₂₅X₂₆X₂₇X₂₈X₂₉X₃₀ | |
| | | | FSTSGHLVRHQRTHTGEKPTGKK | | | |
| | | | TS | | | |
| ccaggagca | CCA GGA | 1198 | LEPGEKPYKCPECGKSFSSKKAL | 1747 | X₁X₂X₃X₄X₅X₆X₇X₈X₉CX₁₀X₁₁CX₁₂X₁₃X₁₄X₁₅X₁₆SKKALTEHX₁₇X₁₈X₁₉ | 2296 |
| gatctttgg | GCA GAT | | TEHQRTHTGEKPYKCPECGKSFS | | HX₂₀X₂₁X₂₂X₂₃X₂₄X₈X₉CX₁₀X₁₁CX₁₂X₁₃X₁₄X₁₅X₁₆RSDHLTTHX₁₇X₁₈ | |
| cac | CTT TGG | | RSDHLTTHQRTHTGEKPYKCPEC | | X₁₉HX₂₀X₂₁X₂₂X₂₃X₂₄X₈X₉CX₁₀X₁₁CX₁₂X₁₃X₁₄X₁₅X₁₆TTGALTEHX₁₇ | |
| | CAC | | GKSFSTTGALTEHQRTHTGEKPY | | X₁₈X₁₉HX₂₀X₂₁X₂₂X₂₃X₂₄X₈X₉CX₁₀X₁₁CX₁₂X₁₃X₁₄X₁₅X₁₆TSGNLVRH | |
| | | | KCPECGKSFSTSGNLVRHQRTHT | | X₁₇X₁₈X₁₉HX₂₀X₂₁X₂₂X₂₃X₂₄X₈X₉CX₁₀X₁₁CX₁₂X₁₃X₁₄X₁₅X₁₆QSGDLR | |
| | | | GEKPYKCPECGKSFSQSGDLRRH | | RHX₁₇X₁₈X₁₉HX₂₀X₂₁X₂₂X₂₃X₂₄X₈X₉CX₁₀X₁₁CX₁₂X₁₃X₁₄X₁₅X₁₆QRAH | |
| | | | QRTHTGEKPYKCPECGKSFSQRA | | LERHX₁₇X₁₈X₁₉HX₂₀X₂₁X₂₂X₂₃X₂₄X₈X₉CX₁₀X₁₁CX₁₂X₁₃X₁₄X₁₅X₁₆TS | |
| | | | HLERHQRTHTGEKPYKCPECGKS | | HSLTEHX₁₇X₁₈X₁₉HX₂₀X₂₁X₂₂X₂₃X₂₄X₂₅X₂₆X₂₇X₂₈X₂₉X₃₀ | |
| | | | FSTSHSLTEHQRTHTGEKPTGKK | | | |
| | | | TS | | | |
| ctgggtcca | CTG GGT | 1199 | LEPGEKPYKCPECGKSFSTTGAL | 1748 | X₁X₂X₃X₄X₅X₆X₇X₈X₉CX₁₀X₁₁CX₁₂X₁₃X₁₄X₁₅X₁₆TTGALTEHX₁₇X₁₈X₁₉ | 2297 |
| ggagcagat | CCA GGA | | TEHQRTHTGEKPYKCPECGKSFS | | HX₂₀X₂₁X₂₂X₂₃X₂₄X₈X₉CX₁₀X₁₁CX₁₂X₁₃X₁₄X₁₅X₁₆TSGNLVRHX₁₇X₁₈ | |
| ctt | GCA GAT | | TSGNLVRHQRTHTGEKPYKCPEC | | X₁₉HX₂₀X₂₁X₂₂X₂₃X₂₄X₈X₉CX₁₀X₁₁CX₁₂X₁₃X₁₄X₁₅X₁₆QSGDLRRHX₁₇ | |
| | CTT | | GKSFSQSGDLRRHQRTHTGEKPY | | X₁₈X₁₉HX₂₀X₂₁X₂₂X₂₃X₂₄X₈X₉CX₁₀X₁₁CX₁₂X₁₃X₁₄X₁₅X₁₆QRAHLERH | |
| | | | KCPECGKSFSQRAHLERHQRTHT | | X₁₇X₁₈X₁₉HX₂₀X₂₁X₂₂X₂₃X₂₄X₈X₉CX₁₀X₁₁CX₁₂X₁₃X₁₄X₁₅X₁₆TSHSLT | |
| | | | GEKPYKCPECGKSFSTSHSLTEH | | EHX₁₇X₁₈X₁₉HX₂₀X₂₁X₂₂X₂₃X₂₄X₈X₉CX₁₀X₁₁CX₁₂X₁₃X₁₄X₁₅X₁₆TSGH | |
| | | | QRTHTGEKPYKCPECGKSFSTSG | | LVRHX₁₇X₁₈X₁₉HX₂₀X₂₁X₂₂X₂₃X₂₄X₈X₉CX₁₀X₁₁CX₁₂X₁₃X₁₄X₁₅X₁₆RN | |
| | | | HLVRHQRTHTGEKPYKCPECGKS | | DALTEHX₁₇X₁₈X₁₉HX₂₀X₂₁X₂₂X₂₃X₂₄X₂₅X₂₆X₂₇X₂₈X₂₉X₃₀ | |
| | | | FSRNDALTEHQRTHTGEKPTGKK | | | |
| | | | TS | | | |
| ggtccagga | GGT CCA | 1200 | LEPGEKPYKCPECGKSFSRSDHL | 1749 | X₁X₂X₃X₄X₅X₆X₇X₈X₉CX₁₀X₁₁CX₁₂X₁₃X₁₄X₁₅X₁₆RSDHLTTHX₁₇X₁₈X₁₉ | 2298 |
| gcagatctt | GGA GCA | | TTHQRTHTGEKPYKCPECGKSFS | | HX₂₀X₂₁X₂₂X₂₃X₂₄X₈X₉CX₁₀X₁₁CX₁₂X₁₃X₁₄X₁₅X₁₆TTGALTEHX₁₇X₁₈ | |
| tgg | GAT CTT | | TTGALTEHQRTHTGEKPYKCPEC | | X₁₉HX₂₀X₂₁X₂₂X₂₃X₂₄X₈X₉CX₁₀X₁₁CX₁₂X₁₃X₁₄X₁₅X₁₆TSGNLVRHX₁₇ | |
| | TGG | | GKSFSTSGNLVRHQRTHTGEKPY | | X₁₈X₁₉HX₂₀X₂₁X₂₂X₂₃X₂₄X₈X₉CX₁₀X₁₁CX₁₂X₁₃X₁₄X₁₅X₁₆QSGDLRRH | |
| | | | KCPECGKSFSQSGDLRRHQRTHT | | X₁₇X₁₈X₁₉HX₂₀X₂₁X₂₂X₂₃X₂₄X₈X₉CX₁₀X₁₁CX₁₂X₁₃X₁₄X₁₅X₁₆QRAHLE | |
| | | | GEKPYKCPECGKSFSQRAHLERH | | RHX₁₇X₁₈X₁₉HX₂₀X₂₁X₂₂X₂₃X₂₄X₈X₉CX₁₀X₁₁CX₁₂X₁₃X₁₄X₁₅X₁₆TSHS | |
| | | | QRTHTGEKPYKCPECGKSFSTSH | | LTEHX₁₇X₁₈X₁₉HX₂₀X₂₁X₂₂X₂₃X₂₄X₈X₉CX₁₀X₁₁CX₁₂X₁₃X₁₄X₁₅X₁₆TS | |
| | | | SLTEHQRTHTGEKPYKCPECGKS | | GHLVRHX₁₇X₁₈X₁₉HX₂₀X₂₁X₂₂X₂₃X₂₄X₂₅X₂₆X₂₇X₂₈X₂₉X₃₀ | |
| | | | FSTSGHLVRHQRTHTGEKPTGKK | | | |
| | | | TS | | | |
| gggaggaga | ggg AGG | 1201 | LEPGEKPYKCPECGKSFSTTGNL | 1750 | X₁X₂X₃X₄X₅X₆X₇X₈X₉CX₁₀X₁₁CX₁₂X₁₃X₁₄X₁₅X₁₆TTGNLTVHX₁₇X₁₈X₁₉ | 2299 |
| atgatacaa | AGA ATG | | TVHQRTHTGEKPYKCPECGKSFS | | 9HX₂₀X₂₁X₂₂X₂₃X₂₄X₈X₉CX₁₀X₁₁CX₁₂X₁₃X₁₄X₁₅X₁₆QSGNLTEHX₁₇X₁₈ | |
| aat | ATA CAA | | QSGNLTEHQRTHTGEKPYKCPEC | | X₁₉HX₂₀X₂₁X₂₂X₂₃X₂₄X₈X₉CX₁₀X₁₁CX₁₂X₁₃X₁₄X₁₅X₁₆QKSSLIAHX₁₇ | |
| | AAT | | GKSFSQKSSLIAHQRTHTGEKPY | | X₁₈X₁₉HX₂₀X₂₁X₂₂X₂₃X₂₄X₈X₉CX₁₀X₁₁CX₁₂X₁₃X₁₄X₁₅X₁₆RRDELNVH | |
| | | | KCPECGKSFSRRDELNVHQRTHT | | X₁₇X₁₈X₁₉HX₂₀X₂₁X₂₂X₂₃X₂₄X₈X₉CX₁₀X₁₁CX₁₂X₁₃X₁₄X₁₅X₁₆QLAHLR | |
| | | | GEKPYKCPECGKSFSQLAHLRAH | | AHX₁₇X₁₈X₁₉HX₂₀X₂₁X₂₂X₂₃X₂₄X₈X₉CX₁₀X₁₁CX₁₂X₁₃X₁₄X₁₅X₁₆RSDH | |
| | | | QRTHTGEKPYKCPECGKSFSRSD | | LTNHX₁₇X₁₈X₁₉HX₂₀X₂₁X₂₂X₂₃X₂₄X₈X₉CX₁₀X₁₁CX₁₂X₁₃X₁₄X₁₅X₁₆RS | |
| | | | HLTNHQRTHTGEKPYKCPECGKS | | DKLVRHX₁₇X₁₈X₁₉HX₂₀X₂₁X₂₂X₂₃X₂₄X₂₅X₂₆X₂₇X₂₈X₂₉X₃₀ | |
| | | | FSRSDKLVRHQRTHTGEKPTGKK | | | |
| | | | TS | | | |
| tggggtggg | TGG GGT | 1202 | LEPGEKPYKCPECGKSFSQKSSL | 1751 | X₁X₂X₃X₄X₅X₆X₇X₈X₉CX₁₀X₁₁CX₁₂X₁₃X₁₄X₁₅X₁₆QKSSLIAHX₁₇X₁₈X₁₉ | 2300 |
| aggagaatg | ggg AGG | | IAHQRTHTGEKPYKCPECGKSFS | | HX₂₀X₂₁X₂₂X₂₃X₂₄X₈X₉CX₁₀X₁₁CX₁₂X₁₃X₁₄X₁₅X₁₆RRDELNVHX₁₇X₁₈ | |
| ata | AGA ATG | | RRDELNVHQRTHTGEKPYKCPEC | | X₁₉HX₂₀X₂₁X₂₂X₂₃X₂₄X₈X₉CX₁₀X₁₁CX₁₂X₁₃X₁₄X₁₅X₁₆QLAHLRAHX₁₇ | |
| | ATA | | GKSFSQLAHLRAHQRTHTGEKPY | | X₁₈X₁₉HX₂₀X₂₁X₂₂X₂₃X₂₄X₈X₉CX₁₀X₁₁CX₁₂X₁₃X₁₄X₁₅X₁₆RSDHLTNH | |
| | | | KCPECGKSFSRSDHLTNHQRTHT | | X₁₇X₁₈X₁₉HX₂₀X₂₁X₂₂X₂₃X₂₄X₈X₉CX₁₀X₁₁CX₁₂X₁₃X₁₄X₁₅X₁₆RSDKLV | |
| | | | GEKPYKCPECGKSFSRSDKLVRH | | RHX₁₇X₁₈X₁₉HX₂₀X₂₁X₂₂X₂₃X₂₄X₈X₉CX₁₀X₁₁CX₁₂X₁₃X₁₄X₁₅X₁₆TSGH | |
| | | | QRTHTGEKPYKCPECGKSFSTSG | | LVRHX₁₇X₁₈X₁₉HX₂₀X₂₁X₂₂X₂₃X₂₄X₈X₉CX₁₀X₁₁CX₁₂X₁₃X₁₄X₁₅X₁₆RS | |
| | | | HLVRHQRTHTGEKPYKCPECGKS | | DHLTTHX₁₇X₁₈X₁₉HX₂₀X₂₁X₂₂X₂₃X₂₄X₂₅X₂₆X₂₇X₂₈X₂₉X₃₀ | |
| | | | FSRSDHLTTHQRTHTGEKPTGKK | | | |
| | | | TS | | | |
| ctttggggt | CTT TGG | 1203 | LEPGEKPYKCPECGKSFSRRDEL | 1752 | X₁X₂X₃X₄X₅X₆X₇X₈X₉CX₁₀X₁₁CX₁₂X₁₃X₁₄X₁₅X₁₆RRDELNVHX₁₇X₁₈X₁₉ | 2301 |
| gggaggaga | GGT ggg | | NVHQRTHTGEKPYKCPECGKSFS | | HX₂₀X₂₁X₂₂X₂₃X₂₄X₈X₉CX₁₀X₁₁CX₁₂X₁₁X₁₃X₁₄X₁₅X₁₆QLAHLRAHX₁₇X₁₈ | |
| atg | AGG AGA | | QLAHLRAHQRTHTGEKPYKCPEC | | X₁₉HX₂₀X₂₁X₂₂X₂₃X₂₄X₈X₉CX₁₀X₁₁CX₁₂X₁₃X₁₄X₁₅X₁₆RSDHLTNHX₁₇ | |
| | ATG | | GKSFSRSDHLTNHQRTHTGEKPY | | X₁₈X₁₉HX₂₀X₂₁X₂₂X₂₃X₂₄X₈X₉CX₁₀X₁₁CX₁₂X₁₃X₁₄X₁₅X₁₆RSDKLVRH | |
| | | | KCPECGKSFSRSDKLVRHQRTHT | | X₁₇X₁₈X₁₉HX₂₀X₂₁X₂₂X₂₃X₂₄X₈X₉CX₁₀X₁₁CX₁₂X₁₃X₁₄X₁₅X₁₆TSGHLV | |
| | | | GEKPYKCPECGKSFSTSGHLVRH | | RHX₁₇X₁₈X₁₉HX₂₀X₂₁X₂₂X₂₃X₂₄X₈X₉CX₁₀X₁₁CX₁₂X₁₃X₁₄X₁₅X₁₆RSDH | |
| | | | QRTHTGEKPYKCPECGKSFSRSD | | LTTHX₁₇X₁₈X₁₉HX₂₀X₂₁X₂₂X₂₃X₂₄X₈X₉CX₁₀X₁₁CX₁₂X₁₃X₁₄X₁₅X₁₆TT | |
| | | | HLTTHQRTHTGEKPYKCPECGKS | | GALTEHX₁₇X₁₈X₁₉HX₂₀X₂₁X₂₂X₂₃X₂₄X₂₅X₂₆X₂₇X₂₈X₂₉X₃₀ | |
| | | | FSTTGALTEHQRTHTGEKPTGKK | | | |
| | | | TS | | | |
| ggcactcaa | GGC ACT | 1204 | LEPGEKPYKCPECGKSFSRSDKL | 1753 | X₂X₃X₄X₅X₆X₇X₈X₉CX₁₀X₁₁CX₁₂X₁₃X₁₄X₁₅X₁₆RSDKLVRHX₁₇X₁₈X₁₉ | 2302 |
| ctttggggt | CAA CTT | | VRHQRTHTGEKPYKCPECGKSFS | | HX₂₀X₂₁X₂₂X₂₃X₂₄X₈X₉CX₁₀X₁₁CX₁₂X₁₃X₁₄X₁₅X₁₆TSGHLVRHX₁₇X₁₈ | |
| ggg | TGG GGT | | TSGHLVRHQRTHTGEKPYKCPEC | | X₁₉HX₂₀X₂₁X₂₂X₂₃X₂₄X₈X₉CX₁₀X₁₁CX₁₂X₁₃X₁₄X₁₅X₁₆RSDHLTTHX₁₇ | |
| | GGG | | GKSFSRSDHLTTHQRTHTGEKPY | | X₁₈X₁₉HX₂₀X₂₁X₂₂X₂₃X₂₄X₈X₉CX₁₀X₁₁CX₁₂X₁₃X₁₄X₁₅X₁₆TTGALTEH | |
| | | | KCPECGKSFSTTGALTEHQRTHT | | X₁₇X₁₈X₁₉HX₂₀X₂₁X₂₂X₂₃X₂₄X₈X₉CX₁₀X₁₁CX₁₂X₁₃X₁₄X₁₅X₁₆QSGNLT | |
| | | | GEKPYKCPECGKSFSQSGNLTEH | | EHX₁₇X₁₈X₁₉HX₂₀X₂₁X₂₂X₂₃X₂₄X₈X₉CX₁₀X₁₁CX₁₂X₁₃X₁₄X₁₅X₁₆THLD | |
| | | | QRTHTGEKPYKCPECGKSFSTHL | | LIRHX₁₇X₁₈X₁₉HX₂₀X₂₁X₂₂X₂₃X₂₄X₈X₉CX₁₀X₁₁CX₁₂X₁₃X₁₄X₁₅X₁₆DP | |
| | | | DLIRHQRTHTGEKPYKCPECGKS | | GHLVRHX₁₇X₁₈X₁₉HX₂₀X₂₁X₂₂X₂₃X₂₄X₂₅X₂₆X₂₇X₂₈X₂₉X₃₀ | |
| | | | FSDPGHLVRHQRTHTGEKPTGKK | | | |
| | | | TS | | | |
| aggagaatg | AGG AGA | 1205 | LEPGEKPYKCPECGKSFSTSGHL | 1754 | X₁X₂X₃X₄X₅X₆X₇X₈X₉CX₁₀X₁₁CX₁₂X₁₃X₁₄X₁₅X₁₆TSGHLVRHX₁₇X₁₈X₁₉ | 2303 |
| atacaaaat | ATG ATA | | VRHQRTHTGEKPYKCPECGKSFS | | HX₂₀X₂₁X₂₂X₂₃X₂₄X₈X₉CX₁₀X₁₁CX₁₂X₁₃X₁₄X₁₅X₁₆TTGNLTVHX₁₇X₁₈ | |
| ggt | CAA AAT | | TTGNLTVHQRTHTGEKPYKCPEC | | X₁₉HX₂₀X₂₁X₂₂X₂₃X₂₄X₈X₉CX₁₀X₁₁CX₁₂X₁₃X₁₄X₁₅X₁₆QSGNLTEHX₁₇ | |
| | GGT | | GKSFSQSGNLTEHQRTHTGEKPY | | X₁₈X₁₉HX₂₀X₂₁X₂₂X₂₃X₂₄X₈X₉CX₁₀X₁₁CX₁₂X₁₃X₁₄X₁₅X₁₆QKSSLIAH | |
| | | | KCPECGKSFSQKSSLIAHQRTHT | | X₁₇X₁₈X₁₉HX₂₀X₂₁X₂₂X₂₃X₂₄X₈X₉CX₁₀X₁₁CX₁₂X₁₃X₁₄X₁₅X₁₆RRDELN | |
| | | | GEKPYKCPECGKSFSRRDELNVH | | VHX₁₇X₁₈X₁₉HX₂₀X₂₁X₂₂X₂₃X₂₄X₈X₉CX₁₀X1CX₁₂X₁₃X₁₄X₁₅X₁₆QLAH | |
| | | | QRTHTGEKPYKCPECGKSFSQLA | | LRAHX₁₇X₁₈X₁₉HX₂₀X₂₁X₂₂X₂₃X₂₄X₈X₉CX₁₀X₁₁CX₁₂X₁₃X₁₄X₁₅X₁₆RS | |
| | | | HLRAHQRTHTGEKPYKCPECGKS | | DHLTNHX₁₇X₁₈X₁₉HX₂₀X₂₁X₂₂X₂₃X₂₄X₂₅X₂₆X₂₇X₂₈X₂₉X₃₀ | |
| | | | FSRSDHLTNHQRTHTGEKPTGKK | | | |
| | | | TS | | | |
| agaatgata | AGA ATG | 1206 | LEPGEKPYKCPECGKSFSRSDHL | 1755 | X₁X₂X₃X₄X₅X₆X₇X₈X₉CX₁₀X₁₁CX₁₂X₁₃X₁₄X₁₅X₁₆RSDHLTNHX₁₇X₁₈X₁₉ | 2304 |
| caaaatggt | ATA CAA | | TNHQRTHTGEKPYKCPECGKSFS | | HX₂₀X₂₁X₂₂X₂₃X₂₄X₈X₉CX₁₀X₁₁CX₁₂X₁₃X₁₄X₁₅X₁₆TSGHLVRHX₁₇X₁₈ | |
| agg | AAT GGT | | TSGHLVRHQRTHTGEKPYKCPEC | | X₁₉HX₂₀X₂₁X₂₂X₂₃X₂₄X₈X₉CX₁₀X₁₁CX₁₂X₁₃X₁₄X₁₅X₁₆TTGNLTVHX₁₇ | |
| | AGG | | GKSFSTTGNLTVHQRTHTGEKPY | | X₁₈X₁₉HX₂₀X₂₁X₂₂X₂₃X₂₄X₈X₉CX₁₀X₁₁CX₁₂X₁₃X₁₄X₁₅X₁₆QSGNLTEH | |
| | | | KCPECGKSFSQSGNLTEHQRTHT | | X₁₇X₁₈X₁₉HX₂₀X₂₁X₂₂X₂₃X₂₄X₈X₉CX₁₀X₁₁CX₁₂X₁₃X₁₄X₁₅X₁₆QKSSLI | |
| | | | GEKPYKCPECGKSFSQKSSLIAH | | AHX₁₇X₁₈X₁₉HX₂₀X₂₁X₂₂X₂₃X₂₄X₈X₉CX₁₀X₁₁CX₁₂X₁₃X₁₄X₁₅X₁₆RRDE | |
| | | | QRTHTGEKPYKCPECGKSFSRRD | | LNVHX₁₇X₁₈X₁₉HX₂₀X₂₁X₂₂X₂₃X₂₄X₈X₉CX₁₀X₁₁CX₁₂X₁₃X₁₄X₁₅X₁₆QL | |
| | | | ELNVHQRTHTGEKPYKCPECGKS | | AHLRAHX₁₇X₁₈X₁₉HX₂₀X₂₁X₂₂X₂₃X₂₄X₂₅X₂₆X₂₇X₂₈X₂₉X₃₀ | |
| | | | FSQLAHLRAHQRTHTGEKPTGKK | | | |
| | | | TS | | | |
| ggtgggagg | GGT ggg | 1207 | LEPGEKPYKCPECGKSFSQSGNL | 1756 | X₁X₂X₃X₄X₅X₆X₇X₈X₉CX₁₀X₁₁CX₁₂X₁₃X₁₄X₁₅X₁₆QSGNLTEHX₁₇X₁₈X₁₉ | 2305 |
| agaatgata | AGG AGA | | TEHQRTHTGEKPYKCPECGKSFS | | HX₂₀X₂₁X₂₂X₂₃X₂₄X₈X₉CX₁₀X₁₁CX₁₂X₁₃X₁₄X₁₅X₁₆QKSSLIAHX₁₇X₁₈ | |
| caa | ATG ATA | | QKSSLIAHQRTHTGEKPYKCPEC | | X₁₉HX₂₀X₂₁X₂₂X₂₃X₂₄X₈X₉CX₁₀X₁₁CX₁₂X₁₃X₁₄X₁₅X₁₆RRDELNVHX₁₇ | |
| | CAA | | GKSFSRRDELNVHQRTHTGEKPY | | X₁₈X₁₉HX₂₀X₂₁X₂₂X₂₃X₂₄X₈X₉CX₁₀X₁₁CX₁₂X₁₃X₁₄X₁₅X₁₆QLAHLRAH | |
| | | | KCPECGKSFSQLAHLRAHQRTHT | | X₁₇X₁₈X₁₉HX₂₀X₂₁X₂₂X₂₃X₂₄X₈X₉CX₁₀X₁₁CX₁₂X₁₃X₁₄X₁₅X₁₆RSDHLT | |
| | | | GEKPYKCPECGKSFSRSDHLTNH | | NHX₁₇X₁₈X₁₉HX₂₀X₂₁X₂₂X₂₃X₂₄X₈X₉CX₁₀X₁₁CX₁₂X₁₃X₁₄X₁₅X₁₆RSDK | |
| | | | QRTHTGEKPYKCPECGKSFSRSD | | LVRHX₁₇X₁₈X₁₉HX₂₀X₂₁X₂₂X₂₃X₂₄X₈X₉CX₁₀X₁₁CX₁₂X₁₃X₁₄X₁₅X₁₆TS | |
| | | | KLVRHQRTHTGEKPYKCPECGKS | | GHLVRHX₁₇X₁₈X₁₉HX₂₀X₂₁X₂₂X₂₃X₂₄X₂₅X₂₆X₂₇X₂₈X₂₉X₃₀ | |
| | | | FSTSGHLVRHQRTHTGEKPTGKK | | | |
| | | | TS | | | |
| caactttgg | CAA CTT | 1208 | LEPGEKPYKCPECGKSFSQLAHL | 1757 | X₁X₂X₃X₄X₅X₆X₇X₈X₉CX₁₀X₁₁CX₁₂X₁₃X₁₄X₁₅X₁₆QLAHLRAHX₁₇X₁₈X₁₉ | 2306 |
| ggtgggagg | TGG GGT | | RAHQRTHTGEKPYKCPECGKSFS | | HX₂₀X₂₁X₂₂X₂₃X₂₄X₈X₉CX₁₀X₁₁CX₁₂X₁₃X₁₄X₁₅X₁₆RSDHLTNHX₁₇X₁₈ | |
| aga | ggg AGG | | RSDHLTNHQRTHTGEKPYKCPEC | | X₁₉HX₂₀X₂₁X₂₂X₂₃X₂₄X₈X₉CX₁₀X₁₁CX₁₂X₁₃X₁₄X₁₅X₁₆RSDKLVRHX₁₇ | |
| | AGA | | GKSFSRSDKLVRHQRTHTGEKPY | | X₁₈X₁₉HX₂₀X₂₁X₂₂X₂₃X₂₄X₈X₉CX₁₀X₁₁CX₁₂X₁₃X₁₄X₁₅X₁₆TSGHLVRH | |
| | | | KCPECGKSFSTSGHLVRHQRTHT | | X₁₇X₁₈X₁₉HX₂₀X₂₁X₂₂X₂₃X₂₄X₈X₉CX₁₀X₁₁CX₁₂X₁₃X₁₄X₁₅X₁₆RSDHLT | |
| | | | GEKPYKCPECGKSFSRSDHLTTH | | THX₁₇X₁₈X₁₉HX₂₀X₂₁X₂₂X₂₃X₂₄X₈X₉CX₁₀X₁₁CX₁₂X₁₃X₁₄X₁₅X₁₆TTGA | |
| | | | QRTHTGEKPYKCPECGKSFSTTG | | LTEHX₁₇X₁₈X₁₉HX₂₀X₂₁X₂₂X₂₃X₂₄X₈X₉CX₁₀X₁₁CX₁₂X₁₃X₁₄X₁₅X₁₆QS | |
| | | | ALTEHQRTHTGEKPYKCPECGKS | | GNLTEHX₁₇X₁₈X₁₉HX₂₀X₂₁X₂₂X₂₃X₂₄X₂₅X₂₆X₂₇X₂₈X₂₉X₃₀ | |
| | | | FSQSGNLTEHQRTHTGEKPTGKK | | | |
| | | | TS | | | |
| actcaactt | ACT CAA | 1209 | LEPGEKPYKCPECGKSFSRSDHL | 1758 | X₁X₂X₃X₄X₅X₆X₇X₈X₉CX₁₀X₁₁CX₁₂X₁₃X₁₄X₁₅X₁₆RSDHLTNHX₁₇X₁₈X₁₉ | 2307 |
| tggggtggg | CTT TGG | | TNHQRTHTGEKPYKCPECGKSFS | | HX₂₀X₂₁X₂₂X₂₃X₂₄X₈X₉CX₁₀X₁₁CX₁₂X₁₃X₁₄X₁₅X₁₆RSDKLVRHX₁₇X₁₈ | |
| agg | GGT ggg | | RSDKLVRHQRTHTGEKPYKCPEC | | X₁₉HX₂₀X₂₁X₂₂X₂₃X₂₄X₈X₉CX₁₀X₁₁CX₁₂X₁₃X₁₄X₁₅X₁₆TSGHLVRHX₁₇ | |
| | AGG | | GKSFSTSGHLVRHQRTHTGEKPY | | X₁₈X₁₉HX₂₀X₂₁X₂₂X₂₃X₂₄X₈X₉CX₁₀X₁₁CX₁₂X₁₃X₁₄X₁₅X₁₆RSDHLTTH | |
| | | | KCPECGKSFSRSDHLTTHQRTHT | | X₁₇X₁₈X₁₉HX₂₀X₂₁X₂₂X₂₃X₂₄X₈X₉CX₁₀X₁₁CX₁₂X₁₃X₁₄X₁₅X₁₆TTGALT | |
| | | | GEKPYKCPECGKSFSTTGALTEH | | EHX₁₇X₁₈X₁₉HX₂₀X₂₁X₂₂X₂₃X₂₄X₈X₉CX₁₀X₁₁CX₁₂X₁₃X₁₄X₁₅X₁₆QSGN | |
| | | | QRTHTGEKPYKCPECGKSFSQSG | | LTEHX₁₇X₁₈X₁₉HX₂₀X₂₁X₂₂X₂₃X₂₄X₈X₉CX₁₀X₁₁CX₁₂X₁₃X₁₄X₁₅X₁₆TH | |
| | | | NLTEHQRTHTGEKPYKCPECGKS | | LDLIRHX₁₇X₁₈X₁₉HX₂₀X₂₁X₂₂X₂₃X₂₄X₂₅X₂₆X₂₇X₂₈X₂₉X₃₀ | |
| | | | FSTHLDLIRHQRTHTGEKPTGKK | | | |
| | | | TS | | | |
| gggtgggag | GGG TGG | 1210 | LEPGEKPYKCPECGKSFSSPADL | 1759 | X₁X₂X₃X₄X₅X₆X₇X₈X₉CX₁₀X₁₁CX₁₂X₁₃X₁₄X₁₅X₁₆SPADLTRHX₁₇X₁₈X₁₉ | 2308 |
| gagaatgat | GAG gag | | TRHQRTHTGEKPYKCPECGKSFS | | HX₂₀X₂₁X₂₂X₂₃X₂₄X₈X₉CX₁₀X₁₁CX₁₂X₁₃X₁₄X₁₅X₁₆TSGNLVRHX₁₇X₁₈ | |
| aca | AAT GAT | | TSGNLVRHQRTHTGEKPYKCPEC | | X₁₉HX₂₀X₂₁X₂₂X₂₃X₂₄X₈X₉CX₁₀X₁₁CX₁₂X₁₃X₁₄X₁₅X₁₆TTGNLTVHX₁₇ | |
| | ACA | | GKSFSTTGNLTVHQRTHTGEKPY | | X₁₈X₁₉HX₂₀X₂₁X₂₂X₂₃X₂₄X₈X₉CX₁₀X₁₁CX₁₂X₁₃X₁₄X₁₅X₁₆RSDNLVRH | |
| | | | KCPECGKSFSRSDNLVRHQRTHT | | X₁₇X₁₈X₁₉HX₂₀X₂₁X₂₂X₂₃X₂₄X₈X₉CX₁₀X₁₁CX₁₂X₁₃X₁₄X₁₅X₁₆RSDNLV | |
| | | | GEKPYKCPECGKSFSRSDNLVRH | | RHX₁₇X₁₈X₁₉HX₂₀X₂₁X₂₂X₂₃X₂₄X₈X₉CX₁₀X₁₁CX₁₂X₁₃X₁₄X₁₅X₁₆RSDH | |
| | | | QRTHTGEKPYKCPECGKSFSRSD | | LTTHX₁₇X₁₈X₁₉HX₂₀X₂₁X₂₂X₂₃X₂₄X₈X₉CX₁₀X₁₁CX₁₂X₁₃X₁₄X₁₅X₁₆RS | |
| | | | HLTTHQRTHTGEKPYKCPECGKS | | DKLVRHX₁₇X₁₈X₁₉HX₂₀X₂₁X₂₂X₂₃X₂₄X₂₅X₂₆X₂₇X₂₈X₂₉X₃₀ | |
| | | | FSRSDKLVRHQRTHTGEKPTGKK | | | |
| | | | TS | | | |
| gagaatgat | gag AAT | 1211 | LEPGEKPYKCPECGKSFSREDNL | 1760 | X₁X₂X₃X₄X₅X₆X₇X₈X₉CX₁₀X₁₁CX₁₂X₁₃X₁₄X₁₅X₁₆REDNLHTHX₁₇X₁₈X₁₉ | 2309 |
| acaaaatgg | GAT ACA | | HTHQRTHTGEKPYKCPECGKSFS | | HX₂₀X₂₁X₂₂X₂₃X₂₄X₈X₉CX₁₀X₁₁CX₁₂X₁₃X₁₄X₁₅X₁₆RSDHLTTHX₁₇X₁₈ | |
| tag | AAA TGG | | RSDHLTTHQRTHTGEKPYKCPEC | | X₁₉HX₂₀X₂₁X₂₂X₂₃X₂₄X₈X₉CX₁₀X₁₁CX₁₂X₁₃X₁₄X₁₅X₁₆QRANLRAHX₁₇ | |
| | TAG | | GKSFSQRANLRAHQRTHTGEKPY | | X₁₈X₁₉HX₂₀X₂₁X₂₂X₂₃X₂₄X₈X₉CX₁₀X₁₁CX₁₂X₁₃X₁₄X₁₅X₁₆SPADLTRH | |
| | | | KCPECGKSFSSPADLTRHQRTHT | | X₁₇X₁₈X₁₉HX₂₀X₂₁X₂₂X₂₃X₂₄X₈X₉CX₁₀X₁₁CX₁₂X₁₃X₁₄X₁₅X₁₆TSGNLV | |
| | | | GEKPYKCPECGKSFSTSGNLVRH | | RHX₁₇X₁₈X₁₉HX₂₀X₂₁X₂₂X₂₃X₂₄X₈X₉CX₁₀X₁₁CX₁₂X₁₃X₁₄X₁₅X₁₆TTGN | |
| | | | QRTHTGEKPYKCPECGKSFSTTG | | LTVHX₁₇X₁₈X₁₉HX₂₀X₂₁X₂₂X₂₃X₂₄X₈X₉CX₁₀X₁₁CX₁₂X₁₃X₁₄X₁₅X₁₆RS | |
| | | | NLTVHQRTHTGEKPYKCPECGKS | | DNLVRHX₁₇X₁₈X₁₉HX₂₀X₂₁X₂₂X₂₃X₂₄X₂₅X₂₆X₂₇X₂₈X₂₉X₃₀ | |
| | | | FSRSDNLVRHQRTHTGEKPTGKK | | | |
| | | | TS | | | |
| tgggaggag | TGG GAG | 1212 | LEPGEKPYKCPECGKSFSQRANL | 1761 | X₁X₂X₃X₄X₅X₆X₇X₈X₉CX₁₀X₁₁CX₁₂X₁₃X₁₄X₁₅X₁₆QRANLRAHX₁₇X₁₈X₁₉ | 2310 |
| aatgataca | gag AAT | | RAHQRTHTGEKPYKCPECGKSFS | | HX₂₀X₂₁X₂₂X₂₃X₂₄X₈X₉CX₁₀X₁₁CX₁₂X₁₃X₁₄X₁₅X₁₆SPADLTRHX₁₇X₁₈ | |
| aaa | GAT ACA | | SPADLTRHQRTHTGEKPYKCPEC | | X₁₉HX₂₀X₂₁X₂₂X₂₃X₂₄X₈X₉CX₁₀X₁₁CX₁₂X₁₃X₁₄X₁₅X₁₆TSGNLVRHX₁₇ | |
| | AAA | | GKSFSTSGNLVRHQRTHTGEKPY | | X₁₈X₁₉HX₂₀X₂₁X₂₂X₂₃X₂₄X₈X₉CX₁₀X₁₁CX₁₂X₁₃X₁₄X₁₅X₁₆TTGNLTVH | |
| | | | KCPECGKSFSTTGNLTVHQRTHT | | X₁₇X₁₈X₁₉HX₂₀X₂₁X₂₂X₂₃X₂₄X₈X₉CX₁₀X₁₁CX₁₂X₁₃X₁₄X₁₅X₁₆RSDNLV | |
| | | | GEKPYKCPECGKSFSRSDNLVRH | | RHX₁₇X₁₈X₁₉HX₂₀X₂₁X₂₂X₂₃X₂₄X₈X₉CX₁₀X₁₁CX₁₂X₁₃X₁₄X₁₅X₁₆RSDN | |
| | | | QRTHTGEKPYKCPECGKSFSRSD | | LVRHX₁₇X₁₈X₁₉HX₂₀X₂₁X₂₂X₂₃X₂₄X₈X₉CX₁₀X₁₁CX₁₂X₁₃X₁₄X₁₅X₁₆RS | |
| | | | NLVRHQRTHTGEKPYKCPECGKS | | DHLTTHX₁₇X₁₈X₁₉HX₂₀X₂₁X₂₂X₂₃X₂₄X₂₅X₂₆X₂₇X₂₈X₂₉X₃₀ | |
| | | | FSRSDHLTTHQRTHTGEKPTGKK | | | |
| | | | TS | | | |
| gaggagaat | GAG gag | 1213 | LEPGEKPYKCPECGKSFSRSDHL | 1762 | X₁X₂X₃X₄X₅X₆X₇X₈X₉CX₁₀X₁₁CX₁₂X₁₃X₁₄X₁₅X₁₆RSDHLTTHX₁₇X₁₈X₁₉ | 2311 |
| gatacaaaa | AAT GAT | | TTHQRTHTGEKPYKCPECGKSFS | | HX₂₀X₂₁X₂₂X₂₃X₂₄X₈X₉CX₁₀X₁₁CX₁₂X₁₃X₁₄X₁₅X₁₆QRANLRAHX₁₇X₁₈ | |
| tgg | ACA AAA | | QRANLRAHQRTHTGEKPYKCPEC | | X₁₉HX₂₀X₂₁X₂₂X₂₃X₂₄X₈X₉CX₁₀X₁₁CX₁₂X₁₃X₁₄X₁₅X₁₆SPADLTRHX₁₇ | |
| | TGG | | GKSFSSPADLTRHQRTHTGEKPY | | X₁₈X₁₉HX₂₀X₂₁X₂₂X₂₃X₂₄X₈X₉CX₁₀X₁₁CX₁₂X₁₃X₁₄X₁₅X₁₆TSGNLVRH | |
| | | | KCPECGKSFSTSGNLVRHQRTHT | | X₁₇X₁₈X₁₉HX₂₀X₂₁X₂₂X₂₃X₂₄X₈X₉CX₁₀X₁₁CX₁₂X₁₃X₁₄X₁₅X₁₆TTGNLT | |
| | | | GEKPYKCPECGKSFSTTGNLTVH | | VHX₁₇X₁₈X₁₉HX₂₀X₂₁X₂₂X₂₃X₂₄X₈X₉CX₁₀X₁₁CX₁₂X₁₃X₁₄X₁₅X₁₆RSDN | |
| | | | QRTHTGEKPYKCPECGKSFSRSD | | LVRHX₁₇X₁₈X₁₉HX₂₀X₂₁X₂₂X₂₃X₂₄X₈X₉CX₁₀X₁₁CX₁₂X₁₃X₁₄X₁₅X₁₆RS | |
| | | | NLVRHQRTHTGEKPYKCPECGKS | | DNLVRHX₁₇X₁₈X₁₉HX₂₀X₂₁X₂₂X₂₃X₂₄X₂₅X₂₆X₂₇X₂₈X₂₉X₃₀ | |
| | | | FSRSDNLVRHQRTHTGEKPTGKK | | | |
| | | | TS | | | |
| aatgataca | AAT GAT | 1214 | LEPGEKPYKCPECGKSFSTSGSL | 1763 | X₁X₂X₃X₄X₅X₆X₇X₈X₉CX₁₀X₁₁CX₁₂X₁₃X₁₄X₁₅X₁₆TSGSLVRHX₁₇X₁₈X₁₉ | 2312 |
| aaatggtag | ACA AAA | | VRHQRTHTGEKPYKCPECGKSFS | | HX₂₀X₂₁X₂₂X₂₃X₂₄X₈X₉CX₁₀X₁₁CX₁₂X₁₃X₁₄X₁₅X₁₆REDNLHTHX₁₇X₁₈ | |
| gtt | TGG TAG | | REDNLHTHQRTHTGEKPYKCPEC | | X₁₉HX₂₀X₂₁X₂₂X₂₃X₂₄X₈X₉CX₁₀X₁₁CX₁₂X₁₃X₁₄X₁₅X₁₆RSDHLTTHX₁₇ | |
| | GTT | | GKSFSRSDHLTTHQRTHTGEKPY | | X₁₈X₁₉HX₂₀X₂₁X₂₂X₂₃X₂₄X₈X₉CX₁₀X₁₁CX₁₂X₁₃X₁₄X₁₅X₁₆QRANLRAH | |
| | | | KCPECGKSFSQRANLRAHQRTHT | | X₁₇X₁₈X₁₉HX₂₀X₂₁X₂₂X₂₃X₂₄X₈X₉CX₁₀X₁₁CX₁₂X₁₃X₁₄X₁₅X₁₆SPADLT | |
| | | | GEKPYKCPECGKSFSSPADLTRH | | RHX₁₇X₁₈X₁₉HX₂₀X₂₁X₂₂X₂₃X₂₄X₈X₉CX₁₀X₁₁CX₁₂X₁₃X₁₄X₁₅X₁₆TSGN | |
| | | | QRTHTGEKPYKCPECGKSFSTSG | | LVRHX₁₇X₁₈X₁₉HX₂₀X₂₁X₂₂X₂₃X₂₄X₈X₉CX₁₀X₁₁CX₁₂X₁₃X₁₄X₁₅X₁₆TT | |
| | | | NLVRHQRTHTGEKPYKCPECGKS | | GNLTVHX₁₇X₁₈X₁₉HX₂₀X₂₁X₂₂X₂₃X₂₄X₂₅X₂₆X₂₇X₂₈X₂₉X₃₀ | |
| | | | FSTTGNLTVHQRTHTGEKPTGKK | | | |
| | | | TS | | | |
| ggtcctaca | GGT CCT | 1215 | LEPGEKPYKCPECGKSFSRSDHL | 1764 | X₁X₂X₃X₄X₅X₆X₇X₈X₉CX₁₀X₁₁CX₁₂X₁₃X₁₄X₁₅X₁₆RSDHLTNHX₁₇X₁₈X₁₉ | 2313 |
| ggccagcac | ACA GGC | | TNHQRTHTGEKPYKCPECGKSFS | | HX₂₀X₂₁X₂₂X₂₃X₂₄X₈X₉CX₁₀X₁₁CX₁₂X₁₃X₁₄X₁₅X₁₆SKKALTEHX₁₇X₁₈ | |
| agg | CAG CAC | | SKKALTEHQRTHTGEKPYKCPEC | | X₁₉HX₂₀X₂₁X₂₂X₂₃X₂₄X₈X₉CX₁₀X₁₁CX₁₂X₁₃X₁₄X₁₅X₁₆RADNLTEHX₁₇ | |
| | AGG | | GKSFSRADNLTEHQRTHTGEKPY | | X₁₈X₁₉HX₂₀X₂₁X₂₂X₂₃X₂₄X₈X₉CX₁₀X₁₁CX₁₂X₁₃X₁₄X₁₅X₁₆DPGHLVRH | |
| | | | KCPECGKSFSDPGHLVRHQRTHT | | X₁₇X₁₈X₁₉HX₂₀X₂₁X₂₂X₂₃X₂₄X₈X₉CX₁₀X₁₁CX₁₂X₁₃X₁₄X₁₅X₁₆SPADLT | |
| | | | GEKPYKCPECGKSFSSPADLTRH | | RHX₁₇X₁₈X₁₉HX₂₀X₂₁X₂₂X₂₃X₂₄X₈X₉CX₁₀X₁₁CX₁₂X₁₃X₁₄X₁₅X₁₆TKNS | |
| | | | QRTHTGEKPYKCPECGKSFSTKN | | LTEHX₁₇X₁₈X₁₉HX₂₀X₂₁X₂₂X₂₃X₂₄X₈X₉CX₁₀X₁₁CX₁₂X₁₃X₁₄X₁₅X₁₆TS | |
| | | | SLTEHQRTHTGEKPYKCPECGKS | | GHLVRHX₁₇X₁₈X₁₉HX₂₀X₂₁X₂₂X₂₃X₂₄X₂₅X₂₆X₂₇X₂₈X₂₉X₃₀ | |
| | | | FSTSGHLVRHQRTHTGEKPTGKK | | | |
| | | | TS | | | |
| taggttggt | TAG GTT | 1216 | LEPGEKPYKCPECGKSFSRADNL | 1765 | X₁X₂X₃X₄X₅X₆X₇X₈X₉CX₁₀X₁₁CX₁₂X₁₃X₁₄X₁₅X₁₆RADNLTEHX₁₇X₁₈X₁₉ | 2314 |
| cctacaggc | GGT CCT | | TEHQRTHTGEKPYKCPECGKSFS | | HX₂₀X₂₁X₂₂X₂₃X₂₄X₈X₉CX₁₀X₁₁CX₁₂X₁₃X₁₄X₁₅X₁₆DPGHLVRHX₁₇X₁₈ | |
| cag | ACA GGC | | DPGHLVRHQRTHTGEKPYKCPEC | | X₁₉HX₂₀X₂₁X₂₂X₂₃X₂₄X₈X₉CX₁₀X₁₁CX₁₂X₁₃X₁₄X₁₅X₁₆SPADLTRHX₁₇ | |
| | CAG | | GKSFSSPADLTRHQRTHTGEKPY | | X₁₈X₁₉HX₂₀X₂₁X₂₂X₂₃X₂₄X₈X₉CX₁₀X₁₁CX₁₂X₁₃X₁₄X₁₅X₁₆TKNSLTEH | |
| | | | KCPECGKSFSTKNSLTEHQRTHT | | X₁₇X₁₈X₁₉HX₂₀X₂₁X₂₂X₂₃X₂₄X₈X₉CX₁₀X₁₁CX₁₂X₁₃X₁₄X₁₅X₁₆TSGHLV | |
| | | | GEKPYKCPECGKSFSTSGHLVRH | | RHX₁₇X₁₈X₁₉HX₂₀X₂₁X₂₂X₂₃X₂₄X₈X₉CX₁₀X₁₁CX₁₂X₁₃X₁₄X₁₅X₁₆TSGS | |
| | | | QRTHTGEKPYKCPECGKSFSTSG | | LVRHX₁₇X₁₈X₁₉HX₂₀X₂₁X₂₂X₂₃X₂₄X₈X₉CX₁₀X₁₁CX₁₂X₁₃X₁₄X₁₅X₁₆RE | |
| | | | SLVRHQRTHTGEKPYKCPECGKS | | DNLHTHX₁₇X₁₈X₁₉HX₂₀X₂₁X₂₂X₂₃X₂₄X₂₅X₂₆X₂₇X₂₈X₂₉X₃₀ | |
| | | | FSREDNLHTHQRTHTGEKPTGKK | | | |
| | | | TS | | | |
| tggtaggtt | TGG TAG | 1217 | LEPGEKPYKCPECGKSFSDPGHL | 1766 | X₁X₂X₃X₄X₅X₆X₇X₈X₉CX₁₀X₁₁CX₁₂X₁₃X₁₄X₁₅X₁₆DPGHLVRHX₁₇X₁₈X₁₉ | 2315 |
| ggtcctaca | GTT GGT | | VRHQRTHTGEKPYKCPECGKSFS | | HX₂₀X₂₁X₂₂X₂₃X₂₄X₈X₉CX₁₀X₁₁CX₁₂X₁₃X₁₄X₁₅X₁₆SPADLTRHX₁₇X₁₈ | |
| ggc | CCT ACA | | SPADLTRHQRTHTGEKPYKCPEC | | X₁₉HX₂₀X₂₁X₂₂X₂₃X₂₄X₈X₉CX₁₀X₁₁CX₁₂X₁₃X₁₄X₁₅X₁₆TKNSLTEHX₁₇ | |
| | GGC | | GKSFSTKNSLTEHQRTHTGEKPY | | X₁₈X₁₉HX₂₀X₂₁X₂₂X₂₃X₂₄X₈X₉CX₁₀X₁₁CX₁₂X₁₃X₁₄X₁₅X₁₆TSGHLVRH | |
| | | | KCPECGKSFSTSGHLVRHQRTHT | | X₁₇X₁₈X₁₉HX₂₀X₂₁X₂₂X₂₃X₂₄X₈X₉CX₁₀X₁₁CX₁₂X₁₃X₁₄X₁₅X₁₆TSGSLV | |
| | | | GEKPYKCPECGKSFSTSGSLVRH | | RHX₁₇X₁₈X₁₉HX₂₀X₂₁X₂₂X₂₃X₂₄X₈X₉CX₁₀X₁₁CX₁₂X₁₃X₁₄X₁₅X₁₆REDN | |
| | | | QRTHTGEKPYKCPECGKSFSRED | | LHTHX₁₇X₁₈X₁₉HX₂₀X₂₁X₂₂X₂₃X₂₄X₈X₉CX₁₀X₁₁CX₁₂X₁₃X₁₄X₁₅X₁₆RS | |
| | | | NLHTHQRTHTGEKPYKCPECGKS | | DHLTTHX₁₇X₁₈X₁₉HX₂₀X₂₁X₂₂X₂₃X₂₄X₂₅X₂₆X₂₇X₂₈X₂₉X₃₀ | |
| | | | FSRSDHLTTHQRTHTGEKPTGKK | | | |
| | | | TS | | | |
| aaatggtag | AAA TGG | 1218 | LEPGEKPYKCPECGKSFSSPADL | 1767 | X₁X₂X₃X₄X₅X₆X₇X₈X₉CX₁₀X₁₁CX₁₂X₁₃X₁₄X₁₅X₁₆SPADLTRHX₁₇X₁₈X₁₉ | 2316 |
| gttggtcct | TAG GTT | | TRHQRTHTGEKPYKCPECGKSFS | | HX₂₀X₂₁X₂₂X₂₃X₂₄X₈X₉CX₁₀X₁₁CX₁₂X₁₃X₁₄X₁₅X₁₆TKNSLTEHX₁₇X₁₈ | |
| aca | GGT CCT | | TKNSLTEHQRTHTGEKPYKCPEC | | X₁₉HX₂₀X₂₁X₂₂X₂₃X₂₄X₈X₉CX₁₀X₁₁CX₁₂X₁₃X₁₄X₁₅X₁₆TSGHLVRHX₁₇ | |
| | GAC | | GKSFSTSGHLVRHQRTHTGEKPY | | X₁₈X₁₉HX₂₀X₂₁X₂₂X₂₃X₂₄X₈X₉CX₁₀X₁₁CX₁₂X₁₃X₁₄X₁₅X₁₆TSGSLVRH | |
| | | | KCPECGKSFSTSGSLVRHQRTHT | | X₁₇X₁₈X₁₉HX₂₀X₂₁X₂₂X₂₃X₂₄X₈X₉CX₁₀X₁₁CX₁₂X₁₃X₁₄X₁₅X₁₆REDNLH | |
| | | | GEKPYKCPECGKSFSREDNLHTH | | THX₁₇X₁₈X₁₉HX₂₀X₂₁X₂₂X₂₃X₂₄X₈X₉CX₁₀X₁₁CX₁₂X₁₃X₁₄X₁₅X₁₆RSDH | |
| | | | ARTHTGEKPYKCPECGKSFSRSD | | LTTHX₁₇X₁₈X₁₉HX₂₀X₂₁X₂₂X₂₃X₂₄X₈X₉CX₁₀X₁₁CX₁₂X₁₃X₁₄X₁₅X₁₆QR | |
| | | | HLTTHQRTHTGEKPYKCPECGKS | | ANLRAHX₁₇X₁₈X₁₉HX₂₀X₂₁X₂₂X₂₃X₂₄X₂₅X₂₆X₂₇X₂₈X₂₉X₃₀ | |
| | | | FSQRANLRAHQRTHTGEKPTGKK | | | |
| | | | TS | | | |
| acaaaatgg | ACA AAA | 1219 | LEPGEKPYKCPECGKSFSTKNSL | 1768 | X₁X₂X₃X₄X₅X₆X₇X₈X₉CX₁₀X₁₁CX₁₂X₁₃X₁₄X₁₅X₁₆TKNSLTEHX₁₇X₁₈X₁₉ | 2317 |
| taggttggt | TGG TAG | | TEHQRTHTGEKPYKCPECGKSFS | | HX₂₀X₂₁X₂₂X₂₃X₂₄X₈X₉CX₁₀X₁₁CX₁₂X₁₃X₁₄X₁₅X₁₆TSGHLVRHX₁₇X₁₈ | |
| cct | GTT GGT | | TSGHLVRHQRTHTGEKPYKCPEC | | X₁₉HX₂₀X₂₁X₂₂X₂₃X₂₄X₈X₉CX₁₀X₁₁CX₁₂X₁₃X₁₄X₁₅X₁₆TSGSLVRHX₁₇ | |
| | CCT | | GKSFSTSGSLVRHQRTHTGEKPY | | X₁₈X₁₉HX₂₀X₂₁X₂₂X₂₃X₂₄X₈X₉CX₁₀X₁₁CX₁₂X₁₃X₁₄X₁₅X₁₆REDNLHTH | |
| | | | KCPECGKSFSREDNLHTHQRTHT | | X₁₇X₁₈X₁₉HX₂₀X₂₁X₂₂X₂₃X₂₄X₈X₉CX₁₀X₁₁CX₁₂X₁₃X₁₄X₁₅X₁₆RSDHLT | |
| | | | GEKPYKCPECGKSFSRSDHLTTH | | THX₁₇X₁₈X₁₉HX₂₀X₂₁X₂₂X₂₃X₂₄X₈X₉CX₁₀X₁₁CX₁₂X₁₃X₁₄X₁₅X₁₆QRAN | |
| | | | QRTHTGEKPYKCPECGKSFSQRA | | LRAHX₁₇X₁₈X₁₉HX₂₀X₂₁X₂₂X₂₃X₂₄X₈X₉CX₁₀X₁₁CX₁₂X₁₃X₁₄X₁₅X₁₆SP | |
| | | | NLRAHQRTHTGEKPYKCPECGKS | | ADLTRHX₁₇X₁₈X₁₉HX₂₀X₂₁X₂₂X₂₃X₂₄X₂₅X₂₆X₂₇X₂₈X₂₉X₃₀ | |
| | | | FSSPADLTRHQRTHTGEKPTGKK | | | |
| | | | TS | | | |
| gatacaaaa | GAT ACA | 1220 | LEPGEKPYKCPECGKSFSTSGHL | 1769 | X₁X₂X₃X₄X₅X₆X₇X₈X₉CX₁₀X₁₁CX₁₂X₁₃X₁₄X₁₅X₁₆TSGHLVRHX₁₇X₁₈X₁₉ | 2318 |
| tggtaggtt | AAA TGG | | VRHQRTHTGEKPYKCPECGKSFS | | HX₂₀X₂₁X₂₂X₂₃X₂₄X₈X₉CX₁₀X₁₁CX₁₂X₁₃X₁₄X₁₅X₁₆TSGSLVRHX₁₇X₁₈ | |
| ggt | TAG GTT | | TSGSLVRHQRTHTGEKPYKCPEC | | X₁₉HX₂₀X₂₁X₂₂X₂₃X₂₄X₈X₉CX₁₀X₁₁CX₁₂X₁₃X₁₄X₁₅X₁₆REDNLHTHX₁₇ | |
| | GGT | | GKSFSREDNLHTHQRTHTGEKPY | | X₁₈X₁₉HX₂₀X₂₁X₂₂X₂₃X₂₄X₈X₉CX₁₀X₁₁CX₁₂X₁₃X₁₄X₁₅X₁₆RSDHLTTH | |
| | | | KCPECGKSFSRSDHLTTHQRTHT | | X₁₇X₁₈X₁₉HX₂₀X₂₁X₂₂X₂₃X₂₄X₈X₉CX₁₀X₁₁CX₁₂X₁₃X₁₄X₁₅X₁₆QRANLR | |
| | | | GEKPYKCPECGKSFSQRANLRAH | | AHX₁₇X₁₈X₁₉HX₂₀X₂₁X₂₂X₂₃X₂₄X₈X₉CX₁₀X₁₁CX₁₂X₁₃X₁₄X₁₅X₁₆SPAD | |
| | | | QRTHTGEKPYKCPECGKSFSSPA | | LTRHX₁₇X₁₈X₁₉HX₂₀X₂₁X₂₂X₂₃X₂₄X₈X₉CX₁₀X₁₁CX₁₂X₁₃X₁₄X₁₅X₁₆TS | |
| | | | DLTRHQRTHTGEKPYKCPECGKS | | GNLVRHX₁₇X₁₈X₁₉HX₂₀X₂₁X₂₂X₂₃X₂₄X₂₅X₂₆X₂₇X₂₈X₂₉X₃₀ | |
| | | | FSTSGNLVRHQRTHTGEKPTGKK | | | |
| | | | TS | | | |
| gttggtcct | GTT GGT | 1221 | LEPGEKPYKCPECGKSFSSKKAL | 1770 | X₁X₂X₃X₄X₅X₆X₇X₈X₉CX₁₀X₁₁CX₁₂X₁₃X₁₄X₁₅X₁₆SKKALTEHX₁₇X₁₈X₁₉ | 2319 |
| acaggccag | CCT ACA | | TEHQRTHTGEKPYKCPECGKSFS | | HX₂₀X₂₁X₂₂X₂₃X₂₄X₈X₉CX₁₀X₁₁CX₁₂X₁₃X₁₄X₁₅X₁₆RADNLTEHX₁₇X₁₈ | |
| cac | GGC CAG | | RADNLTEHQRTHTGEKPYKCPEC | | X₁₉HX₂₀X₂₁X₂₂X₂₃X₂₄X₈X₉CX₁₀X₁₁CX₁₂X₁₃X₁₄X₁₅X₁₆DPGHLVRHX₁₇ | |
| | CAC | | GKSFSDPGHLVRHQRTHTGEKPY | | X₁₈X₁₉HX₂₀X₂₁X₂₂X₂₃X₂₄X₈X₉CX₁₀X₁₁CX₁₂X₁₃X₁₄X₁₅X₁₆SPADLTRH | |
| | | | KCPECGKSFSSPADLTRHQRTHT | | X₁₇X₁₈X₁₉HX₂₀X₂₁X₂₂X₂₃X₂₄X₈X₉CX₁₀X₁₁CX₁₂X₁₃X₁₄X₁₅X₁₆TKNSLT | |
| | | | GEKPYKCPECGKSFSTKNSLTEH | | EHX₁₇X₁₈X₁₉HX₂₀X₂₁X₂₂X₂₃X₂₄X₈X₉CX₁₀X₁₁CX₁₂X₁₃X₁₄X₁₅X₁₆TSGH | |
| | | | QRTHTGEKPYKCPECGKSFSTSG | | LVRHX₁₇X₁₈X₁₉HX₂₀X₂₁X₂₂X₂₃X₂₄X₈X₉CX₁₀X₁₁CX₁₂X₁₃X₁₄X₁₅X₁₆TS | |
| | | | HLVRHQRTHTGEKPYKCPECGKS | | GSLVRHX₁₇X₁₈X₁₉HX₂₀X₂₁X₂₂X₂₃X₂₄X₂₅X₂₆X₂₇X₂₈X₂₉X₃₀ | |
| | | | FSTSGSLVRHQRTHTGEKPTGKK | | | |
| | | | TS | | | |
| gtcctacag | GTC CTA | 1222 | LEPGEKPYKCPECGKSFSTSGHL | 1771 | X₁X₂X₃X₄X₅X₆X₇X₈X₉CX₁₀X₁₁CX₁₂X₁₃X₁₄X₁₅X₁₆TSGHLVRHX₁₇X₁₈X₁₉ | 2320 |
| gccagcaca | CAG GCC | | VRHQRTHTGEKPYKCPECGKSFS | | HX₂₀X₂₁X₂₂X₂₃X₂₄X₈X₉CX₁₀X₁₁CX₁₂X₁₃X₁₄X₁₅X₁₆SPADLTRHX₁₇X₁₈ | |
| ggt | AGC ACA | | SPADLTRHQRTHTGEKPYKCPEC | | X₁₉HX₂₀X₂₁X₂₂X₂₃X₂₄X₈X₉CX₁₀X₁₁CX₁₂X₁₃X₁₄X₁₅X₁₆ERSHLREHX₁₇ | |
| | GGT | | GKSFSERSHLREHQRTHTGEKPY | | X₁₈X₁₉HX₂₀X₂₁X₂₂X₂₃X₂₄X₈X₉CX₁₀X₁₁CX₁₂X₁₃X₁₄X₁₅X₁₆DCRDLARH | |
| | | | KCPECGKSFSDCRDLARHQRTHT | | X₁₇X₁₈X₁₉HX₂₀X₂₁X₂₂X₂₃X₂₄X₈X₉CX₁₀X₁₁CX₁₂X₁₃X₁₄X₁₅X₁₆RADNLT | |
| | | | GEKPYKCPECGKSFSRADNLTEH | | EHX₁₇X₁₈X₁₉HX₂₀X₂₁X₂₂X₂₃X₂₄X₈X₉CX₁₀X₁₁CX₁₂X₁₃X₁₄X₁₅X₁₆QNST | |
| | | | QRTHTGEKPYKCPECGKSFSQNS | | LTEHX₁₇X₁₈X₁₉HX₂₀X₂₁X₂₂X₂₃X₂₄X₈X₉CX₁₀X₁₁CX₁₂X₁₃X₁₄X₁₅X₁₆DP | |
| | | | TLTEHQRTHTGEKPYKCPECGKS | | GALVRHX₁₇X₁₈X₁₉HX₂₀X₂₁X₂₂X₂₃X₂₄X₂₅X₂₆X₂₇X₂₈X₂₉X₃₀ | |
| | | | FSDPGALVRHQRTHTGEKPTGKK | | | |
| | | | TS | | | |
| caggccagc | CAG GCC | 1223 | LEPGEKPYKCPECGKSFSDCRDL | 1772 | X₁X₂X₃X₄X₅X₆X₇X₈X₉CX₁₀X₁₁CX₁₂X₁₃X₁₄X₁₅X₁₆DCRDLARHX₁₇X₁₈X₁₉ | 2321 |
| acaggtgtt | AGC ACA | | ARHQRTHTGEKPYKCPECGKSFS | | HX₂₀X₂₁X₂₂X₂₃X₂₄X₈X₉CX₁₀X₁₁CX₁₂X₁₃X₁₄X₁₅X₁₆TSGSLVRHX₁₇X₁₈ | |
| gcc | GGT GTT | | TSGSLVRHQRTHTGEKPYKCPEC | | X₁₉HX₂₀X₂₁X₂₂X₂₃X₂₄X₈X₉CX₁₀X₁₁CX₁₂X₁₃X₁₄X₁₅X₁₆TSGHLVRHX₁₇ | |
| | GCC | | GKSFSTSGHLVRHQRTHTGEKPY | | X₁₈X₁₉HX₂₀X₂₁X₂₂X₂₃X₂₄X₈X₉CX₁₀X₁₁CX₁₂X₁₃X₁₄X₁₅X₁₆SPADLTRH | |
| | | | KCPECGKSFSSPADLTRHQRTHT | | X₁₇X₁₈X₁₉HX₂₀X₂₁X₂₂X₂₃X₂₄X₈X₉CX₁₀X₁₁CX₁₂X₁₃X₁₄X₁₅X₁₆ERSHLR | |
| | | | GEKPYKCPECGKSFSERSHLREH | | EHX₁₇X₁₈X₁₉HX₂₀X₂₁X₂₂X₂₃X₂₄X₈X₉CX₁₀X₁₁CX₁₂X₁₃X₁₄X₁₅X₁₆DCRD | |
| | | | QRTHTGEKPYKCPECGKSFSDCR | | LARHX₁₇X₁₈X₁₉HX₂₀X₂₁X₂₂X₂₃X₂₄X₈X₉CX₁₀X₁₁CX₁₂X₁₃X₁₄X₁₅X₁₆RA | |
| | | | DLARHQRTHTGEKPYKCPECGKS | | DNLTEHX₁₇X₁₈X₁₉HX₂₀X₂₁X₂₂X₂₃X₂₄X₂₅X₂₆X₂₇X₂₈X₂₉X₃₀ | |
| | | | FSRADNLTEHQRTHTGEKPTGKK | | | |
| | | | TS | | | |
| ctacaggcc | CTA CAG | 1224 | LEPGEKPYKCPECGKSFSTSGSL | 1773 | X₁X₂X₃X₄X₅X₆X₇X₈X₉CX₁₀X₁₁CX₁₂X₁₃X₁₄X₁₅X₁₆TSGSLVRHX₁₇X₁₈X₁₉ | 2322 |
| agcacaggt | GCC AGC | | VRHQRTHTGEKPYKCPECGKSFS | | HX₂₀X₂₁X₂₂X₂₃X₂₄X₈X₉CX₁₀X₁₁CX₁₂X₁₃X₁₄X₁₅X₁₆TSGHLVRHX₁₇X₁₈ | |
| gtt | ACA GGT | | TSGHLVRHQRTHTGEKPYKCPEC | | X₁₉HX₂₀X₂₁X₂₂X₂₃X₂₄X₈X₉CX₁₀X₁₁CX₁₂X₁₃X₁₄X₁₅X₁₆SPADLTRHX₁₇ | |
| | GTT | | GKSFSSPADLTRHQRTHTGEKPY | | X₁₈X₁₉HX₂₀X₂₁X₂₂X₂₃X₂₄X₈X₉CX₁₀X₁₁CX₁₂X₁₃X₁₄X₁₅X₁₆ERSHLREH | |
| | | | KCPECGKSFSERSHLREHQRTHT | | X₁₇X₁₈X₁₉HX₂₀X₂₁X₂₂X₂₃X₂₄X₈X₉CX₁₀X₁₁CX₁₂X₁₃X₁₄X₁₅X₁₆DCRDLA | |
| | | | GEKPYKCPECGKSFSDCRDLARH | | RHX₁₇X₁₈X₁₉HX₂₀X₂₁X₂₂X₂₃X₂₄X₈X₉CX₁₀X₁₁CX₁₂X₁₃X₁₄X₁₅X₁₆RADN | |
| | | | QRTHTGEKPYKCPECGKSFSRAD | | LTEHX₁₇X₁₈X₁₉HX₂₀X₂₁X₂₂X₂₃X₂₄X₈X₉CX₁₀X₁₁CX₁₂X₁₃X₁₄X₁₅X₁₆QN | |
| | | | NLTEHQRTHTGEKPYKCPECGKS | | STLTEHX₁₇X₁₈X₁₉HX₂₀X₂₁X₂₂X₂₃X₂₄X₂₅X₂₆X₂₇X₂₈X₂₉X₃₀ | |
| | | | FSQNSTLTEHQRTHTGEKPTGKK | | | |
| | | | TS | | | |
| ggtgttgcc | GGT GTT | 1225 | LEPGEKPYKCPECGKSFSTSHSL | 1774 | X₁X₂X₃X₄X₅X₆X₇X₈X₉CX₁₀X₁₁CX₁₂X₁₃X₁₄X₁₅X₁₆TSHSLTEHX₁₇X₁₈X₁₉ | 2323 |
| aagtgaagc | GCC AAG | | TEHQRTHTGEKPYKCPECGKSFS | | HX₂₀X₂₁X₂₂X₂₃X₂₄X₈X₉CX₁₀X₁₁CX₁₂X₁₃X₁₄X₁₅X₁₆ERSHLREHX₁₇X₁₈ | |
| cca | TGA AGC | | ERSHLREHQRTHTGEKPYKCPEC | | X₁₉HX₂₀X₂₁X₂₂X₂₃X₂₄X₈X₉CX₁₀X₁₁CX₁₂X₁₃X₁₄X₁₅X₁₆QAGHLASHX₁₇ | |
| | CCA | | GKSFSQAGHLASHQRTHTGEKPY | | X₁₈X₁₉HX₂₀X₂₁X₂₂X₂₃X₂₄X₈X₉CX₁₀X₁₁CX₁₂X₁₃X₁₄X₁₅X₁₆RKDNLKNH | |
| | | | KCPECGKSFSRKDNLKNHQRTHT | | X₁₇X₁₈X₁₉HX₂₀X₂₁X₂₂X₂₃X₂₄X₈X₉CX₁₀X₁₁CX₁₂X₁₃X₁₄X₁₅X₁₆DCRDLA | |
| | | | GEKPYKCPECGKSFSDCRDLARH | | RHX₁₇X₁₈X₁₉HX₂₀X₂₁X₂₂X₂₃X₂₄X₈X₉CX₁₀X₁₁CX₁₂X₁₃X₁₄X₁₅X₁₆TSGS | |
| | | | QRTHTGEKPYKCPECGKSFSTSG | | LVRHX₁₇X₁₈X₁₉HX₂₀X₂₁X₂₂X₂₃X₂₄X₈X₉CX₁₀X₁₁CX₁₂X₁₃X₁₄X₁₅X₁₆TS | |
| | | | SLVRHQRTHTGEKPYKCPECGKS | | GHLVRHX₁₇X₁₈X₁₉HX₂₀X₂₁X₂₂X₂₃X₂₄X₂₅X₂₆X₂₇X₂₈X₂₉X₃₀ | |
| | | | FSTSGHLVRHQRTHTGEKPTGKK | | | |
| | | | TS | | | |
| agcacaggt | AGC ACA | 1226 | LEPGEKPYKCPECGKSFSQAGHL | 1775 | X₁X₂X₃X₄X₅X₆X₇X₈X₉CX₁₀X₁₁CX₁₂X₁₃X₁₄X₁₅X₁₆QAGHLASHX₁₇X₁₈X₁₉ | 2324 |
| gttgccaag | GGT GTT | | ASHQRTHTGEKPYKCPECGKSFS | | HX₂₀X₂₁X₂₂X₂₃X₂₄X₈X₉CX₁₀XCX₁₂X₁₃X₁₄X₁₅X₁₆RKDNLKNHX₁₇X₁₈ | |
| tga | GCC AAG | | RKDNLKNHQRTHTGEKPYKCPEC | | X₁₉HX₂₀X₂₁X₂₂X₂₃X₂₄X₈X₉CX₁₀X₁₁CX₁₂X₁₃X₁₄X₁₅X₁₆DCRDLARHX₁₇ | |
| | TGA | | GKSFSDCRDLARHQRTHTGEKPY | | X₁₈X₁₉HX₂₀X₂₁X₂₂X₂₃X₂₄X₈X₉CX₁₀X₁₁CX₁₂X₁₃X₁₄X₁₅X₁₆TSGSLVRH | |
| | | | KCPECGKSFSTSGSLVRHQRTHT | | X₁₇X₁₈X₁₉HX₂₀X₂₁X₂₂X₂₃X₂₄X₈X₉CX₁₀X₁₁CX₁₂X₁₃X₁₄X₁₅X₁₆TSGHLV | |
| | | | GEKPYKCPECGKSFSTSGHLVRH | | RHX₁₇X₁₈X₁₉HX₂₀X₂₁X₂₂X₂₃X₂₄X₈X₉CX₁₀X₁₁CX₁₂X₁₃X₁₄X₁₅X₁₆SPAD | |
| | | | QRTHTGEKPYKCPECGKSFSSPA | | LTRHX₁₇X₁₈X₁₉HX₂₀X₂₁X₂₂X₂₃X₂₄X₈X₉CX₁₀X₁₁CX₁₂X₁₃X₁₄X₁₅X₁₆ER | |
| | | | DLTRHQRTHTGEKPYKCPECGKS | | SSHLREHX₁₇X₁₈X₁₉HX₂₀X₂₁X₂₂X₂₃X₂₄X₂₅X₂₆X₂₇X₂₈X₂₉X₃₀ | |
| | | | FSERSHLREHQRTHTGEKPTGKK | | | |
| | | | TS | | | |
| acaggtgtt | ACA GGT | 1227 | LEPGEKPYKCPECGKSFSERSHL | 1776 | X₁X₂X₃X₄X₅X₆X₇X₈X₉CX₁₀X₁₁CX₁₂X₁₃X₁₄X₁₅X₁₆ERSHLREHX₁₇X₁₈X₁₉ | 2325 |
| gccaagtga | GTT GCC | | REHQRTHTGEKPYKCPECGKSFS | | HX₂₀X₂₁X₂₂X₂₃X₂₄X₈X₉CX₁₀X₁₁CX₁₂X₁₃X₁₄X₁₅X₁₆QAGHLASHX₁₇X₁₈ | |
| agc | AAG TGA | | QAGHLASHQRTHTGEKPYKCPEC | | X₁₉HX₂₀X₂₁X₂₂X₂₃X₂₄X₈X₉CX₁₀X₁₁CX₁₂X₁₃X₁₄X₁₅X₁₆RKDNLKNHX₁₇ | |
| | AGC | | GKSFSRKDNLKNHQRTHTGEKPY | | X₈X₁₉HX₂₀X₂₁X₂₂X₂₃X₂₄X₈X₉CX₁₀X₁₁CX₁₂X₁₃X₁₄X₁₅X₁₆DCRDLARH | |
| | | | KCPECGKSFSDCRDLARHQRTHT | | X₁₇X₁₈X₁₉HX₂₀X₂₁X₂₂X₂₃X₂₄X₈X₉CX₁₀X₁₁CX₁₂X₁₃X₁₄X₁₅X₁₆TSGSLV | |
| | | | GEKPYKCPECGKSFSTSGSLVRH | | RHX₁₇X₁₈X₁₉HX₂₀X₂₁X₂₂X₂₃X₂₄X₈X₉CX₁₀X₁₁CX₁₂X₁₃X₁₄X₁₅X₁₆TSGH | |
| | | | QRTHTGEKPYKCPECGKSFSTSG | | LVRHX₁₇X₁₈X₁₉HX₂₀X₂₁X₂₂X₂₃X₂₄X₈X₉CX₁₀X₁₁CX₁₂X₁₃X₁₄X₁₅X₁₆SP | |
| | | | HLVRHQRTHTGEKPYKCPECGKS | | ADLTRHX₁₇X₁₈X₁₉HX₂₀X₂₁X₂₂X₂₃X₂₄X₂₅X₂₆X₂₇X₂₈X₂₉X₃₀ | |
| | | | FSSPADLTRHQRTHTGEKPTGKK | | | |
| | | | TS | | | |
| gccagcaca | GCC AGC | 1228 | LEPGEKPYKCPECGKSFSRKDNL | 1777 | X₁X₂X₃X₄X₅X₆X₇X₈X₉CX₁₀X₁₁CX₁₂X₁₃X₁₄X₁₅X₁₆RKDNLKNHX₁₇X₁₈X₁₉ | 2326 |
| ggtgttgcc | ACA GGT | | KNHQRTHTGEKPYKCPECGKSFS | | HX₂₀X₂₁X₂₂X₂₃X₂₄X₈X₉CX₁₀X₁₁CX₁₂X₁₃X₁₄X₁₅X₁₆DCRDLARHX₁₇X₁₈ | |
| aag | GTT GCC | | DCRDLARHQRTHTGEKPYKCPEC | | X₁₉HX₂₀X₂₁X₂₂X₂₃X₂₄X₈X₉CX₁₀X₁₁CX₁₂X₁₃X₁₄X₁₅X₁₆TSGSLVRHX₁₇ | |
| | APG | | GKSFSTSGSLVRHQRTHTGEKPY | | X₁₈X₁₉HX₂₀X₂₁X₂₂X₂₃X₂₄X₈X₉CX₁₀X₁₁CX₁₂X₁₃X₁₄X₁₅X₁₆TSGHLVRH | |
| | | | KCPECGKSFSTSGHLVRHQRTHT | | X₁₇X₁₈X₁₉HX₂₀X₂₁X₂₂X₂₃X₂₄X₈X₉CX₁₀X₁₁CX₁₂X₁₃X₁₄X₁₅X₁₆SPADLT | |
| | | | GEKPYKCPECGKSFSSPADLTRH | | RHX₁₇X₁₈X₁₉HX₂₀X₂₁X₂₂X₂₃X₂₄X₈X₉CX₁₀X₁₁CX₁₂X₁₃X₁₄X₁₅X₁₆ERSH | |
| | | | QRTHTGEKPYKCPECGKSFSERS | | LREHX₁₇X₁₈X₁₉HX₂₀X₂₁X₂₂X₂₃X₂₄X₈X₉CX₁₀X₁₁CX₁₂X₁₃X₁₄X₁₅X₁₆DC | |
| | | | HLREHQRTHTGEKPYKCPECGKS | | RDLARHX₁₇X₁₈X₁₉HX₂₀X₂₁X₂₂X₂₃X₂₄X₂₅X₂₆X₂₇X₂₈X₂₉X₃₀ | |
| | | | FSDCRDLARHQRTHTGEKPTGKK | | | |
| | | | TS | | | |
| aggcacagt | AGG CAC | 1229 | LEPGEKPYKCPECGKSFSTSGNL | 1778 | X₁X₂X₃X₄X₅X₆X₇X₈X₉CX₁₀X₁₁CX₁₂X₁₃X₁₄X₁₅X₁₆TSGNLTEHX₁₇X₁₈X₁₉ | 2327 |
| gatcacagg | AGT GAT | | TEHQRTHTGEKPYKCPECGKSFS | | HX₂₀X₂₁X₂₂X₂₃X₂₄X₈X₉CX₁₀X₁₁CX₁₂X₁₃X₁₄X₁₅X₁₆RSDHLTNHX₁₇X₁₈ | |
| cat | CAC AGG | | RSDHLTNHQRTHTGEKPYKCPEC | | X₁₉HX₂₀X₂₁X₂₂X₂₃X₂₄X₈X₉CX₁₀X₁₁CX₁₂X₁₃X₁₄X₁₅X₁₆SKKALTEHX₁₇ | |
| | CAT | | GKSFSSKKALTEHQRTHTGEKPY | | X₁₈X₁₉HX₂₀X₂₁X₂₂X₂₃X₂₄X₈X₉CX₁₀X₁₁CX₁₂X₁₃X₁₄X₁₅X₁₆TSGNLVRH | |
| | | | KCPECGKSFSTSGNLVRHQRTHT | | X₁₇X₁₈X₁₉HX₂₀X₂₁X₂₂X₂₃X₂₄X₈X₉CX₁₀X₁₁CX₁₂X₁₃X₁₄X₁₅X₁₆HRTTLT | |
| | | | GEKPYKCPECGKSFSHRTTLTNH | | NHX₁₇X₁₈X₁₉HX₂₀X₂₁X₂₂X₂₃X₂₄X₈X₉CX₁₀X₁₁CX₁₂X₁₃X₁₄X₁₅X₁₆SKKA | |
| | | | QRTHTGEKPYKCPECGKSFSSKK | | LTEHX₁₇X₁₈X₁₉HX₂₀X₂₁X₂₂X₂₃X₂₄X₈X₉CX₁₀X₁₁CX₁₂X₁₃X₁₄X₁₅X₁₆RS | |
| | | | ALTEHQRTHTGEKPYKCPECGKS | | DHLTNHX₁₇X₁₈X₁₉HX₂₀X₂₁X₂₂X₂₃X₂₄X₂₅X₂₆X₂₇X₂₈X₂₉X₃₀ | |
| | | | FSRSDHLTNHQRTHTGEKPTGKK | | | |
| | | | TS | | | |
| ccaagtgaa | CCA AGT | 1230 | LEPGEKPYKCPECGKSFSSKKHL | 1779 | X₁X₂X₃X₄X₅X₆X₇X₈X₉CX₁₀X₁₁CX₁₂X₁₃X₁₄X₁₅X₁₆SKKHLAEHX₁₇X₁₈X₁₉ | 2328 |
| gcccatgtg | GAA GCC | | AEHQRTHTGEKPYKCPECGKSFS | | HX₂₀X₂₁X₂₂X₂₃X₂₄X₈X₉CX₁₀X₁₁CX₁₂X₁₃X₁₄X₁₅X₁₆RSDELVRHX₁₇X₁₈ | |
| ccc | CAT gtg | | RSDELVRHQRTHTGEKPYKCPEC | | X₁₉HX₂₀X₂₁X₂₂X₂₃X₂₄X₈X₉CX₁₀X₁₁CX₁₂X₁₃X₁₄X₁₅X₁₆TSGNLTEHX₁₇ | |
| | CCC | | GKSFSTSGNLTEHQRTHTGEKPY | | X₁₈X₁₉HX₂₀X₂₁X₂₂X₂₃X₂₄X₈X₉CX₁₀X₁₁CX₁₂X₁₃X₁₄X₁₅X₁₆DCRDLARH | |
| | | | KCPECGKSFSDCRDLARHQRTHT | | X₁₇X₁₈X₁₉HX₂₀X₂₁X₂₂X₂₃X₂₄X₈X₉CX₁₀X₁₁CX₁₂X₁₃X₁₄X₁₅X₁₆QSSNLV | |
| | | | GEKPYKCPECGKSFSQSSNLVRH | | RHX₁₇X₁₈X₁₉HX₂₀X₂₁X₂₂X₂₃X₂₄X₈X₉CX₁₀X₁₁CX₁₂X₁₃X₁₄X₁₅X₁₆HRTT | |
| | | | QRTHTGEKPYKCPECGKSFSHRT | | LTNHX₁₇X₁₈X₁₉HX₂₀X₂₁X₂₂X₂₃X₂₄X₈X₉CX₁₀X₁₁CX₁₂X₁₃X₁₄X₁₅X₁₆TS | |
| | | | TLTNHQRTHTGEKPYKCPECGKS | | HSLTEHX₁₇X₁₈X₁₉HX₂₀X₂₁X₂₂X₂₃X₂₄X₂₅X₂₆X₂₇X₂₈X₂₉X₃₀ | |
| | | | FSTSHSLTEHQRTHTGEKPTGKK | | | |
| | | | TS | | | |
| gaagcccat | GAA GCC | 1231 | LEPGEKPYKCPECGKSFSSKKAL | 1780 | X₁X₂X₃X₄X₅X₆X₇X₈X₉CX₁₀X₁₁CX₁₂X₁₃X₁₄X₁₅X₁₆SKKALTEHX₁₇X₁₈X₁₉ | 2329 |
| gtgcccagg | CAT gtg | | TEHQRTHTGEKPYKCPECGKSFS | | HX₂₀X₂₁X₂₂X₂₃X₂₄X₈X₉CX₁₀X₁₁CX₁₂X₁₃X₁₄X₁₅X₁₆RSDHLTNHX₁₇X₁₈ | |
| cac | CCC AGG | | RSDHLTNHQRTHTGEKPYKCPEC | | X₁₉HX₂₀X₂₁X₂₂X₂₃X₂₄X₈X₉CX₁₀X₁₁CX₁₂X₁₃X₁₄X₁₅X₁₆SKKHLAEHX₁₇ | |
| | CAC | | GKSFSSKKHLAEHQRTHTGEKPY | | X₁₈X₁₉HX₂₀X₂₁X₂₂X₂₃X₂₄X₈X₉CX₁₀X₁₁CX₁₂X₁₃X₁₄X₁₅X₁₆RSDELVRH | |
| | | | KCPECGKSFSRSDELVRHQRTHT | | X₁₇X₁₈X₁₉HX₂₀X₂₁X₂₂X₂₃X₂₄X₈X₉CX₁₀X₁₁CX₁₂X₁₃X₁₄X₁₅X₁₆TSGNLT | |
| | | | GEKPYKCPECGKSFSTSGNLTEH | | EHX₁₇X₁₈X₁₉HX₂₀X₂₁X₂₂X₂₃X₂₄X₈X₉CX₁₀X₁₁CX₁₂X₁₃X₁₄X₁₅X₁₆DCRD | |
| | | | QRTHTGEKPYKCPECGKSFSDCR | | LARHX₁₇X₁₈X₁₉HX₂₀X₂₁X₂₂X₂₃X₂₄X₈X₉CX₁₀X₁₁CX₁₂X₁₃X₁₄X₁₅X₁₆QS | |
| | | | DLARHQRTHTGEKPYKCPECGKS | | SNLVRHX₁₇X₁₈X₁₉HX₂₀X₂₁X₂₂X₂₃X₂₄X₂₅X₂₆X₂₇X₂₈X₂₉X₃₀ | |
| | | | FSQSSNLVRHQRTHTGEKPTGKK | | | |
| | | | TS | | | |
| agtgaagcc | AGT GAA | 1232 | LEPGEKPYKCPECGKSFSRSDHL | 1781 | X₁X₂X₃X₄X₅X₆X₇X₈X₉CX₁₀X₁₁CX₁₂X₁₃X₁₄X₁₅X₁₆RSDHLTNHX₁₇X₁₈X₁₉ | 2330 |
| catgtgccc | GCC CAT | | TNHQRTHTGEKPYKCPECGKSFS | | HX₂₀X₂₁X₂₂X₂₃X₂₄X₈X₉CX₁₀X₁₁CX₁₂X₁₃X₁₄X₁₅X₁₆SKKHLAEHX₁₇X₁₈ | |
| agg | gtg CCC | | SKKHLAEHQRTHTGEKPYKCPEC | | X₁₉HX₂₀X₂₁X₂₂X₂₃X₂₄X₈X₉CX₁₀X₁₁CX₁₂X₁₃X₁₄X₁₅X₁₆RSDELVRHX₁₇ | |
| | AGG | | GKSFSRSDELVRHQRTHTGEKPY | | X₁₈X₁₉HX₂₀X₂₁X₂₂X₂₃X₂₄X₈X₉CX₁₀X₁₁CX₁₂X₁₃X₁₄X₁₅X₁₆TSGNLTEH | |
| | | | KCPECGKSFSTSGNLTEHQRTHT | | X₁₇X₁₈X₁₉HX₂₀X₂₁X₂₂X₂₃X₂₄X₈X₉CX₁₀X₁₁CX₁₂X₁₃X₁₄X₁₅X₁₆DCRDLA | |
| | | | GEKPYKCPECGKSFSDCRDLARH | | RHX₁₇X₁₈X₁₉HX₂₀X₂₁X₂₂X₂₃X₂₄X₈X₉CX₁₀X₁₁CX₁₂X₁₃X₁₄X₁₅X₁₆QSSN | |
| | | | QRTHTGEKPYKCPECGKSFSQSS | | LVRHX₁₇X₁₈X₁₉HX₂₀X₂₁X₂₂X₂₃X₂₄X₈X₉CX₁₀X₁₁CX₁₂X₁₃X₁₄X₁₅X₁₆HR | |
| | | | NLVRHQRTHTGEKPYKCPECGKS | | TTLTNHX₁₇X₁₈X₁₉HX₂₀X₂₁X₂₂X₂₃X₂₄X₂₅X₂₆X₂₇X₂₈X₂₉X₃₀ | |
| | | | FSHRTTLTNHQRTHTGEKPTGKK | | | |
| | | | TS | | | |
| gtgcccagg | gtg CCC | 1233 | LEPGEKPYKCPECGKSFSSKKAL | 1782 | X₁X₂X₃X₄X₅X₆X₇X₈X₉CX₁₀X₁₁CX₁₂X₁₃X₁₄X₁₅X₁₆SKKALTEHX₁₇X₁₈X₁₉ | 2331 |
| cacagtgat | AGG CAC | | TEHQRTHTGEKPYKCPECGKSFS | | HX₂₀X₂₁X₂₂X₂₃X₂₄X₈X₉CX₁₀X₁₁CX₁₂X₁₃X₁₄X₁₅X₁₆TSGNLVRHX₁₇X₁₈ | |
| cac | AGT GAT | | TSGNLVRHQRTHTGEKPYKCPEC | | X₁₉HX₂₀X₂₁X₂₂X₂₃X₂₄X₈X₉CX₁₀X₁₁CX₁₂X₁₃X₁₄X₁₅X₁₆HRTTLTNHX₁₇ | |
| | CAC | | GKSFSHRTTLTNHQRTHTGEKPY | | X₁₈X₁₉HX₂₀X₂₁X₂₂X₂₃X₂₄X₈X₉CX₁₀X₁₁CX₁₂X₁₃X₁₄X₁₅X₁₆SKKALTEH | |
| | | | KCPECGKSFSSKKALTEHQRTHT | | X₁₇X₁₈X₁₉HX₂₀X₂₁X₂₂X₂₃X₂₄X₈X₉CX₁₀X₁₁CX₁₂X₁₃X₁₄X₁₅X₁₆RSDHLT | |
| | | | GEKPYKCPECGKSFSRSDHLTNH | | NHX₁₇X₁₈X₁₉HX₂₀X₂₁X₂₂X₂₃X₂₄X₈X₉CX₁₀X₁₁CX₁₂X₁₃X₁₄X₁₅X₁₆SKKH | |
| | | | QRTHTGEKPYKCPECGKSFSSKK | | LAEHX₁₇X₁₈X₁₉HX₂₀X₂₁X₂₂X₂₃X₂₄X₈X₉CX₁₀X₁₁CX₁₂X₁₃X₁₄X₁₅X₁₆RS | |
| | | | HLAEHQRTHTGEKPYKCPECGKS | | DELVRHX₁₇X₁₃X₁₉HX₂₀X₂₁X₂₂X₂₃X₂₄X₂₅X₂₆X₂₇X₂₈X₂₉X₃₀ | |
| | | | FSRSDELVRHQRTHTGEKPTGKK | | | |
| | | | TS | | | |
| gcccatgtg | GCC CAT | 1234 | LEPGEKPYKCPECGKSFSHRTTL | 1783 | X₁X₂X₃X₄X₅X₆X₇X₈X₉CX₁₀X₁₁CX₁₂X₁₃X₁₄X₁₅X₁₆HRTTLTNHX₁₇X₁₈X₁₉ | 2332 |
| cccaggcac | gtg CCC | | TNHQRTHTGEKPYKCPECGKSFS | | HX₂₀X₂₁X₂₂X₂₃X₂₄X₈X₉CX₁₀X₁₁CX₁₂X₁₃X₁₄X₁₅X₁₆SKKALTEHX₁₇X₁₈ | |
| agt | AGG CAC | | SKKALTEHQRTHTGEKPYKCPEC | | X₁₉HX₂₀X₂₁X₂₂X₂₃X₂₄X₈X₉CX₁₀X₁₁CX₁₂X₁₃X₁₄X₁₅X₁₆RSDHLTNHX₁₇ | |
| | AGT | | GKSFSRSDHLTNHQRTHTGEKPY | | X₁₈X₁₉HX₂₀X₂₁X₂₂X₂₃X₂₄X₈X₉CX₁₀X₁₁CX₁₂X₁₃X₁₄X₁₅X₁₆SKKHLAEH | |
| | | | KCPECGKSFSSKKHLAEHQRTHT | | X₁₇X₁₈X₁₉HX₂₀X₂₁X₂₂X₂₃X₂₄X₈X₉CX₁₀X₁₁CX₁₂X₁₃X₁₄X₁₅X₁₆RSDELV | |
| | | | GEKPYKCPECGKSFSRSDELVRH | | RHX₁₇X₁₈X₁₉HX₂₀X₂₁X₂₂X₂₃X₂₄X₈X₉CX₁₀X₁₁CX₁₂X₁₃X₁₄X₁₅X₁₆TSGN | |
| | | | QRTHTGEKPYKCPECGKSFSTSG | | LTEHX₁₇X₁₈X₁₉HX₂₀X₂₁X₂₂X₂₃X₂₄X₈X₉CX₁₀X₁₁CX₁₂X₁₃X₁₄X₁₅X₁₆DC | |
| | | | NLTEHQRTHTGEKPYKCPECGKS | | RDLARHX₁₇X₁₈X₁₉HX₂₀X₂₁X₂₂X₂₃X₂₄X₂₅X₂₆X₂₇X₂₈X₂₉X₃₀ | |
| | | | FSDCRDLARHQRTHTGEKPTGKK | | | |
| | | | TS | | | |
| catgtgccc | CAT gtg | 1235 | LEPGEKPYKCPECGKSFSTSGNL | 1784 | X₁X₂X₃X₄X₅X₆X₇X₈X₉CX₁₀X₁₁CX₁₂X₁₃X₁₄X₁₅X₁₆TSGNLVRHX₁₇X₁₈X₁₉ | 2333 |
| aggcacagt | CCC AGG | | VRHQRTHTGEKPYKCPECGKSFS | | HX₂₀X₂₁X₂₂X₂₃X₂₄X₈X₉CX₁₀X₁₁CX₁₂X₁₃X₁₄X₁₅X₁₆HRTTLTNHX₁₇X₁₈ | |
| gat | CAC AGT | | HRTTLTNHQRTHTGEKPYKCPEC | | X₁₉HX₂₀X₂₁X₂₂X₂₃X₂₄X₈X₉CX₁₀X₁₁CX₁₂X₁₃X₁₄X₁₅X₁₆SKKALTEHX₁₇ | |
| | GAT | | GKSFSSKKALTEHQRTHTGEKPY | | X₁₈X₁₉HX₂₀X₂₁X₂₂X₂₃X₂₄X₈X₉CX₁₀X₁₁CX₁₂X₁₃X₁₄X₁₅X₁₆RSDHLTNH | |
| | | | KCPECGKSFSRSDHLTNHQRTHT | | X₁₇X₁₈X₁₉HX₂₀X₂₁X₂₂X₂₃X₂₄X₈X₉CX₁₀X₁₁CX₁₂X₁₃X₁₄X₁₅X₁₆SKKHLA | |
| | | | GEKPYKCPECGKSFSSKKHLAEH | | EHX₁₇X₁₈X₁₉HX₂₀X₂₁X₂₂X₂₃X₂₄X₈X₉CX₁₀X₁₁CX₁₂X₁₃X₁₄X₁₅X₁₆RSDE | |
| | | | QRTHTGEKPYKCPECGKSFSRSD | | LVRHX₁₇X₁₈X₁₉HX₂₀X₂₁X₂₂X₂₃X₂₄X₈X₉CX₁₀X₁₁CX₁₂X₁₃X₁₄X₁₅X₁₆TS | |
| | | | ELVRHQRTHTGEKPYKCPECGKS | | GNLTEHX₁₇X₁₈X₁₉HX₂₀X₂₁X₂₂X₂₃X₂₄X₂₅X₂₆X₂₇X₂₈X₂₉X₃₀ | |
| | | | FSTSGNLTEHQRTHTGEKPTGKK | | | |
| | | | TS | | | |
| cccaggcac | CCC AGG | 1236 | LEPGEKPYKCPECGKSFSRSDHL | 1785 | X₁X₂X₃X₄X₅X₆X₇X₈X₉CX₁₀X₁₁CX₁₂X₁₃X₁₄X₁₅X₁₆RSDHLTNHX₁₇X₁₈X₁₉ | 2334 |
| agtgatcac | CAC AGT | | TNHQRTHTGEKPYKCPECGKSFS | | HX₂₀X₂₁X₂₂X₂₃X₂₄X₈X₉CX₁₀X₁₁CX₁₂X₁₃X₁₄X₁₅X₁₆SKKALTEHX₁₇X₁₈ | |
| agg | GAT CAC | | SKKALTEHQRTHTGEKPYKCPEC | | X₁₉HX₂₀X₂₁X₂₂X₂₃X₂₄X₈X₉CX₁₀X₁₁CX₁₂X₁₃X₁₄X₁₅X₁₆TSGNLVRHX₁₇ | |
| | AGG | | GKSFSTSGNLVRHQRTHTGEKPY | | X₁₈X₁₉HX₂₀X₂₁X₂₂X₂₃X₂₄X₈X₉CX₁₀X₁₁CX₁₂X₁₃X₁₄X₁₅X₁₆HRTTLTNH | |
| | | | KCPECGKSFSHRTTLTNHQRTHT | | X₁₇X₁₈X₁₉HX₂₀X₂₁X₂₂X₂₃X₂₄X₈X₉CX₁₀X₁₁CX₁₂X₁₃X₁₄X₁₅X₁₆SKKALT | |
| | | | GEKPYKCPECGKSFSSKKALTEH | | EHX₁₇X₁₈X₁₉HX₂₀X₂₁X₂₂X₂₃X₂₄X₈X₉CX₁₀X₁₁CX₁₂X₁₃X₁₄X₁₅X₁₆RSDH | |
| | | | QRTHTGEKPYKCPECGKSFSRSD | | LTNHX₁₇X₁₈X₁₉HX₂₀X₂₁X₂₂X₂₃X₂₄X₈X₉CX₁₀X1CX₁₂X₁₃X₁₄X₁₅X₁₆SK | |
| | | | HLTNHQRTHTGEKPYKCPECGKS | | KHLAEHX₁₇X₁₈X₁₉HX₂₀X₂₁X₂₂X₂₃X₂₄X₂₅X₂₆X₂₇X₂₈X₂₉X₃₀ | |
| | | | ESSKKHLAEHQRTHTGEKPTGKK | | | |
| | | | TS | | | |
| gggaggcct | ggg AGG | 1237 | LEPGEKPYKCPECGKSFSTTGNL | 1786 | X₁X₂X₃X₄X₅X₆X₇X₈X₉CX₁₀X₁₁CX₁₂X₁₃X₁₄X₁₅X₁₆TTGNLTVHX₁₇X₁₈X₁₉ | 2335 |
| gcaagggcc | CCT GCA | | TVHQRTHTGEKPYKCPECGKSFS | | HX₂₀X₂₁X₂₂X₂₃X₂₄X₈X₉CX₁₀X₁₁CX₁₂X₁₃X₁₄X₁₅X₁₆DCRDLARHX₁₇X₁₈ | |
| aat | AGG GCC | | DCRDLARHQRTHTGEKPYKCPEC | | X₁₉HX₂₀X₂₁X₂₂X₂₃X₂₄X₈X₉CX₁₀X₁₁CX₁₂X₁₃X₁₄X₁₅X₁₆RSDHLTNHX₁₇ | |
| | AAT | | GKSFSRSDHLTNHQRTHTGEKPY | | X₁₈X₁₉HX₂₀X₂₁X₂₂X₂₃X₂₄X₈X₉CX₁₀X₁₁CX₁₂X₁₃X₁₄X₁₅X₁₆QSGDLRRH | |
| | | | KCPECGKSFSQSGDLRRHQRTHT | | X₁₇X₁₈X₁₉HX₂₀X₂₁X₂₂X₂₃X₂₄X₈X₉CX₁₀X₁₁CX₁₂X₁₃X₁₄X₁₅X₁₆TKNSLT | |
| | | | GEKPYKCPECGKSFSTKNSLTEH | | EHX₁₇X₁₈X₁₉HX₂₀X₂₁X₂₂X₂₃X₂₄X₈X₉CX₁₀X₁₁CX₁₂X₁₃X₁₄X₁₅X₁₆RSDH | |
| | | | QRTHTGEKPYKCPECGKSFSRSD | | LTNHX₁₇X₁₈X₁₉HX₂₀X₂₁X₂₂X₂₃X₂₄X₈X₉CX₁₀X₁₁CX₁₂X₁₃X₁₄X₁₅X₁₆RS | |
| | | | HLTNHQRTHTGEKPYKCPECGKS | | DKLVRHX₁₇X₁₈X₁₉HX₂₀X₂₁X₂₂X₂₃X₂₄X₂₅X₂₆X₂₇X₂₈X₂₉X₃₀ | |
| | | | FSRSDKLVRHQRTHTGEKPTGKK | | | |
| | | | TS | | | |
| gaagggagg | GAA ggg | 1238 | LEPGEKPYKCPECGKSFSDCRDL | 1787 | X₁X₂X₃X₄X₅X₆X₇X₈X₉CX₁₀X₁₁CX₁₂X₁₃X₁₄X₁₅X₁₆DCRDLARHX₁₇X₁₈X₁₉ | 2336 |
| cctgcaagg | AGG CCT | | ARHQRTHTGEKPYKCPECGKSFS | | HX₂₀X₂₁X₂₂X₂₃X₂₄X₈X₉CX₁₀X₁₁CX₁₂X₁₃X₁₄X₁₅X₁₆RSDHLTNHX₁₇X₁₈ | |
| gcc | GCA AGG | | RSDHLTNHQRTHTGEKPYKCPEC | | X₁₉HX₂₀X₂₁X₂₂X₂₃X₂₄X₈X₉CX₁₀X₁₁CX₁₂X₁₃X₁₄X₁₅X₁₆QSGDLRRHX₁₇ | |
| | GCC | | GKSFSQSGDLRRHQRTHTGEKPY | | X₁₈X₁₉HX₂₀X₂₁X₂₂X₂₃X₂₄X₈X₉CX₁₀X₁₁CX₁₂X₁₃X₁₄X₁₅X₁₆TKNSLTEH | |
| | | | KCPECGKSFSTKNSLTEHQRTHT | | X₁₇X₁₈X₁₉HX₂₀X₂₁X₂₂X₂₃X₂₄X₈X₉CX₁₀X₁₁CX₁₂X₁₃X₁₄X₁₅X₁₆RSDHLT | |
| | | | GEKPYKCPECGKSFSRSDHLTNH | | NHX₁₇X₁₈X₁₉HX₂₀X₂₁X₂₂X₂₃X₂₄X₈X₉CX₁₀X₁₁CX₁₂X₁₃X₁₄X₁₅X₁₆RSDK | |
| | | | QRTHTGEKPYKCPECGKSFSRSD | | LVRHX₁₇X₁₈X₁₉HX₂₀X₂₁X₂₂X₂₃X₂₄X₈X₉CX₁₀X₁₁CX₁₂X₁₃X₁₄X₁₅X₁₆QS | |
| | | | KLVRHQRTHTGEKPYKCPECGKS | | SNLVRHX₁₇X₁₈X₁₉HX₂₀X₂₁X₂₂X₂₃X₂₄X₂₅X₂₆X₂₇X₂₈X₂₉X₃₀ | |
| | | | FSQSSNLVRHQRTHTGEKPTGKK | | | |
| | | | TS | | | |
| acaggcatt | ACA GGC | 1239 | LEPGEKPYKCPECGKSFSRSDKL | 1788 | X₁X₂X₃X₄X₅X₆X₇X₈X₉CX₁₀X₁₁CX₁₂X₁₃X₁₄X₁₅X₁₆RSDKLVRHX₁₇X₁₈X₁₉ | 2337 |
| ctgggtgaa | ATT CTG | | VRHQRTHTGEKPYKCPECGKSFS | | HX₂₀X₂₁X₂₂X₂₃X₂₄X₈X₉CX₁₀X₁₁CX₁₂X₁₃X₁₄X₁₅X₁₆QSSNLVRHX₁₇X₁₈ | |
| ggg | GGT GAA | | QSSNLVRHQRTHTGEKPYKCPEC | | X₁₉HX₂₀X₂₁X₂₂X₂₃X₂₄X₈X₉CX₁₀X₁₁CX₁₂X₁₃X₁₄X₁₅X₁₆TSGHLVRHX₁₇ | |
| | GGG | | GKSFSTSGHLVRHQRTHTGEKPY | | X₁₈X₁₉HX₂₀X₂₁X₂₂X₂₃X₂₄X₈X₉CX₁₀X₁₁CX₁₂X₁₃X₁₄X₁₅X₁₆RNDALTEH | |
| | | | KCPECGKSFSRNDALTEHQRTHT | | X₁₇X₁₈X₁₉HX₂₀X₂₁X₂₂X₂₃X₂₄X₈X₉CX₁₀X₁₁CX₁₂X₁₃X₁₄X₁₅X₁₆HKNALQ | |
| | | | GEKPYKCPECGKSFSHKNALQNH | | NHX₁₇X₁₈X₁₉HX₂₀X₂₁X₂₂X₂₃X₂₄X₈X₉CX₁₀X₁₁CX₁₂X₁₃X₁₄X₁₅X₁₆DPGH | |
| | | | QRTHTGEKPYKCPECGKSFSDPG | | LVRHX₁₇X₁₈X₁₉HX₂₀X₂₁X₂₂X₂₃X₂₄X₈X₉CX₁₀X₁₁CX₁₂X₁₃X₁₄X₁₅X₁₆SP | |
| | | | HLVRHQRTHTGEKPYKCPECGKS | | ADLTRHX₁₇X₁₈X₁₉HX₂₀X₂₁X₂₂X₂₃X₂₄X₂₅X₂₆X₂₇X₂₈X₂₉X₃₀ | |
| | | | FSSPADLTRHQRTHTGEKPTGKK | | | |
| | | | TS | | | |
| ctgggtgaa | CTG GGT | 1240 | LEPGEKPYKCPECGKSFSQSGDL | 1789 | X₁X₂X₃X₄X₅X₆X₇X₈X₉CX₁₀X₁₁CX₁₂X₁₃X₁₄X₁₅X₁₆QSGDLRRHX₁₇X₁₈X₁₉ | 2338 |
| gggaggcct | GAA ggg | | RRHQRTHTGEKPYKCPECGKSIS | | HX₂₀X₂₁X₂₂X₂₃X₂₄X₈X₉CX₁₀X₁₁CX₁₂X₁₃X₁₄X₁₅X₁₆TKNSLTEHX₁₇X₁₈ | |
| gca | AGG CCT | | TKNSLTEHQRTHTGEKPYKCPEC | | X₁₉HX₂₀X₂₁X₂₂X₂₃X₂₄X₈X₉CX₁₀X₁₁CX₁₂X₁₃X₁₄X₁₅X₁₆RSDHLTNHX₁₇ | |
| | GCA | | GKSFSRSDHLTNHQRTHTGEKPY | | X₁₈X₁₉HX₂₀X₂₁X₂₂X₂₃X₂₄X₈X₉CX₁₀X₁₁CX₁₂X₁₃X₁₄X₁₅X₁₆RSDKLVRH | |
| | | | KCPECGKSFSRSDKLVRHQRTHT | | X₁₇X₁₈X₁₉HX₂₀X₂₁X₂₂X₂₃X₂₄X₈X₉CX₁₀X₁₁CX₁₂X₁₃X₁₄X₁₅X₁₆QSSNLV | |
| | | | GEKPYKCPECGKSFSQSSNLVRH | | RHX₁₇X₁₈X₁₉HX₂₀X₂₁X₂₂X₂₃X₂₄X₈X₉CX₁₀X₁₁CX₁₂X₁₃X₁₄X₁₅X₁₆TSGH | |
| | | | QRTHTGEKPYKCPECGKSFSTSG | | LVRHX₁₇X₁₈X₁₉HX₂₀X₂₁X₂₂X₂₃X₂₄X₈X₉CX₁₀X₁₁CX₁₂X₁₃X₁₄X₁₅X₁₆RN | |
| | | | HLVRHQRTHTGEKPYKCPECGKS | | DALTEHX₁₇X₁₈X₁₉HX₂₀X₂₁X₂₂X₂₃X₂₄X₂₅X₂₆X₂₇X₂₈X₂₉X₃₀ | |
| | | | FSRNDALTEHQRTHTGEKPTGKK | | | |
| | | | TS | | | |
| attctgggt | ATT CTG | 1241 | LEPGEKPYKCPECGKSFSTKNSL | 1790 | X₁X₂X₃X₄X₅X₆X₇X₈X₉CX₁₀X₁₁CX₁₂X₁₃X₁₄X₁₅X₁₆TKNSLTEHX₁₇X₁₈X₁₉ | 2339 |
| gaagggagg | GGT GAA | | TEHQRTHTGEKPYKCPECGKSFS | | HX₂₀X₂₁X₂₂X₂₃X₂₄X₈X₉CX₁₀X₁₁CX₁₂X₁₃X₁₄X₁₅X₁₆RSDHLTNHX₁₇X₁₈ | |
| cct | ggg AGG | | RSDHLTNHQRTHTGEKPYKCPEC | | X₁₉HX₂₀X₂₁X₂₂X₂₃X₂₄X₈X₉CX₁₀X₁₁CX₁₂X₁₃X₁₄X₁₅X₁₆RSDKLVRHX₁₇ | |
| | CCT | | GKSFSRSDKLVRHQRTHTGEKPY | | X₁₈X₁₉HX₂₀X₂₁X₂₂X₂₃X₂₄X₈X₉CX₁₀X₁₁CX₁₂X₁₃X₁₄X₁₅X₁₆QSSNLVRH | |
| | | | KCPECGKSFSQSSNLVRHQRTHT | | X₁₇X₁₈X₁₉HX₂₀X₂₁X₂₂X₂₃X₂₄X₈X₉CX₁₀X₁₁CX₁₂X₁₃X₁₄X₁₅X₁₆TSGHLV | |
| | | | GEKPYKCPECGKSFSTSGHLVRH | | RHX₁₇X₁₈X₁₉HX₂₀X₂₁X₂₂X₂₃X₂₄X₈X₉CX₁₀X₁₁CX₁₂X₁₃X₁₄X₁₅X₁₆RNDA | |
| | | | QRTHTGEKPYKCPECGKSFSRND | | LTEHX₁₇X₁₈X₁₉HX₂₀X₂₁X₂₂X₂₃X₂₄X₈X₉CX₁₀X₁₁CX₁₂X₁₃X₁₄X₁₅X₁₆HK | |
| | | | ALTEHQRTHTGEKPYKCPECGKS | | NALQNHX₁₇X₁₈X₁₉HX₂₀X₂₁X₂₂X₂₃X₂₄X₂₅X₂₆X₂₇X₂₈X₂₉X₃₀ | |
| | | | FSHKNALQNHQRTHTGEKPTGKK | | | |
| | | | TS | | | |
| ggcattctg | GGC ATT | 1242 | LEPGEKPYKCPECGKSFSRSDHL | 1791 | X₁X₂X₃X₄X₅X₆X₇X₈X₉CX₁₀X₁₁CX₁₂X₁₃X₁₄X₁₅X₁₆RSDHLTNHX₁₇X₁₈X₁₉ | 2340 |
| ggtgaaggg | CTG GGT | | TNHQRTHTGEKPYKCPECGKSFS | | HX₂₀X₂₁X₂₂X₂₃X₂₄X₈X₉CX₁₀X₁₁CX₁₂X₁₃X₁₄X₁₅X₁₆RSDKLVRHX₁₇X₁₈ | |
| agg | GAA ggg | | RSDKLVRHQRTHTGEKPYKCPEC | | X₁₉HX₂₀X₂₁X₂₂X₂₃X₂₄X₈X₉CX₁₀X₁₁CX₁₂X₁₃X₁₄X₁₅X₁₆QSSNLVRHX₁₇ | |
| | AGG | | GKSFSQSSNLVRHQRTHTGEKPY | | X₁₈X₁₉HX₂₀X₂₁X₂₂X₂₃X₂₄X₈X₉CX₁₀X₁₁CX₁₂X₁₃X₁₄X₁₅X₁₆TSGHLVRH | |
| | | | KCPECGKSFSTSGHLVRHQRTHT | | X₁₇X₁₈X₁₉HX₂₀X₂₁X₂₂X₂₃X₂₄X₈X₉CX₁₀X₁₁CX₁₂X₁₃X₁₄X₁₅X₁₆RNDALT | |
| | | | GEKPYKCPECGKSFSRNDALTEH | | EHX₁₇X₁₈X₁₉HX₂₀X₂₁X₂₂X₂₃X₂₄X₈X₉CX₁₀X₁₁CX₁₂X₁₃X₁₄X₁₅X₁₆HKNA | |
| | | | QRTHTGEKPYKCPECGKSFSHKN | | LQNHX₁₇X₁₈X₁₉HX₂₀X₂₁X₂₂X₂₃X₂₄X₈X₉CX₁₀X₁₁CX₁₂XEX₁₄X₁₅X₁₆DP | |
| | | | ALQNHQRTHTGEKPYKCPECGKS | | GHLVRHX₁₇X₁₈X₁₉HX₂₀X₂₁X₂₂X₂₃X₂₄X₂₅X₂₆X₂₇X₂₈X₂₉X₃₀ | |
| | | | FSDPGHLVRHQRTHTGEKPTGKK | | | |
| | | | TS | | | |
| ggtgaaggg | GGT GAA | 1243 | LEPGEKPYKCPECGKSFSRSDHL | 1792 | X₁X₂X₃X₄X₅X₆X₇X₈X₉CX₁₀X₁₁CX₁₂X₁₃X₁₄X₁₅X₁₆RSDHLTNHX₁₇X₁₈X₁₉ | 2341 |
| aggcctgca | ggg AGG | | TNHQRTHTGEKPYKCPECGKSFS | | HX₂₀X₂₁X₂₂X₂₃X₂₄X₈X₉CX₁₀X₁₁CX₁₂X₁₃X₁₄X₁₅X₁₆QSGDLRRHX₁₇X₁₈ | |
| agg | CCT GCA | | QSGDLRRHQRTHTGEKPYKCPEC | | X₁₉HX₂₀X₂₁X₂₂X₂₃X₂₄X₈X₉CX₁₀X₁₁CX₁₂X₁₃X₁₄X₁₅X₁₆TKNSLTEHX₁₇ | |
| | AGG | | GKSFSTKNSLTEHQRTHTGEKPY | | X₁₈X₁₉HX₂₀X₂₁X₂₂X₂₃X₂₄X₈X₉CX₁₀X₁₁CX₁₂X₁₃X₁₄X₁₅X₁₆RSDHLTNH | |
| | | | KCPECGKSFSRSDHLTNHQRTHT | | X₁₇X₁₈X₁₉HX₂₀X₂₁X₂₂X₂₃X₂₄X₈X₉CX₁₀X₁₁CX₁₂X₁₃X₁₄X₁₅X₁₆RSDKLV | |
| | | | GEKPYKCPECGKSFSRSDKLVRH | | RHX₁₇X₁₈X₁₉HX₂₀X₂₁X₂₂X₂₃X₂₄X₈X₉CX₁₀X₁₁CX₁₂X₁₃X₁₄X₁₅X₁₆QSSN | |
| | | | QRTHTGEKPYKCPECGKSFSQSS | | LVRHX₁₇X₁₈X₁₉HX₂₀X₂₁X₂₂X₂₃X₂₄X₈X₉CX₁₀X₁₁CX₁₂X₁₃X₁₄X₁₅X₁₆TS | |
| | | | NLVRHQRTHTGEKPYKCPECGKS | | GHLVRHX₁₇X₁₈X₁₉HX₂₀X₂₁X₂₂X₂₃X₂₄X₂₅X₂₆X₂₇X₂₈X₂₉X₃₀ | |
| | | | FSTSGHLVRHQRTHTGEKPTGKK | | | |
| | | | TS | | | |
| ggaggcctg | GGA GGC | 1244 | LEPGEKPYKCPECGKSFSHKNAL | 1793 | X₁X₂X₃X₄X₅X₆X₇X₈X₉CX₁₀X₁₁CX₁₂X₁₃X₁₄X₁₅X₁₆HKNALQNHX₁₇X₁₈X₁₉ | 2342 |
| caagggcca | CTG CAA | | QNHQRTHTGEKPYKCPECGKSFS | | HX₂₀X₂₁X₂₂X₂₃X₂₄X₈X₉CX₁₀X₁₁CX₁₂X₁₃X₁₄X₁₅X₁₆TSHSLTEHX₁₇X₁₈ | |
| att | ggg CCA | | TSHSLTEHQRTHTGEKPYKCPEC | | X₁₉HX₂₀X₂₁X₂₂X₂₃X₂₄X₈X₉CX₁₀X₁₁CX₁₂X₁₃X₁₄X₁₅X₁₆RSDKLVRHX₁₇ | |
| | ATT | | GKSFSRSDKLVRHQRTHTGEKPY | | X₁₈X₁₉HX₂₀X₂₁X₂₂X₂₃X₂₄X₈X₉CX₁₀X₁₁CX₁₂X₁₃X₁₄X₁₅X₁₆QSGNLTEH | |
| | | | KCPECGKSFSQSGNLTEHQRTHT | | X₁₇X₁₈X₁₉HX₂₀X₂₁X₂₂X₂₃X₂₄X₈X₉CX₁₀X₁₁CX₁₂X₁₃X₁₄X₁₅X₁₆RNDALT | |
| | | | GEKPYKCPECGKSFSRNDALTEH | | EHX₁₇X₁₈X₁₉HX₂₀X₂₁X₂₂X₂₃X₂₄X₈X₉CX₁₀X₁₁CX₁₂X₁₃X₁₄X₁₅X₁₆DPGH | |
| | | | QRTHTGEKPYKCPECGKSFSDPG | | LVRHX₁₇X₁₈X₁₉HX₂₀X₂₁X₂₂X₂₃X₂₄X₈X₉CX₁₀X₁₁CX₁₂X₁₃X₁₄X₁₅X₁₆QR | |
| | | | HLVRHQRTHTGEKPYKCPECGKS | | AHLERHX₁₇X₁₈X₁₉HX₂₀X₂₁X₂₂X₂₃X₂₄X₂₅X₂₆X₂₇X₂₈X₂₉X₃₀ | |
| | | | FSQRAHLERHQRTHTGEKPTGKK | | | |
| | | | TS | | | |
| gtgaaggga | gtg AAG | 1245 | LEPGEKPYKCPECGKSFSRSDKL | 1794 | X₁X₂X₃X₄X₅X₆X₇X₈X₉CX₁₀X₁₁CX₁₂X₁₃X₁₄X₁₅X₁₆RSDKLVRHX₁₇X₁₈X₁₉ | 2343 |
| ggcctgcaa | GGA GGC | | VRHQRTHTGEKPYKCPECGKSFS | | HX₂₀X₂₁X₂₂X₂₃X₂₄X₈X₉CX₁₀X₁₁CX₁₂X₁₃X₁₄X₁₅X₁₆QSGNLTEHX₁₇X₁₈ | |
| ggg | CTG CAA | | QSGNLTEHQRTHTGEKPYKCPEC | | X₁₉HX₂₀X₂₁X₂₂X₂₃X₂₄X₈X₉CX₁₀X₁₁CX₁₂X₁₃X₁₄X₁₅X₁₆RNDALTEHX₁₇ | |
| | GGG | | GKSFSRNDALTEHQRTHTGEKPY | | X₁₈X₁₉HX₂₀X₂₁X₂₂X₂₃X₂₄X₈X₉CX₁₀X₁₁CX₁₂X₁₃X₁₄X₁₅X₁₆DPGHLVRH | |
| | | | KCPECGKSFSDPGHLVRHQRTHT | | X₁₇X₁₈X₁₉HX₂₀X₂₁X₂₂X₂₃X₂₄X₈X₉CX₁₀X₁₁CX₁₂X₁₃X₁₄X₁₅X₁₆QRAHLE | |
| | | | GEKPYKCPECGKSFSQRAHLERH | | RHX₁₇X₁₈X₁₉HX₂₀X₂₁X₂₂X₂₃X₂₄X₈X₉CX₁₀X₁₁CX₁₂X₁₃X₁₄X₁₅X₁₆RKDN | |
| | | | QRTHTGEKPYKCPECGKSFSRKD | | LKNHX₁₇X₁₈X₁₉HX₂₀X₂₁X₂₂X₂₃X₂₄X₈X₉CX₁₀X₁₁CX₁₂X₁₃X₁₄X₁₅X₁₆RS | |
| | | | NLKNHQRTHTGEKPYKCPECGKS | | DELVRHX₁₇X₁₈X₁₉HX₂₀X₂₁X₂₂X₂₃X₂₄X₂₅X₂₆X₂₇X₂₈X₂₉X₃₀ | |
| | | | FSRSDELVRHQRTHTGEKPTGKK | | | |
| | | | TS | | | |
| tgggtgaag | TGG gtg | 1246 | LEPGEKPYKCPECGKSFSQSGNL | 1795 | X₁X₂X₃X₄X₅X₆X₇X₈X₉CX₁₀X₁₁CX₁₂X₁₃X₁₄X₁₅X₁₆QSGNLTEHX₁₇X₁₈X₁₉ | 2344 |
| ggaggcctg | AAG GGA | | TEHQRTHTGEKPYKCPECGKSFS | | HX₂₀X₂₁X₂₂X₂₃X₂₄X₈X₉CX₁₀X₁₁CX₁₂X₁₃X₁₄X₁₅X₁₆RNDALTEHX₁₇X₁₈ | |
| caa | GGC CTG | | RNDALTEHQRTHTGEKPYKCPEC | | X₁₉HX₂₀X₂₁X₂₂X₂₃X₂₄X₈X₉CX₁₀X₁₁CX₁₂X₁₃X₁₄X₁₅X₁₆DPGHLVRHX₁₇ | |
| | CAA | | GKSFSDPGHLVRHQRTHTGEKPY | | X₁₈X₁₉HX₂₀X₂₁X₂₂X₂₃X₂₄X₈X₉CX₁₀X₁₁CX₁₂X₁₃X₁₄X₁₅X₁₆QRAHLERH | |
| | | | KCPECGKSFSQRAHLERHQRTHT | | X₁₇X₁₈X₁₉HX₂₀X₂₁X₂₂X₂₃X₂₄X₈X₉CX₁₀X₁₁CX₁₂X₁₃X₁₄X₁₅X₁₆RKDNLK | |
| | | | GEKPYKCPECGKSFSRKDNLKNH | | NHX₁₇X₁₈X₁₉HX₂₀X₂₁X₂₂X₂₃X₂₄X₈X₉CX₁₀X₁₁CX₁₂X₁₃X₁₄X₁₅X₁₆RSDE | |
| | | | QRTHTGEKPYKCPECGKSFSRSD | | LVRHX₁₇X₁₈X₁₉HX₂₀X₂₁X₂₂X₂₃X₂₄X₈X₉CX₁₀X₁₁CX₁₂X₁₃X₁₄X₁₅X₁₆RS | |
| | | | ELVRHQRTHTGEKPYKCPECGKS | | DHLTTHX₁₇X₁₈X₁₉HX₂₀X₂₁X₂₂X₂₃X₂₄X₂₅X₂₆X₂₇X₂₈X₂₉X₃₀ | |
| | | | FSRSDHLTTHQRTHTGEKPTGKK | | | |
| | | | TS | | | |
| aagggaggc | AAG GGA | 1247 | LEPGEKPYKCPECGKSFSTSHSL | 1796 | X₁X₂X₃X₄X₅X₆X₇X₈X₉CX₁₀X₁₁CX₁₂X₁₃X₁₄X₁₅X₁₆TSHSLTEHX₁₇X₁₈X₁₉ | 2345 |
| ctgcaaggg | GGC CTG | | TEHQRTHTGEKPYKCPECGKSFS | | HX₂₀X₂₁X₂₂X₂₃X₂₄X₈X₉CX₁₀X₁₁CX₁₂X₁₃X₁₄X₁₅X₁₆RSDKLVRHX₁₇X₁₈ | |
| cca | CAA ggg | | RSDKLVRHQRTHTGEKPYKCPEC | | X₁₉HX₂₀X₂₁X₂₂X₂₃X₂₄X₈X₉CX₁₀X₁₁CX₁₂X₁₃X₁₄X₁₅X₁₆QSGNLTEHX₁₇ | |
| | CCA | | GKSFSQSGNLTEHQRTHTGEKPY | | X₁₈X₁₉HX₂₀X₂₁X₂₂X₂₃X₂₄X₈X₉CX₁₀X₁₁CX₁₂X₁₃X₁₄X₁₅X₁₆RNDALTEH | |
| | | | KCPECGKSFSRNDALTEHQRTHT | | X₁₇X₁₈X₁₉HX₂₀X₂₁X₂₂X₂₃X₂₄X₈X₉CX₁₀X₁₁CX₁₂X₁₃X₁₄X₁₅X₁₆DPGHLV | |
| | | | GEKPYKCPECGKSFSDPGHLVRH | | RHX₁₇X₁₈X₁₉HX₂₀X₂₁X₂₂X₂₃X₂₄X₈X₉CX₁₀X₁₁CX₁₂X₁₃X₁₄X₁₅X₁₆QRAH | |
| | | | QRTHTGEKPYKCPECGKSFSQRA | | LERHX₁₇X₁₈X₁₉HX₂₀X₂₁X₂₂X₂₃X₂₄X₈X₉CX₁₀X₁₁CX₁₂X₁₃X₁₄X₁₅X₁₆RK | |
| | | | HLERHQRTHTGEKPYKCPECGKS | | DNLKNHX₁₇X₁₈X₁₉HX₂₀X₂₁X₂₂X₂₃X₂₄X₂₅X₂₆X₂₇X₂₈X₂₉X₃₀ | |
| | | | FSRKDNLKNHQRTHTGEKPTGKK | | | |
| | | | TS | | | |
| actgtgcct | ACT gtg | 1248 | LEPGEKPYKCPECGKSFSDPGHL | 1797 | X₁X₂X₃X₄X₅X₆X₇X₈X₉CX₁₀X₁₁CX₁₂X₁₃X₁₄X₁₅X₁₆DPGHLVRHX₁₇X₁₈X₁₉ | 2346 |
| gggcacatg | CCT ggg | | VRHQRTHTGEKPYKCPECGKSFS | | HX₂₀X₂₁X₂₂X₂₃X₂₄X₈X₉CX₁₀X₁₁CX₁₂X₁₃X₁₄X₁₅X₁₆RRDELNVHX₁₇X₁₈ | |
| ggc | CAC ATG | | RRDELNVHQRTHTGEKPYKCPEC | | X₁₉HX₂₀X₂₁X₂₂X₂₃X₂₄X₈X₉CX₁₀X₁₁CX₁₂X₁₃X₁₄X₁₅X₁₆SKKALTEHX₁₇ | |
| | GGC | | GKSFSSKKALTEHQRTHTGEKPY | | X₁₈X₁₉HX₂₀X₂₁X₂₂X₂₃X₂₄X₈X₉CX₁₀X₁₁CX₁₂X₁₃X₁₄X₁₅X₁₆RSDKLVRH | |
| | | | KCPECGKSFSRSDKLVRHQRTHT | | X₁₇X₁₈X₁₉HX₂₀X₂₁X₂₂X₂₃X₂₄X₈X₉CX₁₀X₁₁CX₁₂X₁₃X₁₄X₁₅X₁₆TKNSLT | |
| | | | GEKPYKCPECGKSFSTKNSLTEH | | EHX₁₇X₁₈X₁₉HX₂₀X₂₁X₂₂X₂₃X₂₄X₈X₉CX₁₀X₁₁CX₁₂X₁₃X₁₄X₁₅X₁₆RSDE | |
| | | | QRTHTGEKPYKCPECGKSFSRSD | | LVRHX₁₇X₁₈X₁₉HX₂₀X₂₁X₂₂X₂₃X₂₄X₈X₉CX₁₀X₁₁CX₁₂X₁₃X₁₄X₁₅X₁₆TH | |
| | | | ELVRHQRTHTGEKPYKCPECGKS | | LDLIRHX₁₇X₁₈X₁₉HX₂₀X₂₁X₂₂X₂₃X₂₄X₂₅X₂₆X₂₇X₂₈X₂₉X₃₀ | |
| | | | FSTHLDLIRHQRTHTGEKPTGKK | | | |
| | | | TS | | | |
| gcctgggca | GCC TGG | 1249 | LEPGEKPYKCPECGKSFSSKKAL | 1798 | X₁X₂X₃X₄X₅X₆X₇X₈X₉CX₁₀X₁₁CX₁₂X₁₃X₁₄X₁₅X₁₆SKKALTEHX₁₇X₁₈X₁₉ | 2347 |
| catgggctt | GCA CAT | | TEHQRTHTGEKPYKCPECGKSFS | | HX₂₀X₂₁X₂₂X₂₃X₂₄X₈X₉CX₁₀X₁₁CX₁₂X₁₃X₁₄X₁₅X₁₆TTGALTEHX₁₇X₁₈ | |
| cac | ggg CTT | | TTGALTEHQRTHTGEKPYKCPEC | | X₁₉HX₂₀X₂₁X₂₂X₂₃X₂₄X₈X₉CX₁₀X₁₁CX₁₂X₁₃X₁₄X₁₅X₁₆RSDKLVRHX₁₇ | |
| | CAC | | GKSFSRSDKLVRHQRTHTGEKPY | | X₁₈X₁₉HX₂₀X₂₁X₂₂X₂₃X₂₄X₈X₉CX₁₀X₁₁CX₁₂X₁₃X₁₄X₁₅X₁₆TSGNLTEH | |
| | | | KCPECGKSFSTSGNLTEHQRTHT | | X₁₇X₁₈X₁₉HX₂₀X₂₁X₂₂X₂₃X₂₄X₈X₉CX₁₀X₁₁CX₁₂X₁₃X₁₄X₁₅X₁₆QSGDLR | |
| | | | GEKPYKCPECGKSFSQSGDLRRH | | RHX₁₇X₁₈X₁₉HX₂₀X₂₁X₂₂X₂₃X₂₄X₈X₉CX₁₀X₁₁CX₁₂X₁₃X₁₄X₁₅X₁₆RSDH | |
| | | | QRTHTGEKPYKCPECGKSFSRSD | | LTTHX₁₇X₁₈X₁₉HX₂₀X₂₁X₂₂X₂₃X₂₄X₈X₉CX₁₀X₁₁CX₁₂X₁₃X₁₄X₁₅X₁₆DC | |
| | | | HLTTHQRTHTGEKPYKCPECGKS | | RDLARHX₁₇X₁₈X₁₉HX₂₀X₂₁X₂₂X₂₃X₂₄X₂₅X₂₆X₂₇X₂₈X₂₉X₃₀ | |
| | | | FSDCRDLARHQRTHTGEKPTGKK | | | |
| | | | TS | | | |
| gctggcctg | GCT GGC | 1250 | LEPGEKPYKCPECGKSFSTKNSL | 1799 | X₁X₂X₃X₄X₅X₆X₇X₈X₉CX₁₀X₁₁CX₁₂X₁₃X₁₄X₁₅X₁₆TKNSLTEHX₁₇X₁₈X₁₉ | 2348 |
| taggaccaa | CTG TAG | | TEHQRTHTGEKPYKCPECGKSFS | | HX₂₀X₂₁X₂₂X₂₃X₂₄X₈X₉CX₁₀X₁₁CX₁₂X₁₃X₁₄X₁₅X₁₆QSGNLTEHX₁₇X₁₈ | |
| cct | GAC CAA | | QSGNLTEHQRTHTGEKPYKCPEC | | X₁₉HX₂₀X₂₁X₂₂X₂₃X₂₄X₈X₉CX₁₀X₁₁CX₁₂X₁₃X₁₄X₁₅X₁₆DPGNLVRHX₁₇ | |
| | CCT | | GKSFSDPGNLVRHQRTHTGEKPY | | X₁₈X₁₉HX₂₀X₂₁X₂₂X₂₃X₂₄X₈X₉CX₁₀X₁₁CX₁₂X₁₃X₁₄X₁₅X₁₆REDNLHTH | |
| | | | KCPECGKSFSREDNLHTHQRTHT | | X₁₇X₁₈X₁₉HX₂₀X₂₁X₂₂X₂₃X₂₄X₈X₉CX₁₀X₁₁CX₁₂X₁₃X₁₄X₁₅X₁₆RNDALT | |
| | | | GEKPYKCPECGKSFSRNDALTEH | | EHX₁₇X₁₈X₁₉HX₂₀X₂₁X₂₂X₂₃X₂₄X₈X₉CX₁₀X₁₁CX₁₂X₁₃X₁₄X₁₅X₁₆DPGH | |
| | | | QRTHTGEKPYKCPECGKSFSDPG | | LVRHX₁₇X₁₈X₁₉HX₂₀X₂₁X₂₂X₂₃X₂₄X₈X₉CX₁₀X₁₁CX₁₂X₁₃X₁₄X₁₅X₁₆TS | |
| | | | HLVRHQRTHTGEKPYKCPECGKS | | GELVRHX₁₇X₁₈X₁₉HX₂₀X₂₁X₂₂X₂₃X₂₄X₂₅X₂₆X₂₇X₂₈X₂₉X₃₀ | |
| | | | FSTSGELVRHQRTHTGEKPTGKK | | | |
| | | | TS | | | |
| ggcctgtag | GGC CTG | 1251 | LEPGEKPYKCPECGKSFSDKKDL | 1800 | X₁X₂X₃X₄X₅X₆X₇X₈X₉CX₁₀X₁₁CX₁₂X₁₃X₁₄X₁₅X₁₆DKKDLTRHX₁₇X₁₈X₁₉ | 2349 |
| gaccaacct | TAG GAC | | TRHQRTHTGEKPYKCPECGKSFS | | HX₂₀X₂₁X₂₂X₂₃X₂₄X₈X₉CX₁₀X₁₁CX₁₂X₁₃X₁₄X₁₅X₁₆TKNSLTEHX₁₇X₁₈ | |
| acc | CAA CCT | | TKNSLTEHQRTHTGEKPYKCPEC | | X₁₉HX₂₀X₂₁X₂₂X₂₃X₂₄X₈X₉CX₁₀X₁₁CX₁₂X₁₃X₁₄X₁₅X₁₆QSGNLTEHX₁₇ | |
| | ACC | | GKSFSQSGNLTEHQRTHTGEKPY | | X₁₈X₁₉HX₂₀X₂₁X₂₂X₂₃X₂₄X₈X₉CX₁₀X₁₁CX₁₂X₁₃X₁₄X₁₅X₁₆DPGNLVRH | |
| | | | KCPECGKSFSDPGNLVRHQRTHT | | X₁₇X₁₈X₁₉HX₂₀X₂₁X₂₂X₂₃X₂₄X₈X₉CX₁₀X₁₁CX₁₂X₁₃X₁₄X₁₅X₁₆REDNLH | |
| | | | GEKPYKCPECGKSFSREDNLHTH | | THX₁₇X₁₈X₁₉HX₂₀X₂₁X₂₂X₂₃X₂₄X₈X₉CX₁₀X₁₁CX₁₂X₁₃X₁₄X₁₅X₁₆RNDA | |
| | | | QRTHTGEKPYKCPECGKSFSRND | | LTEHX₁₇X₁₈X₁₉HX₂₀X₂₁X₂₂X₂₃X₂₄X₈X₉CX₁₀X₁₁CX₁₂X₁₃X₁₄X₁₅X₁₆DP | |
| | | | ALTEHQRTHTGEKPYKCPECGKS | | GHLVRHX₁₇X₁₈X₁₉HX₂₀X₂₁X₂₂X₂₃X₂₄X₂₅X₂₆X₂₇X₂₈X₂₉X₃₀ | |
| | | | FSDPGHLVRHQRTHTGEKPTGKK | | | |
| | | | TS | | | |
| ctgtaggac | CTG TAG | 1252 | LEPGEKPYKCPECGKSFSHKNAL | 1801 | X₁X₂X₃X₄X₅X₆X₇X₈X₉CX₁₀X₁₁CX₁₂X₁₃X₁₄X₁₅X₁₆HKNALQNHX₁₇X₁₈X₁₉ | 2350 |
| caacctacc | GAC CAA | | QNHQRTHTGEKPYKCPECGKSFS | | HX₂₀X₂₁X₂₂X₂₃X₂₄X₈X₉CX₁₀X₁₁CX₁₂X₁₃X₁₄X₁₅X₁₆DKKDLTRHX₁₇X₁₈ | |
| att | CCT ACC | | DKKDLTRHQRTHTGEKPYKCPEC | | X₁₉HX₂₀X₂₁X₂₂X₂₃X₂₄X₈X₉CX₁₀X₁₁CX₁₂X₁₃X₁₄X₁₅X₁₆TKNSLTEHX₁₇ | |
| | ATT | | GKSFSTKNSLTEHQRTHTGEKPY | | X₁₈X₁₉HX₂₀X₂₁X₂₂X₂₃X₂₄X₈X₉CX₁₀X₁₁CX₁₂X₁₃X₁₄X₁₅X₁₆QSGNLTEH | |
| | | | KCPECGKSFSQSGNLTEHQRTHT | | X₁₇X₁₈X₁₉HX₂₀X₂₁X₂₂X₂₃X₂₄X₈X₉CX₁₀X₁₁CX₁₂X₁₃X₁₄X₁₅X₁₆DPGNLV | |
| | | | GEKPYKCPECGKSFSDPGNLVRH | | RHX₁₇X₁₈X₁₉HX₂₀X₂₁X₂₂X₂₃X₂₄X₈X₉CX₁₀X₁₁CX₁₂X₁₃X₁₄X₁₅X₁₆REDN | |
| | | | QRTHTGEKPYKCPECGKSFSRED | | LHTHX₁₇X₁₈X₁₉HX₂₀X₂₁X₂₂X₂₃X₂₄X₈X₉CX₁₀X₁₁CX₁₂X₁₃X₁₄X₁₅X₁₆RN | |
| | | | NLHTHQRTHTGEKPYKCPECGKS | | DALTEHX₁₇X₁₈X₁₉HX₂₀X₂₁X₂₂X₂₃X₂₄X₂₅X₂₆X₂₇X₂₈X₂₉X₃₀ | |
| | | | FSRNDALTEHQRTHTGEKPTGKK | | | |
| | | | TS | | | |
| ccaccccaa | CCA CCC | 1253 | LEPGEKPYKCPECGKSFSTSHSL | 1802 | X₁X₂X₃X₄X₅X₆X₇X₈X₉CX₁₀X₁₁CX₁₂X₁₃X₁₄X₁₅X₁₆TSHSLTEHX₁₇X₁₈X₁₉ | 2351 |
| agttgagtg | CAA AGT | | TEHQRTHTGEKPYKCPECGKSFS | | HX₂₀X₂₁X₂₂X₂₃X₂₄X₈X₉CX₁₀X₁₁CX₁₂X₁₃X₁₄X₁₅X₁₆RSDELVRHX₁₇X₁₈ | |
| cca | TGA gtg | | RSDELVRHQRTHTGEKPYKCPEC | | X₁₉HX₂₀X₂₁X₂₂X₂₃X₂₄X₈X₉CX₁₀X₁₁CX₁₂X₁₃X₁₄X₁₅X₁₆QAGHLASHX₁₇ | |
| | CCA | | GKSFSQAGHLASHQRTHTGEKPY | | X₁₈X₁₉HX₂₀X₂₁X₂₂X₂₃X₂₄X₈X₉CX₁₀X₁₁CX₁₂X₁₃X₁₄X₁₅X₁₆HRTTLTNH | |
| | | | KCPECGKSFSHRTTLTNHQRTHT | | X₁₇X₁₈X₁₉HX₂₀X₂₁X₂₂X₂₃X₂₄X₈X₉CX₁₀X₁₁CX₁₂X₁₃X₁₄X₁₅X₁₆QSGNLT | |
| | | | GEKPYKCPECGKSFSQSGNLTEH | | EHX₁₇X₁₈X₁₉HX₂₀X₂₁X₂₂X₂₃X₂₄X₈X₉CX₁₀X₁₁CX₁₂X₁₃X₁₄X₁₅X₁₆SKKH | |
| | | | QRTHTGEKPYKCPECGKSFSSKK | | LAEHX₁₇X₁₈X₁₉HX₂₀X₂₁X₂₂X₂₃X₂₄X₈X₉CX₁₀X₁₁CX₁₂X₁₃X₁₄X₁₅X₁₆TS | |
| | | | HLAEHQRTHTGEKPYKCPECGKS | | HSLTEHX₁₇X₁₈X₁₉HX₂₀X₂₁X₂₂X₂₃X₂₄X₂₅X₂₆X₂₇X₂₈X₂₉X₃₀ | |
| | | | FSTSHSLTEHQRTHTGEKPTGKK | | | |
| | | | TS | | | |
| ccccaaagt | CCC CAA | 1254 | LEPGEKPYKCPECGKSFSRKDNL | 1803 | X₁X₂X₃X₄X₅X₆X₇X₈X₉CX₁₀X₁₁CX₁₂X₁₃X₁₄X₁₅X₁₆RKDNLKNHX₁₇X₁₈X₁₉ | 2352 |
| tgagtgcca | AGT TGA | | KNHQRTHTGEKPYKCPECGKSFS | | HX₂₀X₂₁X₂₂X₂₃X₂₄X₈X₉CX₁₀X₁₁CX₁₂X₁₃X₁₄X₁₅X₁₆TSHSLTEHX₁₇X₁₈ | |
| aag | gtg CCA | | TSHSLTEHQRTHTGEKPYKCPEC | | X₁₉HX₂₀X₂₁X₂₂X₂₃X₂₄X₈X₉CX₁₀X₁₁CX₁₂X₁₃X₁₄X₁₅X₁₆RSDELVRHX₁₇ | |
| | AAG | | GKSFSRSDELVRHQRTHTGEKPY | | X₁₈X₁₉HX₂₀X₂₁X₂₂X₂₃X₂₄X₈X₉CX₁₀X₁₁CX₁₂X₁₃X₁₄X₁₅X₁₆QAGHLASH | |
| | | | KCPECGKSFSQAGHLASHQRTHT | | X₁₇X₁₈X₁₉HX₂₀X₂₁X₂₂X₂₃X₂₄X₈X₉CX₁₀X₁₁CX₁₂X₁₃X₁₄X₁₅X₁₆HRTTLT | |
| | | | GEKPYKCPECGKSFSHRTTLTNH | | NHX₁₇X₁₈X₁₉HX₂₀X₂₁X₂₂X₂₃X₂₄X₈X₉CX₁₀X₁₁CX₁₂X₁₃X₁₄X₁₅X₁₆QSGN | |
| | | | QRTHTGEKPYKCPECGKSFSQSG | | LTEHX₁₇X₁₈X₁₉HX₂₀X₂₁X₂₂X₂₃X₂₄X₈X₉CX₁₀X₁₁CX₁₂X₁₃X₁₄X₁₅X₁₆SK | |
| | | | NLTEHQRTHTGEKPYKCPECGKS | | KHLAEHX₁₇X₁₈X₁₉HX₂₀X₂₁X₂₂X₂₃X₂₄X₂₅X₂₆X₂₇X₂₈X₂₉X₃₀ | |
| | | | FSSKKHLAEHQRTHTGEKPTGKK | | | |
| | | | TS | | | |
| gctcctgga | GCT CCT | 1255 | LEPGEKPYKCPECGKSFSDKKDL | 1804 | X₁X₂X₃X₄X₅X₆X₇X₈X₉CX₁₀X₁₁CX₁₂X₁₃X₁₄X₁₅X₁₆DKKDLTRHX₁₇X₁₈X₁₉ | 2353 |
| cccaggcac | GGA CCC | | TRHQRTHTGEKPYKCPECGKSFS | | HX₂₀X₂₁X₂₂X₂₃X₂₄X₈X₉CX₁₀X₁₁CX₁₂X₁₃X₁₄X₁₅X₁₆SKKALTEHX₁₇X₁₈ | |
| acc | AGG CAC | | SKKALTEHQRTHTGEKPYKCPEC | | X₁₉HX₂₀X₂₁X₂₂X₂₃X₂₄X₈X₉CX₁₀X₁₁CX₁₂X₁₃X₁₄X₁₅X₁₆RSDHLTNHX₁₇ | |
| | ACC | | GKSFSRSDHLTNHQRTHTGEKPY | | X₁₈X₁₉HX₂₀X₂₁X₂₂X₂₃X₂₄X₈X₉CX₁₀X₁₁CX₁₂X₁₃X₁₄X₁₅X₁₆SKKHLAEH | |
| | | | KCPECGKSFSSKKHLAEHQRTHT | | X₁₇X₁₈X₁₉HX₂₀X₂₁X₂₂X₂₃X₂₄X₈X₉CX₁₀X₁₁CX₁₂X₁₃X₁₄X₁₅X₁₆QRAHLE | |
| | | | GEKPYKCPECGKSFSQRAHLERH | | RHX₁₇X₁₈X₁₉HX₂₀X₂₁X₂₂X₂₃X₂₄X₈X₉CX₁₀X₁₁CX₁₂X₁₃X₁₄X₁₅X₁₆TKNS | |
| | | | QRTHTGEKPYKCPECGKSFSTKN | | LTEHX₁₇X₁₈X₁₉HX₂₀X₂₁X₂₂X₂₃X₂₄X₈X₉CX₁₀X₁₁CX₁₂X₁₃X₁₄X₁₅X₁₆TS | |
| | | | SLTEHQRTHTGEKPYKCPECGKS | | GELVRHX₁₇X₁₈X₁₉HX₂₀X₂₁X₂₂X₂₃X₂₄X₂₅X₂₆X₂₇X₂₈X₂₉X₃₀ | |
| | | | FSTSGELVRHQRTHTGEKPTGKK | | | |
| | | | TS | | | |
| ctggaccca | CTG GAC | 1256 | LEPGEKPYKCPECGKSFSDCRDL | 1805 | X₁X₂X₃X₄X₅X₆X₇X₈X₉CX₁₀X₁₁CX₁₂X₁₃X₁₄X₁₅X₁₆DCRDLARHX₁₇X₁₈X₁₉ | 2354 |
| ggcacacct | CCA GGC | | ARHQRTHTGEKPYKCPECGKSFS | | HX₂₀X₂₁X₂₂X₂₃X₂₄X₈X₉CX₁₀X₁₁CX₁₂X₁₃X₁₄X₁₅X₁₆TKNSLTEHX₁₇X₁₈ | |
| gcc | ACA CCT | | TKNSLTEHQRTHTGEKPYKCPEC | | X₁₉HX₂₀X₂₁X₂₂X₂₃X₂₄X₈X₉CX₁₀X₁₁CX₁₂X₁₃X₁₄X₁₅X₁₆SPADLTRHX₁₇ | |
| | GCC | | GKSFSSPADLTRHQRTHTGEKPY | | X₁₈X₁₉HX₂₀X₂₁X₂₂X₂₃X₂₄X₈X₉CX₁₀X₁₁CX₁₂X₁₃X₁₄X₁₅X₁₆DPGHLVRH | |
| | | | KCPECGKSFSDPGHLVRHQRTHT | | X₁₇X₁₈X₁₉HX₂₀X₂₁X₂₂X₂₃X₂₄X₈X₉CX₁₀X₁₁CX₁₂X₁₃X₁₄X₁₅X₁₆TSHSLT | |
| | | | GEKPYKCPECGKSFSTSHSLTEH | | EHX₁₇X₁₈X₁₉HX₂₀X₂₁X₂₂X₂₃X₂₄X₈X₉CX₁₀X₁₁CX₁₂X₁₃X₁₄X₁₅X₁₆DPGN | |
| | | | QRTHTGEKPYKCPECGKSFSDPG | | LVRHX₁₇X₁₈X₁₉HX₂₀X₂₁X₂₂X₂₃X₂₄X₈X₉CX₁₀X₁₁CX₁₂X₁₃X₁₄X₁₅X₁₆RN | |
| | | | NLVRHQRTHTGEKPYKCPECGKS | | DALTEHX₁₇X₁₈X₁₉HX₂₀X₂₁X₂₂X₂₃X₂₄X₂₅X₂₆X₂₇X₂₈X₂₉X₃₀ | |
| | | | FSRNDALTEHQRTHTGEKPTGKK | | | |
| | | | TS | | | |
| gcccccact | GCC CCC | 1257 | LEPGEKPYKCPECGKSFSRSDKL | 1806 | X₁X₂X₃X₄X₅X₆X₇X₈X₉CX₁₀X₁₁CX₁₂X₁₃X₁₄X₁₅X₁₆RSDKLVRHX₁₇X₁₈X₁₉ | 2355 |
| ggcacacct | ACT GGC | | VRHQRTHTGEKPYKCPECGKSFS | | HX₂₀X20X₂₂X₂₃X₂₄X₈X₉CX₁₀X₁₁CX₁₂X₁₃X₁₄X₁₅X₁₆TKNSLTEHX₁₇X₁₈ | |
| ggg | ACA CCT | | TKNSLTEHQRTHTGEKPYKCPEC | | X₁₉HX₂₀X₂₁X₂₂X₂₃X₂₄X₈X₉CX₁₀X₁₁CX₁₂X₁₃X₁₄X₁₅X₁₆SPADLTRHX₁₇ | |
| | GGG | | GKSFSSPADLTRHQRTHTGEKPY | | X₁₈X₁₉HX₂₀X₂₁X₂₂X₂₃X₂₄X₈X₉CX₁₀X₁₁CX₁₂X₁₃X₁₄X₁₅X₁₆DPGHLVRH | |
| | | | KCPECGKSFSDPGHLVRHQRTHT | | X₁₇X₁₈X₁₉HX₂₀X₂₁X₂₂X₂₃X₂₄X₈X₉CX₁₀X₁₁CX₁₂X₁₃X₁₄X₁₅X₁₆THLDL | |
| | | | GEKPYKCPECGKSFSTHLDLIRH | | RHX₁₇X₁₈X₁₉HX₂₀X₂₁X₂₂X₂₃X₂₄X₈X₉CX₁₀X₁₁CX₁₂X₁₃X₁₄X₁₅X₁₆SKKH | |
| | | | QRTHTGEKPYKCPECGKSFSSKK | | LAEHX₁₇X₁₈X₁₉HX₂₀X₂₁X₂₂X₂₃X₂₄X₈X₉CX₁₀X₁₁CX₁₂X₁₃X₁₄X₁₅X₁₆DC | |
| | | | HLAEHQRTHTGEKPYKCPECGKS | | RDLARHX₁₇X₁₈X₁₉HX₂₀X₂₁X₂₂X₂₃X₂₄X₂₅X₂₆X₂₇X₂₈X₂₉X₃₀ | |
| | | | FSDCRDLARHQRTHTGEKPTGKK | | | |
| | | | TS | | | |
| cctgccccc | CCT GCC | 1258 | LEPGEKPYKCPECGKSFSTKNSL | 1807 | X₁X₂X₃X₄X₅X₆X₇X₈X₉CX₁₀X₁₁CX₁₂X₁₃X₁₄X₁₅X₁₆TKNSLTEHX₁₇X₁₈X₁₉ | 2356 |
| actggcaca | CCC ACT | | TEHQRTHTGEKPYKCPECGKSFS | | HX₂₀X₂₁X₂₂X₂₃X₂₄X₈X₉CX₁₀X₁₁CX₁₂X₁₃X₁₄X₁₅X₁₆SPADLTRHX₁₇X₁₈ | |
| cct | GGC ACA | | SPADLTRHQRTHTGEKPYKCPEC | | X₁₉HX₂₀X₂₁X₂₂X₂₃X₂₄X₈X₉CX₁₀X₁₁CX₁₂X₁₃X₁₄X₁₅X₁₆DPGHLVRHX₁₇ | |
| | CCT | | GKSFSDPGHLVRHQRTHTGEKPY | | X₁₈X₁₉HX₂₀X₂₁X₂₂X₂₃X₂₄X₈X₉CX₁₀X₁₁CX₁₂X₁₃X₁₄X₁₅X₁₆THLDLIRH | |
| | | | KCPECGKSFSTHLDLIRHQRTHT | | X₁₇X₁₈X₁₉HX₂₀X₂₁X₂₂X₂₃X₂₄X₈X₉CX₁₀X₁₁CX₁₂X₁₃X₁₄X₁₅X₁₆SKKHLA | |
| | | | GEKPYKCPECGKSFSSKKHLAEH | | EHX₁₇X₁₈X₁₉HX₂₀X₂₁X₂₂X₂₃X₂₄X₈X₉CX₁₀X₁₁CX₁₂X₁₃X₁₄X₁₅X₁₆DCRD | |
| | | | QRTHTGEKPYKCPECGKSFSDCR | | LARHX₁₇X₁₈X₁₉HX₂₀X₂₁X₂₂X₂₃X₂₄X₈X₉CX₁₀X₁₁CX₁₂X₁₃X₁₄X₁₅X₁₆TK | |
| | | | DLARHQRTHTGEKPYKCPECGKS | | NSLTEHX₁₇X₁₃X₁₉HX₂₀X₂₁X₂₂X₂₃X₂₄X₂₅X₂₆X₂₇X₂₈X₂₉X₃₀ | |
| | | | FSTKNSLTEHQRTHTGEKPTGKK | | | |
| | | | TS | | | |
| ggcacacct | GGC ACA | 1259 | LEPGEKPYKCPECGKSFSDPGHL | 1808 | X₁X₂X₃X₄X₅X₆X₇X₈X₉CX₁₀X₁₁CX₁₂X₁₃X₁₄X₁₅X₁₆DPGHLVRHX₁₇X₁₈X₁₉ | 2357 |
| gcccccact | CCT GCC | | VRHQRTHTGEKPYKCPECGKSFS | | HX₂₀X₂₁X₂₂X₂₃X₂₄X₈X₉CX₁₀X₁₁CX₁₂X₁₃X₁₄X₁₅X₁₆THLDLIRHX₁₇X₁₈ | |
| ggc | CCC ACT | | THLDLIRHQRTHTGEKPYKCPEC | | X₁₉HX₂₀X₂₁X₂₂X₂₃X₂₄X₈X₉CX₁₀X₁₁CX₁₂X₁₃X₁₄X₁₅X₁₆SKKHLAEHX₁₇ | |
| | GGC | | GKSFSSKKHLAEHQRTHTGEKPY | | X₁₈X₁₉HX₂₀X₂₁X₂₂X₂₃X₂₄X₈X₉CX₁₀X₁₁CX₁₂X₁₃X₁₄X₁₅X₁₆DCRDLARH | |
| | | | KCPECGKSFSDCRDLARHQRTHT | | X₁₇X₁₈X₁₉HX₂₀X₂₁X₂₂X₂₃X₂₄X₈X₉CX₁₀X₁₁CX₁₂X₁₃X₁₄X₁₅X₁₆TKNSLT | |
| | | | GEKPYKCPECGKSFSTKNSLTEH | | EHX₁₇X₁₈X₁₉HX₂₀X₂₁X₂₂X₂₃X₂₄X₈X₉CX₁₀X₁₁CX₁₂X₁₃X₁₄X₁₅X₁₆SPAD | |
| | | | QRTHTGEKPYKCPECGKSFSSPA | | LTRHX₁₇X₁₈X₁₉HX₂₀X₂₁X₂₂X₂₃X₂₄X₈X₉CX₁₀X₁₁CX₁₂X₁₃X₁₄X₁₅X₁₆DP | |
| | | | DLTRHQRTHTGEKPYKCPECGKS | | GHLVRHX₁₇X₁₈X₁₉HX₂₀X₂₁X₂₂X₂₃X₂₄X₂₅X₂₆X₂₇X₂₈X₂₉X₃₀ | |
| | | | FSDPGHLVRHQRTHTGEKPTGKK | | | |
| | | | TS | | | |
| acacctgcc | ACA CCT | 1260 | LEPGEKPYKCPECGKSFSSPADL | 1809 | X₁X₂X₃X₄X₅X₆X₇X₈X₉CX₁₀X₁₁CX₁₂X₁₃X₁₄X₁₅X₁₆SPADLTRHX₁₇X₁₈X₁₉ | 2358 |
| cccactggc | GCC CCC | | TRHQRTHTGEKPYKCPECGKSFS | | HX₂₀X₂₁X₂₂X₂₃X₂₄X₈X₉CX₁₀X₁₁CX₁₂X₁₃X₁₄X₁₅X₁₆DPGHLVRHX₁₇X₁₈ | |
| aca | ACT GGC | | DPGHLVRHQRTHTGEKPYKCPEC | | X₁₉HX₂₀X₂₁X₂₂X₂₃X₂₄X₈X₉CX₁₀X₁₁CX₁₂X₁₃X₁₄X₁₅X₁₆THLDLIRHX₁₇ | |
| | ACA | | GKSFSTHLDLIRHQRTHTGEKPY | | X₁₈X₁₉HX₂₀X₂₁X₂₂X₂₃X₂₄X₈X₉CX₁₀X₁₁CX₁₂X₁₃X₁₄X₁₅X₁₆SKKHLAEH | |
| | | | KCPECGKSFSSKKHLAEHQRTHT | | X₁₇X₁₈X₁₉HX₂₀X₂₁X₂₂X₂₃X₂₄X₈X₉CX₁₀X₁₁CX₁₂X₁₃X₁₄X₁₅X₁₆DCRDLA | |
| | | | GEKPYKCPECGKSFSDCRDLARH | | RHX₁₇X₁₈X₁₉HX₂₀X₂₁X₂₂X₂₃X₂₄X₈X₉CX₁₀X₁₁CX₁₂X₁₃X₁₄X₁₅X₁₆TKNS | |
| | | | QRTHTGEKPYKCPECGKSFSTKN | | LTEHX₁₇X₁₈X₁₉HX₂₀X₂₁X₂₂X₂₃X₂₄X₈X₉CX₁₀X₁₁CX₁₂X₁₃X₁₄X₁₅X₁₆SP | |
| | | | SLTEHQRTHTGEKPYKCPECGKS | | ADLTRHX₁₇X₁₈X₁₉HX₂₀X₂₁X₂₂X₂₃X₂₄X₂₅X₂₆X₂₇X₂₈X₂₉X₃₀ | |
| | | | FSSPADLTRHQRTHTGEKPTGKK | | | |
| | | | TS | | | |
| ccaggcaca | CCA GGC | 1261 | LEPGEKPYKCPECGKSFSTHLDL | 1810 | X₁X₂X₃X₄X₅X₆X₇X₈X₉CX₁₀X₁₁CX₁₂X₁₃X₁₄X₁₅X₁₆THLDLIRHX₁₇X₁₈X₁₉ | 2359 |
| cctgccccc | ACA CCT | | IRHQRTHTGEKPYKCPECGKSFS | | HX₂₀X₂₁X₂₂X₂₃X₂₄X₈X₉CX₁₀X₁₁CX₁₂X₁₃X₁₄X₁₅X₁₆SKKHLAEHX₁₇X₁₈ | |
| act | GCC CCC | | SKKHLAEHQRTHTGEKPYKCPEC | | X₁₉HX₂₀X₂₁X₂₂X₂₃X₂₄X₈X₉CX₁₀X₁₁CX₁₂X₁₃X₁₄X₁₅X₁₆DCRDLARHX₁₇ | |
| | ACT | | GKSFSDCRDLARHQRTHTGEKPY | | X₁₈X₁₉HX₂₀X₂₁X₂₂X₂₃X₂₄X₈X₉CX₁₀X₁₁CX₁₂X₁₃X₁₄X₁₅X₁₆TKNSLTEH | |
| | | | KCPECGKSFSTKNSLTEHQRTHT | | X₁₇X₁₈X₁₉HX₂₀X₂₁X₂₂X₂₃X₂₄X₈X₉CX₁₀X₁₁CX₁₂X₁₃X₁₄X₁₅X₁₆SPADLT | |
| | | | GEKPYKCPECGKSFSSPADLTRH | | RHX₁₇X₁₈X₁₉HX₂₀X₂₁X₂₂X₂₃X₂₄X₈X₉CX₁₀X₁₁CX₁₂X₁₃X₁₄X₁₅X₁₆DPGH | |
| | | | QRTHTGEKPYKCPECGKSFSDPG | | LVRHX₁₇X₁₈X₁₉HX₂₀X₂₁X₂₂X₂₃X₂₄X₈X₉CX₁₀X₁₁CX₁₂X₁₃X₁₄X₁₅X₁₆TS | |
| | | | HLVRHQRTHTGEKPYKCPECGKS | | HSLTEHX₁₇X₁₈X₁₉HX₂₀X₂₁X₂₂X₂₃X₂₄X₂₅X₂₆X₂₇X₂₈X₂₉X₃₀ | |
| | | | FSTSHSLTEHQRTHTGEKPTGKK | | | |
| | | | TS | | | |
| cccactggc | CCC ACT | 1262 | LEPGEKPYKCPECGKSFSSKKAL | 1811 | X₁X₂X₃X₄X₅X₆X₇X₈X₉CX₁₀X₁₁CX₁₂X₁₃X₁₄X₁₅X₁₆SKKALTEHX₁₇X₁₈X₁₉ | 2360 |
| acacctggg | GGC ACA | | TEHQRTHTGEKPYKCPECGKSFS | | HX₂₀X₂₁X₂₂X₂₃X₂₄X₈X₉CX₁₀X₁₁CX₁₂X₁₃X₁₄X₁₅X₁₆RSDKLVRHX₁₇X₁₈ | |
| cac | CCT ggg | | RSDKLVRHQRTHTGEKPYKCPEC | | X₁₉HX₂₀X₂₁X₂₂X₂₃X₂₄X₈X₉CX₁₀X₁₁CX₁₂X₁₃X₁₄X₁₅X₁₆TKNSLTEHX₁₇ | |
| | CAC | | GKSFSTKNSLTEHQRTHTGEKPY | | X₁₈X₁₉HX₂₀X₂₁X₂₂X₂₃X₂₄X₈X₉CX₁₀X₁₁CX₁₂X₁₃X₁₄X₁₅X₁₆SPADLTRH | |
| | | | KCPECGKSFSSPADLTRHQRTHT | | X₁₇X₁₈X₁₉HX₂₀X₂₁X₂₂X₂₃X₂₄X₈X₉CX₁₀X₁₁CX₁₂X₁₃X₁₄X₁₅X₁₆DPGHLV | |
| | | | GEKPYKCPECGKSFSDPGHLVRH | | RHX₁₇X₁₈X₁₉HX₂₀X₂₁X₂₂X₂₃X₂₄X₈X₉CX₁₀X₁₁CX₁₂X₁₃X₁₄X₁₅X₁₆THLD | |
| | | | QRTHTGEKPYKCPECGKSFSTHL | | LIRHX₁₇X₁₈X₁₉HX₂₀X₂₁X₂₂X₂₃X₂₄X₈X₉CX₁₀X₁₁CX₁₂X₁₃X₁₄X₁₅X₁₆SK | |
| | | | DLIRHQRTHTGEKPYKCPECGKS | | KHLAEHX₁₇X₁₈X₁₉HX₂₀X₂₁X₂₂X₂₃X₂₄X₂₅X₂₆X₂₇X₂₈X₂₉X₃₀ | |
| | | | FSSKKHLAEHQRTHTGEKPTGKK | | | |
| | | | TS | | | |
| gacccaggc | GAC CCA | 1263 | LEPGEKPYKCPECGKSFSSKKHL | 1812 | X₁X₂X₃X₄X₅X₆X₇X₈X₉CX₁₀X₁₁CX₁₂X₁₃X₁₄X₁₅X₁₆SKKHLAEHX₁₇X₁₈X₁₉ | 2361 |
| acacctgcc | GGC ACA | | AEHQRTHTGEKPYKCPECGKSFS | | HX₂₀X₂₁X₂₂X₂₃X₂₄X₈X₉CX₁₀X₁₁CX₁₂X₁₃X₁₄X₁₅X₁₆DCRDLARHX₁₇X₁₈ | |
| ccc | CCT GCC | | DCRDLARHQRTHTGEKPYKCPEC | | X₁₉HX₂₀X₂₁X₂₂X₂₃X₂₄X₈X₉CX₁₀X₁₁CX₁₂X₁₃X₁₄X₁₅X₁₆TKNSLTEHX₁₇ | |
| | CCC | | GKSFSTKNSLTEHQRTHTGEKPY | | X₁₈X₁₉HX₂₀X₂₁X₂₂X₂₃X₂₄X₈X₉CX₁₀X₁₁CX₁₂X₁₃X₁₄X₁₅X₁₆SPADLTRH | |
| | | | KCPECGKSFSSPADLTRHQRTHT | | X₁₇X₁₈X₁₉HX₂₀X₂₁X₂₂X₂₃X₂₄X₈X₉CX₁₀X₁₁CX₁₂X₁₃X₁₄X₁₅X₁₆DPGHLV | |
| | | | GEKPYKCPECGKSFSDPGHLVRH | | RHX₁₇X₁₈X₁₉HX₂₀X₂₁X₂₂X₂₃X₂₄X₈X₉CX₁₀X₁₁CX₁₂X₁₃X₁₄X₁₅X₁₆TSHS | |
| | | | QRTHTGEKPYKCPECGKSFSTSH | | LTEHX₁₇X₁₈X₁₉HX₂₀X₂₁X₂₂X₂₃X₂₄X₈X₉CX₁₀X₁₁CX₁₂X₁₃X₁₄X₁₅X₁₆DP | |
| | | | SLTEHQRTHTGEKPYKCPECGKS | | GNLVRHX₁₇X₁₈X₁₉HX₂₀X₂₁X₂₂X₂₃X₂₄X₂₅X₂₆X₂₇X₂₈X₂₉X₃₀ | |
| | | | FSDPGNLVRHQRTHTGEKPTGKK | | | |
| | | | TS | | | |
| ccactggca | CCA CTG | 1264 | LEPGEKPYKCPECGKSFSSPADL | 1813 | X₁X₂X₃X₄X₅X₆X₇X₈X₉CX₁₀X₁₁CX₁₂X₁₃X₁₄X₁₅X₁₆SPADLTRHX₁₇X₁₈X₁₉ | 2362 |
| cacctgggc | GCA CAC | | TRHQRTHTGEKPYKCPECGKSFS | | HX₂₀X₂₁X₂₂X₂₃X₂₄X₈X₉CX₁₀X₁₁CX₁₂X₁₃X₁₄X₁₅X₁₆DPGHLVRHX₁₇X₁₈ | |
| aca | CTG GGC | | DPGHLVRHQRTHTGEKPYKCPEC | | X₁₉HX₂₀X₂₁X₂₂X₂₃X₂₄X₈X₉CX₁₀X₁₁CX₁₂X₁₃X₁₄X₁₅X₁₆RNDALTEHX₁₇ | |
| | ACA | | GKSFSRNDALTEHQRTHTGEKPY | | X₁₈X₁₉HX₂₀X₂₁X₂₂X₂₃X₂₄X₈X₉CX₁₀X₁₁CX₁₂X₁₃X₁₄X₁₅X₁₆SKKALTEH | |
| | | | KCPECGKSFSSKKALTEHQRTHT | | X₁₇X₁₈X₁₉HX₂₀X₂₁X₂₂X₂₃X₂₄X₈X₉CX₁₀X₁₁CX₁₂X₁₃X₁₄X₁₅X₁₆QSGDLR | |
| | | | GEKPYKCPECGKSFSQSGDLRRH | | RHX₁₇X₁₈X₁₉HX₂₀X₂₁X₂₂X₂₃X₂₄X₈X₉CX₁₀X₁₁CX₁₂X₁₃X₁₄X₁₅X₁₆RNDA | |
| | | | QRTHTGEKPYKCPECGKSFSRND | | LTEHX₁₇X₁₈X₁₉HX₂₀X₂₁X₂₂X₂₃X₂₄X₈X₉CX₁₀X₁₁CX₁₂X₁₃X₁₄X₁₅X₁₆TS | |
| | | | ALTEHQRTHTGEKPYKCPECGKS | | HSLTEHX₁₇X₁₈X₁₉HX₂₀X₂₁X₂₂X₂₃X₂₄X₂₅X₂₆X₂₇X₂₈X₂₉X₃₀ | |
| | | | FSTSHSLTEHQRTHTGEKPTGKK | | | |
| | | | TS | | | |
| gcacacctg | GCA CAC | 1265 | LEPGEKPYKCPECGKSFSQSGDL | 1814 | X₁X₂X₃X₄X₅X₆X₇X₈X₉CX₁₀X₁₁CX₁₂X₁₃X₁₄X₁₅X₁₆QSGDLRRHX₁₇X₁₈X₁₉ | 2363 |
| cccccactg | CTG CCC | | RRHQRTHTGEKPYKCPECGKSFS | | HX₂₀X₂₁X₂₂X₂₃X₂₄X₈X₉CX₁₀X₁₁CX₁₂X₁₃X₁₄X₁₅X₁₆RNDALTEHX₁₇X₁₈ | |
| gca | CCA CTG | | RNDALTEHQRTHTGEKPYKCPEC | | X₁₉HX₂₀X₂₁X₂₂X₂₃X₂₄X₈X₉CX₁₀X₁₁CX₁₂X₁₃X₁₄X₁₅X₁₆TSHSLTEHX₁₇ | |
| | GCA | | GKSFSTSHSLTEHQRTHTGEKPY | | X₁₈X₁₉HX₂₀X₂₁X₂₂X₂₃X₂₄X₈X₉CX₁₀X₁₁CX₁₂X₁₃X₁₄X₁₅X₁₆SKKHLAEH | |
| | | | KCPECGKSFSSKKHLAEHQRTHT | | X₁₇X₁₈X₁₉HX₂₀X₂₁X₂₂X₂₃X₂₄X₈X₉CX₁₀X₁₁CX₁₂X₁₃X₁₄X₁₅X₁₆RNDALT | |
| | | | GEKPYKCPECGKSFSRNDALTEH | | EHX₁₇X₁₈X₁₉HX₂₀X₂₁X₂₂X₂₃X₂₄X₈X₉CX₁₀X₁₁CX₁₂X₁₃X₁₄X₁₅X₁₆SKKA | |
| | | | QRTHTGEKPYKCPECGKSFSSKK | | LTEHX₁₇X₁₈X₁₉HX₂₀X₂₁X₂₂X₂₃X₂₄X₈X₉CX₁₀X₁₁CX₁₂X₁₃X₁₄X₁₅X₁₆QS | |
| | | | ALTEHQRTHTGEKPYKCPECGKS | | GDLRRHX₁₇X₁₈X₁₉HX₂₀X₂₁X₂₂X₂₃X₂₄X₂₅X₂₆X₂₇X₂₈X₂₉X₃₀ | |
| | | | FSQSGDLRRHQRTHTGEKPTGKK | | | |
| | | | TS | | | |
| ctgccccca | CTG CCC | 1266 | LEPGEKPYKCPECGKSFSRNDAL | 1815 | X₁X₂X₃X₄X₅X₆X₇X₈X₉CX₁₀X₁₁CX₁₂X₁₃X₁₄X₁₅X₁₆RNDALTEHX₁₇X₁₈X₁₉ | 2364 |
| ctggcacac | CCA CTG | | TEHQRTHTGEKPYKCPECGKSFS | | HX₂₀X₂₁X₂₂X₂₃X₂₄X₈X₉CX₁₀X₁₁CX₁₂X₁₃X₁₄X₁₅X₁₆SKKALTEHX₁₇X₁₈ | |
| ctg | GCA CAC | | SKKALTEHQRTHTGEKPYKCPEC | | X₁₉HX₂₀X₂₁X₂₂X₂₃X₂₄X₈X₉CX₁₀X₁₁CX₁₂X₁₃X₁₄X₁₅X₁₆QSGDLRRHX₁₇ | |
| | CTG | | GKSFSQSGDLRRHQRTHTGEKPY | | X₁₈X₁₉HX₂₀X₂₁X₂₂X₂₃X₂₄X₈X₉CX₁₀X₁₁CX₁₂X₁₃X₁₄X₁₅X₁₆RNDALTEH | |
| | | | KCPECGKSFSRNDALTEHQRTHT | | X₁₇X₁₈X₁₉HX₂₀X₂₁X₂₂X₂₃X₂₄X₈X₉CX₁₀X₁₁CX₁₂X₁₃X₁₄X₁₅X₁₆TSHSLT | |
| | | | GEKPYKCPECGKSFSTSHSLTEH | | EHX₁₇X₁₈X₁₉HX₂₀X₂₁X₂₂X₂₃X₂₄X₈X₉CX₁₀X₁₁CX₁₂X₁₃X₁₄X₁₅X₁₆SKKH | |
| | | | QRTHTGEKPYKCPECGKSFSSKK | | LAEHX₁₇X₁₈X₁₉HX₂₀X₂₁X₂₂X₂₃X₂₄X₈X₉CX₁₀X₁₁CX₁₂X₁₃X₁₄X₁₅X₁₆RN | |
| | | | HLAEHQRTHTGEKPYKCPECGKS | | DALTEHX₁₇X₁₈X₁₉HX₂₀X₂₁X₂₂X₂₃X₂₄X₂₅X₂₆X₂₇X₂₈X₂₉X₃₀ | |
| | | | FSRNDALTEHQRTHTGEKPTGKK | | | |
| | | | TS | | | |
| cccccactg | CCC CCA | 1267 | LEPGEKPYKCPECGKSFSDPGHL | 1816 | X₁X₂X₃X₄X₅X₆X₇X₈X₉CX₁₀X₁₁CX₁₂X₁₃X₁₄X₁₅X₁₆DPGHLVRHX₁₇X₁₈X₁₉ | 2365 |
| gcacacctg | CTG GCA | | VRHQRTHTGEKPYKCPECGKSFS | | HX₂₀X₂₁X₂₂X₂₃X₂₄X₈X₉CX₁₀X₁₁CX₁₂X₁₃X₁₄X₁₅X₁₆RNDALTEHX₁₇X₁₈ | |
| ggc | CAC CTG | | RNDALTEHQRTHTGEKPYKCPEC | | X₁₉HX₂₀X₂₁X₂₂X₂₃X₂₄X₈X₉CX₁₀X₁₁CX₁₂X₁₃X₁₄X₁₅X₁₆SKKALTEHX₁₇ | |
| | GGC | | GKSFSSKKALTEHQRTHTGEKPY | | X₁₈X₁₉HX₂₀X₂₁X₂₂X₂₃X₂₄X₈X₉CX₁₀X₁₁CX₁₂X₁₃X₁₄X₁₅X₁₆QSGDLRRH | |
| | | | KCPECGKSFSQSGDLRRHQRTHT | | X₁₇X₁₈X₁₉HX₂₀X₂₁X₂₂X₂₃X₂₄X₈X₉CX₁₀X₁₁CX₁₂X₁₃X₁₄X₁₅X₁₆RNDALT | |
| | | | GEKPYKCPECGKSFSRNDALTEH | | EHX₁₇X₁₈X₁₉HX₂₀X₂₁X₂₂X₂₃X₂₄X₈X₉CX₁₀X₁₁CX₁₂X₁₃X₁₄X₁₅X₁₆TSHS | |
| | | | QRTHTGEKPYKCPECGKSFSTSH | | LTEHX₁₇X₁₈X₁₉HX₂₀X₂₁X₂₂X₂₃X₂₄X₈X₉CX₁₀X₁₁CX₁₂X₁₃X₁₄X₁₅X₁₆SK | |
| | | | SLTEHQRTHTGEKPYKCPECGKS | | KHLAEHX₁₇X₁₈X₁₉HX₂₀X₂₁X₂₂X₂₃X₂₄X₂₅X₂₆X₂₇X₂₈X₂₉X₃₀ | |
| | | | FSSKKHLAEHQRTHTGEKPTGKK | | | |
| | | | TS | | | |
| caggcacac | CAG GCA | 1268 | LEPGEKPYKCPECGKSFSRNDAL | 1817 | X₁X₂X₃X₄X₅X₆X₇X₈X₉CX₁₀X₁₁CX₁₂X₁₃X₁₄X₁₅X₁₆RNDALTEHX₁₇X₁₈X₁₉ | 2366 |
| ctgccccca | CAC CTG | | TEHQRTHTGEKPYKCPECGKSFS | | HX₂₀X₂₁X₂₂X₂₃X₂₄X₈X₉CX₁₀X₁₁CX₁₂X₁₃X₁₄X₁₅X₁₆TSHSLTEHX₁₇X₁₈ | |
| ctg | CCC CCA | | TSHSLTEHQRTHTGEKPYKCPEC | | X₁₉HX₂₀X₂₁X₂₂X₂₃X₂₄X₈X₉CX₁₀X₁₁CX₁₂X₁₃X₁₄X₁₅X₁₆SKKHLAEHX₁₇ | |
| | CTG | | GKSFSSKKHLAEHQRTHTGEKPY | | X₁₈X₁₉HX₂₀X₂₁X₂₂X₂₃X₂₄X₈X₉CX₁₀X₁₁CX₁₂X₁₃X₁₄X₁₅X₁₆RNDALTEH | |
| | | | KCPECGKSFSRNDALTEHQRTHT | | X₁₇X₁₈X₁₉HX₂₀X₂₁X₂₂X₂₃X₂₄X₈X₉CX₁₀X₁₁CX₁₂X₁₃X₁₄X₁₅X₁₆SKKALT | |
| | | | GEKPYKCPECGKSFSSKKALTEH | | EHX₁₇X₁₈X₁₉HX₂₀X₂₁X₂₂X₂₃X₂₄X₈X₉CX₁₀X₁₁CX₁₂X₁₃X₁₄X₁₅X₁₆QSGD | |
| | | | QRTHTGEKPYKCPECGKSFSQSG | | LRRHX₁₇X₁₈X₁₉HX₂₀X₂₁X₂₂X₂₃X₂₄X₈X₉CX₁₀X₁₁CX₁₂X₁₃X₁₄X₁₅X₁₆RA | |
| | | | DLRRHQRTHTGEKPYKCPECGKS | | DNLTEHX₁₇X₁₈X₁₉HX₂₀X₂₁X₂₂X₂₃X₂₄X₂₅X₂₆X₂₇X₂₈X₂₉X₃₀ | |
| | | | FSRADNLTEHQRTHTGEKPTGKK | | | |
| | | | TS | | | |
| tggacccag | TGG ACC | 1269 | LEPGEKPYKCPECGKSFSSKKHL | 1818 | X₁X₂X₃X₄X₅X₆X₇X₈X₉CX₁₀X₁₁CX₁₂X₁₃X₁₄X₁₅X₁₆SKKHLAEHX₁₇X₁₈X₁₉ | 2367 |
| gcacacctg | CAG GCA | | AEHQRTHTGEKPYKCPECGKSFS | | HX₂₀X₂₁X₂₂X₂₃X₂₄X₈X₉CX₁₀X₁₁CX₁₂X₁₃X₁₄X₁₅X₁₆RNDALTEHX₁₇X₁₈ | |
| ccc | CAC CTG | | RNDALTEHQRTHTGEKPYKCPEC | | X₁₉HX₂₀X₂₁X₂₂X₂₃X₂₄X₈X₉CX₁₀X₁₁CX₁₂X₁₃X₁₄X₁₅X₁₆SKKALTEHX₁₇ | |
| | CCC | | GKSFSSKKALTEHQRTHTGEKPY | | X₁₈X₁₉HX₂₀X₂₁X₂₂X₂₃X₂₄X₈X₉CX₁₀X₁₁CX₁₂X₁₃X₁₄X₁₅X₁₆QSGDLRRH | |
| | | | KCPECGKSFSQSGDLRRHQRTHT | | X₁₇X₁₈X₁₉HX₂₀X₂₁X₂₂X₂₃X₂₄X₈X₉CX₁₀X₁₁CX₁₂X₁₃X₁₄X₁₅X₁₆RADNLT | |
| | | | GEKPYKCPECGKSFSRADNLTEH | | EHX₁₇X₁₈X₁₉HX₂₀X₂₁X₂₂X₂₃X₂₄X₈X₉CX₁₀X₁₁CX₁₂X₁₃X₁₄X₁₅X₁₆DKKD | |
| | | | QRTHTGEKPYKCPECGKSFSDKK | | LTRHX₁₇X₁₈X₁₉HX₂₀X₂₁X₂₂X₂₃X₂₄X₈X₉CX₁₀X₁₁CX₁₂X₁₃X₁₄X₁₅X₁₆RS | |
| | | | DLTRHQRTHTGEKPYKCPECGKS | | DHLTTHX₁₇X₁₈X₁₉HX₂₀X₂₁X₂₂X₂₃X₂₄X₂₅X₂₆X₂₇X₂₈X₂₉X₃₀ | |
| | | | FSRSDHLTTHQRTHTGEKPTGKK | | | |
| | | | TS | | | |
| acccaggca | ACC CAG | 1270 | LEPGEKPYKCPECGKSFSTSHSL | 1819 | X₁X₂X₃X₄X₅X₆X₇X₈X₉CX₁₀X₁₁CX₁₂X₁₃X₁₄X₁₅X₁₆TSHSLTEHX₁₇X₁₈X₁₉ | 2368 |
| cacctgccc | GCA CAC | | TEHQRTHTGEKPYKCPECGKSFS | | HX₂₀X₂₁X₂₂X₂₃X₂₄X₈X₉CX₁₀X₁₁CX₁₂X₁₃X₁₄X₁₅X₁₆SKKHLAEHX₁₇X₁₈ | |
| cca | CTG CCC | | SKKHLAEHQRTHTGEKPYKCPEC | | X₁₉HX₂₀X₂₁X₂₂X₂₃X₂₄X₈X₉CX₁₀X₁₁CX₁₂X₁₃X₁₄X₁₅X₁₆RNDALTEHX₁₇ | |
| | CCA | | GKSFSRNDALTEHQRTHTGEKPY | | X₁₈X₁₉HX₂₀X₂₁X₂₂X₂₃X₂₄X₈X₉CX₁₀X₁₁CX₁₂X₁₃X₁₄X₁₅X₁₆SKKALTEH | |
| | | | KCPECGKSFSSKKALTEHQRTHT | | X₁₇X₁₈X₁₉HX₂₀X₂₁X₂₂X₂₃X₂₄X₈X₉CX₁₀X₁₁CX₁₂X₁₃X₁₄X₁₅X₁₆QSGDLR | |
| | | | GEKPYKCPECGKSFSQSGDLRRH | | RHX₁₇X₁₈X₁₉HX₂₀X₂₁X₂₂X₂₃X₂₄X₈X₉CX₁₀X₁₁CX₁₂X₁₃X₁₄X₁₅X₁₆RADN | |
| | | | QRTHTGEKPYKCPECGKSFSRAD | | LTEHX₁₇X₁₈X₁₉HX₂₀X₂₁X₂₂X₂₃X₂₄X₈X₉CX₁₀X₁₁CX₁₂X₁₃X₁₄X₁₅X₁₆DK | |
| | | | NLTEHQRTHTGEKPYKCPECGKS | | KDLTRHX₁₇X₁₈X₁₉HX₂₀X₂₁X₂₂X₂₃X₂₄X₂₅X₂₆X₂₇X₂₈X₂₉X₃₀ | |
| | | | FSDKKDLTRHQRTHTGEKPTGKK | | | |
| | | | TS | | | |
| cacctgccc | CAC CTG | 1271 | LEPGEKPYKCPECGKSFSSKKAL | 1820 | X₁X₂X₃X₄X₅X₆X₇X₈X₉CX₁₀X₁₁CX₁₂X₁₃X₁₄X₁₅X₁₆SKKALTEHX₁₇X₁₈X₁₉ | 2369 |
| ccactggca | CCC CCA | | TEHQRTHTGEKPYKCPECGKSFS | | HX₂₀X₂₁X₂₂X₂₃X₂₄X₈X₉CX₁₀X₁₁CX₁₂X₁₃X₁₄X₁₅X₁₆QSGDLRRHX₁₇X₁₈ | |
| cac | CTG GCA | | QSGDLRRHQRTHTGEKPYKCPEC | | X₁₉HX₂₀X₂₁X₂₂X₂₃X₂₄X₈X₉CX₁₀X₁₁CX₁₂X₁₃X₁₄X₁₅X₁₆RNDALTEHX₁₇ | |
| | CAC | | GKSFSRNDALTEHQRTHTGEKPY | | X₁₈X₁₉HX₂₀X₂₁X₂₂X₂₃X₂₄X₈X₉CX₁₀X₁₁CX₁₂X₁₃X₁₄X₁₅X₁₆TSHSLTEH | |
| | | | KCPECGKSFSTSHSLTEHQRTHT | | X₁₇X₁₈X₁₉HX₂₀X₂₁X₂₂X₂₃X₂₄X₈X₉CX₁₀X₁₁CX₁₂X₁₃X₁₄X₁₅X₁₆SKKHLA | |
| | | | GEKPYKCPECGKSFSSKKHLAEH | | EHX₁₇X₁₈X₁₉HX₂₀X₂₁X₂₂X₂₃X₂₄X₈X₉CX₁₀X₁₁CX₁₂X₁₃X₁₄X₁₅X₁₆RNDA | |
| | | | QRTHTGEKPYKCPECGKSFSRND | | LTEHX₁₇X₁₈X₁₉HX₂₀X₂₁X₂₂X₂₃X₂₄X₈X₉CX₁₀X₁₁CX₁₂X₁₃X₁₄X₁₅X₁₆SK | |
| | | | ALTEHQRTHTGEKPYKCPECGKS | | KALTEHX₁₇X₁₈X₁₉HX₂₀X₂₁X₂₂X₂₃X₂₄X₂₅X₂₆X₂₇X₂₈X₂₉X₃₀ | |
| | | | FSSKKALTEHQRTHTGEKPTGKK | | | |
| | | | TS | | | |
| ccacctacc | CCA CCT | 1272 | LEPGEKPYKCPECGKSFSSRRTC | 1821 | X₁X₂X₃X₄X₅X₆X₇X₈X₉CX₁₀X₁₁CX₁₂X₁₃X₁₄X₁₅X₁₆SRRTCRAHX₁₇X₁₈X₁₉ | 2370 |
| attgcccat | ACC ATT | | RAHQRTHTGEKPYKCPECGKSFS | | HX₂₀X₂₁X₂₂X₂₃X₂₄X₈X₉CX₁₀X₁₁CX₁₂X₁₃X₁₄X₁₅X₁₆TSGNLTEHX₁₇X₁₈ | |
| cgt | GCC CAT | | TSGNLTEHQRTHTGEKPYKCPEC | | X₁₉HX₂₀X₂₁X₂₂X₂₃X₂₄X₈X₉CX₁₀X₁₁CX₁₂X₁₃X₁₄X₁₅X₁₆DCRDLARHX₁₇ | |
| | CGT | | GKSFSDCRDLARHQRTHTGEKPY | | X₁₈X₁₉HX₂₀X₂₁X₂₂X₂₃X₂₄X₈X₉CX₁₀X₁₁CX₁₂X₁₃X₁₄X₁₅X₁₆HKNALQNH | |
| | | | KCPECGKSFSHKNALQNHQRTHT | | X₁₇X₁₈X₁₉HX₂₀X₂₁X₂₂X₂₃X₂₄X₈X₉CX₁₀X₁₁CX₁₂X₁₃X₁₄X₁₅X₁₆DKKDLT | |
| | | | GEKPYKCPECGKSFSDKKDLTRH | | RHX₁₇X₁₈X₁₉HX₂₀X₂₁X₂₂X₂₃X₂₄X₈X₉CX₁₀X₁₁CX₁₂X₁₃X₁₄X₁₅X₁₆TKNS | |
| | | | QRTHTGEKPYKCPECGKSFSTKN | | LTEHX₁₇X₁₈X₁₉HX₂₀X₂₁X₂₂X₂₃X₂₄X₈X₉CX₁₀X₁₁CX₁₂X₁₃X₁₄X₁₅X₁₆TS | |
| | | | SLTEHQRTHTGEKPYKCPECGKS | | HSLTEHX₁₇X₁₈X₁₉HX₂₀X₂₁X₂₂X₂₃X₂₄X₂₅X₂₆X₂₇X₂₈X₂₉X₃₀ | |
| | | | FSTSHSLTEHQRTHTGEKPTGKK | | | |
| | | | TS | | | |
| tggcacacc | TGG CAC | 1273 | LEPGEKPYKCPECGKSFSRNDAL | 1822 | X₁X₂X₃X₄X₅X₆X₇X₈X₉CX₁₀X₁₁CX₁₂X₁₃X₁₄X₁₅X₁₆RNDALTEHX₁₇X₁₈X₁₉ | 2371 |
| tgggcacat | ACC TGG | | TEHQRTHTGEKPYKCPECGKSFS | | HX₂₀X₂₁X₂₂X₂₃X₂₄X₈X₉CX₁₀X₁₁CX₁₂X₁₃X₁₄X₁₅X₁₆TSGNLTEHX₁₇X₁₈ | |
| ctg | GCA CAT | | TSGNLTEHQRTHTGEKPYKCPEC | | X₁₉HX₂₀X₂₁X₂₂X₂₃X₂₄X₈X₉CX₁₀X₁₁CX₁₂X₁₃X₁₄X₁₅X₁₆QSGDLRRHX₁₇ | |
| | CTG | | GKSFSQSGDLRRHQRTHTGEKPY | | X₁₈X₁₉HX₂₀X₂₁X₂₂X₂₃X₂₄X₈X₉CX₁₀X₁₁CX₁₂X₁₃X₁₄X₁₅X₁₆RSDHLTTH | |
| | | | KCPECGKSFSRSDHLTTHQRTHT | | X₁₇X₁₈X₁₉HX₂₀X₂₁X₂₂X₂₃X₂₄X₈X₉CX₁₀X₁₁CX₁₂X₁₃X₁₄X₁₅X₁₆DKKDLT | |
| | | | GEKPYKCPECGKSFSDKKDLTRH | | RHX₁₇X₁₈X₁₉HX₂₀X₂₁X₂₂X₂₃X₂₄X₈X₉CX₁₀X₁₁CX₁₂X₁₃X₁₄X₁₅X₁₆SKKA | |
| | | | QRTHTGEKPYKCPECGKSFSSKK | | LTEHX₁₇X₁₈X₁₉HX₂₀X₂₁X₂₂X₂₃X₂₄X₈X₉CX₁₀X₁₁CX₁₂X₁₃X₁₄X₁₅X₁₆RS | |
| | | | ALTEHQRTHTGEKPYKCPECGKS | | DHLTTHX₁₇X₁₈X₁₉HX₂₀X₂₁X₂₂X₂₃X₂₄X₂₅X₂₆X₂₇X₂₈X₂₉X₃₀ | |
| | | | FSRSDHLTTHQRTHTGEKPTGKK | | | |
| | | | TS | | | |
| cactggcac | CAC TGG | 1274 | LEPGEKPYKCPECGKSFSTSGNL | 1823 | X₁X₂X₃X₄X₅X₆X₇X₈X₉CX₁₀X₁₁CX₁₂X₁₃X₁₄X₁₅X₁₆TSGNLTEHX₁₇X₁₈X₁₉ | 2372 |
| acctgggca | CAC ACC | | TEHQRTHTGEKPYKCPECGKSFS | | HX₂₀X₂₁X₂₂X₂₃X₂₄X₈X₉CX₁₀X₁₁CX₁₂X₁₃X₁₄X₁₅X₁₆QSGDLRRHX₁₇X₁₈ | |
| cat | TGG GCA | | QSGDLRRHQRTHTGEKPYKCPEC | | X₁₉HX₂₀X₂₁X₂₂X₂₃X₂₄X₈X₉CX₁₀X₁₁CX₁₂X₁₃X₁₄X₁₅X₁₆RSDHLTTHX₁₇ | |
| | CAT | | GKSFSRSDHLTTHQRTHTGEKPY | | X₁₈X₁₉HX₂₀X₂₁X₂₂X₂₃X₂₄X₈X₉CX₁₀X₁₁CX₁₂X₁₃X₁₄X₁₅X₁₆DKKDLTRH | |
| | | | KCPECGKSFSDKKDLTRHQRTHT | | X₁₇X₁₈X₁₉HX₂₀X₂₁X₂₂X₂₃X₂₄X₈X₉CX₁₀X₁₁CX₁₂X₁₃X₁₄X₁₅X₁₆SKKALT | |
| | | | GEKPYKCPECGKSFSSKKALTEH | | EHX₁₇X₁₈X₁₉HX₂₀X₂₁X₂₂X₂₃X₂₄X₈X₉CX₁₀X₁₁CX₁₂X₁₃X₁₄X₁₅X₁₆RSDH | |
| | | | QRTHTGEKPYKCPECGKSFSRSD | | LTTHX₁₇X₁₈X₁₉HX₂₀X₂₁X₂₂X₂₃X₂₄X₈X₉CX₁₀X₁₁CX₁₂X₁₃X₁₄X₁₅X₁₆SK | |
| | | | HLTTHQRTHTGEKPYKCPECGKS | | KALTEHX₁₇X₁₈X₁₉HX₂₀X₂₁X₂₂X₂₃X₂₄X₂₅X₂₆X₂₇X₂₈X₂₉X₃₀ | |
| | | | FSSKKALTEHQRTHTGEKPTGKK | | | |
| | | | TS | | | |
| ctgccccca | CTG CCC | 1275 | LEPGEKPYKCPECGKSFSDCRDL | 1824 | X₁X₂X₃X₄X₅X₆X₇X₈X₉CX₁₀X₁₁CX₁₂X₁₃X₁₄X₁₅X₁₆DCRDLARHX₁₇X₁₈X₁₉ | 2373 |
| cctaccatt | CCA CCT | | ARHQRTHTGEKPYKCPECGKSFS | | HX₂₀X₂₁X₂₂X₂₃X₂₄X₈X₉CX₁₀X₁₁CX₁₂X₁₃X₁₄X₁₅X₁₆HKNALQNHX₁₇X₁₈ | |
| gcc | ACC ATT | | HKNALQNHQRTHTGEKPYKCPEC | | X₁₉HX₂₀X₂₁X₂₂X₂₃X₂₄X₈X₉CX₁₀X₁₁CX₁₂X₁₃X₁₄X₁₅X₁₆DKKDLTRHX₁₇ | |
| | GCC | | GKSFSDKKDLTRHQRTHTGEKPY | | X₁₈X₁₉HX₂₀X₂₁X₂₂X₂₃X₂₄X₈X₉CX₁₀X₁₁CX₁₂X₁₃X₁₄X₁₅X₁₆TKNSLTEH | |
| | | | KCPECGKSFSTKNSLTEHQRTHT | | X₁₇X₁₈X₁₉HX₂₀X₂₁X₂₂X₂₃X₂₄X₈X₉CX₁₀X₁₁CX₁₂X₁₃X₁₄X₁₅X₁₆TSHSLT | |
| | | | GEKPYKCPECGKSFSTSHSLTEH | | EHX₁₇X₁₈X₁₉HX₂₀X₂₁X₂₂X₂₃X₂₄X₈X₉CX₁₀X₁₁CX₁₂X₁₃X₁₄X₁₅X₁₆SKKH | |
| | | | QRTHTGEKPYKCPECGKSFSSKK | | LAEHX₁₇X₁₈X₁₉HX₂₀X₂₁X₂₂X₂₃X₂₄X₈X₉CX₁₀X₁₁CX₁₂X₁₃X₁₄X₁₅X₁₆RN | |
| | | | HLAEHQRTHTGEKPYKCPECGKS | | DALTEHX₁₇X₁₈X₁₉HX₂₀X₂₁X₂₂X₂₃X₂₄X₂₅X₂₆X₂₇X₂₈X₂₉X₃₀ | |
| | | | FSRNDALTEHQRTHTGEKPTGKK | | | |
| | | | TS | | | |
| tgggcacat | TGG GCA | 1276 | LEPGEKPYKCPECGKSFSTKNSL | 1825 | X₁X₂X₃X₄X₅X₆X₇X₈X₉CX₁₀X₁₁CX₁₂X₁₃X₁₄X₁₅X₁₆TKNSLTEHX₁₇X₁₈X₁₉ | 2374 |
| ctgccccca | CAT CTG | | TEHQRTHTGEKPYKCPECGKSFS | | HX₂₀X₂₁X₂₂X₂₃X₂₄X₈X₉CX₁₀X₁₁CX₁₂X₁₃X₁₄X₁₅X₁₆TSHSLTEHX₁₇X₁₈ | |
| cct | CCC CCA | | TSHSLTEHQRTHTGEKPYKCPEC | | X₁₉HX₂₀X₂₁X₂₂X₂₃X₂₄X₈X₉CX₁₀X₁₁CX₁₂X₁₃X₁₄X₁₅X₁₆SKKHLAEHX₁₇ | |
| | CCT | | GKSFSSKKHLAEHQRTHTGEKPY | | X₁₈X₁₉HX₂₀X₂₁X₂₂X₂₃X₂₄X₈X₉CX₁₀X₁₁CX₁₂X₁₃X₁₄X₁₅X₁₆RNDALTEH | |
| | | | KCPECGKSFSRNDALTEHQRTHT | | X₁₇X₁₈X₁₉HX₂₀X₂₁X₂₂X₂₃X₂₄X₈X₉CX₁₀X₁₁CX₁₂X₁₃X₁₄X₁₅X₁₆TSGNLT | |
| | | | GEKPYKCPECGKSFSTSGNLTEH | | EHX₁₇X₁₈X₁₉HX₂₀X₂₁X₂₂X₂₃X₂₄X₈X₉CX₁₀X₁₁CX₁₂X₁₃X₁₄X₁₅X₁₆QSGD | |
| | | | QRTHTGEKPYKCPECGKSFSQSG | | LRRHX₁₇X₁₈X₁₉HX₂₀X₂₁X₂₂X₂₃X₂₄X₈X₉CX₁₀X₁₁CX₁₂X₁₃X₁₄X₁₅X₁₆RS | |
| | | | DLRRHQRTHTGEKPYKCPECGKS | | DHLTTHX₁₇X₁₈X₁₉HX₂₀X₂₁X₂₂X₂₃X₂₄X₂₅X₂₆X₂₇X₂₈X₂₉X₃₀ | |
| | | | FSRSDHLTTHQRTHTGEKPTGKK | | | |
| | | | TS | | | |
| acctgggca | ACC TGG | 1277 | LEPGEKPYKCPECGKSFSTSHSL | 1826 | X₁X₂X₃X₄X₅X₆X₇X₈X₉CX₁₀X₁₁CX₁₂X₁₃X₁₄X₁₅X₁₆TSHSLTEHX₁₇X₁₈X₁₉ | 2375 |
| catctgccc | GCA CAT | | TEHQRTHTGEKPYKCPECGKSFS | | HX₂₀X₂₁X₂₂X₂₃X₂₄X₈X₉CX₁₀X₁₁CX₁₂X₁₃X₁₄X₁₅X₁₆SKKHLAEHX₁₇X₁₈ | |
| cca | CTG CCC | | SKKHLAEHQRTHTGEKPYKCPEC | | X₁₉HX₂₀X₂₁X₂₂X₂₃X₂₄X₈X₉CX₁₀X₁₁CX₁₂X₁₃X₁₄X₁₅X₁₆RNDALTEHX₁₇ | |
| | CCA | | GKSFSRNDALTEHQRTHTGEKPY | | X₁₈X₁₉HX₂₀X₂₁X₂₂X₂₃X₂₄X₈X₉CX₁₀X₁₁CX₁₂X₁₃X₁₄X₁₅X₁₆TSGNLTEH | |
| | | | KCPECGKSFSTSGNLTEHQRTHT | | X₁₇X₁₈X₁₉HX₂₀X₂₁X₂₂X₂₃X₂₄X₈X₉CX₁₀X₁₁CX₁₂X₁₃X₁₄X₁₅X₁₆QSGDLR | |
| | | | GEKPYKCPECGKSFSQSGDLRRH | | RHX₁₇X₁₈X₁₉HX₂₀X₂₁X₂₂X₂₃X₂₄X₈X₉CX₁₀X₁₁CX₁₂X₁₃X₁₄X₁₅X₁₆RSDH | |
| | | | QRTHTGEKPYKCPECGKSFSRSD | | LTTHX₁₇X₁₈X₁₉HX₂₀X₂₁X₂₂X₂₃X₂₄X₈X₉CX₁₀X₁₁CX₁₂X₁₃X₁₄X₁₅X₁₆DK | |
| | | | HLTTHQRTHTGEKPYKCPECGKS | | KDLTRHX₁₇X₁₈X₁₉HX₂₀X₂₁X₂₂X₂₃X₂₄X₂₅X₂₆X₂₇X₂₈X₂₉X₃₀ | |
| | | | FSDKKDLTRHQRTHTGEKPTGKK | | | |
| | | | TS | | | |
| gcacatctg | GCA CAT | 1278 | LEPGEKPYKCPECGKSFSDKKDL | 1827 | X₁X₂X₃X₄X₅X₆X₇X₈X₉CX₁₀X₁₁CX₁₂X₁₃X₁₄X₁₅X₁₆DKKDLTRHX₁₇X₁₈X₁₉ | 2376 |
| cccccacct | CTG CCC | | TRHQRTHTGEKPYKCPECGKSFS | | HX₂₀X₂₁X₂₂X₂₃X₂₄X₈X₉CX₁₀X₁₁CX₁₂X₁₃X₁₄X₁₅X₁₆TKNSLTEHX₁₇X₁₈ | |
| acc | CCA CCT | | TKNSLTEHQRTHTGEKPYKCPEC | | X₁₉HX₂₀X₂₁X₂₂X₂₃X₂₄X₈X₉CX₁₀X₁₁CX₁₂X₁₃X₁₄X₁₅X₁₆TSHSLTEHX₁₇ | |
| | ACC | | GKSFSTSHSLTEHQRTHTGEKPY | | X₁₈X₁₉HX₂₀X₂₁X₂₂X₂₃X₂₄X₈X₉CX₁₀X₁₁CX₁₂X₁₃X₁₄X₁₅X₁₆SKKHLAEH | |
| | | | KCPECGKSFSSKKHLAEHQRTHT | | X₁₇X₁₈X₁₉HX₂₀X₂₁X₂₂X₂₃X₂₄X₈X₉CX₁₀X₁₁CX₁₂X₁₃X₁₄X₁₅X₁₆RNDALT | |
| | | | GEKPYKCPECGKSFSRNDALTEH | | EHX₁₇X₁₈X₁₉HX₂₀X₂₁X₂₂X₂₃X₂₄X₈X₉CX₁₀X₁₁CX₁₂X₁₃X₁₄X₁₅X₁₆TSGN | |
| | | | QRTHTGEKPYKCPECGKSFSTSG | | LTEHX₁₇X₁₈X₁₉HX₂₀X₂₁X₂₂X₂₃X₂₄X₈X₉CX₁₀X₁₁CX₁₂X₁₃X₁₄X₁₅X₁₆QS | |
| | | | NLTEHQRTHTGEKPYKCPECGKS | | GDLRRHX₁₇X₁₈X₁₉HX₂₀X₂₁X₂₂X₂₃X₂₄X₂₅X₂₆X₂₇X₂₈X₂₉X₃₀ | |
| | | | FSQSGDLRRHQRTHTGEKPTGKK | | | |
| | | | TS | | | |
| cctaccatt | CCT ACC | 1279 | LEPGEKPYKCPECGKSFSQSGNL | 1828 | X₁X₂X₃X₄X₅X₆X₇X₈X₉CX₁₀X₁₁CX₁₂X₁₃X₁₄X₁₅X₁₆QSGNLTEHX₁₇X₁₈X₁₉ | 2377 |
| gcccatcgt | ATT GCC | | TEHQRTHTGEKPYKCPECGKSFS | | HX₂₀X₂₁X₂₂X₂₃X₂₄X₈X₉CX₁₀X₁₁CX₁₂X₁₃X₁₄X₁₅X₁₆SRRTCRAHX₁₇X₁₈ | |
| caa | CAT CGT | | SRRTCRAHQRTHTGEKPYKCPEC | | X₁₉HX₂₀X₂₁X₂₂X₂₃X₂₄X₈X₉CX₁₀X₁₁CX₁₂X₁₃X₁₄X₁₅X₁₆TSGNLTEHX₁₇ | |
| | CAA | | GKSFSTSGNLTEHQRTHTGEKPY | | X₁₈X₁₉HX₂₀X₂₁X₂₂X₂₃X₂₄X₈X₉CX₁₀X₁₁CX₁₂X₁₃X₁₄X₁₅X₁₆DCRDLARH | |
| | | | KCPECGKSFSDCRDLARHQRTHT | | X₁₇X₁₈X₁₉HX₂₀X₂₁X₂₂X₂₃X₂₄X₈X₉CX₁₀X₁₁CX₁₂X₁₃X₁₄X₁₅X₁₆HKNALQ | |
| | | | GEKPYKCPECGKSFSHKNALQNH | | NHX₁₇X₁₈X₁₉HX₂₀X₂₁X₂₂X₂₃X₂₄X₈X₉CX₁₀X₁₁CX₁₂X₁₃X₁₄X₁₅X₁₆DKKD | |
| | | | QRTHTGEKPYKCPECGKSFSDKK | | LTRHX₁₇X₁₈X₁₉HX₂₀X₂₁X₂₂X₂₃X₂₄X₈X₉CX₁₀X₁₁CX₁₂X₁₃X₁₄X₁₅X₁₆TK | |
| | | | DLTRHQRTHTGEKPYKCPECGKS | | NSLTEHX₁₇X₁₈X₁₉HX₂₀X₂₁X₂₂X₂₃X₂₄X₂₅X₂₆X₂₇X₂₈X₂₉X₃₀ | |
| | | | FSTKNSLTEHQRTHTGEKPTGKK | | | |
| | | | TS | | | |
| catctgccc | CAT CTG | 1280 | LEPGEKPYKCPECGKSFSHKNAL | 1829 | X₁X₂X₃X₄X₅X₆X₇X₈X₉CX₁₀X₁₁CX₁₂X₁₃X₁₄X₁₅X₁₆HKNALQNHX₁₇X₁₈X₁₉ | 2378 |
| ccacctacc | CCC CCA | | QNHQRTHTGEKPYKCPECGKSFS | | HX₂₀X₂₁X₂₂X₂₃X₂₄X₈X₉CX₁₀X₁₁CX₁₂X₁₃X₁₄X₁₅X₁₆DKKDLTRHX₁₇X₁₈ | |
| att | CCT ACC | | DKKDLTRHQRTHTGEKPYKCPEC | | X₁₉HX₂₀X₂₁X₂₂X₂₃X₂₄X₈X₉CX₁₀X₁₁CX₁₂X₁₃X₁₄X₁₅X₁₆TKNSLTEHX₁₇ | |
| | ATT | | GKSFSTKNSLTEHQRTHTGEKPY | | X₁₈X₁₉HX₂₀X₂₁X₂₂X₂₃X₂₄X₈X₉CX₁₀X₁₁CX₁₂X₁₃X₁₄X₁₅X₁₆TSHSLTEH | |
| | | | KCPECGKSFSTSHSLTEHQRTHT | | X₁₇X₁₈X₁₉HX₂₀X₂₁X₂₂X₂₃X₂₄X₈X₉CX₁₀X₁₁CX₁₂X₁₃X₁₄X₁₅X₁₆SKKHLA | |
| | | | GEKPYKCPECGKSFSSKKHLAEH | | EHX₁₇X₁₈X₁₉HX₂₀X₂₁X₂₂X₂₃X₂₄X₈X₉CX₁₀X₁₁CX₁₂X₁₃X₁₄X₁₅X₁₆RNDA | |
| | | | QRTHTGEKPYKCPECGKSFSRND | | LTEHX₁₇X₁₈X₁₉HX₂₀X₂₁X₂₂X₂₃X₂₄X₈X₉CX₁₀X₁₁CX₁₂X₁₃X₁₄X₁₅X₁₆TS | |
| | | | ALTEHQRTHTGEKPYKCPECGKS | | GNLTEHX₁₇X₁₈X₁₉HX₂₀X₂₁X₂₂X₂₃X₂₄X₂₅X₂₆X₂₇X₂₈X₂₉X₃₀ | |
| | | | FSTSGNLTEHQRTHTGEKPTGKK | | | |
| | | | TS | | | |
| ccccactgg | CCC CAC | 1281 | LEPGEKPYKCPECGKSFSQSGDL | 1830 | X₁X₂X₃X₄X₅X₆X₇X₈X₉CX₁₀X₁₁CX₁₂X₁₃X₁₄X₁₅X₁₆QSGDLRRHX₁₇X₁₈X₁₉ | 2379 |
| cacacctgg | TGG CAC | | RRHQRTHTGEKPYKCPECGKSFS | | HX₂₀X₂₁X₂₂X₂₃X₂₄X₈X₉CX₁₀X₁₁CX₁₂X₁₃X₁₄X₁₅X₁₆RSDHLTTHX₁₇X₁₈ | |
| gca | ACC TGG | | RSDHLTTHQRTHTGEKPYKCPEC | | X₁₉HX₂₀X₂₁X₂₂X₂₃X₂₄X₈X₉CX₁₀X₁₁CX₁₂X₁₃X₁₄X₁₅X₁₆DKKDLTRHX₁₇ | |
| | GCA | | GKSFSDKKDLTRHQRTHTGEKPY | | X₁₈X₁₉HX₂₀X₂₁X₂₂X₂₃X₂₄X₈X₉CX₁₀X₁₁CX₁₂X₁₃X₁₄X₁₅X₁₆SKKALTEH | |
| | | | KCPECGKSFSSKKALTEHQRTHT | | X₁₇X₁₈X₁₉HX₂₀X₂₁X₂₂X₂₃X₂₄X₈X₉CX₁₀X₁₁CX₁₂X₁₃X₁₄X₁₅X₁₆RSDHLT | |
| | | | GEKPYKCPECGKSFSRSDHLTTH | | THX₁₇X₁₈X₁₉HX₂₀X₂₁X₂₂X₂₃X₂₄X₈X₉CX₁₀X₁₁CX₁₂X₁₃X₁₄X₁₅X₁₆SKKA | |
| | | | QRTHTGEKPYKCPECGKSFSSKK | | LTEHX₁₇X₁₈X₁₉HX₂₀X₂₁X₂₂X₂₃X₂₄X₈X₉CX₁₀X₁₁CX₁₂X₁₃X₁₄X₁₅X₁₆SK | |
| | | | ALTEHQRTHTGEKPYKCPECGKS | | KHLAEHX₁₇X₁₈X₁₉HX₂₀X₂₁X₂₂X₂₃X₂₄X₂₅X₂₆X₂₇X₂₈X₂₉X₃₀ | |
| | | | FSSKKHLAEHQRTHTGEKPTGKK | | | |
| | | | TS | | | |
| cccccacct | CCC CCA | 1282 | LEPGEKPYKCPECGKSFSTSGNL | 1831 | X₁X₂X₃X₄X₅X₆X₇X₈X₉CX₁₀X₁₁CX₁₂X₁₃X₁₄X₁₅X₁₆TSGNLTEHX₁₇X₁₈X₁₉ | 2380 |
| accattgcc | CCT ACC | | TEHQRTHTGEKPYKCPECGKSFS | | HX₂₀X₂₁X₂₂X₂₃X₂₄X₈X₉CX₁₀X₁₁CX₁₂X₁₃X₁₄X₁₅X₁₆DCRDLARHX₁₇X₁₈ | |
| cat | ATT GCC | | DCRDLARHQRTHTGEKPYKCPEC | | X₁₉HX₂₀X₂₁X₂₂X₂₃X₂₄X₈X₉CX₁₀X₁₁CX₁₂X₁₃X₁₄X₁₅X₁₆HKNALQNHX₁₇ | |
| | CAT | | GKSFSHKNALQNHQRTHTGEKPY | | X₁₈X₁₉HX₂₀X₂₁X₂₂X₂₃X₂₄X₈X₉CX₁₀X₁₁CX₁₂X₁₃X₁₄X₁₅X₁₆DKKDLTRH | |
| | | | KCPECGKSFSDKKDLTRHQRTHT | | X₁₇X₁₈X₁₉HX₂₀X₂₁X₂₂X₂₃X₂₄X₈X₉CX₁₀X₁₁CX₁₂X₁₃X₁₄X₁₅X₁₆TKNSLT | |
| | | | GEKYKCPECGKSFSTKNSLTEH | | EHX₁₇X₁₈X₁₉HX₂₀X₂₁X₂₂X₂₃X₂₄X₈X₉CX₁₀X₁₁CX₁₂X₁₃X₁₄X₁₅X₁₆TSHS | |
| | | | QRTHTGEKPYKCPECGKSFSTSH | | LTEHX₁₇X₁₈X₁₉HX₂₀X₂₁X₂₂X₂₃X₂₄X₈X₉CX₁₀X₁₁CX₁₂X₁₃X₁₄X₁₅X₁₆SK | |
| | | | SLTEHQRTHTGEKPYKCPECGKS | | KHLAEHX₁₇X₁₈X₁₉HX₂₀X₂₁X₂₂X₂₃X₂₄X₂₅X₂₆X₂₇X₂₈X₂₉X₃₀ | |
| | | | FSSKKHLAEHQRTHTGEKPTGKK | | | |
| | | | TS | | | |
| cacacctgg | CAC ACC | 1283 | LEPGEKPYKCPECGKSFSSKKHL | 1832 | X₁X₂X₃X₄X₅X₆X₇X₈X₉CX₁₀X₁₁CX₁₂X₁₃X₁₄X₁₅X₁₆SKKHLAEHX₁₇X₁₈X₁₉ | 2381 |
| gcacatctg | TGG GCA | | AEHQRTHTGEKPYKCPECGKSFS | | HX₂₀X₂₁X₂₂X₂₃X₂₄X₈X₉CX₁₀X₁₁CX₁₂X₁₃X₁₄X₁₅X₁₆RNDALTEHX₁₇X₁₈ | |
| ccc | CAT CTG | | RNDALTEHQRTHTGEKPYKCPEC | | X₁₉HX₂₀X₂₁X₂₂X₂₃X₂₄X₈X₉CX₁₀X₁₁CX₁₂X₁₃X₁₄X₁₅X₁₆TSGNLTEHX₁₇ | |
| | CCC | | GKSFSTSGNLTEHQRTHTGEKPY | | X₁₈X₁₉HX₂₀X₂₁X₂₂X₂₃X₂₄X₈X₉CX₁₀X₁₁CX₁₂X₁₃X₁₄X₁₅X₁₆QSGDLRRH | |
| | | | KCPECGKSFSQSGDLRRHQRTHT | | X₁₇X₁₈X₁₉HX₂₀X₂₁X₂₂X₂₃X₂₄X₈X₉CX₁₀X₁₁CX₁₂X₁₃X₁₄X₁₅X₁₆RSDHLT | |
| | | | GEKPYKCPECGKSFSRSDHLTTH | | THX₁₇X₁₈X₁₉HX₂₀X₂₁X₂₂X₂₃X₂₄X₈X₉CX₁₀X₁₁CX₁₂X₁₃X₁₄X₁₅X₁₆DKKD | |
| | | | QRTHTGEKPYKCPECGKSFSDKK | | LTRHX₁₇X₁₈X₁₉HX₂₀X₂₁X₂₂X₂₃X₂₄X₈X₉CX₁₀X₁₁CX₁₂X₁₃X₁₄X₁₅X₁₆SK | |
| | | | DLTRHQRTHTGEKPYKCPECGKS | | KALTEHX₁₇X₁₈X₁₉HX₂₀X₂₁X₂₂X₂₃X₂₄X₂₅X₂₆X₂₇X₂₈X₂₉X₃₀ | |
| | | | FSSKKALTEHQRTHTGEKPTGKK | | | |
| | | | TS | | | |
| attgcccat | ATT GCC | 1284 | LEPGEKPYKCPECGKSFSRNDAL | 1833 | X₁X₂X₃X₄X₅X₆X₇X₈X₉CX₁₀X₁₁CX₁₂X₁₃X₁₄X₁₅X₁₆RNDALTEHX₁₇X₁₈X₁₉ | 2382 |
| cgtcaacac | CAT CGT | | TEHQRTHTGEKPYKCPECGKSFS | | HX₂₀X₂₁X₂₂X₂₃X₂₄X₈X₉CX₁₀X₁₁CX₁₂X₁₃X₁₄X₁₅X₁₆SKKALTEHX₁₇X₁₈ | |
| ctg | CAA CAC | | SKKALTEHQRTHTGEKPYKCPEC | | X₁₉HX₂₀X₂₁X₂₂X₂₃X₂₄X₈X₉CX₁₀X₁₁CX₁₂X₁₃X₁₄X₁₅X₁₆QSGNLTEHX₁₇ | |
| | CTG | | GKSFSQSGNLTEHQRTHTGEKPY | | X₁₈X₁₉HX₂₀X₂₁X₂₂X₂₃X₂₄X₈X₉CX₁₀X₁₁CX₁₂X₁₃X₁₄X₁₅X₁₆SRRTCRAH | |
| | | | KCPECGKSFSSRRTCRAHQRTHT | | X₁₇X₁₈X₁₉HX₂₀X₂₁X₂₂X₂₃X₂₄X₈X₉CX₁₀X₁₁CX₁₂X₁₃X₁₄X₁₅X₁₆TSGNLT | |
| | | | GEKPYKCPECGKSFSTSGNLTEH | | EHX₁₇X₁₈X₁₉HX₂₀X₂₁X₂₂X₂₃X₂₄X₈X₉CX₁₀X₁₁CX₁₂X₁₃X₁₄X₁₅X₁₆DCRD | |
| | | | QRTHTGEKPYKCPECGKSFSDCR | | LARHX₁₇X₁₈X₁₉HX₂₀X₂₁X₂₂X₂₃X₂₄X₈X₉CX₁₀X₁₁CX₁₂X₁₃X₁₄X₁₅X₁₆HK | |
| | | | DLARHQRTHTGEKPYKCPECGKS | | NALQNHX₁₇X₁₈X₁₉HX₂₀X₂₁X₂₂X₂₃X₂₄X₂₅X₂₆X₂₇X₂₈X₂₉X₃₀ | |
| | | | FSHKNALQNHQRTHTGEKPTGKK | | | |
| | | | TS | | | |
| catcgtcaa | CAT CGT | 1285 | LEPGEKPYKCPECGKSFSHKNAL | 1834 | X₁X₂X₃X₄X₅X₆X₇X₈X₉CX₁₀X₁₁CX₁₂X₁₃X₁₄X₁₅X₁₆HKNALQNHX₁₇X₁₈X₁₉ | 2383 |
| cacctgcac | CAA CAC | | QNHQRTHTGEKPYKCPECGKSFS | | HX₂₀X₂₁X₂₂X₂₃X₂₄X₈X₉CX₁₀X₁₁CX₁₂X₁₃X₁₄X₁₅X₁₆SKKALTEHX₁₇X₁₈ | |
| att | CTG CAC | | SKKALTEHQRTHTGEKPYKCPEC | | X₁₉HX₂₀X₂₁X₂₂X₂₃X₂₄X₈X₉CX₁₀X₁₁CX₁₂X₁₃X₁₄X₁₅X₁₆RNDALTEHX₁₇ | |
| | ATT | | GKSFSRNDALTEHQRTHTGEKPY | | X₁₈X₁₉HX₂₀X₂₁X₂₂X₂₃X₂₄X₈X₉CX₁₀X₁₁CX₁₂X₁₃X₁₄X₁₅X₁₆SKKALTEH | |
| | | | KCPECGKSFSSKKALTEHQRTHT | | X₁₇X₁₈X₁₉HX₂₀X₂₁X₂₂X₂₃X₂₄X₈X₉CX₁₀X₁₁CX₁₂X₁₃X₁₄X₁₅X₁₆QSGNLT | |
| | | | GEKPYKCPECGKSFSQSGNLTEH | | EHX₁₇X₁₈X₁₉HX₂₀X₂₁X₂₂X₂₃X₂₄X₈X₉CX₁₀X₁₁CX₁₂X₁₃X₁₄X₁₅X₁₆SRRT | |
| | | | QRTHTGEKPYKCPECGKSFSSRR | | CRAHX₁₇X₁₈X₁₉HX₂₀X₂₁X₂₂X₂₃X₂₄X₈X₉CX₁₀X₁₁CX₁₂X₁₃X₁₄X₁₅X₁₆TS | |
| | | | TCRAHQRTHTGEKPYKCPECGKS | | GNLTEHX₁₇X₁₈X₁₉HX₂₀X₂₁X₂₂X₂₃X₂₄X₂₅X₂₆X₂₇X₂₈X₂₉X₃₀ | |
| | | | FSTSGNLTEHQRTHTGEKPTGKK | | | |
| | | | TS | | | |
| accattgcc | ACC ATT | 1286 | LEPGEKPYKCPECGKSFSSKKAL | 1835 | X₁X₂X₃X₄X₅X₆X₇X₈X₉CX₁₀X₁₁CX₁₂X₁₃X₁₄X₁₅X₁₆SKKALTEHX₁₇X₁₈X₁₉ | 2384 |
| catcgtcaa | GCC CAT | | TEHQRTHTGEKPYKCPECGKSFS | | HX₂₀X₂₁X₂₂X₂₃X₂₄X₈X₉CX₁₀X₁₁CX₁₂X₁₃X₁₄X₁₅X₁₆QSGNLTEHX₁₇X₁₈ | |
| cac | CGT CAA | | QSGNLTEHQRTHTGEKPYKCPEC | | X₁₉HX₂₀X₂₁X₂₂X₂₃X₂₄X₈X₉CX₁₀X₁₁CX₁₂X₁₃X₁₄X₁₅X₁₆SRRTCRAHX₁₇ | |
| | CAC | | GKSFSSRRTCRAHQRTHTGEKPY | | X₁₈X₁₉HX₂₀X₂₁X₂₂X₂₃X₂₄X₈X₉CX₁₀X₁₁CX₁₂X₁₃X₁₄X₁₅X₁₆TSGNLTEH | |
| | | | KCPECGKSFSTSGNLTEHQRTHT | | X₁₇X₁₈X₁₉HX₂₀X₂₁X₂₂X₂₃X₂₄X₈X₉CX₁₀X₁₁CX₁₂X₁₃X₁₄X₁₅X₁₆DCRDLA | |
| | | | GEKPYKCPECGKSFSDCRDLARH | | RHX₁₇X₁₈X₁₉HX₂₀X₂₁X₂₂X₂₃X₂₄X₈X₉CX₁₀X₁₁CX₁₂X₁₃X₁₄X₁₅X₁₆HKNA | |
| | | | QRTHTGEKPYKCPECGKSFSHKN | | LQNHX₁₇X₁₈X₁₉HX₂₀X₂₁X₂₂X₂₃X₂₄X₈X₉CX₁₀X₁₁CX₁₂X₁₃X₁₄X₁₅X₁₆DK | |
| | | | ALQNHQRTHTGEKPYKCPECGKS | | KDLTRHX₁₇X₁₈X₁₉HX₂₀X₂₁X₂₂X₂₃X₂₄X₂₅X₂₆X₂₇X₂₈X₂₉X₃₀ | |
| | | | FSDKKDLTRHQRTHTGEKPTGKK | | | |
| | | | TS | | | |
| gcccatcgt | GCC CAT | 1287 | LEPGEKPYKCPECGKSFSSKKAL | 1836 | X₁X₂X₃X₄X₅X₆X₇X₈X₉CX₁₀X₁₁CX₁₂X₁₃X₁₄X₁₅X₁₆SKKALTEHX₁₇X₁₈X₁₉ | 2385 |
| caacacctg | CGT CAA | | TEHQRTHTGEKPYKCPECGKSFS | | HX₂₀X₂₁X₂₂X₂₃X₂₄X₈X₉CX₁₀X₁₁CX₁₂X₁₃X₁₄X₁₅X₁₆RNDALTEHX₁₇X₁₈ | |
| cac | CAC CTG | | RNDALTEHQRTHTGEKPYKCPEC | | X₁₉HX₂₀X₂₁X₂₂X₂₃X₂₄X₈X₉CX₁₀X₁₁CX₁₂X₁₃X₁₄X₁₅X₁₆SKKALTEHX₁₇ | |
| | CAC | | GKSFSSKKALTEHQRTHTGEKPY | | X₁₈X₁₉HX₂₀X₂₁X₂₂X₂₃X₂₄X₈X₉CX₁₀X₁₁CX₁₂X₁₃X₁₄X₁₅X₁₆QSGNLTEH | |
| | | | KCPECGKSFSQSGNLTEHQRTHT | | X₁₇X₁₈X₁₉HX₂₀X₂₁X₂₂X₂₃X₂₄X₈X₉CX₁₀X₁₁CX₁₂X₁₃X₁₄X₁₅X₁₆SRRTCR | |
| | | | GEKPYKCPECGKSFSSRRTCRAH | | AHX₁₇X₁₈X₁₉HX₂₀X₂₁X₂₂X₂₃X₂₄X₈X₉CX₁₀X₁₁CX₁₂X₁₃X₁₄X₁₅X₁₆TSGN | |
| | | | QRTHTGEKPYKCPECGKSFSTSG | | LTEHX₁₇X₁₈X₁₉HX₂₀X₂₁X₂₂X₂₃X₂₄X₈X₉CX₁₀X₁₁CX₁₂X₁₃X₁₄X₁₅X₁₆DC | |
| | | | NLTEHQRTHTGEKPYKCPECGKS | | RDLARHX₁₇X₁₈X₁₉HX₂₀X₂₁X₂₂X₂₃X₂₄X₂₅X₂₆X₂₇X₂₈X₂₉X₃₀ | |
| | | | FSDCRDLARHQRTHTGEKPTGKK | | | |
| | | | TS | | | |
| cagggtggt | CAG GGT | 1288 | LEPGEKPYKCPECGKSFSDPGAL | 1837 | X₁X₂X₃X₄X₅X₆X₇X₈X₉CX₁₀X₁₁CX₁₂X₁₃X₁₄X₁₅X₁₆DPGALVRHX₁₇X₁₈X₁₉ | 2386 |
| gtaggctgg | GGT GTA | | VRHQRTHTGEKPYKCPECGKSFS | | HX₂₀X₂₁X₂₂X₂₃X₂₄X₈X₉CX₁₀X₁₁CX₁₂X₁₃X₁₄X₁₅X₁₆RSDHLTTHX₁₇X₁₈ | |
| gtc | GGC TGG | | RSDHLTTHQRTHTGEKPYKCPEC | | X₁₉HX₂₀X₂₁X₂₂X₂₃X₂₄X₈X₉CX₁₀X₁₁CX₁₂X₁₃X₁₄X₁₅X₁₆DPGHLVRHX₁₇ | |
| | GTC | | GKSFSDPGHLVRHQRTHTGEKPY | | X₁₈X₁₉HX₂₀X₂₁X₂₂X₂₃X₂₄X₈X₉CX₁₀X₁₁CX₁₂X₁₃X₁₄X₁₅X₁₆QSSSLVRH | |
| | | | KCPECGKSFSQSSSLVRHQRTHT | | X₁₇X₁₈X₁₉HX₂₀X₂₁X₂₂X₂₃X₂₄X₈X₉CX₁₀X₁₁CX₁₂X₁₃X₁₄X₁₅X₁₆TSGHLV | |
| | | | GEKPYKCPECGKSFSTSGHLVRH | | RHX₁₇X₁₈X₁₉HX₂₀X₂₁X₂₂X₂₃X₂₄X₈X₉CX₁₀X₁₁CX₁₂X₁₃X₁₄X₁₅X₁₆TSGH | |
| | | | QRTHTGEKPYKCPECGKSFSTSG | | LVRHX₁₇X₁₈X₁₉HX₂₀X₂₁X₂₂X₂₃X₂₄X₈X₉CX₁₀X₁₁CX₁₂X₁₃X₁₄X₁₅X₁₆RA | |
| | | | HLVRHQRTHTGEKPYKCPECGKS | | DNLTEHX₁₇X₁₈X₁₉HX₂₀X₂₁X₂₂X₂₃X₂₄X₂₅X₂₆X₂₇X₂₈X₂₉X₃₀ | |
| | | | FSRADNLTEHQRTHTGEKPTGKK | | | |
| | | | TS | | | |
| ggtggtgta | GGT GGT | 1289 | LEPGEKPYKCPECGKSFSRADNL | 1838 | X₁X₂X₃X₄X₅X₆X₇X₈X₉CX₁₀X₁₁CX₁₂X₁₃X₁₄X₁₅X₁₆RADNLTEHX₁₇X₁₈X₁₉ | 2387 |
| ggctgggtc | GTA GGC | | TEHQRTHTGEKPYKCPECGKSFS | | HX₂₀X₂₁X₂₂X₂₃X₂₄X₈X₉CX₁₀X₁₁CX₁₂X₁₃X₁₄X₁₅X₁₆DPGALVRHX₁₇X₁₈ | |
| cag | TGG GTC | | DPGALVRHQRTHTGEKPYKCPEC | | X₁₉HX₂₀X₂₁X₂₂X₂₃X₂₄X₈X₉CX₁₀X₁₁CX₁₂X₁₃X₁₄X₁₅X₁₆RSDHLTTHX₁₇ | |
| | CAG | | GKSFSRSDHLTTHQRTHTGEKPY | | X₁₈X₁₉HX₂₀X₂₁X₂₂X₂₃X₂₄X₈X₉CX₁₀X₁₁CX₁₂X₁₃X₁₄X₁₅X₁₆DPGHLVRH | |
| | | | KCPECGKSFSDPGHLVRHQRTHT | | X₁₇X₁₈X₁₉HX₂₀X₂₁X₂₂X₂₃X₂₄X₈X₉CX₁₀X₁₁CX₁₂X₁₃X₁₄X₁₅X₁₆QSSSLV | |
| | | | GEKPYKCPECGKSFSQSSSLVRH | | RHX₁₇X₁₈X₁₉HX₂₀X₂₁X₂₂X₂₃X₂₄X₈X₉CX₁₀X₁₁CX₁₂X₁₃X₁₄X₁₅X₁₆TSGH | |
| | | | QRTHTGEKPYKCPECGKSFSTSG | | LVRHX₁₇X₁₈X₁₉HX₂₀X₂₁X₂₂X₂₃X₂₄X₈X₉CX₁₀X₁₁CX₁₂X₁₃X₁₄X₁₅X₁₆TS | |
| | | | HLVRHQRTHTGEKPYKCPECGKS | | GHLVRHX₁₇X₁₈X₁₉HX₂₀X₂₁X₂₂X₂₃X₂₄X₂₅X₂₆X₂₇X₂₈X₂₉X₃₀ | |
| | | | FSTSGHLVRHQRTHTGEKPTGKK | | | |
| | | | TS | | | |
| aggctgggt | AGG CTG | 1290 | LEPGEKPYKCPECGKSFSSKKAL | 1839 | X₁X₂X₃X₄X₅X₆X₇X₈X₉CX₁₀X₁₁CX₁₂X₁₃X₁₄X₁₅X₁₆SKKALTEHX₁₇X₁₈X₁₉ | 2388 |
| ccagtgcag | GGT CCA | | TEHQRTHTGEKPYKCPECGKSFS | | HX₂₀X₂₁X₂₂X₂₃X₂₄X₈X₉CX₁₀X₁₁CX₁₂X₁₃X₁₄X₁₅X₁₆RADNLTEHX₁₇X₁₈ | |
| cac | gtg CAG | | RADNLTEHQRTHTGEKPYKCPEC | | X₁₉HX₂₀X₂₁X₂₂X₂₃X₂₄X₈X₉CX₁₀X₁₁CX₁₂X₁₃X₁₄X₁₅X₁₆RSDELVRHX₁₇ | |
| | CAC | | GKSFSRSDELVRHQRTHTGEKPY | | X₁₈X₁₉HX₂₀X₂₁X₂₂X₂₃X₂₄X₈X₉CX₁₀X₁₁CX₁₂X₁₃X₁₄X₁₅X₁₆TSHSLTEH | |
| | | | KCPECGKSFSTSHSLTEHQRTHT | | X₁₇X₁₈X₁₉HX₂₀X₂₁X₂₂X₂₃X₂₄X₈X₉CX₁₀X₁₁CX₁₂X₁₃X₁₄X₁₅X₁₆TSGHLV | |
| | | | GEKPYKCPECGKSFSTSGHLVRH | | RHX₁₇X₁₈X₁₉HX₂₀X₂₁X₂₂X₂₃X₂₄X₈X₉CX₁₀X₁₁CX₁₂X₁₃X₁₄X₁₅X₁₆RNDA | |
| | | | QRTHTGEKPYKCPECGKSFSRND | | LTEHX₁₇X₁₈X₁₉HX₂₀X₂₁X₂₂X₂₃X₂₄X₈X₉CX₁₀X₁₁CX₁₂X₁₃X₁₄X₁₅X₁₆RS | |
| | | | ALTEHQRTHTGEKPYKCPECGKS | | DHLTNHX₁₇X₁₈X₁₉HX₂₀X₂₁X₂₂X₂₃X₂₄X₂₅X₂₆X₂₇X₂₈X₂₉X₃₀ | |
| | | | FSRSDHLTNHQRTHTGEKPTGKK | | | |
| | | | TS | | | |
| agcactgta | AGC ACT | 1291 | LEPGEKPYKCPECGKSFSDPGAL | 1840 | X₁X₂X₃X₄X₅X₆X₇X₈X₉CX₁₀X₁₁CX₁₂X₁₃X₁₄X₁₅X₁₆DPGALVRHX₁₇X₁₈X₁₉ | 2389 |
| gtcggccat | GTA GTC | | VRHQRTHTGEKPYKCPECGKSFS | | HX₂₀X₂₁X₂₂X₂₃X₂₄X₈X₉CX₁₀X₁₁CX₁₂X₁₃X₁₄X₁₅X₁₆TSGNLTEHX₁₇X₁₈ | |
| gtc | GGC CAT | | TSGNLTEHQRTHTGEKPYKCPEC | | X₁₉HX₂₀X₂₁X₂₂X₂₃X₂₄X₈X₉CX₁₀X₁₁CX₁₂X₁₃X₁₄X₁₅X₁₆DPGHLVRHX₁₇ | |
| | GTC | | GKSFSDPGHLVRHQRTHTGEKPY | | X₁₈X₁₉HX₂₀X₂₁X₂₂X₂₃X₂₄X₈X₉CX₁₀X₁₁CX₁₂X₁₃X₁₄X₁₅X₁₆DPGALVRH | |
| | | | KCPECGKSFSDPGALVRHQRTHT | | X₁₇X₁₈X₁₉HX₂₀X₂₁X₂₂X₂₃X₂₄X₈X₉CX₁₀X₁₁CX₁₂X₁₃X₁₄X₁₅X₁₆QSS SLV | |
| | | | GEKPYKCPECGKSFSQSSSLVRH | | RHX₁₇X₁₈X₁₉HX₂₀X₂₁X₂₂X₂₃X₂₄X₈X₉CX₁₀X₁₁CX₁₂X₁₃X₁₄X₁₅X₁₆THLD | |
| | | | QRTHTGEKPYKCPECGKSFSTHL | | LIRHX₁₇X₁₈X₁₉HX₂₀X20X₂₂X₂₃X₂₄X₈X₉CX₁₀X₁₁CX₁₂X₁₃X₁₄X₁₅X₁₆ER | |
| | | | DLIRHQRTHTGEKPYKCPECGKS | | SHLREHX₁₇X₁₈X₁₉HX₂₀X20X₂₂X₂₃X₂₄X₂₅X₂₆X₂₇X₂₈X₂₉X₃₀ | |
| | | | FSERSHLREHQRTHTGEKPTGKK | | | |
| | | | TS | | | |
| actgtagtc | ACT GTA | 1292 | LEPGEKPYKCPECGKSFSTSGNL | 1841 | X₁X₂X₃X₄X₅X₆X₇X₈X₉CX₁₀X₁₁CX₁₂X₁₃X₁₄X₁₅X₁₆TSGNLTEHX₁₇X₁₈X₁₉ | 2390 |
| ggccatgtc | GTC GGC | | TEHQRTHTGEKPYKCPECGKSFS | | HX₂₀X₂₁X₂₂X₂₃X₂₄X₈X₉CX₁₀X₁₁CX₁₂X₁₃X₁₄X₁₅X₁₆DPGALVRHX₁₇X₁₈ | |
| cat | CAT GTC | | DPGALVRHQRTHTGEKPYKCPEC | | X₁₉HX₂₀X₂₁X₂₂X₂₃X₂₄X₈X₉CX₁₀X₁₁CX₁₂X₁₃X₁₄X₁₅X₁₆TSGNLTEHX₁₇ | |
| | CAT | | GKSFSTSGNLTEHQRTHTGEKPY | | X₁₈X₁₉HX₂₀X₂₁X₂₂X₂₃X₂₄X₈X₉CX₁₀X₁₁CX₁₂X₁₃X₁₄X₁₅X₁₆DPGHLVRH | |
| | | | KCPECGKSFSDPGHLVRHQRTHT | | X₁₇X₁₈X₁₉HX₂₀X₂₁X₂₂X₂₃X₂₄X₈X₉CX₁₀X₁₁CX₁₂X₁₃X₁₄X₁₅X₁₆DPGALV | |
| | | | GEKPYKCPECGKSFSDPGALVRH | | RHX₁₇X₁₈X₁₉HX₂₀X₂₁X₂₂X₂₃X₂₄X₈X₉CX₁₀X₁₁CX₁₂X₁₃X₁₄X₁₅X₁₆QSSS | |
| | | | QRTHTGEKPYKCPECGKSFSQSS | | LVRHX₁₇X₁₈X₁₉HX₂₀X₂₁X₂₂X₂₃X₂₄X₈X₉CX₁₀X₁₁CX₁₂X₁₃X₁₄X₁₅X₁₆TH | |
| | | | SLVRHQRTHTGEKPYKCPECGKS | | LDLIRHX₁₇X₁₈X₁₉HX₂₀X₂₁X₂₂X₂₃X₂₄X₂₅X₂₆X₂₇X₂₈X₂₉X₃₀ | |
| | | | FSTHLDLIRHQRTHTGEKPTGKK | | | |
| | | | TS | | | |
| gtagtcggc | GTA GTC | 1293 | LEPGEKPYKCPECGKSFSDPGAL | 1842 | X₁X₂X₃X₄X₅X₆X₇X₈X₉CX₁₀X₁₁CX₁₂X₁₃X₁₄X₁₅X₁₆DPGALVRHX₁₇X₁₈X₁₉ | 2391 |
| catgtccat | GGC CAT | | VRHQRTHTGEKPYKCPECGKSFS | | HX₂₀X₂₁X₂₂X₂₃X₂₄X₈X₉CX₁₀X₁₁CX₁₂X₁₃X₁₄X₁₅X₁₆TSGNLTEHX₁₇X₁₈ | |
| gtc | GTC CAT | | TSGNLTEHQRTHTGEKPYKCPEC | | X₁₉HX₂₀X₂₁X₂₂X₂₃X₂₄X₈X₉CX₁₀X₁₁CX₁₂X₁₃X₁₄X₁₅X₁₆DPGALVRHX₁₇ | |
| | GTC | | GKSFSDPGALVRHQRTHTGEKPY | | X₁₈X₁₉HX₂₀X₂₁X₂₂X₂₃X₂₄X₈X₉CX₁₀X₁₁CX₁₂X₁₃X₁₄X₁₅X₁₆TSGNLTEH | |
| | | | KCPECGKSFSTSGNLTEHQRTHT | | X₁₇X₁₈X₁₉HX₂₀X₂₁X₂₂X₂₃X₂₄X₈X₉CX₁₀X₁₁CX₁₂X₁₃X₁₄X₁₅X₁₆DPGHLV | |
| | | | GEKPYKCPECGKSFSDPGHLVRH | | RHX₁₇X₁₈X₁₉HX₂₀X₂₁X₂₂X₂₃X₂₄X₈X₉CX₁₀X₁₁CX₁₂X₁₃X₁₄X₁₅X₁₆DPGA | |
| | | | QRTHTGEKPYKCPECGKSFSDPG | | LVRHX₁₇X₁₈X₁₉HX₂₀X₂₁X₂₂X₂₃X₂₄X₈X₉CX₁₀X₁₁CX₁₂X₁₃X₁₄X₁₅X₁₆QS | |
| | | | ALVRHQRTHTGEKPYKCPECGKS | | SSLVRHX₁₇X₁₈X₁₉HX₂₀X₂₁X₂₂X₂₃X₂₄X₂₅X₂₆X₂₇X₂₈X₂₉X₃₀ | |
| | | | FSQSSSLVRHQRTHTGEKPTGKK | | | |
| | | | TS | | | |
| gtcggccat | GTC GGC | 1294 | LEPGEKPYKCPECGKSFSDPGNL | 1843 | X₁X₂X₃X₄X₅X₆X₇X₈X₉CX₁₀X₁₁CX₁₂X₁₃X₁₄X₁₅X₁₆DPGNLVRHX₁₇X₁₈X₁₉ | 2392 |
| gtccatgtc | CAT GTC | | VRHQRTHTGEKPYKCPECGKSFS | | HX₂₀X₂₁X₂₂X₂₃X₂₄X₈X₉CX₁₀X₁₁CX₁₂X₁₃X₁₄X₁₅X₁₆DPGALVRHX₁₇X₁₈ | |
| gac | CAT GTC | | DPGALVRHQRTHTGEKPYKCPEC | | X₁₉HX₂₀X₂₁X₂₂X₂₃X₂₄X₈X₉CX₁₀X₁₁CX₁₂X₁₃X₁₄X₁₅X₁₆TSGNLTEHX₁₇ | |
| | GAC | | GKSFSTSGNLTEHQRTHTGEKPY | | X₁₈X₁₉HX₂₀X₂₁X₂₂X₂₃X₂₄X₈X₉CX₁₀X₁₁CX₁₂X₁₃X₁₄X₁₅X₁₆DPGALVRH | |
| | | | KCPECGKSFSDPGALVRHQRTHT | | X₁₇X₁₈X₁₉HX₂₀X₂₁X₂₂X₂₃X₂₄X₈X₉CX₁₀X₁₁CX₁₂X₁₃X₁₄X₁₅X₁₆TSGNLT | |
| | | | GEKPYKCPECGKSFSTSGNLTEH | | EHX₁₇X₁₈X₁₉HX₂₀X₂₁X₂₂X₂₃X₂₄X₈X₉CX₁₀X₁₁CX₁₂X₁₃X₁₄X₁₅X₁₆DPGH | |
| | | | QRTHTGEKPYKCPECGKSFSDPG | | LVRHX₁₇X₁₈X₁₉HX₂₀X₂₁X₂₂X₂₃X₂₄X₈X₉CX₁₀X₁₁CX₁₂X₁₃X₁₄X₁₅X₁₆DP | |
| | | | HLVRHQRTHTGEKPYKCPECGKS | | GALVRHX₁₇X₁₈X₁₉HX₂₀X₂₁X₂₂X₂₃X₂₄X₂₅X₂₆X₂₇X₂₈X₂₉X₃₀ | |
| | | | FSDPGALVRHQRTHTGEKPTGKK | | | |
| | | | TS | | | |
| ggccatgtc | GGC CAT | 1295 | LEPGEKPYKCPECGKSFSRSDNL | 1844 | X₁X₂X₃X₄X₅X₆X₇X₈X₉CX₁₀X₁₁CX₁₂X₁₃X₁₄X₁₅X₁₆RSDNLVRHX₁₇X₁₈X₁₉ | 2393 |
| catgtcgac | GTC CAT | | VRHQRTHTGEKPYKCPECGKSFS | | HX₂₀X₂₁X₂₂X₂₃X₂₄X₈X₉CX₁₀X₁₁CX₁₂X₁₃X₁₄X₁₅X₁₆DPGNLVRHX₁₇X₁₈ | |
| gag | GTC GAC | | DPGNLVRHQRTHTGEKPYKCPEC | | X₁₉HX₂₀X₂₁X₂₂X₂₃X₂₄X₈X₉CX₁₀X₁₁CX₁₂X₁₃X₁₄X₁₅X₁₆DPGALVRHX₁₇ | |
| | GAG | | GKSFSDPGALVRHQRTHTGEKPY | | X₁₈X₁₉HX₂₀X₂₁X₂₂X₂₃X₂₄X₈X₉CX₁₀X₁₁CX₁₂X₁₃X₁₄X₁₅X₁₆TSGNLTEH | |
| | | | KCPECGKSFSTSGNLTEHQRTHT | | X₁₇X₁₈X₁₉HX₂₀X₂₁X₂₂X₂₃X₂₄X₈X₉CX₁₀X₁₁CX₁₂X₁₃X₁₄X₁₅X₁₆DPGALV | |
| | | | GEKPYKCPECGKSFSDPGALVRH | | RHX₁₇X₁₈X₁₉HX₂₀X₂₁X₂₂X₂₃X₂₄X₈X₉CX₁₀X₁₁CX₁₂X₁₃X₁₄X₁₅X₁₆TSGN | |
| | | | QRTHTGEKPYKCPECGKSFSTSG | | LTEHX₁₇X₁₈X₁₉HX₂₀X₂₁X₂₂X₂₃X₂₄X₈X₉CX₁₀X₁₁CX₁₂X₁₃X₁₄X₁₅X₁₆DP | |
| | | | NLTEHQRTHTGEKPYKCPECGKS | | GHLVRHX₁₇X₁₈X₁₉HX₂₀X₂₁X₂₂X₂₃X₂₄X₂₅X₂₆X₂₇X₂₈X₂₉X₃₀ | |
| | | | FSDPGHLVRHQRTHTGEKPTGKK | | | |
| | | | TS | | | |
| catgtccat | CAT GTC | 1296 | LEPGEKPYKCPECGKSFSTSGHL | 1845 | X₁X₂X₃X₄X₅X₆X₇X₈X₉CX₁₀X₁₁CX₁₂X₁₃X₁₄X₁₅X₁₆TSGHLVRHX₁₇X₁₈X₁₉ | 2394 |
| gtcgacgag | CAT GTC | | VRHQRTHTGEKPYKCPECGKSFS | | HX₂₀X₂₁X₂₂X₂₃X₂₄X₈X₉CX₁₀X₁₁CX₁₂X₁₃X₁₄X₁₅X₁₆RSDNLVRHX₁₇X₁₈ | |
| ggt | GAC GAG | | RSDNLVRHQRTHTGEKPYKCPEC | | X₁₉HX₂₀X₂₁X₂₂X₂₃X₂₄X₈X₉CX₁₀X₁₁CX₁₂X₁₃X₁₄X₁₅X₁₆DPGNLVRHX₁₇ | |
| | GGT | | GKSFSDPGNLVRHQRTHTGEKPY | | X₁₈X₁₉HX₂₀X₂₁X₂₂X₂₃X₂₄X₈X₉CX₁₀X₁₁CX₁₂X₁₃X₁₄X₁₅X₁₆DPGALVRH | |
| | | | KCPECGKSFSDPGALVRHQRTHT | | X₁₇X₁₈X₁₉HX₂₀X₂₁X₂₂X₂₃X₂₄X₈X₉CX₁₀X₁₁CX₁₂X₁₃X₁₄X₁₅X₁₆TSGNLT | |
| | | | GEKPYKCPECGKSFSTSGNLTEH | | EHX₁₇X₁₈X₁₉HX₂₀X₂₁X₂₂X₂₃X₂₄X₈X₉CX₁₀X₁₁CX₁₂X₁₃X₁₄X₁₅X₁₆DPGA | |
| | | | QRTHTGEKPYKCPECGKSFSDPG | | LVRHX₁₇X₁₈X₁₉HX₂₀X₂₁X₂₂X₂₃X₂₄X₈X₉CX₁₀X₁₁CX₁₂X₁₃X₁₄X₁₅X₁₆TS | |
| | | | ALVRHQRTHTGEKPYKCPECGKS | | GNLTEHX₁₇X₁₈X₁₉HX₂₀X₂₁X₂₂X₂₃X₂₄X₂₅X₂₆X₂₇X₂₈X₂₉X₃₀ | |
| | | | FSTSGNLTEHQRTHTGEKPTGKK | | | |
| | | | TS | | | |
| ctgcctcca | CTG CCT | 1297 | LEPGEKPYKCPECGKSFSSKKAL | 1846 | X₁X₂X₃X₄X₅X₆X₇X₈X₉CX₁₀X₁₁CX₁₂X₁₃X₁₄X₁₅X₁₆SKKALTEHX₁₇X₁₈X₁₉ | 2395 |
| cgccgcggc | CCA CGC | | TEHQRTHTGEKPYKCPECGKSFS | | HX₂₀X₂₁X₂₂X₂₃X₂₄X₈X₉CX₁₀X₁₁CX₁₂X₁₃X₁₄X₁₅X₁₆DPGHLVRHX₁₇X₁₈ | |
| cac | CGC GGC | | DPGHLVRHQRTHTGEKPYKCPEC | | X₁₉HX₂₀X₂₁X₂₂X₂₃X₂₄X₈X₉CX₁₀X₁₁CX₁₂X₁₃X₁₄X₁₅X₁₆HTGHLLEHX₁₇ | |
| | CAC | | GKSFSHTGHLLEHQRTHTGEKPY | | X₁₈X₁₉HX₂₀X₂₁X₂₂X₂₃X₂₄X₈X₉CX₁₀X₁₁CX₁₂X₁₃X₁₄X₁₅X₁₆HTGHLLEH | |
| | | | KCPECGKSFSHTGHLLEHQRTHT | | X₁₇X₁₈X₁₉HX₂₀X₂₁X₂₂X₂₃X₂₄X₈X₉CX₁₀X₁₁CX₁₂X₁₃X₁₄X₁₅X₁₆TSHSLT | |
| | | | GEKPYKCPECGKSFSTSHSLTEH | | EHX₁₇X₁₈X₁₉HX₂₀X₂₁X₂₂X₂₃X₂₄X₈X₉CX₁₀X₁₁CX₁₂X₁₃X₁₄X₁₅X₁₆TKNS | |
| | | | QRTHTGEKPYKCPECGKSFSTKN | | LTEHX₁₇X₁₈X₁₉HX₂₀X₂₁X₂₂X₂₃X₂₄X₈X₉CX₁₀X₁₁CX₁₂X₁₃X₁₄X₁₅X₁₆RN | |
| | | | SLTEHQRTHTGEKPYKCPECGKS | | DALTEHX₁₇X₁₈X₁₉HX₂₀X₂₁X₂₂X₂₃X₂₄X₂₅X₂₆X₂₇X₂₈X₂₉X₃₀ | |
| | | | FSRNDALTEHQRTHTGEKPTGKK | | | |
| | | | TS | | | |
| cctccacgc | CCT CCA | 1298 | LEPGEKPYKCPECGKSFSRNDAL | 1847 | X₁X₂X₃X₄X₅X₆X₇X₈X₉CX₁₀X₁₁CX₁₂X₁₃X₁₄X₁₅X₁₆RNDALTEHX₁₇X₁₈X₁₉ | 2396 |
| cgcggccac | CGC CGC | | TEHQRTHTGEKPYKCPECGKSFS | | HX₂₀X₂₁X₂₂X₂₃X₂₄X₈X₉CX₁₀X₁₁CX₁₂X₁₃X₁₄X₁₅X₁₆SKKALTEHX₁₇X₁₈ | |
| ctg | GGC CAC | | SKKALTEHQRTHTGEKPYKCPEC | | X₁₉HX₂₀X₂₁X₂₂X₂₃X₂₄X₈X₉CX₁₀X₁₁CX₁₂X₁₃X₁₄X₁₅X₁₆DPGHLVRHX₁₇ | |
| | CTG | | GKSFSDPGHLVRHQRTHTGEKPY | | X₁₈X₁₉HX₂₀X₂₁X₂₂X₂₃X₂₄X₈X₉CX₁₀X₁₁CX₁₂X₁₃X₁₄X₁₅X₁₆HTGHLLEH | |
| | | | KCPECGKSFSHTGHLLEHQRTHT | | X₁₇X₁₈X₁₉HX₂₀X₂₁X₂₂X₂₃X₂₄X₈X₉CX₁₀X₁₁CX₁₂X₁₃X₁₄X₁₅X₁₆HTGHLL | |
| | | | GEKPYKCPECGKSFSHTGHLLEH | | EHX₁₇X₁₈X₁₉HX₂₀X₂₁X₂₂X₂₃X₂₄X₈X₉CX₁₀X₁₁CX₁₂X₁₃X₁₄X₁₅X₁₆TSHS | |
| | | | QRTHTGEKPYKCPECGKSFSTSH | | LTEHX₁₇X₁₈X₁₉HX₂₀X₂₁X₂₂X₂₃X₂₄X₈X₉CX₁₀X₁₁CX₁₂XEX₁₄X₁₅X₁₆TK | |
| | | | SLTEHQRTHTGEKPYKCPECGKS | | N5LTEHX₁₇X₁₈X₁₉HX₂₀X₂₁X₂₂X₂₃X₂₄X₂₅X₂₆X₂₇X₂₈X₂₉X₃₀ | |
| | | | FSTKNSLTEHQRTHTGEKPTGKK | | | |
| | | | TS | | | |
| ccacgccgc | CCA CGC | 1299 | LEPGEKPYKCPECGKSFSSKKHL | 1848 | X₁X₂X₃X₄X₅X₆X₇X₈X₉CX₁₀X₁₁CX₁₂X₁₃X₁₄X₁₅X₁₆SKKHLAEHX₁₇X₁₈X₁₉ | 2397 |
| ggccacctg | CGC GGC | | AEHQRTHTGEKPYKCPECGKSFS | | HX₂₀X₂₁X₂₂X₂₃X₂₄X₈X₉CX₁₀X₁₁CX₁₂X₁₃X₁₄X₁₅X₁₆RNDALTEHX₁₇X₁₈ | |
| ccc | CAC CTG | | RNDALTEHQRTHTGEKPYKCPEC | | X₁₉HX₂₀X₂₁X₂₂X₂₃X₂₄X₈X₉CX₁₀X₁₁CX₁₂X₁₃X₁₄X₁₅X₁₆SKKALTEHX₁₇ | |
| | CCC | | GKSFSSKKALTEHQRTHTGEKPY | | X₁₈X₁₉HX₂₀X₂₁X₂₂X₂₃X₂₄X₈X₉CX₁₀X₁₁CX₁₂X₁₃X₁₄X₁₅X₁₆DPGHLVRH | |
| | | | KCPECGKSFSDPGHLVRHQRTHT | | X₁₇X₁₈X₁₉HX₂₀X₂₁X₂₂X₂₃X₂₄X₈X₉CX₁₀X₁₁CX₁₂X₁₃X₁₄X₁₅X₁₆HTGHLL | |
| | | | GEKPYKCPECGKSFSHTGHLLEH | | EHX₁₇X₁₈X₁₉HX₂₀X₂₁X₂₂X₂₃X₂₄X₈X₉CX₁₀X₁₁CX₁₂X₁₃X₁₄X₁₅X₁₆HTGH | |
| | | | QRTHTGEKPYKCPECGKSFSHTG | | LLEHX₁₇X₁₈X₁₉HX₂₀X₂₁X₂₂X₂₃X₂₄X₈X₉CX₁₀X₁₁CX₁₂X₁₃X₁₄X₁₅X₁₆TS | |
| | | | HLLEHQRTHTGEKPYKCPECGKS | | HSLTEHX₁₇X₁₈X₁₉HX₂₀X₂₁X₂₂X₂₃X₂₄X₂₅X₂₆X₂₇X₂₈X₂₉X₃₀ | |
| | | | FSTSHSLTEHQRTHTGEKPTGKK | | | |
| | | | TS | | | |
| cggccacct | CGG CCA | 1300 | LEPGEKPYKCPECGKSFSRSDHL | 1849 | X₁X₂X₃X₄X₅X₆X₇X₈X₉CX₁₀X₁₁CX₁₂X₁₃X₁₄X₁₅X₁₆RSDHLTTHX₁₇X₁₈X₁₉ | 2398 |
| gccctaccc | CCT GCC | | TTHQRTHTGEKPYKCPECGKSFS | | HX₂₀X₂₁X₂₂X₂₃X₂₄X₈X₉CX₁₀X₁₁CX₁₂X₁₃X₁₄X₁₅X₁₆SKKHLAEHX₁₇X₁₈ | |
| tgg | CTA CCC | | SKKHLAEHQRTHTGEKPYKCPEC | | X₁₉HX₂₀X₂₁X₂₂X₂₃X₂₄X₈X₉CX₁₀X₁₁CX₁₂X₁₃X₁₄X₁₅X₁₆QNSTLTEHX₁₇ | |
| | TGG | | GKSFSQNSTLTEHQRTHTGEKPY | | X₁₈X₁₉HX₂₀X₂₁X₂₂X₂₃X₂₄X₈X₉CX₁₀X₁₁CX₁₂X₁₃X₁₄X₁₅X₁₆DCRDLARH | |
| | | | KCPECGKSFSDCRDLARHQRTHT | | X₁₇X₁₈X₁₉HX₂₀X₂₁X₂₂X₂₃X₂₄X₈X₉CX₁₀X₁₁CX₁₂X₁₃X₁₄X₁₅X₁₆TKNSLT | |
| | | | GEKPYKCPECGKSFSTKNSLTEH | | EHX₁₇X₁₈X₁₉HX₂₀X₂₁X₂₂X₂₃X₂₄X₈X₉CX₁₀X₁₁CX₁₂X₁₃X₁₄X₁₅X₁₆TSHS | |
| | | | QRTHTGEKPYKCPECGKSFSTSH | | LTEHX₁₇X₁₈X₁₉HX₂₀X₂₁X₂₂X₂₃X₂₄X₈X₉CX₁₀X₁₁CX₁₂X₁₃X₁₄X₁₅X₁₆RS | |
| | | | SLTEHQRTHTGEKPYKCPECGKS | | DKLTEHX₁₇X₁₈X₁₉HX₂₀X₂₁X₂₂X₂₃X₂₄X₂₅X₂₆X₂₇X₂₈X₂₉X₃₀ | |
| | | | FSRSDKLTEHQRTHTGEKPTGKK | | | |
| | | | TS | | | |
| acgccgcgg | ACG CCG | 1301 | LEPGEKPYKCPECGKSFSQNSTL | 1850 | X₁X₂X₃X₄X₅X₆X₇X₈X₉CX₁₀X₁₁CX₁₂X₁₃X₁₄X₁₅X₁₆QNSTLTEHX₁₇X₁₈X₁₉ | 2399 |
| ccacctgcc | CGG CCA | | TEHQRTHTGEKPYKCPECGKSFS | | HX₂₀X₂₁X₂₂X₂₃X₂₄X₈X₉CX₁₀X₁₁CX₁₂X₁₃X₁₄X₁₅X₁₆DCRDLARHX₁₇X₁₈ | |
| cta | CCT GCC | | DCRDLARHQRTHTGEKPYKCPEC | | X₁₉HX₂₀X₂₁X₂₂X₂₃X₂₄X₈X₉CX₁₀X₁₁CX₁₂X₁₃X₁₄X₁₅X₁₆TKNSLTEHX₁₇ | |
| | CTA | | GKSFSTKNSLTEHQRTHTGEKPY | | X₁₈X₁₉HX₂₀X₂₁X₂₂X₂₃X₂₄X₈X₉CX₁₀X₁₁CX₁₂X₁₃X₁₄X₁₅X₁₆TSHSLTEH | |
| | | | KCPECGKSFSTSHSLTEHQRTHT | | X₁₇X₁₈X₁₉HX₂₀X₂₁X₂₂X₂₃X₂₄X₈X₉CX₁₀X₁₁CX₁₂X₁₃X₁₄X₁₅X₁₆RSDKLT | |
| | | | GEKPYKCPECGKSFSRSDKLTEH | | EHX₁₇X₁₈X₁₉HX₂₀X₂₁X₂₂X₂₃X₂₄X₈X₉CX₁₀X₁₁CX₁₂X₁₃X₁₄X₁₅X₁₆RNDT | |
| | | | QRTHTGEKPYKCPECGKSFSRND | | LTEHX₁₇X₁₈X₁₉HX₂₀X₂₁X₂₂X₂₃X₂₄X₈X₉CX₁₀X₁₁CX₁₂X₁₃X₁₄X₁₅X₁₆RT | |
| | | | TLTEHQRTHTGEKPYKCPECGKS | | DTLRDHX₁₇X₁₃X₁₉HX₂₀X₂₁X₂₂X₂₃X₂₄X₂₅X₂₆X₂₇X₂₈X₂₉X₃₀ | |
| | | | FSRTDTLRDHQRTHTGEKPTGKK | | | |
| | | | TS | | | |
| ccgcggcca | CCG CGG | 1302 | LEPGEKPYKCPECGKSFSSKKHL | 1851 | X₁X₂X₃X₄X₅X₆X₇X₈X₉CX₁₀X₁₁CX₁₂X₁₃X₁₄X₁₅X₁₆SKKHLAEHX₁₇X₁₈X₁₉ | 2400 |
| cctgcccta | CCA CCT | | AEHQRTHTGEKPYKCPECGKSFS | | HX₂₀X₂₁X₂₂X₂₃X₂₄X₈X₉CX₁₀X₁₁CX₁₂X₁₃X₁₄X₁₅X₁₆QNSTLTEHX₁₇X₁₈ | |
| ccc | GCC CTA | | QNSTLTEHQRTHTGEKPYKCPEC | | X₁₉HX₂₀X₂₁X₂₂X₂₃X₂₄X₈X₉CX₁₀X₁₁CX₁₂X₁₃X₁₄X₁₅X₁₆DCRDLARHX₁₇ | |
| | CCC | | GKSFSDCRDLARHQRTHTGEKPY | | X₁₈X₁₉HX₂₀X₂₁X₂₂X₂₃X₂₄X₈X₉CX₁₀X₁₁CX₁₂X₁₃X₁₄X₁₅X₁₆TKNSLTEH | |
| | | | KCPECGKSFSTKNSLTEHQRTHT | | X₁₇X₁₈X₁₉HX₂₀X₂₁X₂₂X₂₃X₂₄X₈X₉CX₁₀X₁₁CX₁₂X₁₃X₁₄X₁₅X₁₆TSHSLT | |
| | | | GEKPYKCPECGKSFSTSHSLTEH | | EHX₁₇X₁₈X₁₉HX₂₀X₂₁X₂₂X₂₃X₂₄X₈X₉CX₁₀X₁₁CX₁₂X₁₃X₁₄X₁₅X₁₆RSDK | |
| | | | QRTHTGEKPYKCPECGKSFSRSD | | LTEHX₁₇X₁₈X₁₉HX₂₀X₂₁X₂₂X₂₃X₂₄X₈X₉CX₁₀X₁₁CX₁₂X₁₃X₁₄X₁₅X₁₆RN | |
| | | | KLTEHQRTHTGEKPYKCPECGKS | | DTLTEHX₁₇X₁₈X₁₉HX₂₀X₂₁X₂₂X₂₃X₂₄X₂₅X₂₆X₂₇X₂₈X₂₉X₃₀ | |
| | | | FSRNDTLTEHQRTHTGEKPTGKK | | | |
| | | | TS | | | |
| ccacctgcc | CCA CCT | 1303 | LEPGEKPYKCPECGKSFSRSDDL | 1852 | X₁X₂X₃X₄X₅X₆X₇X₈X₉CX₁₀X₁₁CX₁₂X₁₃X₁₄X₁₅X₁₆RSDDLVRHX₁₇X₁₈X₁₉ | 2401 |
| ctaccctgg | GCC CTA | | VRHQRTHTGEKPYKCPECGKSFS | | HX₂₀X₂₁X₂₂X₂₃X₂₄X₈X₉CX₁₀X₁₁CX₁₂X₁₃X₁₄X₁₅X₁₆RSDHLTTHX₁₇X₁₈ | |
| gcg | CCC TGG | | RSDHLTTHQRTHTGEKPYKCPEC | | X₁₉HX₂₀X₂₁X₂₂X₂₃X₂₄X₈X₉CX₁₀X₁₁CX₁₂X₁₃X₁₄X₁₅X₁₆SKKHLAEHX₁₇ | |
| | GCG | | GKSFSSKKHLAEHQRTHTGEKPY | | X₁₈X₁₉HX₂₀X₂₁X₂₂X₂₃X₂₄X₈X₉CX₁₀X₁₁CX₁₂X₁₃X₁₄X₁₅X₁₆QNSTLTEH | |
| | | | KCPECGKSFSQNSTLTEHQRTHT | | X₁₇X₁₈X₁₉HX₂₀X₂₁X₂₂X₂₃X₂₄X₈X₉CX₁₀X₁₁CX₁₂X₁₃X₁₄X₁₅X₁₆DCRDLA | |
| | | | GEKPYKCPECGKSFSDCRDLARH | | RHX₁₇X₁₈X₁₉HX₂₀X₂₁X₂₂X₂₃X₂₄X₈X₉CX₁₀X₁₁CX₁₂X₁₃X₁₄X₁₅X₁₆TKNS | |
| | | | QRTHTGEKPYKCPECGKSFSTKN | | LTEHX₁₇X₁₈X₁₉HX₂₀X₂₁X₂₂X₂₃X₂₄X₈X₉CX₁₀X₁₁CX₁₂X₁₃X₁₄X₁₅X₁₆TS | |
| | | | SLTEHQRTHTGEKPYKCPECGKS | | HSLTEHX₁₇X₁₈X₁₉HX₂₀X₂₁X₂₂X₂₃X₂₄X₂₅X₂₆X₂₇X₂₈X₂₉X₃₀ | |
| | | | FSTSHSLTEHQRTHTGEKPTGKK | | | |
| | | | TS | | | |
| cctgcccta | CCT GCC | 1304 | LEPGEKPYKCPECGKSFSSKKHL | 1853 | X₁X₂X₃X₄X₅X₆X₇X₈X₉CX₁₀X₁₁CX₁₂X₁₃X₁₄X₁₅X₁₆SKKHLAEHX₁₇X₁₈X₁₉ | 2402 |
| ccctgggcg | CTA CCC | | AEHQRTHTGEKPYKCPECGKSFS | | HX₂₀X₂₁X₂₂X₂₃X₂₄X₈X₉CX₁₀X₁₁CX₁₂X₁₃X₁₄X₁₅X₁₆RSDDLVRHX₁₇X₁₈ | |
| ccc | TGG gcg | | RSDDLVRHQRTHTGEKPYKCPEC | | X₁₉HX₂₀X₂₁X₂₂X₂₃X₂₄X₈X₉CX₁₀X₁₁CX₁₂X₁₃X₁₄X₁₅X₁₆RSDHLTTHX₁₇ | |
| | CCC | | GKSFSRSDHLTTHQRTHTGEKPY | | X₁₈X₁₉HX₂₀X₂₁X₂₂X₂₃X₂₄X₈X₉CX₁₀X₁₁CX₁₂X₁₃X₁₄X₁₅X₁₆SKKHLAEH | |
| | | | KCPECGKSFSSKKHLAEHQRTHT | | X₁₇X₁₈X₁₉HX₂₀X₂₁X₂₂X₂₃X₂₄X₈X₉CX₁₀X₁₁CX₁₂X₁₃X₁₄X₁₅X₁₆QNSTLT | |
| | | | GEKPYKCPECGKSFSQNSTLTEH | | EHX₁₇X₁₈X₁₉HX₂₀X₂₁X₂₂X₂₃X₂₄X₈X₉CX₁₀X₁₁CX₁₂X₁₃X₁₄X₁₅X₁₆DCRD | |
| | | | QRTHTGEKPYKCPECGKSFSDCR | | LARHX₁₇X₁₈X₁₉HX₂₀X₂₁X₂₂X₂₃X₂₄X₈X₉CX₁₀X₁₁CX₁₂X₁₃X₁₄X₁₅X₁₆TK | |
| | | | DLARHQRTHTGEKPYKCPECGKS | | NSLTEHX₁₇X₁₃X₁₉HX₂₀X₂₁X₂₂X₂₃X₂₄X₂₅X₂₆X₂₇X₂₈X₂₉X₃₀ | |
| | | | FSTKNSLTEHQRTHTGEKPTGKK | | | |
| | | | TS | | | |
| gccctaccc | GCC CTA | 1305 | LEPGEKPYKCPECGKSFSDKKDL | 1854 | X₁X₂X₃X₄X₅X₆X₇X₈X₉CX₁₀X₁₁CX₁₂X₁₃X₁₄X₁₅X₁₆DKKDLTRHX₁₇X₁₈X₁₉ | 2403 |
| tgggcgccc | CCC TGG | | TRHQRTHTGEKPYKCPECGKSFS | | HX₂₀X₂₁X₂₂X₂₃X₂₄X₈X₉CX₁₀X₁₁CX₁₂X₁₃X₁₄X₁₅X₁₆SKKHLAEHX₁₇X₁₈ | |
| acc | gcg CCC | | SKKHLAEHQRTHTGEKPYKCPEC | | X₁₉HX₂₀X₂₁X₂₂X₂₃X₂₄X₈X₉CX₁₀X₁₁CX₁₂X₁₃X₁₄X₁₅X₁₆RSDDLVRHX₁₇ | |
| | ACC | | GKSFSRSDDLVRHQRTHTGEKPY | | X₁₈X₁₉HX₂₀X₂₁X₂₂X₂₃X₂₄X₈X₉CX₁₀X₁₁CX₁₂X₁₃X₁₄X₁₅X₁₆RSDHLTTH | |
| | | | KCPECGKSFSRSDHLTTHQRTHT | | X₁₇X₁₈X₁₉HX₂₀X₂₁X₂₂X₂₃X₂₄X₈X₉CX₁₀X₁₁CX₁₂X₁₃X₁₄X₁₅X₁₆SKKHLA | |
| | | | GEKPYKCPECGKSFSSKKHLAEH | | EHX₁₇X₁₈X₁₉HX₂₀X₂₁X₂₂X₂₃X₂₄X₈X₉CX₁₀X₁₁CX₁₂X₁₃X₁₄X₁₅X₁₆QNST | |
| | | | QRTHTGEKPYKCPECGKSFSQNS | | LTEHX₁₇X₁₈X₁₉HX₂₀X₂₁X₂₂X₂₃X₂₄X₈X₉CX₁₀X₁₁CX₁₂X₁₃X₁₄X₁₅X₁₆DC | |
| | | | TLTEHQRTHTGEKPYKCPECGKS | | RDLARHX₁₇X₁₃X₁₉HX₂₀X₂₁X₂₂X₂₃X₂₄X₂₅X₂₆X₂₇X₂₈X₂₉X₃₀ | |
| | | | FSDCRDLARHQRTHTGEKPTGKK | | | |
| | | | TS | | | |
| ccctgggcg | CCC TGG | 1306 | LEPGEKPYKCPECGKSFSRKDNL | 1855 | X₁X₂X₃X₄X₅X₆X₇X₈X₉CX₁₀X₁₁CX₁₂X₁₃X₁₄X₁₅X₁₆RKDNLKNHX₁₇X₁₈X₁₉ | 2404 |
| cccaccccg | gcg CCC | | KNHQRTHTGEKPYKCPECGKSFS | | HX₂₀X20X₂₂X₂₃X₂₄X₈X₉CX₁₀X₁₁CX₁₂X₁₃X₁₄X₁₅X₁₆RNDTLTEHX₁₇X₁₈ | |
| aag | ACC CCG | | RNDTLTEHQRTHTGEKPYKCPEC | | X₁₉HX₂₀X₂₁X₂₂X₂₃X₂₄X₈X₉CX₁₀X₁₁CX₁₂X₁₃X₁₄X₁₅X₁₆DKKDLTRHX₁₇ | |
| | AAG | | GKSFSDKKDLTRHQRTHTGEKPY | | X₁₈X₁₉HX₂₀X₂₁X₂₂X₂₃X₂₄X₈X₉CX₁₀X₁₁CX₁₂X₁₃X₁₄X₁₅X₁₆SKKHLAEH | |
| | | | KCPECGKSFSSKKHLAEHQRTHT | | X₁₇X₁₈X₁₉HX₂₀X₂₁X₂₂X₂₃X₂₄X₈X₉CX₁₀X₁₁CX₁₂X₁₃X₁₄X₁₅X₁₆RSDDLV | |
| | | | GEKPYKCPECGKSFSRSDDLVRH | | RHX₁₇X₁₈X₁₉HX₂₀X₂₁X₂₂X₂₃X₂₄X₈X₉CX₁₀X₁₁CX₁₂X₁₃X₁₄X₁₅X₁₆RSDH | |
| | | | QRTHTGEKPYKCPECGKSFSRSD | | LTTHX₁₇X₁₈X₁₉HX₂₀X₂₁X₂₂X₂₃X₂₄X₈X₉CX₁₀X₁₁CX₁₂XEX₁₄X₁₅X₁₆SK | |
| | | | HLTTHQRTHTGEKPYKCPECGKS | | KHLAEHX₁₇X₁₈X₁₉HX₂₀X₂₁X₂₂X₂₃X₂₄X₂₅X₂₆X₂₇X₂₈X₂₉X₃₀ | |
| | | | FSSKKHLAEHQRTHTGEKPTGKK | | | |
| | | | TS | | | |
| tgggcgccc | TGG gcg | 1307 | LEPGEKPYKCPECGKSFSDCRDL | 1856 | X₁X₂X₃X₄X₅X₆X₇X₈X₉CX₁₀X₁₁CX₁₂X₁₃X₁₄X₁₅X₁₆DCRDLARHX₁₇X₁₈X₁₉ | 2405 |
| accccgaag | CCC ACC | | ARHQRTHTGEKPYKCPECGKSFS | | HX₂₀X₂₁X₂₂X₂₃X₂₄X₈X₉CX₁₀X₁₁CX₁₂X₁₃X₁₄X₁₅X₁₆RKDNLKNHX₁₇X₁₈ | |
| gcc | CCG AAG | | RKDNLKNHQRTHTGEKPYKCPEC | | X₁₉HX₂₀X₂₁X₂₂X₂₃X₂₄X₈X₉CX₁₀X₁₁CX₁₂X₁₃X₁₄X₁₅X₁₆RNDTLTEHX₁₇ | |
| | GCC | | GKSFSRNDTLTEHQRTHTGEKPY | | X₁₈X₁₉HX₂₀X₂₁X₂₂X₂₃X₂₄X₈X₉CX₁₀X₁₁CX₁₂X₁₃X₁₄X₁₅X₁₆DKKDLTRH | |
| | | | KCPECGKSFSDKKDLTRHQRTHT | | X₁₇X₁₈X₁₉HX₂₀X₂₁X₂₂X₂₃X₂₄X₈X₉CX₁₀X₁₁CX₁₂X₁₃X₁₄X₁₅X₁₆SKKHLA | |
| | | | GEKPYKCPECGKSFSSKKHLAEH | | EHX₁₇X₁₈X₁₉HX₂₀X₂₁X₂₂X₂₃X₂₄X₈X₉CX₁₀X₁₁CX₁₂X₁₃X₁₄X₁₅X₁₆RSDD | |
| | | | QRTHTGEKPYKCPECGKSFSRSD | | LVRHX₁₇X₁₈X₁₉HX₂₀X₂₁X₂₂X₂₃X₂₄X₈X₉CX₁₀X₁₁CX₁₂X₁₃X₁₄X₁₅X₁₆RS | |
| | | | DLVRHQRTHTGEKPYKCPECGKS | | DHLTTHX₁₇X₁₈X₁₉HX₂₀X₂₁X₂₂X₂₃X₂₄X₂₅X₂₆X₂₇X₂₈X₂₉X₃₀ | |
| | | | FSRSDHLTTHQRTHTGEKPTGKK | | | |
| | | | TS | | | |
| ctaccctgg | CTA CCC | 1308 | LEPGEKPYKCPECGKSFSRNDTL | 1857 | X₁X₂X₃X₄X₅X₆X₇X₈X₉CX₁₀X₁₁CX₁₂X₁₃X₁₄X₁₅X₁₆RNDTLTEHX₁₇X₁₈X₁₉ | 2406 |
| gcgcccacc | TGG gcg | | TEHQRTHTGEKPYKCPECGKSFS | | HX₂₀X₂₁X₂₂X₂₃X₂₄X₈X₉CX₁₀X₁₁CX₁₂X₁₃X₁₄X₁₅X₁₆DKKDLTRHX₁₇X₁₈ | |
| ccg | CCC ACC | | DKKDLTRHQRTHTGEKPYKCPEC | | X₁₉HX₂₀X₂₁X₂₂X₂₃X₂₄X₈X₉CX₁₀X₁₁CX₁₂X₁₃X₁₄X₁₅X₁₆SKKHLAEHX₁₇ | |
| | CCG | | GKSFSSKKHLAEHQRTHTGEKPY | | X₁₈X₁₉HX₂₀X₂₁X₂₂X₂₃X₂₄X₈X₉CX₁₀X₁₁CX₁₂X₁₃X₁₄X₁₅X₁₆RSDDLVRH | |
| | | | KCPECGKSFSRSDDLVRHQRTHT | | X₁₇X₁₈X₁₉HX₂₀X₂₁X₂₂X₂₃X₂₄X₈X₉CX₁₀X₁₁CX₁₂X₁₃X₁₄X₁₅X₁₆RSDHLT | |
| | | | GEKPYKCPECGKSFSRSDHLTTH | | THX₁₇X₁₈X₁₉HX₂₀X₂₁X₂₂X₂₃X₂₄X₈X₉CX₁₀X₁₁CX₁₂X₁₃X₁₄X₁₅X₁₆SKKH | |
| | | | QRTHTGEKPYKCPECGKSFSSKK | | LAEHX₁₇X₁₈X₁₉HX₂₀X₂₁X₂₂X₂₃X₂₄X₈X₉CX₁₀X₁₁CX₁₂X₁₃X₁₄X₁₅X₁₆QN | |
| | | | HLAEHQRTHTGEKPYKCPECGKS | | STLTEHX₁₇X₁₃X₁₉HX₂₀X₂₁X₂₂X₂₃X₂₄X₂₅X₂₆X₂₇X₂₈X₂₉X₃₀ | |
| | | | FSQNSTLTEHQRTHTGEKPTGKK | | | |
| | | | TS | | | |
| cccaccccg | CCC ACC | 1309 | LEPGEKPYKCPECGKSFSDCRDL | 1858 | X₁X₂X₃X₄X₅X₆X₇X₈X₉CX₁₀X₁₁CX₁₂X₁₃X₁₄X₁₅X₁₆DCRDLARHX₁₇X₁₈X₁₉ | 2407 |
| aaggccccc | CCG AAG | | ARHQRTHTGEKPYKCPECGKSFS | | HX₂₀X₂₁X₂₂X₂₃X₂₄X₈X₉CX₁₀X₁₁CX₁₂X₁₃X₁₄X₁₅X₁₆SKKHLAEHX₁₇X₁₈ | |
| gcc | GCC CCC | | SKKHLAEHQRTHTGEKPYKCPEC | | X₁₉HX₂₀X₂₁X₂₂X₂₃X₂₄X₈X₉CX₁₀X₁₁CX₁₂X₁₃X₁₄X₁₅X₁₆DCRDLARHX₁₇ | |
| | GCC | | GKSFSDCRDLARHQRTHTGEKPY | | X₁₈X₁₉HX₂₀X₂₁X₂₂X₂₃X₂₄X₈X₉CX₁₀X₁₁CX₁₂X₁₃X₁₄X₁₅X₁₆RKDNLKNH | |
| | | | KCPECGKSFSRKDNLKNHQRTHT | | X₁₇X₁₈X₁₉HX₂₀X₂₁X₂₂X₂₃X₂₄X₈X₉CX₁₀X₁₁CX₁₂X₁₃X₁₄X₁₅X₁₆RNDTLT | |
| | | | GEKPYKCPECGKSFSRNDTLTEH | | EHX₁₇X₁₈X₁₉HX₂₀X₂₁X₂₂X₂₃X₂₄X₈X₉CX₁₀X₁₁CX₁₂X₁₃X₁₄X₁₅X₁₆DKKD | |
| | | | QRTHTGEKPYKCPECGKSFSDKK | | LTRHX₁₇X₁₈X₁₉HX₂₀X₂₁X₂₂X₂₃X₂₄X₈X₉CX₁₀X₁₁CX₁₂X₁₃X₁₄X₁₅X₁₆SK | |
| | | | DLTRHQRTHTGEKPYKCPECGKS | | KHLAEHX₁₇X₁₈X₁₉HX₂₀X₂₁X₂₂X₂₃X₂₄X₂₅X₂₆X₂₇X₂₈X₂₉X₃₀ | |
| | | | FSSKKHLAEHQRTHTGEKPTGKK | | | |
| | | | TS | | | |
| gcgcccacc | gcg CCC | 1310 | LEPGEKPYKCPECGKSFSSKKHL | 1859 | X₁X₂X₃X₄X₅X₆X₇X₈X₉CX₁₀X₁₁CX₁₂X₁₃X₁₄X₁₅X₁₆SKKHLAEHX₁₇X₁₈X₁₉ | 2408 |
| ccgaaggcc | ACC CCG | | AEHQRTHTGEKPYKCPECGKSFS | | HX₂₀X₂₁X₂₂X₂₃X₂₄X₈X₉CX₁₀X₁₁CX₁₂X₁₃X₁₄X₁₅X₁₆DCRDLARHX₁₇X₁₈ | |
| ccc | AAG GCC | | DCRDLARHQRTHTGEKPYKCPEC | | X₁₉HX₂₀X₂₁X₂₂X₂₃X₂₄X₈X₉CX₁₀X₁₁CX₁₂X₁₃X₁₄X₁₅X₁₆RKDNLKNHX₁₇ | |
| | CCC | | GKSFSRKDNLKNHQRTHTGEKPY | | X₁₈X₁₉HX₂₀X₂₁X₂₂X₂₃X₂₄X₈X₉CX₁₀X₁₁CX₁₂X₁₃X₁₄X₁₅X₁₆RNDTLTEH | |
| | | | KCPECGKSFSRNDTLTEHQRTHT | | X₁₇X₁₈X₁₉HX₂₀X₂₁X₂₂X₂₃X₂₄X₈X₉CX₁₀X₁₁CX₁₂X₁₃X₁₄X₁₅X₁₆DKKDLT | |
| | | | GEKPYKCPECGKSFSDKKDLTRH | | RHX₁₇X₁₈X₁₉HX₂₀X₂₁X₂₂X₂₃X₂₄X₈X₉CX₁₀X₁₁CX₁₂X₁₃X₁₄X₁₅X₁₆SKKH | |
| | | | QRTHTGEKPYKCPECGKSFSSKK | | LAEHX₁₇X₁₈X₁₉HX₂₀X₂₁X₂₂X₂₃X₂₄X₈X₉CX₁₀X₁₁CX₁₂X₁₃X₁₄X₁₅X₁₆RS | |
| | | | HLAEHQRTHTGEKPYKCPECGKS | | DDLVRHX₁₇X₁₈X₁₉HX₂₀X₂₁X₂₂X₂₃X₂₄X₂₅X₂₆X₂₇X₂₈X₂₉X₃₀ | |
| | | | FSRSDDLVRHQRTHTGEKPTGKK | | | |
| | | | TS | | | |
| cctaccctg | CCT ACC | 1311 | LEPGEKPYKCPECGKSFSSKKHL | 1860 | X₁X₂X₃X₄X₅X₆X₇X₈X₉CX₁₀X₁₁CX₁₂X₁₃X₁₄X₁₅X₁₆SKKHLAEHX₁₇X₁₈X₁₉ | 2409 |
| ggcgcccac | CTG GGC | | AEHQRTHTGEKPYKCPECGKSFS | | HX₂₀X₂₁X₂₂X₂₃X₂₄X₈X₉CX₁₀X₁₁CX₁₂X₁₃X₁₄X₁₅X₁₆SKKALTEHX₁₇X₁₈ | |
| ccc | GCC CAC | | SKKALTEHQRTHTGEKPYKCPEC | | X₁₉HX₂₀X₂₁X₂₂X₂₃X₂₄X₈X₉CX₁₀X₁₁CX₁₂X₁₃X₁₄X₁₅X₁₆DCRDLARHX₁₇ | |
| | CCC | | GKSFSDCRDLARHQRTHTGEKPY | | X₁₈X₁₉HX₂₀X₂₁X₂₂X₂₃X₂₄X₈X₉CX₁₀X₁₁CX₁₂X₁₃X₁₄X₁₅X₁₆DPGHLVRH | |
| | | | KCPECGKSFSDPGHLVRHQRTHT | | X₁₇X₁₈X₁₉HX₂₀X₂₁X₂₂X₂₃X₂₄X₈X₉CX₁₀X₁₁CX₁₂X₁₃X₁₄X₁₅X₁₆RNDALT | |
| | | | GEKPYKCPECGKSFSRNDALTEH | | EHX₁₇X₁₈X₁₉HX₂₀X₂₁X₂₂X₂₃X₂₄X₈X₉CX₁₀X₁₁CX₁₂X₁₃X₁₄X₁₅X₁₆DKKD | |
| | | | QRTHTGEKPYKCPECGKSFSDKK | | LTRHX₁₇X₁₈X₁₉HX₂₀X₂₁X₂₂X₂₃X₂₄X₈X₉CX₁₀X₁₁CX₁₂X₁₃X₁₄X₁₅X₁₆TK | |
| | | | DLTRHQRTHTGEKPYKCPECGKS | | NSLTEHX₁₇X₁₈X₁₉HX₂₀X₂₁X₂₂X₂₃X₂₄X₂₅X₂₆X₂₇X₂₈X₂₉X₃₀ | |
| | | | FSTKNSLTEHQRTHTGEKPTGKK | | | |
| | | | TS | | | |
| ctgggcgcc | CTG GGC | 1312 | LEPGEKPYKCPECGKSFSDPGHL | 1861 | X₁X₂X₃X₄X₅X₆X₇X₈X₉CX₁₀X₁₁CX₁₂X₁₃X₁₄X₁₅X₁₆DPGHLVRHX₁₇X₁₈X₁₉ | 2410 |
| caccccgaa | GCC CAC | | VRHQRTHTGEKPYKCPECGKSFS | | HX₂₀X₂₁X₂₂X₂₃X₂₄X₈X₉CX₁₀X₁₁CX₁₂X₁₃X₁₄X₁₅X₁₆QSSNLVRHX₁₇X₁₈ | |
| ggc | CCC GAA | | QSSNLVRHQRTHTGEKPYKCPEC | | X₁₉HX₂₀X₂₁X₂₂X₂₃X₂₄X₈X₉CX₁₀X₁₁CX₁₂X₁₃X₁₄X₁₅X₁₆SKKHLAEHX₁₇ | |
| | GGC | | GKSFSSKKHLAEHQRTHTGEKPY | | X₁₈X₁₉HX₂₀X₂₁X₂₂X₂₃X₂₄X₈X₉CX₁₀X₁₁CX₁₂X₁₃X₁₄X₁₅X₁₆SKKALTEH | |
| | | | KCPECGKSFSSKKALTEHQRTHT | | X₁₇X₁₈X₁₉HX₂₀X₂₁X₂₂X₂₃X₂₄X₈X₉CX₁₀X₁₁CX₁₂X₁₃X₁₄X₁₅X₁₆DCRDLA | |
| | | | GEKPYKCPECGKSFSDCRDLARH | | RHX₁₇X₁₈X₁₉HX₂₀X₂₁X₂₂X₂₃X₂₄X₈X₉CX₁₀X₁₁CX₁₂X₁₃X₁₄X₁₅X₁₆DPGH | |
| | | | QRTHTGEKPYKCPECGKSFSDPG | | LVRHX₁₇X₁₈X₁₉HX₂₀X₂₁X₂₂X₂₃X₂₄X₈X₉CX₁₀X₁₁CX₁₂XEX₁₄X₁₅X₁₆RN | |
| | | | HLVRHQRTHTGEKPYKCPECGKS | | DALTEHX₁₇X₁₈X₁₉HX₂₀X₂₁X₂₂X₂₃X₂₄X₂₅X₂₆X₂₇X₂₈X₂₉X₃₀ | |
| | | | FSRNDALTEHQRTHTGEKPTGKK | | | |
| | | | TS | | | |
| accctgggc | ACC CTG | 106 | LEPGEKPYKCPECGKSFSQSSNL | 107 | X₁X₂X₃X₄X₅X₆X₇X₈X₉CX₁₀X₁₁CX₁₂X₁₃X₁₄X₁₅X₁₆QSSNLVRHX₁₇X₁₈X₁₉ | 314 |
| gcccacccc | GGC GCC | | VRHQRTHTGEKPYKCPECGKSFS | | HX₂₀X₂₁X₂₂X₂₃X₂₄X₈X₉CX₁₀X₁₁CX₁₂X₁₃X₁₄X₁₅X₁₆SKKHLAEHX₁₇X₁₈ | |
| gaa | CAC CCC | | SKKHLAEHQRTHTGEKPYKCPEC | | X₁₉HX₂₀X₂₁X₂₂X₂₃X₂₄X₈X₉CX₁₀X₁₁CX₁₂X₁₃X₁₄X₁₅X₁₆SKKALTEHX₁₇ | |
| | GAA | | GKSFSSKKALTEHQRTHTGEKPY | | X₁₈X₁₉HX₂₀X₂₁X₂₂X₂₃X₂₄X₈X₉CX₁₀X₁₁CX₁₂X₁₃X₁₄X₁₅X₁₆DCRDLARH | |
| | | | KCPECGKSFSDCRDLARHQRTHT | | X₁₇X₁₈X₁₉HX₂₀X₂₁X₂₂X₂₃X₂₄X₈X₉CX₁₀X₁₁CX₁₂X₁₃X₁₄X₁₅X₁₆DPGHLV | |
| | | | GEKPYKCPECGKSFSDPGHLVRH | | RHX₁₇X₁₈X₁₉HX₂₀X₂₁X₂₂X₂₃X₂₄X₈X₉CX₁₀X₁₁CX₁₂X₁₃X₁₄X₁₅X₁₆RNDA | |
| | | | QRTHTGEKPYKCPECGKSFSRND | | LTEHX₁₇X₁₈X₁₉HX₂₀X₂₁X₂₂X₂₃X₂₄X₈X₉CX₁₀X₁₁CX₁₂X₁₃X₁₄X₁₅X₁₆DK | |
| | | | ALTEHQRTHTGEKPYKCPECGKS | | KDLTRHX₁₇X₁₈X₁₉HX₂₀X₂₁X₂₂X₂₃X₂₄X₂₅X₂₆X₂₇X₂₈X₂₉X₃₀ | |
| | | | FSDKKDLTRHQRTHTGEKPTGKK | | | |
| | | | TS | | | |
| ggcgcccac | GGC GCC | 1313 | LEPGEKPYKCPECGKSFSSKKHL | 1862 | X₁X₂X₃X₄X₅X₆X₇X₈X₉CX₁₀X₁₁CX₁₂X₁₃X₁₄X₁₅X₁₆SKKHLAEHX₁₇X₁₈X₁₉ | 2411 |
| cccgaaggc | CAC CCC | | AEHQRTHTGEKPYKCPECGKSFS | | HX₂₀X₂₁X₂₂X₂₃X₂₄X₈X₉CX₁₀X₁₁CX₁₂X₁₃X₁₄X₁₅X₁₆DPGHLVRHX₁₇X₁₈ | |
| ccc | GAA GGC | | DPGHLVRHQRTHTGEKPYKCPEC | | X₁₉HX₂₀X₂₁X₂₂X₂₃X₂₄X₈X₉CX₁₀X₁₁CX₁₂X₁₃X₁₄X₁₅X₁₆QSSNLVRHX₁₇ | |
| | CCC | | GKSFSQSSNLVRHQRTHTGEKPY | | X₁₈X₁₉HX₂₀X₂₁X₂₂X₂₃X₂₄X₈X₉CX₁₀X₁₁CX₁₂X₁₃X₁₄X₁₅X₁₆SKKHLAEH | |
| | | | KCPECGKSFSSKKHLAEHQRTHT | | X₁₇X₁₈X₁₉HX₂₀X₂₁X₂₂X₂₃X₂₄X₈X₉CX₁₀X₁₁CX₁₂X₁₃X₁₄X₁₅X₁₆SKKALT | |
| | | | GEKPYKCPECGKSFSSKKALTEH | | EHX₁₇X₁₈X₁₉HX₂₀X₂₁X₂₂X₂₃X₂₄X₈X₉CX₁₀X₁₁CX₁₂X₁₃X₁₄X₁₅X₁₆DCRD | |
| | | | QRTHTGEKPYKCPECGKSFSDCR | | LARHX₁₇X₁₈X₁₉HX₂₀X₂₁X₂₂X₂₃X₂₄X₈X₉CX₁₀X₁₁CX₁₂X₁₃X₁₄X₁₅X₁₆DP | |
| | | | DLARHQRTHTGEKPYKCPECGKS | | GHLVRHX₁₇X₁₈X₁₉HX₂₀X₂₁X₂₂X₂₃X₂₄X₂₅X₂₆X₂₇X₂₈X₂₉X₃₀ | |
| | | | FSDPGHLVRHQRTHTGEKPTGKK | | | |
| | | | TS | | | |
| caccccgaa | CAC CCC | 1314 | LEPGEKPYKCPECGKSFSTKNSL | 1863 | X₁X₂X₃X₄X₅X₆X₇X₈X₉CX₁₀X₁₁CX₁₂X₁₃X₁₄X₁₅X₁₆TKNSLTEHX₁₇X₁₈X₁₉ | 2412 |
| ggcccccgc | GAA GGC | | TEHQRTHTGEKPYKCPECGKSFS | | HX₂₀X₂₁X₂₂X₂₃X₂₄X₈X₉CX₁₀X₁₁CX₁₂X₁₃X₁₄X₁₅X₁₆HTGHLLEHX₁₇X₁₈ | |
| cct | CCC CGC | | HTGHLLEHQRTHTGEKPYKCPEC | | X₁₉HX₂₀X₂₁X₂₂X₂₃X₂₄X₈X₉CX₁₀X₁₁CX₁₂X₁₃X₁₄X₁₅X₁₆SKKHLAEHX₁₇ | |
| | CCT | | GKSFSSKKHLAEHQRTHTGEKPY | | X₁₈X₁₉HX₂₀X₂₁X₂₂X₂₃X₂₄X₈X₉CX₁₀X₁₁CX₁₂X₁₃X₁₄X₁₅X₁₆DPGHLVRH | |
| | | | KCPECGKSFSDPGHLVRHQRTHT | | X₁₇X₁₈X₁₉HX₂₀X₂₁X₂₂X₂₃X₂₄X₈X₉CX₁₀X₁₁CX₁₂X₁₃X₁₄X₁₅X₁₆QSSNLV | |
| | | | GEKPYKCPECGKSFSQSSNLVRH | | RHX₁₇X₁₈X₁₉HX₂₀X₂₁X₂₂X₂₃X₂₄X₈X₉CX₁₀X₁₁CX₁₂X₁₃X₁₄X₁₅X₁₆SKKH | |
| | | | QRTHTGEKPYKCPECGKSFSSKK | | LAEHX₁₇X₁₈X₁₉HX₂₀X₂₁X₂₂X₂₃X₂₄X₈X₉CX₁₀X₁₁CX₁₂X₁₃X₁₄X₁₅X₁₆SK | |
| | | | HLAEHQRTHTGEKPYKCPECGKS | | KALTEHX₁₇X₁₈X₁₉HX₂₀X₂₁X₂₂X₂₃X₂₄X₂₅X₂₆X₂₇X₂₈X₂₉X₃₀ | |
| | | | FSSKKALTEHQRTHTGEKPTGKK | | | |
| | | | TS | | | |
| gcccacccc | GCC CAC | 1315 | LEPGEKPYKCPECGKSFSHTGHL | 1864 | X₁X₂X₃X₄X₅X₆X₇X₈X₉CX₁₀X₁₁CX₁₂X₁₃X₁₄X₁₅X₁₆HTGHLLEHX₁₇X₁₈X₁₉ | 2413 |
| gaaggcccc | CCC GAA | | LEHQRTHTGEKPYKCPECGKSFS | | HX₂₀X₂₁X₂₂X₂₃X₂₄X₈X₉CX₁₀X₁₁CX₁₂X₁₃X₁₄X₁₅X₁₆SKKHLAEHX₁₇X₁₈ | |
| cgc | GGC CCC | | SKKHLAEHQRTHTGEKPYKCPEC | | X₁₉HX₂₀X₂₁X₂₂X₂₃X₂₄X₈X₉CX₁₀X₁₁CX₁₂X₁₃X₁₄X₁₅X₁₆DPGHLVRHX₁₇ | |
| | CGC | | GKSFSDPGHLVRHQRTHTGEKPY | | X₁₈X₁₉HX₂₀X₂₁X₂₂X₂₃X₂₄X₈X₉CX₁₀X₁₁CX₁₂X₁₃X₁₄X₁₅X₁₆QSSNLVRH | |
| | | | KCPECGKSFSQSSNLVRHQRTHT | | X₁₇X₁₈X₁₉HX₂₀X₂₁X₂₂X₂₃X₂₄X₈X₉CX₁₀X₁₁CX₁₂X₁₃X₁₄X₁₅X₁₆SKKHLA | |
| | | | GEKPYKCPECGKSFSSKKHLAEH | | EHX₁₇X₁₈X₁₉HX₂₀X₂₁X₂₂X₂₃X₂₄X₈X₉CX₁₀X₁₁CX₁₂X₁₃X₁₄X₁₅X₁₆SKKA | |
| | | | QRTHTGEKPYKCPECGKSFSSKK | | LTEHX₁₇X₁₈X₁₉HX₂₀X₂₁X₂₂X₂₃X₂₄X₈X₉CX₁₀X₁₁CX₁₂X₁₃X₁₄X₁₅X₁₆DC | |
| | | | ALTEHQRTHTGEKPYKCPECGKS | | RDLARHX₁₇X₁₈X₁₉HX₂₀X₂₁X₂₂X₂₃X₂₄X₂₅X₂₆X₂₇X₂₈X₂₉X₃₀ | |
| | | | FSDCRDLARHQRTHTGEKPTGKK | | | |
| | | | TS | | | |
| cccgaaggc | CCC GAA | 1316 | LEPGEKPYKCPECGKSFSRNDTL | 1865 | X₁X₂X₃X₄X₅X₆X₇X₈X₉CX₁₀X₁₁CX₁₂X₁₃X₁₄X₁₅X₁₆RNDTLTEHX₁₇X₁₈X₁₉ | 2414 |
| ccccgccct | GGC CCC | | TEHQRTHTGEKPYKCPECGKSFS | | HX₂₀X₂₁X₂₂X₂₃X₂₄X₈X₉CX₁₀X₁₁CX₁₂X₁₃X₁₄X₁₅X₁₆TKNSLTEHX₁₇X₁₈ | |
| ccg | CGC CCT | | TKNSLTEHQRTHTGEKPYKCPEC | | X₁₉HX₂₀X₂₁X₂₂X₂₃X₂₄X₈X₉CX₁₀X₁₁CX₁₂X₁₃X₁₄X₁₅X₁₆HTGHLLEHX₁₇ | |
| | CCG | | GKSFSHTGHLLEHQRTHTGEKPY | | X₁₈X₁₉HX₂₀X₂₁X₂₂X₂₃X₂₄X₈X₉CX₁₀X₁₁CX₁₂X₁₃X₁₄X₁₅X₁₆SKKHLAEH | |
| | | | KCPECGKSFSSKKHLAEHQRTHT | | X₁₇X₁₈X₁₉HX₂₀X₂₁X₂₂X₂₃X₂₄X₈X₉CX₁₀X₁₁CX₁₂X₁₃X₁₄X₁₅X₁₆DPGHLV | |
| | | | GEKPYKCPECGKSFSDPGHLVRH | | RHX₁₇X₁₈X₁₉HX₂₀X₂₁X₂₂X₂₃X₂₄X₈X₉CX₁₀X₁₁CX₁₂X₁₃X₁₄X₁₅X₁₆QSSN | |
| | | | QRTHTGEKPYKCPECGKSFSQSS | | LVRHX₁₇X₁₈X₁₉HX₂₀X₂₁X₂₂X₂₃X₂₄X₈X₉CX₁₀X₁₁CX₁₂X₁₃X₁₄X₁₅X₁₆SK | |
| | | | NLVRHQRTHTGEKPYKCPECGKS | | KHLAEHX₁₇X₁₈X₁₉HX₂₀X₂₁X₂₂X₂₃X₂₄X₂₅X₂₆X₂₇X₂₈X₂₉X₃₀ | |
| | | | FSSKKHLAEHQRTHTGEKPTGKK | | | |
| | | | TS | | | |
| gaaggcccc | GAA GGC | 1317 | LEPGEKPYKCPECGKSFSSKKHL | 1866 | X₁X₂X₃X₄X₅X₆X₇X₈X₉CX₁₀X₁₁CX₁₂X₁₃X₁₄X₁₅X₁₆SKKHLAEHX₁₇X₁₈X₁₉ | 2415 |
| cgccctccg | CCC CGC | | AEHQRTHTGEKPYKCPECGKSFS | | HX₂₀X₂₁X₂₂X₂₃X₂₄X₈X₉CX₁₀X₁₁CX₁₂X₁₃X₁₄X₁₅X₁₆RNDTLTEHX₁₇X₁₈ | |
| ccc | CCT CCG | | RNDTLTEHQRTHTGEKPYKCPEC | | X₁₉HX₂₀X₂₁X₂₂X₂₃X₂₄X₈X₉CX₁₀X₁₁CX₁₂X₁₃X₁₄X₁₅X₁₆TKNSLTEHX₁₇ | |
| | CCC | | GKSFSTKNSLTEHQRTHTGEKPY | | X₁₈X₁₉HX₂₀X₂₁X₂₂X₂₃X₂₄X₈X₉CX₁₀X₁₁CX₁₂X₁₃X₁₄X₁₅X₁₆HTGHLLEH | |
| | | | KCPECGKSFSHTGHLLEHQRTHT | | X₁₇X₁₈X₁₉HX₂₀X₂₁X₂₂X₂₃X₂₄X₈X₉CX₁₀X₁₁CX₁₂X₁₃X₁₄X₁₅X₁₆SKKHLA | |
| | | | GEKPYKCPECGKSFSSKKHLAEH | | EHX₁₇X₁₈X₁₉HX₂₀X₂₁X₂₂X₂₃X₂₄X₈X₉CX₁₀X₁₁CX₁₂X₁₃X₁₄X₁₅X₁₆DPGH | |
| | | | QRTHTGEKPYKCPECGKSFSDPG | | LVRHX₁₇X₁₈X₁₉HX₂₀X₂₁X₂₂X₂₃X₂₄X₈X₉CX₁₀X₁₁CX₁₂X₁₃X₁₄X₁₅X₁₆QS | |
| | | | HLVRHQRTHTGEKPYKCPECGKS | | SNLVRHX₁₇X₁₈X₁₉HX₂₀X₂₁X₂₂X₂₃X₂₄X₂₅X₂₆X₂₇X₂₈X₂₉X₃₀ | |
| | | | FSQSSNLVRHQRTHTGEKPTGKK | | | |
| | | | TS | | | |
| cctgggcgc | CCT ggg | 1318 | LEPGEKPYKCPECGKSFSRSDHL | 1867 | X₁X₂X₃X₄X₅X₆X₇X₈X₉CX₁₀X₁₁CX₁₂X₁₃X₁₄X₁₅X₁₆RSDHLTNHX₁₁X1BX₁₉ | 2416 |
| ccaccccga | CGC CCA | | TNHQRTHTGEKPYKCPECGKSFS | | HX₂₀X₂₁X₂₂X₂₃X₂₄X₈X₉CX₁₀X₁₁CX₁₂X₁₃X₁₄X₁₅X₁₆QSGHLTEHX₁₇X₁₈ | |
| agg | CCC CGA | | QSGHLTEHQRTHTGEKPYKCPEC | | X₁₉HX₂₀X₂₁X₂₂X₂₃X₂₄X₈X₉CX₁₀X₁₁CX₁₂X₁₃X₁₄X₁₅X₁₆SKKHLAEHX₁₇ | |
| | AGG | | GKSFSSKKHLAEHQRTHTGEKPY | | X₁₈X₁₉HX₂₀X₂₁X₂₂X₂₃X₂₄X₈X₉CX₁₀X₁₁CX₁₂X₁₃X₁₄X₁₅X₁₆TSHSLTEH | |
| | | | KCPECGKSFSTSHSLTEHQRTHT | | X₁₇X₁₈X₁₉HX₂₀X₂₁X₂₂X₂₃X₂₄X₈X₉CX₁₀X₁₁CX₁₂X₁₃X₁₄X₁₅X₁₆HTGHLL | |
| | | | GEKPYKCPECGKSFSHTGHLLEH | | EHX₁₇X₁₈X₁₉HX₂₀X₂₁X₂₂X₂₃X₂₄X₈X₉CX₁₀X₁₁CX₁₂X₁₃X₁₄X₁₅X₁₆RSDK | |
| | | | QRTHTGEKPYKCPECGKSFSRSD | | LVRHX₁₇X₁₈X₁₉HX₂₀X₂₁X₂₂X₂₃X₂₄X₈X₉CX₁₀X₁₁CX₁₂X₁₃X₁₄X₁₅X₁₆TK | |
| | | | KLVRHQRTHTGEKPYKCPECGKS | | NSLTEHX₁₇X₁₈X₁₉HX₂₀X₂₁X₂₂X₂₃X₂₄X₂₅X₂₆X₂₇X₂₈X₂₉X₃₀ | |
| | | | FSTKNSLTEHQRTHTGEKPTGKK | | | |
| | | | TS | | | |
| gggcgccca | ggg CGC | 1319 | LEPGEKPYKCPECGKSFSSKKHL | 1868 | X₁X₂X₃X₄X₅X₆X₇X₈X₉CX₁₀X₁₁CX₁₂X₁₃X₁₄X₁₅X₁₆SKKHLAEHX₁₇X₁₈X₁₉ | 2417 |
| ccccgaagg | CCA CCC | | AEHQRTHTGEKPYKCPECGKSFS | | HX₂₀X₂₁X₂₂X₂₃X₂₄X₈X₉CX₁₀X₁₁CX₁₂X₁₃X₁₄X₁₅X₁₆RSDHLTNHX₁₇X₁₈ | |
| ccc | CGA AGG | | RSDHLTNHQRTHTGEKPYKCPEC | | X₁₉HX₂₀X₂₁X₂₂X₂₃X₂₄X₈X₉CX₁₀X₁₁CX₁₂X₁₃X₁₄X₁₅X₁₆QSGHLTEHX₁₇ | |
| | CCC | | GKSFSQSGHLTEHQRTHTGEKPY | | X₁₈X₁₉HX₂₀X₂₁X₂₂X₂₃X₂₄X₈X₉CX₁₀X₁₁CX₁₂X₁₃X₁₄X₁₅X₁₆SKKHLAEH | |
| | | | KCPECGKSFSSKKHLAEHQRTHT | | X₁₇X₁₈X₁₉HX₂₀X₂₁X₂₂X₂₃X₂₄X₈X₉CX₁₀X₁₁CX₁₂X₁₃X₁₄X₁₅X₁₆TSHSLT | |
| | | | GEKPYKCPECGKSFSTSHSLTEH | | EHX₁₇X₁₈X₁₉HX₂₀X₂₁X₂₂X₂₃X₂₄X₈X₉CX₁₀X₁₁CX₁₂X₁₃X₁₄X₁₅X₁₆HTGH | |
| | | | QRTHTGEKPYKCPECGKSFSHTG | | LLEHX₁₇X₁₈X₁₉HX₂₀X₂₁X₂₂X₂₃X₂₄X₈X₉CX₁₀X₁₁CX₁₂X₁₃X₁₄X₁₅X₁₆RS | |
| | | | HLLEHQRTHTGEKPYKCPECGKS | | DKLVRHX₁₇X₁₈X₁₉HX₂₀X₂₁X₂₂X₂₃X₂₄X₂₅X₂₆X₂₇X₂₈X₂₉X₃₀ | |
| | | | FSRSDKLVRHQRTHTGEKPTGKK | | | |
| | | | TS | | | |
| cgcccaccc | CGC CCA | 1320 | LEPGEKPYKCPECGKSFSRNDTL | 1869 | X₁X₂X₃X₄X₅X₆X₇X₈X₉CX₁₀X₁₁CX₁₂X₁₃X₁₄X₁₅X₁₆RNDTLTEHX₁₇X₁₈X₁₉ | 2418 |
| cgaaggccc | CCC CGA | | TEHQRTHTGEKPYKCPECGKSFS | | HX₂₀X₂₁X₂₂X₂₃X₂₄X₈X₉CX₁₀X₁₁CX₁₂X₁₃X₁₄X₁₅X₁₆SKKHLAEHX₁₇X₁₈ | |
| ccg | AGG CCC | | SKKHLAEHQRTHTGEKPYKCPEC | | X₁₉HX₂₀X₂₁X₂₂X₂₃X₂₄X₈X₉CX₁₀X₁₁CX₁₂X₁₃X₁₄X₁₅X₁₆RSDHLTNHX₁₇ | |
| | CCG | | GKSFSRSDHLTNHQRTHTGEKPY | | X₁₈X₁₉HX₂₀X₂₁X₂₂X₂₃X₂₄X₈X₉CX₁₀X₁₁CX₁₂X₁₃X₁₄X₁₅X₁₆QSGHLTEH | |
| | | | KCPECGKSFSQSGHLTEHQRTHT | | X₁₇X₁₈X₁₉HX₂₀X₂₁X₂₂X₂₃X₂₄X₈X₉CX₁₀X₁₁CX₁₂X₁₃X₁₄X₁₅X₁₆SKKHLA | |
| | | | GEKPYKCPECGKSFSSKKHLAEH | | EHX₁₇X₁₈X₁₉HX₂₀X₂₁X₂₂X₂₃X₂₄X₈X₉CX₁₀X₁₁CX₁₂X₁₃X₁₄X₁₅X₁₆TSHS | |
| | | | QRTHTGEKPYKCPECGKSFSTSH | | LTEHX₁₇X₁₈X₁₉HX₂₀X₂₁X₂₂X₂₃X₂₄X₈X₉CX₁₀X₁₁CX₁₂X₁₃X₁₄X₁₅X₁₆HT | |
| | | | SLTEHQRTHTGEKPYKCPECGKS | | GHLLEHX₁₇X₁₃X₁₉HX₂₀X₂₁X₂₂X₂₃X₂₄X₂₅X₂₆X₂₇X₂₈X₂₉X₃₀ | |
| | | | FSHTGHLLEHQRTHTGEKPTGKK | | | |
| | | | TS | | | |
| ccaccccga | CCA CCC | 1321 | LEPGEKPYKCPECGKSFSSKKHL | 1870 | X₁X₂X₃X₄X₅X₆X₇X₈X₉CX₁₀X₁₁CX₁₂X₁₃X₁₄X₁₅X₁₆SKKHLAEHX₁₇X₁₈X₁₉ | 2419 |
| aggcccccg | CGA AGG | | AEHQRTHTGEKPYKCPECGKSFS | | HX₂₀XX₂₁X₂₂X₂₃X₂₄X₈X₉CX₁₀X₁₁CX₁₂X₁₃X₁₄X₁₅X₁₆RNDTLTEHX₁₇X₁₈ | |
| ccc | CCC CCG | | RNDTLTEHQRTHTGEKPYKCPEC | | X₁₉HX₂₀X₂₁X₂₂X₂₃X₂₄X₈X₉CX₁₀X₁₁CX₁₂X₁₃X₁₄X₁₅X₁₆SKKHLAEHX₁₇ | |
| | CCC | | GKSFSSKKHLAEHQRTHTGEKPY | | X₁₈X₁₉HX₂₀X₂₁X₂₂X₂₃X₂₄X₈X₉CX₁₀X₁₁CX₁₂X₁₃X₁₄X₁₅X₁₆RSDHLTNH | |
| | | | KCPECGKSFSRSDHLTNHQRTHT | | X₁₇X₁₈X₁₉HX₂₀X₂₁X₂₂X₂₃X₂₄X₈X₉CX₁₀X₁₁CX₁₂X₁₃X₁₄X₁₅X₁₆QSGHLT | |
| | | | GEKPYKCPECGKSFSQSGHLTEH | | EHX₁₇X₁₈X₁₉HX₂₀X₂₁X₂₂X₂₃X₂₄X₈X₉CX₁₀X₁₁CX₁₂X₁₃X₁₄X₁₅X₁₆SKKH | |
| | | | QRTHTGEKPYKCPECGKSFSSKK | | LAEHX₁₇X₁₈X₁₉HX₂₀X₂₁X₂₂X₂₃X₂₄X₈X₉CX₁₀X₁₁CX₁₂X₁₃X₁₄X₁₅X₁₆TS | |
| | | | HLAEHQRTHTGEKPYKCPECGKS | | H5LTEHX₁₇X₁₃X₁₉HX₂₀X₂₁X₂₂X₂₃X₂₄X₂₅X₂₆X₂₇X₂₈X₂₉X₃₀ | |
| | | | FSTSHSLTEHQRTHTGEKPTGKK | | | |
| | | | TS | | | |
| ccactgcct | CCA CTG | 1322 | LEPGEKPYKCPECGKSFSDCRDL | 1871 | X₁X₂X₃X₄X₅X₆X₇X₈X₉CX₁₀X₁₁CX₁₂X₁₃X₁₄X₁₅X₁₆DCRDLARHX₁₇X₁₈X₁₉ | 2420 |
| cctcccagt | CCT CCT | | ARHQRTHTGEKPYKCPECGKSFS | | HX₂₀XX₂₀X₂₂X₂₃X₂₄X₈X₉CX₁₀X₁₁CX₁₂X₁₃X₁₄X₁₅X₁₆HRTTLTNHX₁₇X₁₈ | |
| gcc | CCC AGT | | HRTTLTNHQRTHTGEKPYKCPEC | | X₁₉HX₂₀X₂₁X₂₂X₂₃X₂₄X₈X₉CX₁₀X₁₁CX₁₂X₁₃X₁₄X₁₅X₁₆SKKHLAEHX₁₇ | |
| | GCC | | GKSFSSKKHLAEHQRTHTGEKPY | | X₁₈X₁₉HX₂₀X₂₁X₂₂X₂₃X₂₄X₈X₉CX₁₀X₁₁CX₁₂X₁₃X₁₄X₁₅X₁₆TKNSLTEH | |
| | | | KCPECGKSFSTKNSLTEHQRTHT | | X₁₇X₁₈X₁₉HX₂₀X₂₁X₂₂X₂₃X₂₄X₈X₉CX₁₀X₁₁CX₁₂X₁₃X₁₄X₁₅X₁₆TKNSLT | |
| | | | GEKPYKCPECGKSFSTKNSLTEH | | EHX₁₇X₁₈X₁₉HX₂₀X₂₁X₂₂X₂₃X₂₄X₈X₉CX₁₀X₁₁CX₁₂X₁₃X₁₄X₁₅X₁₆RNDA | |
| | | | QRTHTGEKPYKCPECGKSFSRND | | LTEHX₁₇X₁₈X₁₉HX₂₀X₂₁X₂₂X₂₃X₂₄X₈X₉CX₁₀X₁₁CX₁₂X₁₃X₁₄X₁₅X₁₆TS | |
| | | | ALTEHQRTHTGEKPYKCPECGKS | | HSLTEHX₁₇X₁₈X₁₉HX₂₀X₂₁X₂₂X₂₃X₂₄X₂₅X₂₆X₂₇X₂₈X₂₉X₃₀ | |
| | | | FSTSHSLTEHQRTHTGEKPTGKK | | | |
| | | | TS | | | |
| tgggaagat | TGG GAA | 1323 | LEPGEKPYKCPECGKSFSDPGAL | 1872 | X₁X₂X₃X₄X₅X₆X₇X₈X₉CX₁₀X₁₁CX₁₂X₁₃X₁₄X₁₅X₁₆DPGALVRHX₁₇X₁₈X₁₉ | 2421 |
| ctgctggga | GAT CTG | | VRHQRTHTGEKPYKCPECGKSFS | | HX₂₀X₂₁X₂₂X₂₃X₂₄X₈X₉CX₁₀X₁₁CX₁₂X₁₃X₁₄X₁₅X₁₆QRAHLERHX₁₇X₁₈ | |
| gtc | CTG GGA | | QRAHLERHQRTHTGEKPYKCPEC | | X₁₉HX₂₀X₂₁X₂₂X₂₃X₂₄X₈X₉CX₁₀X₁₁CX₁₂X₁₃X₁₄X₁₅X₁₆RNDALTEHX₁₇ | |
| | GTC | | GKSFSRNDALTEHQRTHTGEKPY | | X₁₈X₁₉HX₂₀X₂₁X₂₂X₂₃X₂₄X₈X₉CX₁₀X₁₁CX₁₂X₁₃X₁₄X₁₅X₁₆RNDALTEH | |
| | | | KCPECGKSFSRNDALTEHQRTHT | | X₁₇X₁₈X₁₉HX₂₀X₂₁X₂₂X₂₃X₂₄X₈X₉CX₁₀X₁₁CX₁₂X₁₃X₁₄X₁₅X₁₆TSGNLV | |
| | | | GEKPYKCPECGKSFSTSGNLVRH | | RHX₁₇X₁₈X₁₉HX₂₀X₂₁X₂₂X₂₃X₂₄X₈X₉CX₁₀X₁₁CX₁₂X₁₃X₁₄X₁₅X₁₆QSSN | |
| | | | QRTHTGEKPYKCPECGKSFSQSS | | LVRHX₁₇X₁₈X₁₉HX₂₀X₂₁X₂₂X₂₃X₂₄X₈X₉CX₁₀X₁₁CX₁₂X₁₃X₁₄X₁₅X₁₆RS | |
| | | | NLVRHQRTHTGEKPYKCPECGKS | | DHLTTHX₁₇X₁₈X₁₉HX₂₀X₂₁X₂₂X₂₃X₂₄X₂₅X₂₆X₂₇X₂₈X₂₉X₃₀ | |
| | | | FSRSDHLTTHQRTHTGEKPTGKK | | | |
| | | | TS | | | |
| gctgggagt | GCT ggg | 1324 | LEPGEKPYKCPECGKSFSDCRDL | 1873 | X₁X₂X₃X₄X₅X₆X₇X₈X₉CX₁₀X₁₁CX₁₂X₁₃X₁₄X₁₅X₁₆DCRDLARHX₁₇X₁₈X₁₉ | 2422 |
| cttggccta | AGT CTT | | ARHQRTHTGEKPYKCPECGKSFS | | HX₂₀X₂₁X₂₂X₂₃X₂₄X₈X₉CX₁₀X₁₁CX₁₂X₁₃X₁₄X₁₅X₁₆QNSTLTEHX₁₇X₁₈ | |
| gcc | GGC CTA | | QNSTLTEHQRTHTGEKPYKCPEC | | X₁₉HX₂₀X₂₁X₂₂X₂₃X₂₄X₈X₉CX₁₀X₁₁CX₁₂X₁₃X₁₄X₁₅X₁₆DPGHLVRHX₁₇ | |
| | GCC | | GKSFSDPGHLVRHQRTHTGEKPY | | X₁₈X₁₉HX₂₀X₂₁X₂₂X₂₃X₂₄X₈X₉CX₁₀X₁₁CX₁₂X₁₃X₁₄X₁₅X₁₆TTGALTEH | |
| | | | KCPECGKSFSTTGALTEHQRTHT | | X₁₇X₁₈X₁₉HX₂₀X₂₁X₂₂X₂₃X₂₄X₈X₉CXHX₁₁CX₁₂X₁₃X₁₄X₁₅X₁₆HRTTLT | |
| | | | GEKPYKCPECGKSFSHRTTLTNH | | NHX₁₇X₁₈X₁₉HX₂₀X₂₁X₂₂X₂₃X₂₄X₈X₉CX₁₀X₁₁CX₁₂X₁₃X₁₄X₁₅X₁₆RSDK | |
| | | | QRTHTGEKPYKCPECGKSFSRSD | | LVRHX₁₇X₁₈X₁₉HX₂₀X₂₁X₂₂X₂₃X₂₄X₈X₉CX₁₀X₁₁CX₁₂X₁₃X₁₄X₁₅X₁₆TS | |
| | | | KLVRHQRTHTGEKPYKCPECGKS | | GELVRHX₁₇X₁₈X₁₉HX₂₀X₂₁X₂₂X₂₃X₂₄X₂₅X₂₆X₂₇X₂₈X₂₉X₃₀ | |
| | | | FSTSGELVRHQRTHTGEKPTGKK | | | |
| | | | TS | | | |
| gcctagcct | GCC TAG | 1325 | LEPGEKPYKCPECGKSFSTSGHL | 1874 | X₁X₂X₃X₄X₅X₆X₇X₈X₉CX₁₀X₁₁CX₁₂X₁₃X₁₄X₁₅X₁₆TSGHLVRHX₁₇X₁₈X₁₉ | 2423 |
| ctgtgaagg | CCT CTG | | VRHQRTHTGEKPYKCPECGKSFS | | HX₂₀X₂₁X₂₂X₂₃X₂₄X₈X₉CX₁₀X₁₁CX₁₂X₁₃X₁₄X₁₅X₁₆RSDHLTNHX₁₇X₁₈ | |
| ggt | TGA AGG | | RSDHLTNHQRTHTGEKPYKCPEC | | X₁₉HX₂₀X₂₁X₂₂X₂₃X₂₄X₈X₉CX₁₀X₁₁CX₁₂X₁₃X₁₄X₁₅X₁₆QAGHLASHX₁₇ | |
| | GGT | | GKSFSQAGHLASHQRTHTGEKPY | | X₁₈X₁₉HX₂₀X₂₁X₂₂X₂₃X₂₄X₈X₉CX₁₀X₁₁CX₁₂X₁₃X₁₄X₁₅X₁₆RNDALTEH | |
| | | | KCPECGKSFSRNDALTEHQRTHT | | X₁₇X₁₈X₁₉HX₂₀X₂₁X₂₂X₂₃X₂₄X₈X₉CX₁₀X₁₁CX₁₂X₁₃X₁₄X₁₅X₁₆TKNSLT | |
| | | | GEKPYKCPECGKSFSTKNSLTEH | | EHX₁₇X₁₈X₁₉HX₂₀X₂₁X₂₂X₂₃X₂₄X₈X₉CX₁₀X₁₁CX₁₂X₁₃X₁₄X₁₅X₁₆REDN | |
| | | | QRTHTGEKPYKCPECGKSFSRED | | LHTHX₁₇X₁₈X₁₉HX₂₀X₂₁X₂₂X₂₃X₂₄X₈X₉CX₁₀X₁₁CX₁₂X₁₃X₁₄X₁₅X₁₆DC | |
| | | | NLHTHQRTHTGEKPYKCPECGKS | | RDLARHX₁₇X₁₈X₁₉HX₂₀X₂₁X₂₂X₂₃X₂₄X₂₅X₂₆X₂₇X₂₈X₂₉X₃₀ | |
| | | | FSDCRDLARHQRTHTGEKPTGKK | | | |
| | | | TS | | | |
| tagcctctg | TAG CCT | 1326 | LEPGEKPYKCPECGKSFSQRAHL | 1875 | X₁X₂X₃X₄X₅X₆X₇X₈X₉CX₁₀X₁₁CX₁₂X₁₃X₁₄X₁₅X₁₆QRAHLERHX₁₇X₁₈X₁₉ | 2424 |
| tgaaggggt | CTG TGA | | ERHQRTHTGEKPYKCPECGKSFS | | HX₂₀X₂₁X₂₂X₂₃X₂₄X₈X₉CX₁₀X₁₁CX₁₂X₁₃X₁₄X₁₅X₁₆TSGHLVRHX₁₇X₁₈ | |
| gga | AGG GGT | | TSGHLVRHQRTHTGEKPYKCPEC | | X₁₉HX₂₀X₂₁X₂₂X₂₃X₂₄X₈X₉CX₁₀X₁₁CX₁₂X₁₃X₁₄X₁₅X₁₆RSDHLTNHX₁₇ | |
| | GGA | | GKSFSRSDHLTNHQRTHTGEKPY | | X₁₈X₁₉HX₂₀X₂₁X₂₂X₂₃X₂₄X₈X₉CX₁₀X₁₁CX₁₂X₁₃X₁₄X₁₅X₁₆QAGHLASH | |
| | | | KCPECGKSFSQAGHLASHQRTHT | | X₁₇X₁₈X₁₉HX₂₀X₂₁X₂₂X₂₃X₂₄X₈X₉CX₁₀X₁₁CX₁₂X₁₃X₁₄X₁₅X₁₆RNDALT | |
| | | | GEKPYKCPECGKSFSRNDALTEH | | EHX₁₇X₁₈X₁₉HX₂₀X₂₁X₂₂X₂₃X₂₄X₈X₉CX₁₀X₁₁CX₁₂X₁₃X₁₄X₁₅X₁₆TKNS | |
| | | | QRTHTGEKPYKCPECGKSFSTKN | | LTEHX₁₇X₁₈X₁₉HX₂₀X₂₁X₂₂X₂₃X₂₄X₈X₉CX₁₀X₁₁CX₁₂X₁₃X₁₄X₁₅X₁₆RE | |
| | | | SLTEHQRTHTGEKPYKCPECGKS | | DNLHTHX₁₇X₁₈X₁₉HX₂₀X₂₁X₂₂X₂₃X₂₄X₂₅X₂₆X₂₇X₂₈X₂₉X₃₀ | |
| | | | FSREDNLHTHQRTHTGEKPTGKK | | | |
| | | | TS | | | |
| cctctgtga | CCT CTG | 1327 | LEPGEKPYKCPECGKSFSDPGHL | 1876 | X₁X₂X₃X₄X₅X₆X₇X₈X₉CX₁₀X₁₁CX₁₂X₁₃X₁₄X₁₅X₁₆DPGHLVRHX₁₇X₁₈X₁₉ | 2425 |
| aggggtgga | TGA AGG | | VRHQRTHTGEKPYKCPECGKSFS | | HX₂₀X₂₁X₂₂X₂₃X₂₄X₈X₉CX₁₀X₁₁CX₁₂X₁₃X₁₄X₁₅X₁₆QRAHLERHX₁₇X₁₈ | |
| ggc | GGT GGA | | QRAHLERHQRTHTGEKPYKCPEC | | X₁₉HX₂₀X₂₁X₂₂X₂₃X₂₄X₈X₉CX₁₀X₁₁CX₁₂X₁₃X₁₄X₁₅X₁₆TSGHLVRHX₁₇ | |
| | GGC | | GKSFSTSGHLVRHQRTHTGEKPY | | X₁₈X₁₉HX₂₀X₂₁X₂₂X₂₃X₂₄X₈X₉CX₁₀X₁₁CX₁₂X₁₃X₁₄X₁₅X₁₆RSDHLTNH | |
| | | | KCPECGKSFSRSDHLTNHQRTHT | | X₁₇X₁₈X₁₉HX₂₀X₂₁X₂₂X₂₃X₂₄X₈X₉CX₁₀X₁₁CX₁₂X₁₃X₁₄X₁₅X₁₆QAGHLA | |
| | | | GEKPYKCPECGKSFSQAGHLASH | | SHX₁₇X₁₈X₁₉HX₂₀X₂₁X₂₂X₂₃X₂₄X₈X₉CXHX₁₁CX₁₂X₁₃X₁₄X₁₅X₁₆RNDA | |
| | | | QRTHTGEKPYKCPECGKSFSRND | | LTEHX₁₇X₁₈X₁₉HX₂₀X₂₁X₂₂X₂₃X₂₄X₈X₉CX₁₀X₁₁CX₁₂X₁₃X₁₄X₁₅X₁₆TK | |
| | | | ALTEHQRTHTGEKPYKCPECGKS | | NSLTEHX₁₇X₁₈X₁₉HX₂₀X₂₁X₂₂X₂₃X₂₄X₂₅X₂₆X₂₇X₂₈X₂₉X₃₀ | |
| | | | FSTKNSLTEHQRTHTGEKPTGKK | | | |
| | | | TS | | | |
| ggggtggag | GGG GTG | 1328 | LEPGEKPYKCPECGKSFSRSDKL | 1877 | X₁X₂X₃X₄X₅X₆X₇X₈X₉CX₁₀X₁₁CX₁₂X₁₃X₁₄X₁₅X₁₆RSDKLVRHX₁₇X₁₈X₁₉ | 2426 |
| gctctgccg | GAG GCT | | VRHQRTHTGEKPYKCPECGKSFS | | HX₂₀X₂₁X₂₂X₂₃X₂₄X₈X₉CX₁₀X₁₁CX₁₂X₁₃X₁₄X₁₅X₁₆RNDTLTEHX₁₇X₁₈ | |
| ggg | CTG CCG | | RNDTLTEHQRTHTGEKPYKCPEC | | X₁₉HX₂₀X₂₁X₂₂X₂₃X₂₄X₈X₉CX₁₀X₁₁CX₁₂X₁₃X₁₄X₁₅X₁₆RNDALTEHX₁₇ | |
| | GGG | | GKSFSRNDALTEHQRTHTGEKPY | | X₁₈X₁₉HX₂₀X₂₁X₂₂X₂₃X₂₄X₈X₉CX₁₀X₁₁CX₁₂X₁₃X₁₄X₁₅X₁₆TSGELVRH | |
| | | | KCPECGKSFSTSGELVRHQRTHT | | X₁₇X₁₈X₁₉HX₂₀X₂₁X₂₂X₂₃X₂₄X₈X₉CX₁₀X₁₁CX₁₂X₁₃X₁₄X₁₅X₁₆RSDNLV | |
| | | | GEKPYKCPECGKSFSRSDNLVRH | | RHX₁₇X₁₈X₁₉HX₂₀X₂₁X₂₂X₂₃X₂₄X₈X₉CX₁₀X₁₁CX₁₂X₁₃X₁₄X₁₅X₁₆RSDE | |
| | | | QRTHTGEKPYKCPECGKSFSRSD | | LVRHX₁₇X₁₈X₁₉HX₂₀X₂₁X₂₂X₂₃X₂₄X₈X₉CX₁₀X₁₁CX₁₂X₁₃X₁₄X₁₅X₁₆RS | |
| | | | ELVRHQRTHTGEKPYKCPECGKS | | DKLVRHX₁₇X₁₈X₁₉HX₂₀X₂₁X₂₂X₂₃X₂₄X₂₅X₂₆X₂₇X₂₈X₂₉X₃₀ | |
| | | | FSRSDKLVRHQRTHTGEKPTGKK | | | |
| | | | TS | | | |
| gaaggggtg | GAA GGG | 158 | LEPGEKPYKCPECGKSFSRNDTL | 159 | X₁X₂X₃X₄X₅X₆X₇X₈X₉CX₁₀X₁₁CX₁₂X₁₃X₁₄X₁₅X₁₆RNDTLTEHX₁₇X₁₈X₁₉ | 327 |
| gaggctctg | GTG GAG | | TEHQRTHTGEKPYKCPECGKSFS | | HX₂₀X₂₁X₂₂X₂₃X₂₄X₈X₉CX₁₀X₁₁CX₁₂X₁₃X₁₄X₁₅X₁₆RNDALTEHX₁₇X₁₈ | |
| ccg | GCT CTG | | RNDALTEHQRTHTGEKPYKCPEC | | X₁₉HX₂₀X₂₁X₂₂X₂₃X₂₄X₈X₉CX₁₀X₁₁CX₁₂X₁₃X₁₄X₁₅X₁₆TSGELVRHX₁₇ | |
| | CCG | | GKSFSTSGELVRHQRTHTGEKPY | | X₁₈X₁₉HX₂₀X₂₁X₂₂X₂₃X₂₄X₈X₉CX₁₀X₁₁CX₁₂X₁₃X₁₄X₁₅X₁₆RSDNLVRH | |
| | | | KCPECGKSFSRSDNLVRHQRTHT | | X₁₇X₁₈X₁₉HX₂₀X₂₁X₂₂X₂₃X₂₄X₈X₉CX₁₀X₁₁CX₁₂X₁₃X₁₄X₁₅X₁₆RSDELV | |
| | | | GEKPYKCPECGKSFSRSDELVRH | | RHX₁₇X₁₈X₁₉HX₂₀X₂₁X₂₂X₂₃X₂₄X₈X₉CX₁₀X₁₁CX₁₂X₁₃X₁₄X₁₅X₁₆RSDK | |
| | | | QRTHTGEKPYKCPECGKSFSRSD | | LVRHX₁₇X₁₈X₁₉HX₂₀X₂₁X₂₂X₂₃X₂₄X₈X₉CX₁₀X₁₁CX₁₂X₁₃X₁₄X₁₅X₁₆QS | |
| | | | KLVRHQRTHTGEKPYKCPECGKS | | SNLVRHX₁₇X₁₈X₁₉HX₂₀X₂₁X₂₂X₂₃X₂₄X₂₅X₂₆X₂₇X₂₈X₂₉X₃₀ | |
| | | | FSQSSNLVRHQRTHTGEKPTGKK | | | |
| | | | TS | | | |
| gtggaggct | GTG GAG | 1329 | LEPGEKPYKCPECGKSFSRSDHL | 1878 | X₁X₂X₃X₄X₅X₆X₇X₈X₉CX₁₀X₁₁CX₁₂X₁₃X₁₄X₁₅X₁₆RSDHLTNHX₁₇X₁₈X₁₉ | 2427 |
| ctgccgggg | GCT CTG | | TNHQRTHTGEKPYKCPECGKSFS | | HX₂₀X₂₁X₂₂X₂₃X₂₄X₈X₉CX₁₀X₁₁CX₁₂X₁₃X₁₄X₁₅X₁₆RSDKLVRHX₁₇X₁₈ | |
| agg | CCG ggg | | RSDKLVRHQRTHTGEKPYKCPEC | | X₁₉HX₂₀X₂₁X₂₂X₂₃X₂₄X₈X₉CX₁₀X₁₁CX₁₂X₁₃X₁₄X₁₅X₁₆RNDTLTEHX₁₇ | |
| | AGG | | GKSFSRNDTLTEHQRTHTGEKPY | | X₁₈X₁₉HX₂₀X₂₁X₂₂X₂₃X₂₄X₈X₉CX₁₀X₁₁CX₁₂X₁₃X₁₄X₁₅X₁₆RNDALTEH | |
| | | | KCPECGKSFSRNDALTEHQRTHT | | X₁₇X₁₈X₁₉HX₂₀X₂₁X₂₂X₂₃X₂₄X₈X₉CX₁₀X₁₁CX₁₂X₁₃X₁₄X₁₅X₁₆TSGELV | |
| | | | GEKPYKCPECGKSFSTSGELVRH | | RHX₁₇X₁₈X₁₉HX₂₀X₂₁X₂₂X₂₃X₂₄X₈X₉CX₁₀X₁₁CX₁₂X₁₃X₁₄X₁₅X₁₆RSDN | |
| | | | QRTHTGEKPYKCPECGKSFSRSD | | LVRHX₁₇X₁₈X₁₉HX₂₀X₂₁X₂₂X₂₃X₂₄X₈X₉CX₁₀X₁₁CX₁₂X₁₃X₁₄X₁₅X₁₆RS | |
| | | | NLVRHQRTHTGEKPYKCPECGKS | | DELVRHX₁₇X₁₈X₁₉HX₂₀X₂₁X₂₂X₂₃X₂₄X₂₅X₂₆X₂₇X₂₈X₂₉X₃₀ | |
| | | | FSRSDELVRHQRTHTGEKPTGKK | | | |
| | | | TS | | | |
| gaggctctg | GAG GCT | 1330 | LEPGEKPYKCPECGKSFSTSGHL | 1879 | X₁X₂X₃X₄X₅X₆X₇X₈X₉CX₁₀X₁₁CX₁₂X₁₃X₁₄X₁₅X₁₆TSGHLVRHX₁₇X₁₈X₁₉ | 2428 |
| ccggggagg | CTG CCG | | VRHQRTHTGEKPYKCPECGKSFS | | HX₂₀X₂₁X₂₂X₂₃X₂₄X₈X₉CX₁₀X₁₁CX₁₂X₁₃X₁₄X₁₅X₁₆RSDHLTNHX₁₇X₁₈ | |
| ggt | ggg AGG | | RSDHLTNHQRTHTGEKPYKCPEC | | X₁₉HX₂₀X₂₁X₂₂X₂₃X₂₄X₈X₉CX₁₀X₁₁CX₁₂X₁₃X₁₄X₁₅X₁₆RSDKLVRHX₁₇ | |
| | GGT | | GKSFSRSDKLVRHQRTHTGEKPY | | X₁₈X₁₉HX₂₀X₂₁X₂₂X₂₃X₂₄X₈X₉CX₁₀X₁₁CX₁₂X₁₃X₁₄X₁₅X₁₆RNDTLTEH | |
| | | | KCPECGKSFSRNDTLTEHQRTHT | | X₁₇X₁₈X₁₉HX₂₀X₂₁X₂₂X₂₃X₂₄X₈X₉CX₁₀X₁₁CX₁₂X₁₃X₁₄X₁₅X₁₆RNDALT | |
| | | | GEKPYKCPECGKSFSRNDALTEH | | EHX₁₇X₁₈X₁₉HX₂₀X₂₁X₂₂X₂₃X₂₄X₈X₉CX₁₀X₁₁CX₁₂X₁₃X₁₄X₁₅X₁₆TSGE | |
| | | | QRTHTGEKPYKCPECGKSFSTSG | | LVRHX₁₇X₁₈X₁₉HX₂₀X₂₁X₂₂X₂₃X₂₄X₈X₉CX₁₀X₁₁CX₁₂X₁₃X₁₄X₁₅X₁₆RS | |
| | | | ELVRHQRTHTGEKPYKCPECGKS | | DNLVRHX₁₇X₁₈X₁₉HX₂₀X₂₁X₂₂X₂₃X₂₄X₂₅X₂₆X₂₇X₂₈X₂₉X₃₀ | |
| | | | FSRSDNLVRHQRTHTGEKPTGKK | | | |
| | | | TS | | | |
| gctctgccg | GCT CTG | 1331 | LEPGEKPYKCPECGKSFSRSDKL | 1880 | X₁X₂X₃X₄X₅X₆X₇X₈X₉CX₁₀X₁₁CX₁₂X₁₃X₁₄X₁₅X₁₆RSDKLVRHX₁₇X₁₈X₁₉ | 2429 |
| gggaggggt | CCG ggg | | VRHQRTHTGEKPYKCPECGKSFS | | HX₂₀X₂₁X₂₂X₂₃X₂₄X₈X₉CX₁₀X₁₁CX₁₂X₁₃X₁₄X₁₅X₁₆TSGHLVRHX₁₇X₁₈ | |
| ggg | AGG GGT | | TSGHLVRHQRTHTGEKPYKCPEC | | X₁₉HX₂₀X₂₁X₂₂X₂₃X₂₄X₈X₉CX₁₀X₁₁CX₁₂X₁₃X₁₄X₁₅X₁₆RSDHLTNHX₁₇ | |
| | GGG | | GKSFSRSDHLTNHQRTHTGEKPY | | X₁₈X₁₉HX₂₀X₂₁X₂₂X₂₃X₂₄X₈X₉CX₁₀X₁₁CX₁₂X₁₃X₁₄X₁₅X₁₆RSDKLVRH | |
| | | | KCPECGKSFSRSDKLVRHQRTHT | | X₁₇X₁₈X₁₉HX₂₀X₂₁X₂₂X₂₃X₂₄X₈X₉CX₁₀X₁₁CX₁₂X₁₃X₁₄X₁₅X₁₆RNDTLT | |
| | | | GEKPYKCPECGKSFSRNDTLTEH | | EHX₁₇X₁₈X₁₉HX₂₀X₂₁X₂₂X₂₃X₂₄X₈X₉CX₁₀X₁₁CX₁₂X₁₃X₁₄X₁₅X₁₆RNDA | |
| | | | QRTHTGEKPYKCPECGKSFSRND | | LTEHX₁₇X₁₈X₁₉HX₂₀X₂₁X₂₂X₂₃X₂₄X₈X₉CX₁₀X₁₁CX₁₂X₁₃X₁₄X₁₅X₁₆TS | |
| | | | ALTEHQRTHTGEKPYKCPECGKS | | GELVRHX₁₇X₁₈X₁₉HX₂₀X₂₁X₂₂X₂₃X₂₄X₂₅X₂₆X₂₇X₂₈X₂₉X₃₀ | |
| | | | FSTSGELVRHQRTHTGEKPTGKK | | | |
| | | | TS | | | |
| ctgccgggg | CTG CCG | 1332 | LEPGEKPYKCPECGKSFSTSGHL | 1881 | X₁X₂X₃X₄X₅X₆X₇X₈X₉CX₁₀X₁₁CX₁₂X₁₃X₁₄X₁₅X₁₆TSGHLVRHX₁₇X₁₈X₁₉ | 2430 |
| aggggtggg | ggg AGG | | VRHQRTHTGEKPYKCPECGKSFS | | HX₂₀X₂₁X₂₂X₂₃X₂₄X₈X₉CX₁₀X₁₁CX₁₂X₁₃X₁₄X₁₅X₁₆RSDKLvRHX₁₇X₁₈ | |
| ggt | GGT GGG | | RSDKLVRHQRTHTGEKPYKCPEC | | X₁₉HX₂₀X₂₁X₂₂X₂₃X₂₄X₈X₉CX₁₀X₁₁CX₁₂X₁₃X₁₄X₁₅X₁₆TSGHLVRHX₁₇ | |
| | GGT | | GKSFSTSGHLVRHQRTHTGEKPY | | X₁₈X₁₉HX₂₀X₂₁X₂₂X₂₃X₂₄X₈X₉CX₁₀X₁₁CX₁₂X₁₃X₁₄X₁₅X₁₆RSDHLTNH | |
| | | | KCPECGKSFSRSDHLTNHQRTHT | | X₁₇X₁₈X₁₉HX₂₀X₂₁X₂₂X₂₃X₂₄X₈X₉CX₁₀X₁₁CX₁₂X₁₃X₁₄X₁₅X₁₆RSDKLV | |
| | | | GEKPYKCPECGKSFSRSDKLVRH | | RHX₁₇X₁₈X₁₉HX₂₀X₂₁X₂₂X₂₃X₂₄X₈X₉CX₁₀X₁₁CX₁₂X₁₃X₁₄X₁₅X₁₆RNDT | |
| | | | QRTHTGEKPYKCPECGKSFSRND | | LTEHX₁₇X₁₈X₁₉HX₂₀X₂₁X₂₂X₂₃X₂₄X₈X₉CX₁₀X₁₁CX₁₂XEX₁₄X₁₅X₁₆RN | |
| | | | TLTEHQRTHTGEKPYKCPECGKS | | DALTEHX₁₇X₁₈X₁₉HX₂₀X₂₁X₂₂X₂₃X₂₄X₂₅X₂₆X₂₇X₂₈X₂₉X₃₀ | |
| | | | FSRNDALTEHQRTHTGEKPTGKK | | | |
| | | | TS | | | |
| cggggaggg | CGG GGA | 1333 | LEPGEKPYKCPECGKSFSTTGNL | 1882 | X₁X₂X₃X₄X₅X₆X₇X₈X₉CX₁₀X₁₁CX₁₂X₁₃X₁₄X₁₅X₁₆TTGNLTVHX₁₇X₁₈X₁₉ | 2431 |
| gtgggggtt | GGG GTG | | TVHQRTHTGEKPYKCPECGKSFS | | HX₂₀X₂₁X₂₂X₂₃X₂₄X₈X₉CX₁₀X₁₁CX₁₂X₁₃X₁₄X₁₅X₁₆TSGSLVRHX₁₇X₁₈ | |
| aat | GGG GTT | | TSGSLVRHQRTHTGEKPYKCPEC | | X₁₉HX₂₀X₂₁X₂₂X₂₃X₂₄X₈X₉CX₁₀X₁₁CX₁₂X₁₃X₁₄X₁₅X₁₆RSDKLVRHX₁₇ | |
| | AAT | | GKSFSRSDKLVRHQRTHTGEKPY | | X₁₈X₁₉HX₂₀X₂₁X₂₂X₂₃X₂₄X₈X₉CX₁₀X₁₁CX₁₂X₁₃X₁₄X₁₅X₁₆RSDELVRH | |
| | | | KCPECGKSFSRSDELVRHQRTHT | | X₁₇X₁₈X₁₉HX₂₀X₂₁X₂₂X₂₃X₂₄X₈X₉CX₁₀X₁₁CX₁₂X₁₃X₁₄X₁₅X₁₆RSDKLV | |
| | | | GEKPYKCPECGKSFSRSDKLVRH | | RHX₁₇X₁₈X₁₉HX₂₀X₂₁X₂₂X₂₃X₂₄X₈X₉CX₁₀X₁₁CX₁₂X₁₃X₁₄X₁₅X₁₆QRAH | |
| | | | QRTHTGEKPYKCPECGKSFSQRA | | LERHX₁₇X₁₈X₁₉HX₂₀X₂₁X₂₂X₂₃X₂₄X₈X₉CX₁₀X₁₁CX₁₂X₁₃X₁₄X₁₅X₁₆RS | |
| | | | HLERHQRTHTGEKPYKCPECGKS | | DKLTEHX₁₇X₁₈X₁₉HX₂₀X₂₁X₂₂X₂₃X₂₄X₂₅X₂₆X₂₇X₂₈X₂₉X₃₀ | |
| | | | FSRSDKLTEHQRTHTGEKPTGKK | | | |
| | | | TS | | | |
| ggaggggtg | GGA GGG | 154 | LEPGEKPYKCPECGKSFSTSGHL | 155 | X₁X₂X₃X₄X₅X₆X₇X₈X₉CX₁₀X₁₁CX₁₂X₁₃X₁₄X₁₅X₁₆TSGHLVRHX₁₇X₁₈X₁₉ | 326 |
| ggggttaat | GTG GGG | | VRHQRTHTGEKPYKCPECGKSFS | | HX₂₀X₂₁X₂₂X₂₃X₂₄X₈X₉CX₁₀X₁₁CX₁₂X₁₃X₁₄X₁₅X₁₆TTGNLTVHX₁₇X₁₈ | |
| ggt | GTT AAT | | TTGNLTVHQRTHTGEKPYKCPEC | | X₁₉HX₂₀X₂₁X₂₂X₂₃X₂₄X₈X₉CX₁₀X₁₁CX₁₂X₁₃X₁₄X₁₅X₁₆TSGSLVRHX₁₇ | |
| | GGT | | GKSFSTSGSLVRHQRTHTGEKPY | | X₁₈X₁₉HX₂₀X₂₁X₂₂X₂₃X₂₄X₈X₉CX₁₀X₁₁CX₁₂X₁₃X₁₄X₁₅X₁₆RSDKLVRH | |
| | | | KCPECGKSFSRSDKLVRHQRTHT | | X₁₇X₁₈X₁₉HX₂₀X₂₁X₂₂X₂₃X₂₄X₈X₉CX₁₀X₁₁CX₁₂X₁₃X₁₄X₁₅X₁₆RSDELV | |
| | | | GEKPYKCPECGKSFSRSDELVRH | | RHX₁₇X₁₈X₁₉HX₂₀X₂₁X₂₂X₂₃X₂₄X₈X₉CX₁₀X₁₁CX₁₂X₁₃X₁₄X₁₅X₁₆RSDK | |
| | | | QRTHTGEKPYKCPECGKSFSRSD | | LVRHX₁₇X₁₈X₁₉HX₂₀X₂₁X₂₂X₂₃X₂₄X₈X₉CX₁₀X₁₁CX₁₂X₁₃X₁₄X₁₅X₁₆QR | |
| | | | KLVRHQRTHTGEKPYKCPECGKS | | AHLERHX₁₇X₁₈X₁₉HX₂₀X₂₁X₂₂X₂₃X₂₄X₂₅X₂₆X₂₇X₂₈X₂₉X₃₀ | |
| | | | FSQRAHLERHQRTHTGEKPTGKK | | | |
| | | | TS | | | |
| ggcggggct | GGC GGG | 1334 | LEPGEKPYKCPECGKSFSRSDHL | 1883 | X₁X₂X₃X₄X₅X₆X₇X₈X₉CX₁₀X₁₁CX₁₂X₁₃X₁₄X₁₅X₁₆RSDHLTTHX₁₇X₁₈X₁₉ | 2432 |
| gcagggatt | GCT GCA | | TTHQRTHTGEKPYKCPECGKSFS | | HX₂₀X₂₁X₂₂X₂₃X₂₄X₈X₉CX₁₀X₁₁CX₁₂X₁₃X₁₄X₁₅X₁₆HKNALQNHX₁₇X₁₈ | |
| tgg | ggg ATT | | HKNALQNHQRTHTGEKPYKCPEC | | X₁₉HX₂₀X₂₁X₂₂X₂₃X₂₄X₈X₉CX₁₀X₁₁CX₁₂X₁₃X₁₄X₁₅X₁₆RSDKLVRHX₁₇ | |
| | TGG | | GKSFSRSDKLVRHQRTHTGEKPY | | X₁₈X₁₉HX₂₀X₂₁X₂₂X₂₃X₂₄X₈X₉CX₁₀X₁₁CX₁₂X₁₃X₁₄X₁₅X₁₆QSGDLRRH | |
| | | | KCPECGKSFSQSGDLRRHQRTHT | | X₁₇X₁₈X₁₉HX₂₀X₂₁X₂₂X₂₃X₂₄X₈X₉CXHX₁₁CX₁₂X₁₃X₁₄X₁₅X₁₆TSGELV | |
| | | | GEKPYKCPECGKSFSTSGELVRH | | RHX₁₇X₁₈X₁₉HX₂₀X₂₁X₂₂X₂₃X₂₄X₈X₉CX₁₀X₁₁CX₁₂X₁₃X₁₄X₁₅X₁₆RSDK | |
| | | | QRTHTGEKPYKCPECGKSFSRSD | | LVRHX₁₇X₁₈X₁₉HX₂₀X₂₁X₂₂X₂₃X₂₄X₈X₉CX₁₀X₁₁CX₁₂X₁₃X₁₄X₁₅X₁₆DP | |
| | | | KLVRHQRTHTGEKPYKCPECGKS | | GHLVRHX₁₇X₁₈X₁₉HX₂₀X₂₁X₂₂X₂₃X₂₄X₂₅X₂₆X₂₇X₂₈X₂₉X₃₀ | |
| | | | FSDPGHLVRHQRTHTGEKPTGKK | | | |
| | | | TS | | | |
| ctgggcggg | CTG GGC | 1335 | LEPGEKPYKCPECGKSFSHKNAL | 1884 | X₁X₂X₃X₄X₅X₆X₇X₈X₉CX₁₀X₁₁CX₁₂X₁₃X₁₄X₁₅X₁₆HKNALQNHX₁₇X₁₈X₁₉ | 2433 |
| gctgcaggg | GGG GCT | | QNHQRTHTGEKPYKCPECGKSFS | | HX₂₀X₂₁X₂₂X₂₃X₂₄X₈X₉CX₁₀X₁₁CX₁₂X₁₃X₁₄X₁₅X₁₆RSDKLVRHX₁₇X₁₈ | |
| att | GCA ggg | | RSDKLVRHQRTHTGEKPYKCPEC | | X₁₉HX₂₀X₂₁X₂₂X₂₃X₂₄X₈X₉CX₁₀X₁₁CX₁₂X₁₃X₁₄X₁₅X₁₆QSGDLRRHX₁₇ | |
| | ATT | | GKSFSQSGDLRRHQRTHTGEKPY | | X₁₈X₁₉HX₂₀X₂₁X₂₂X₂₃X₂₄X₈X₉CX₁₀X₁₁CX₁₂X₁₃X₁₄X₁₅X₁₆TSGELVRH | |
| | | | KCPECGKSFSTSGELVRHQRTHT | | X₁₇X₁₈X₁₉HX₂₀X₂₁X₂₂X₂₃X₂₄X₈X₉CX₁₀X₁₁CX₁₂X₁₃X₁₄X₁₅X₁₆RSDKLV | |
| | | | GEKPYKCPECGKSFSRSDKLVRH | | RHX₁₇X₁₈X₁₉HX₂₀X₂₁X₂₂X₂₃X₂₄X₈X₉CX₁₀X₁₁CX₁₂X₁₃X₁₄X₁₅X₁₆DPGH | |
| | | | QRTHTGEKPYKCPECGKSFSDPG | | LVRHX₁₇X₁₈X₁₉HX₂₀X₂₁X₂₂X₂₃X₂₄X₈X₉CX₁₀X₁₁CX₁₂X₁₃X₁₄X₁₅X₁₆RN | |
| | | | HLVRHQRTHTGEKPYKCPECGKS | | DALTEHX₁₇X₁₃X₁₉HX₂₀X₂₁X₂₂X₂₃X₂₄X₂₅X₂₆X₂₇X₂₈X₂₉X₃₀ | |
| | | | FSRNDALTEHQRTHTGEKPTGKK | | | |
| | | | TS | | | |
| ggggctgca | GGG GCT | 1336 | LEPGEKPYKCPECGKSFSRNDAL | 1885 | X₁X₂X₃X₄X₅X₆X₇X₈X₉CX₁₀X₁₁CX₁₂X₁₃X₁₄X₁₅X₁₆RNDALTEHX₁₇X₁₈X₁₉ | 2434 |
| gggatttgg | GCA ggg | | TEHQRTHTGEKPYKCPECGKSFS | | HX₂₀X₂₁X₂₂X₂₃X₂₄X₈X₉CX₁₀X₁₁CX₁₂X₁₃X₁₄X₁₅X₁₆RSDHLTTHX₁₇X₁₈ | |
| ctg | ATT TGG | | RSDHLTTHQRTHTGEKPYKCPEC | | X₁₉HX₂₀X₂₁X₂₂X₂₃X₂₄X₈X₉CX₁₀X₁₁CX₁₂X₁₃X₁₄X₁₅X₁₆HKNALQNHX₁₇ | |
| | CTG | | GKSFSHKNALQNHQRTHTGEKPY | | X₁₈X₁₉HX₂₀X₂₁X₂₂X₂₃X₂₄X₈X₉CX₁₀X₁₁CX₁₂X₁₃X₁₄X₁₅X₁₆RSDKLVRH | |
| | | | KCPECGKSFSRSDKLVRHQRTHT | | X₁₇X₁₈X₁₉HX₂₀X₂₁X₂₂X₂₃X₂₄X₈X₉CX₁₀X₁₁CX₁₂X₁₃X₁₄X₁₅X₁₆QSGDDR | |
| | | | GEKPYKCPECGKSFSQSGDLRRH | | RHX₁₇X₁₈X₁₉HX₂₀X₂₁X₂₂X₂₃X₂₄X₈X₉CX₁₀X₁₁CX₁₂X₁₃X₁₄X₁₅X₁₆TSGE | |
| | | | QRTHTGEKPYKCPECGKSFSTSG | | LVRHX₁₇X₁₈X₁₉HX₂₀X₂₁X₂₂X₂₃X₂₄X₈X₉CX₁₀X₁₁CX₁₂X₁₃X₁₄X₁₅X₁₆RS | |
| | | | ELVRHQRTHTGEKPYKCPECGKS | | DKLVRHX₁₇X₁₃X₁₉HX₂₀X₂₁X₂₂X₂₃X₂₄X₂₅X₂₆X₂₇X₂₈X₂₉X₃₀ | |
| | | | FSRSDKLVRHQRTHTGEKPTGKK | | | |
| | | | TS | | | |
| aggctgggc | AGG CTG | 150 | LEPGEKPYKCPECGKSFSRSDKL | 151 | X₁X₂X₃X₄X₅X₆X₇X₈X₉CX₁₀X₁₁CX₁₂X₁₃X₁₄X₁₅X₁₆RSDKLVRHX₁₇X₁₈X₁₉ | 325 |
| ggggctgca | GGC GGG | | VRHQRTHTGEKPYKCPECGKSFS | | HX₂₀X₂₁X₂₂X₂₃X₂₄X₈X₉CX₁₀X₁₁CX₁₂X₁₃X₁₄X₁₅X₁₆QSGDLRRHX₁₇X₁₈ | |
| ggg | GCT GCA | | QSGDLRRHQRTHTGEKPYKCPEC | | X₁₉HX₂₀X₂₁X₂₂X₂₃X₂₄X₈X₉CX₁₀X₁₁CX₁₂X₁₃XHX₁₅X₁₆TSGELVRHX₁₇ | |
| | GGG | | GKSFSTSGELVRHQRTHTGEKPY | | X₁₈X₁₉HX₂₀X₂₁X₂₂X₂₃X₂₄X₈X₉CX₁₀X₁₁CX₁₂X₁₃X₁₄X₁₅X₁₆RSDKLVRH | |
| | | | KCPECGKSFSRSDKLVRHQRTHT | | X₁₇X₁₈X₁₉HX₂₀X₂₁X₂₂X₂₃X₂₄X₈X₉CX₁₀X₁₁CX₁₂X₁₃X₁₄X₁₅X₁₆DPGHLV | |
| | | | GEKPYKCPECGKSFSDPGHLVRH | | RHX₁₇X₁₈X₁₉HX₂₀X₂₁X₂₂X₂₃X₂₄X₈X₉CX₁₀X₁₁CX₁₂X₁₃X₁₄X₁₅X₁₆RNDA | |
| | | | QRTHTGEKPYKCPECGKSFSRND | | LTEHX₁₇X₁₈X₁₉HX₂₀X₂₁X₂₂X₂₃X₂₄X₈X₉CX₁₀X₁₁CX₁₂X₁₃X₁₄X₁₅X₁₆RS | |
| | | | ALTEHQRTHTGEKPYKCPECGKS | | DHLTNHX₁₇X₁₈X₁₉HX₂₀X₂₁X₂₂X₂₃X₂₄X₂₅X₂₆X₂₇X₂₈X₂₉X₃₀ | |
| | | | FSRSDHLTNHQRTHTGEKPTGKK | | | |
| | | | TS | | | |
| gtggatagg | GTG GAT | 1337 | LEPGEKPYKCPECGKSFSTSGEL | 1886 | X₁X₂X₃X₄X₅X₆X₇X₈X₉CX₁₀X₁₁CX₁₂X₁₃X₁₄X₁₅X₁₆TSGELVRHX₁₇X₁₈X₁₉ | 2435 |
| ctgggcggg | AGG CTG | | VRHQRTHTGEKPYKCPECGKSFS | | HX₂₀X₂₁X₂₂X₂₃X₂₄X₈X₉CX₁₀X₁₁CX₁₂X₁₃X₁₄X₁₅X₁₆RSDKLVRHX₁₇X₁₈ | |
| gct | GGC GGG | | RSDKLVRHQRTHTGEKPYKCPEC | | X₁₉HX₂₀X₂₁X₂₂X₂₃X₂₄X₈X₉CX₁₀X₁₁CX₁₂X₁₃X₁₄X₁₅X₁₆DPGHLVRHX₁₇ | |
| | GCT | | GKSFSDPGHLVRHQRTHTGEKPY | | X₁₈X₁₉HX₂₀X₂₁X₂₂X₂₃X₂₄X₈X₉CX₁₀X₁₁CX₁₂X₁₃X₁₄X₁₅X₁₆RNDALTEH | |
| | | | KCPECGKSFSRNDALTEHQRTHT | | X₁₇X₁₈X₁₉HX₂₀X₂₁X₂₂X₂₃X₂₄X₈X₉CX₁₀X₁₁CX₁₂X₁₃X₁₄X₁₅X₁₆RSDHLT | |
| | | | GEKPYKCPECGKSFSRSDHLTNH | | NHX₁₇X₁₈X₁₉HX₂₀X₂₁X₂₂X₂₃X₂₄X₈X₉CX₁₀X₁₁CX₁₂X₁₃X₁₄X₁₅X₁₆TSGN | |
| | | | QRTHTGEKPYKCPECGKSFSTSG | | LVRHX₁₇X₁₈X₁₉HX₂₀X₂₁X₂₂X₂₃X₂₄X₈X₉CX₁₀X₁₁CX₁₂X₁₃X₁₄X₁₅X₁₆RS | |
| | | | NLVRHQRTHTGEKPYKCPECGKS | | DELVRHX₁₇X₁₈X₁₉HX₂₀X₂₁X₂₂X₂₃X₂₄X₂₅X₂₆X₂₇X₂₈X₂₉X₃₀ | |
| | | | FSRSDELVRHQRTHTGEKPTGKK | | | |
| | | | TS | | | |
| gataggctg | GAT AGG | 1338 | LEPGEKPYKCPECGKSFSQSGDL | 1887 | X₁X₂X₃X₄X₅X₆X₇X₈X₉CX₁₀X₁₁CX₁₂X₁₃X₁₄X₁₅X₁₆QSGDLRRHX₁₇X₁₈X₁₉ | 2436 |
| ggcggggct | CTG GGC | | RRHQRTHTGEKPYKCPECGKSFS | | HX₂₀X₂₁X₂₂X₂₃X₂₄X₈X₉CX₁₀X₁₁CX₁₂X₁₃X₁₄X₁₅X₁₆TSGELVRHX₁₇X₁₈ | |
| gca | GGG GCT | | TSGELVRHQRTHTGEKPYKCPEC | | X₁₉HX₂₀X₂₁X₂₂X₂₃X₂₄X₈X₉CX₁₀X₁₁CX₁₂X₁₃X₁₄X₁₅X₁₆RSDKLVRHX₁₇ | |
| | GCA | | GKSFSRSDKLVRHQRTHTGEKPY | | X₁₈X₁₉HX₂₀X₂₁X₂₂X₂₃X₂₄X₈X₉CX₁₀X₁₁CX₁₂X₁₃X₁₄X₁₅X₁₆DPGHLVRH | |
| | | | KCPECGKSFSDPGHLVRHQRTHT | | X₁₇X₁₈X₁₉HX₂₀X₂₁X₂₂X₂₃X₂₄X₈X₉CX₁₀X₁₁CX₁₂X₁₃X₁₄X₁₅X₁₆RNDALT | |
| | | | GEKPYKCPECGKSFSRNDALTEH | | EHX₁₇X₁₈X₁₉HX₂₀X₂₁X₂₂X₂₃X₂₄X₈X₉CX₁₀X₁₁CX₁₂X₁₃X₁₄X₁₅X₁₆RSDH | |
| | | | QRTHTGEKPYKCPECGKSFSRSD | | LTNHX₁₇X₁₈X₁₉HX₂₀X₂₁X₂₂X₂₃X₂₄X₈X₉CX₁₀X₁₁CX₁₂X₁₃X₁₄X₁₅X₁₆TS | |
| | | | HLTNHQRTHTGEKPYKCPECGKS | | GNLVRHX₁₇X₁₃X₁₉HX₂₀X₂₁X₂₂X₂₃X₂₄X₂₅X₂₆X₂₇X₂₈X₂₉X₃₀ | |
| | | | FSTSGNLVRHQRTHTGEKPTGKK | | | |
| | | | TS | | | |
| ccggtggat | CCG GTG | 1339 | LEPGEKPYKCPECGKSFSRSDKL | 1888 | X₁X₂X₃X₄X₅X₆X₇X₈X₉CX₁₀X₁₁CX₁₂X₁₃X₁₄X₁₅X₁₆RSDKLVRHX₁₇X₁₈X₁₉ | 2437 |
| aggctgggc | GAT AGG | | VRHQRTHTGEKPYKCPECGKSFS | | HX₂₀X₂₁X₂₂X₂₃X₂₄X₈X₉CX₁₀X₁₁CX₁₂X₁₃X₁₄X₁₅X₁₆DPGHLVRHX₁₇X₁₈ | |
| ggg | CTG GGC | | DPGHLVRHQRTHTGEKPYKCPEC | | X₁₉HX₂₀X₂₁X₂₂X₂₃X₂₄X₈X₉CX₁₀X₁₁CX₁₂X₁₃X₁₄X₁₅X₁₆RNDALTEHX₁₇ | |
| | GGG | | GKSFSRNDALTEHQRTHTGEKPY | | X₁₈X₁₉HX₂₀X₂₁X₂₂X₂₃X₂₄X₈X₉CX₁₀X₁₁CX₁₂X₁₃X₁₄X₁₅X₁₆RSDHLTNH | |
| | | | KCPECGKSFSRSDHLTNHQRTHT | | X₁₇X₁₈X₁₉HX₂₀X₂₁X₂₂X₂₃X₂₄X₈X₉CX₁₀X₁₁CX₁₂X₁₃X₁₄X₁₅X₁₆TSGNLV | |
| | | | GEKPYKCPECGKSFSTSGNLVRH | | RHX₁₇X₁₈X₁₉HX₂₀X₂₁X₂₂X₂₃X₂₄X₈X₉CX₁₀X₁₁CX₁₂X₁₃X₁₄X₁₅X₁₆RSDE | |
| | | | QRTHTGEKPYKCPECGKSFSRSD | | LVRHX₁₇X₁₈X₁₉HX₂₀X₂₁X₂₂X₂₃X₂₄X₈X₉CX₁₀X₁₁CX₁₂X₁₃X₁₄X₁₅X₁₆RN | |
| | | | ELVRHQRTHTGEKPYKCPECGKS | | DTLTEHX₁₇X₁₃X₁₉HX₂₀X₂₁X₂₂X₂₃X₂₄X₂₅X₂₆X₂₇X₂₈X₂₉X₃₀ | |
| | | | FSRNDTLTEHQRTHTGEKPTGKK | | | |
| | | | TS | | | |
| ccgccggtg | CCG CCG | 1340 | LEPGEKPYKCPECGKSFSDPGHL | 1889 | X₁X₂X₃X₄X₅X₆X₇X₈X₉CX₁₀X₁₁CX₁₂X₁₃X₁₄X₁₅X₁₆DPGHLVRHX₁₇X₁₈X₁₉ | 2438 |
| gataggctg | GTG GAT | | VRHQRTHTGEKPYKCPECGKSFS | | HX₂₀X₂₁X₂₂X₂₃X₂₄X₈X₉CX₁₀X₁₁CX₁₂X₁₃X₁₄X₁₅X₁₆RNDALTEHX₁₇X₁₈ | |
| ggc | AGG CTG | | RNDALTEHQRTHTGEKPYKCPEC | | X₁₉HX₂₀X₂₁X₂₂X₂₃X₂₄X₈X₉CX₁₀X₁₁CX₁₂X₁₃X₁₄X₁₅X₁₆RSDHLTNHX₁₇ | |
| | GGC | | GKSFSRSDHLTNHQRTHTGEKPY | | X₁₈X₁₉HX₂₀X₂₁X₂₂X₂₃X₂₄X₈X₉CX₁₀X₁₁CX₁₂X₁₃X₁₄X₁₅X₁₆TSGNLVRH | |
| | | | KCPECGKSFSTSGNLVRHQRTHT | | X₁₇X₁₈X₁₉HX₂₀X₂₁X₂₂X₂₃X₂₄X₈X₉CX₁₀X₁₁CX₁₂X₁₃X₁₄X₁₅X₁₆RSDELV | |
| | | | GEKPYKCPECGKSFSRSDELVRH | | RHX₁₇X₁₈X₁₉HX₂₀X₂₁X₂₂X₂₃X₂₄X₈X₉CX₁₀X₁₁CX₁₂X₁₃X₁₄X₁₅X₁₆RNDT | |
| | | | QRTHTGEKPYKCPECGKSFSRND | | LTEHX₁₇X₁₈X₁₉HX₂₀X₂₁X₂₂X₂₃X₂₄X₈X₉CX₁₀X₁₁CX₁₂X₁₃X₁₄X₁₅X₁₆RN | |
| | | | TLTEHQRTHTGEKPYKCPECGKS | | DTLTEHX₁₇X₁₈X₁₉HX₂₀X₂₁X₂₂X₂₃X₂₄X₂₅X₂₆X₂₇X₂₈X₂₉X₃₀ | |
| | | | FSRNDTLTEHQRTHTGEKPTGKK | | | |
| | | | TS | | | |
| cccccgccg | CCC CCG | 1341 | LEPGEKPYKCPECGKSFSRNDAL | 1890 | X₁X₂X₃X₄X₅X₆X₇X₈X₉CX₁₀X₁₁CX₁₂X₁₃X₁₄X₁₅X₁₆RNDALTEHX₁₇X₁₈X₁₉ | 2439 |
| gtggatagg | CCG GTG | | TEHQRTHTGEKPYKCPECGKSFS | | HX₂₀X₂₁X₂₂X₂₃X₂₄X₈X₉CX₁₀X₁₁CX₁₂X₁₃X₁₄X₁₅X₁₆RSDHLTNHX₁₇X₁₈ | |
| ctg | GAT AGG | | RSDHLTNHQRTHTGEKPYKCPEC | | X₁₉HX₂₀X₂₁X₂₂X₂₃X₂₄X₈X₉CX₁₀X₁₁CX₁₂X₁₃X₁₄X₁₅X₁₆TSGNLVRHX₁₇ | |
| | CTG | | GKSFSTSGNLVRHQRTHTGEKPY | | X₁₈X₁₉HX₂₀X₂₁X₂₂X₂₃X₂₄X₈X₉CX₁₀X₁₁CX₁₂X₁₃X₁₄X₁₅X₁₆RSDELVRH | |
| | | | KCPECGKSFSRSDELVRHQRTHT | | X₁₇X₁₈X₁₉HX₂₀X₂₁X₂₂X₂₃X₂₄X₈X₉CX₁₀X₁₁CX₁₂X₁₃X₁₄X₁₅X₁₆RNDTLT | |
| | | | GEKPYKCPECGKSFSRNDTLTEH | | EHX₁₇X₁₈X₁₉HX₂₀X₂₁X₂₂X₂₃X₂₄X₈X₉CX₁₀X₁₁CX₁₂X₁₃X₁₄X₁₅X₁₆RNDT | |
| | | | QRTHTGEKPYKCPECGKSFSRND | | LTEHX₁₇X₁₈X₁₉HX₂₀X₂₁X₂₂X₂₃X₂₄X₈X₉CX₁₀X₁₁CX₁₂X₁₃X₁₄X₁₅X₁₆SK | |
| | | | TLTEHQRTHTGEKPYKCPECGKS | | KHLAEHX₁₇X₁₈X₁₉HX₂₀X₂₁X₂₂X₂₃X₂₄X₂₅X₂₆X₂₇X₂₈X₂₉X₃₀ | |
| | | | FSSKKHLAEHQRTHTGEKPTGKK | | | |
| | | | TS | | | |
| ggtcccccg | GGT CCC | 1342 | LEPGEKPYKCPECGKSFSRSDHL | 1891 | X₁X₂X₃X₄X₅X₆X₇X₈X₉CX₁₀X₁₁CX₁₂X₁₃X₁₄X₁₅X₁₆RSDHLTNHX₁₇X₁₈X₁₉ | 2440 |
| ccggtggat | CCG CCG | | TNHQRTHTGEKPYKCPECGKSFS | | HX₂₀X₂₁X₂₂X₂₃X₂₄X₈X₉CX₁₀X₁₁CX₁₂X₁₃X₁₄X₁₅X₁₆TSGNLVRHX₁₇X₁₈ | |
| agg | GTG GAT | | TSGNLVRHQRTHTGEKPYKCPEC | | X₁₉HX₂₀X₂₁X₂₂X₂₃X₂₄X₈X₉CX₁₀X₁₁CX₁₂X₁₃X₁₄X₁₅X₁₆RSDELVRHX₁₇ | |
| | AGG | | GKSFSRSDELVRHQRTHTGEKPY | | X₁₈X₁₉HX₂₀X₂₁X₂₂X₂₃X₂₄X₈X₉CX₁₀X₁₁CX₁₂X₁₃X₁₄X₁₅X₁₆RNDTLTEH | |
| | | | KCPECGKSFSRNDTLTEHQRTHT | | X₁₇X₁₈X₁₉HX₂₀X₂₁X₂₂X₂₃X₂₄X₈X₉CX₁₀X₁₁CX₁₂X₁₃X₁₄X₁₅X₁₆RNDTLT | |
| | | | GEKPYKCPECGKSFSRNDTLTEH | | EHX₁₇X₁₈X₁₉HX₂₀X₂₁X₂₂X₂₃X₂₄X₈X₉CX₁₀X₁₁CX₁₂X₁₃X₁₄X₁₅X₁₆SKKH | |
| | | | QRTHTGEKPYKCPECGKSFSSKK | | LAEHX₁₇X₁₈X₁₉HX₂₀X₂₁X₂₂X₂₃X₂₄X₈X₉CX₁₀X₁₁CX₁₂X₁₃X₁₄X₁₅X₁₆TS | |
| | | | HLAEHQRTHTGEKPYKCPECGKS | | GHLVRHX₁₇X₁₈X₁₉HX₂₀X₂₁X₂₂X₂₃X₂₄X₂₅X₂₆X₂₇X₂₈X₂₉X₃₀ | |
| | | | FSTSGHLVRHQRTHTGEKPTGKK | | | |
| | | | TS | | | |
| ataggctgg | ATA GGC | 1343 | LEPGEKPYKCPECGKSFSRADNL | 1892 | X₁X₂X₃X₄X₅X₆X₇X₈X₉CX₁₀X₁₁CX₁₂X₁₃X₁₄X₁₅X₁₆RADNLTEHX₁₇X₁₈X₁₉ | 2441 |
| gcggggctg | TGG GCG | | TEHQRTHTGEKPYKCPECGKSFS | | HX₂₀X₂₁X₂₂X₂₃X₂₄X₈X₉CX₁₀X₁₁CX₁₂X₁₃X₁₄X₁₅X₁₆RNDALTEHX₁₇X₁₈ | |
| cag | ggg CTG | | RNDALTEHQRTHTGEKPYKCPEC | | X₁₉HX₂₀X₂₁X₂₂X₂₃X₂₄X₈X₉CX₁₀X₁₁CX₁₂X₁₃X₁₄X₁₅X₁₆RSDKLVRHX₁₇ | |
| | CAG | | GKSFSRSDKLVRHQRTHTGEKPY | | X₁₈X₁₉HX₂₀X₂₁X₂₂X₂₃X₂₄X₈X₉CX₁₀X₁₁CX₁₂X₁₃X₁₄X₁₅X₁₆RSDDLVRH | |
| | | | KCPECGKSFSRSDDLVRHQRTHT | | X₁₇X₁₈X₁₉HX₂₀X₂₁X₂₂X₂₃X₂₄X₈X₉CX₁₀X₁₁CX₁₂X₁₃X₁₄X₁₅X₁₆RSDHLT | |
| | | | GEKPYKCPECGKSFSRSDHLTTH | | THX₁₇X₁₈X₁₉HX₂₀X₂₁X₂₂X₂₃X₂₄X₈X₉CX₁₀X₁₁CX₁₂X₁₃X₁₄X₁₅X₁₆DPGH | |
| | | | QRTHTGEKPYKCPECGKSFSDPG | | LVRHX₁₇X₁₈X₁₉HX₂₀X₂₁X₂₂X₂₃X₂₄X₈X₉CX₁₀X₁₁CX₁₂XEX₁₄X₁₅X₁₆QK | |
| | | | HLVRHQRTHTGEKPYKCPECGKS | | SSLIAHX₁₇X₁₈X₁₉HX₂₀X₂₁X₂₂X₂₃X₂₄X₂₅X₂₆X₂₇X₂₈X₂₉X₃₀ | |
| | | | FSQKSSLIAHQRTHTGEKPTGKK | | | |
| | | | TS | | | |
| cggtggata | CGG TGG | 1344 | LEPGEKPYKCPECGKSFSRSDKL | 1893 | X₁X₂X₃X₄X₅X₆X₇X₈X₉CX₁₀X₁₁CX₁₂X₁₃X₁₄X₁₅X₁₆RSDKLVRHX₁₇X₁₈X₁₉ | 2442 |
| ggctgggcg | ATA GGC | | VRHQRTHTGEKPYKCPECGKSFS | | HX₂₀X₂₁X₂₂X₂₃X₂₄X₈X₉CX₁₀X₁₁CX₁₂X₁₃X₁₄X₁₅X₁₆RSDDLVRHX₁₇X₁₈ | |
| ggg | TGG GCG | | RSDDLVRHQRTHTGEKPYKCPEC | | X₁₉HX₂₀X₂₁X₂₂X₂₃X₂₄X₈X₉CX₁₀X₁₁CX₁₂X₁₃X₁₄X₁₅X₁₆RSDHLTTHX₁₇ | |
| | GGG | | GKSFSRSDHLTTHQRTHTGEKPY | | X₁₈X₁₉HX₂₀X₂₁X₂₂X₂₃X₂₄X₈X₉CX₁₀X₁₁CX₁₂X₁₃X₁₄X₁₅X₁₆DPGHLVRH | |
| | | | KCPECGKSFSDPGHLVRHQRTHT | | X₁₇X₁₈X₁₉HX₂₀X₂₁X₂₂X₂₃X₂₄X₈X₉CX₁₀X₁₁CX₁₂X₁₃X₁₄X₁₅X₁₆QKSSLI | |
| | | | GEKPYKCPECGKSFSQKSSLIAH | | AHX₁₇X₁₈X₁₉HX₂₀X₂₁X₂₂X₂₃X₂₄X₈X₉CX₁₀X₁₁CX₁₂X₁₃X₁₄X₁₅X₁₆RSDH | |
| | | | QRTHTGEKPYKCPECGKSFSRSD | | LTTHX₁₇X₁₈X₁₉HX₂₀X₂₁X₂₂X₂₃X₂₄X₈X₉CX₁₀X₁₁CX₁₂X₁₃X₁₄X₁₅X₁₆RS | |
| | | | HLTTHQRTHTGEKPYKCPECGKS | | DKLTEHX₁₇X₁₈X₁₉HX₂₀X₂₁X₂₂X₂₃X₂₄X₂₅X₂₆X₂₇X₂₈X₂₉X₃₀ | |
| | | | FSRSDKLTEHQRTHTGEKPTGKK | | | |
| | | | TS | | | |
| tggataggc | TGG ATA | 1345 | LEPGEKPYKCPECGKSFSRNDAL | 1894 | X₁X₂X₃X₄X₅X₆X₇X₈X₉CX₁₀X₁₁CX₁₂X₁₃X₁₄X₁₅X₁₆RNDALTEHX₁₇X₁₈X₁₉ | 2443 |
| tgggcgggg | GGC TGG | | TEHQRTHTGEKPYKCPECGKSFS | | HX₂₀X₂₁X₂₂X₂₃X₂₄X₈X₉CX₁₀X₁₁CX₁₂X₁₃X₁₄X₁₅X₁₆RSDKLVRHX₁₇X₁₈ | |
| ctg | GCG ggg | | RSDKLVRHQRTHTGEKPYKCPEC | | X₁₉HX₂₀X₂₁X₂₂X₂₃X₂₄X₈X₉CX₁₀X₁₁CX₁₂X₁₃X₁₄X₁₅X₁₆RSDDLVRHX₁₇ | |
| | CTG | | GKSFSRSDDLVRHQRTHTGEKPY | | X₁₈X₁₉HX₂₀X₂₁X₂₂X₂₃X₂₄X₈X₉CX₁₀X₁₁CX₁₂X₁₃X₁₄X₁₅X₁₆RSDHLTTH | |
| | | | KCPECGKSFSRSDHLTTHQRTHT | | X₁₇X₁₈X₁₉HX₂₀X₂₁X₂₂X₂₃X₂₄X₈X₉CX₁₀X₁₁CX₁₂X₁₃X₁₄X₁₅X₁₆DPGHLV | |
| | | | GEKPYKCPECGKSFSDPGHLVRH | | RHX₁₇X₁₈X₁₉HX₂₀X₂₁X₂₂X₂₃X₂₄X₈X₉CX₁₀X₁₁CX₁₂X₁₃X₁₄X₁₅X₁₆QKSS | |
| | | | QRTHTGEKPYKCPECGKSFSQKS | | LIAHX₁₇X₁₈X₁₉HX₂₀X₂₁X₂₂X₂₃X₂₄X₈X₉CX₁₀X₁₁CX₁₂X₁₃X₁₄X₁₅X₁₆RS | |
| | | | SLIAHQRTHTGEKPYKCPECGKS | | DHLTTHX₁₇X₁₈X₁₉HX₂₀X₂₁X₂₂X₂₃X₂₄X₂₅X₂₆X₂₇X₂₈X₂₉X₃₀ | |
| | | | FSRSDHLTTHQRTHTGEKPTGKK | | | |
| | | | TS | | | |
| cgccggtgg | CGC CGG | 1346 | LEPGEKPYKCPECGKSFSRSDDL | 1895 | X₁X₂X₃X₄X₅X₆X₇X₈X₉CX₁₀X₁₁CX₁₂X₁₃X₁₄X₁₅X₁₆RSDDLVRHX₁₇X₁₈X₁₉ | 2444 |
| ataggctgg | TGG ATA | | VRHQRTHTGEKPYKCPECGKSFS | | HX₂₀X₂₁X₂₂X₂₃X₂₄X₈X₉CX₁₀X₁₁CX₁₂X₁₃X₁₄X₁₅X₁₆RSDHLTTHX₁₇X₁₈ | |
| gcg | GGC TGG | | RSDHLTTHQRTHTGEKPYKCPEC | | X₁₉HX₂₀X₂₁X₂₂X₂₃X₂₄X₈X₉CX₁₀X₁₁CX₁₂X₁₃X₁₄X₁₅X₁₆DPGHLVRHX₁₇ | |
| | GCG | | GKSFSDPGHLVRHQRTHTGEKPY | | X₁₈X₁₉HX₂₀X₂₁X₂₂X₂₃X₂₄X₈X₉CX₁₀X₁₁CX₁₂X₁₃X₁₄X₁₅X₁₆QKSSLIAH | |
| | | | KCPECGKSFSQKSSLIAHQRTHT | | X₁₇X₁₈X₁₉HX₂₀X₂₁X₂₂X₂₃X₂₄X₈X₉CX₁₀X₁₁CX₁₂X₁₃X₁₄X₁₅X₁₆RSDHLT | |
| | | | GEKPYKCPECGKSFSRSDHLTTH | | THX₁₇X₁₈X₁₉HX₂₀X₂₁X₂₂X₂₃X₂₄X₈X₉CX₁₀X₁₁CX₁₂X₁₃X₁₄X₁₅X₁₆RSDK | |
| | | | QRTHTGEKPYKCPECGKSFSRSD | | LTEHX₁₇X₁₈X₁₉HX₂₀X₂₁X₂₂X₂₃X₂₄X₈X₉CX₁₀X₁₁CX₁₂X₁₃X₁₄X₁₅X₁₆HT | |
| | | | KLTEHQRTHTGEKPYKCPECGKS | | GHLLEHX₁₇X₁₈X₁₉HX₂₀X₂₁X₂₂X₂₃X₂₄X₂₅X₂₆X₂₇X₂₈X₂₉X₃₀ | |
| | | | FSHTGHLLEHQRTHTGEKPTGKK | | | |
| | | | TS | | | |
| gtcccccgc | GTC CCC | 1347 | LEPGEKPYKCPECGKSFSDPGHL | 1896 | X₁X₂X₃X₄X₅X₆X₇X₈X₉CX₁₀X₁₁CX₁₂X₁₃X₁₄X₁₅X₁₆DPGHLVRHX₁₇X₁₈X₁₉ | 2445 |
| cggtggata | CGC CGG | | VRHQRTHTGEKPYKCPECGKSFS | | HX₂₀X₂₁X₂₂X₂₃X₂₄X₈X₉CX₁₀X₁₁CX₁₂X₁₃X₁₄X₁₅X₁₆QKSSLIAHX₁₇X₁₈ | |
| ggc | TGG ATA | | QKSSLIAHQRTHTGEKPYKCPEC | | X₁₉HX₂₀X₂₁X₂₂X₂₃X₂₄X₈X₉CX₁₀X₁₁CX₁₂X₁₃X₁₄X₁₅X₁₆RSDHLTTHX₁₇ | |
| | GGC | | GKSFSRSDHLTTHQRTHTGEKPY | | X₁₈X₁₉HX₂₀X₂₁X₂₂X₂₃X₂₄X₈X₉CX₁₀X₁₁CX₁₂X₁₃X₁₄X₁₅X₁₆RSDKLTEH | |
| | | | KCPECGKSFSRSDKLTEHQRTHT | | X₁₇X₁₈X₁₉HX₂₀X₂₁X₂₂X₂₃X₂₄X₈X₉CX₁₀X₁₁CX₁₂X₁₃X₁₄X₁₅X₁₆HTGHLL | |
| | | | GEKPYKCPECGKSFSHTGHLLEH | | EHX₁₇X₁₈X₁₉HX₂₀X₂₁X₂₂X₂₃X₂₄X₈X₉CX₁₀X₁₁CX₁₂X₁₃X₁₄X₁₅X₁₆SKKH | |
| | | | QRTHTGEKPYKCPECGKSFSSKK | | LAEHX₁₇X₁₈X₁₉HX₂₀X₂₁X₂₂X₂₃X₂₄X₈X₉CX₁₀X₁₁CX₁₂X₁₃X₁₄X₁₅X₁₆DP | |
| | | | HLAEHQRTHTGEKPYKCPECGKS | | GALVRHX₁₇X₁₈X₁₉HX₂₀X₂₁X₂₂X₂₃X₂₄X₂₅X₂₆X₂₇X₂₈X₂₉X₃₀ | |
| | | | FSDPGALVRHQRTHTGEKPTGKK | | | |
| | | | TS | | | |
| ccccgccgg | CCC CGC | 1348 | LEPGEKPYKCPECGKSFSRSDHL | 1897 | X₁X₂X₃X₄X₅X₆X₇X₈X₉CXₗ₀X₁₁CX₁₂X₁₃X₁₄X₁₅X₁₆RSDHLTTHX₁₇XHX₁₉ | 2446 |
| tggataggc | CGG TGG | | TTHQRTHTGEKPYKCPECGKSFS | | HX₂₀X₂₁X₂₂X₂₃X₂₄X₈X₉CX₁₀X₁₁CX₁₂X₁₃X₁₄X₁₅X₁₆DPGHLVRHX₁₇X₁₈ | |
| tgg | ATA GGC | | DPGHLVRHQRTHTGEKPYKCPEC | | X₁₉HX₂₀X₂₁X₂₂X₂₃X₂₄X₈X₉CX₁₀X₁₁CX₁₂X₁₃X₁₄X₁₅X₁₆QKSSLIAHX₁₇ | |
| | TGG | | GKSFSQKSSLIAHQRTHTGEKPY | | X₁₈X₁₉HX₂₀X₂₁X₂₂X₂₃X₂₄X₈X₉CX₁₀X₁₁CX₁₂X₁₃X₁₄X₁₅X₁₆RSDHLTTH | |
| | | | KCPECGKSFSRSDHLTTHQRTHT | | X₁₇X₁₈X₁₉HX₂₀X₂₁X₂₂X₂₃X₂₄X₈X₉CX₁₀X₁₁CX₁₂X₁₃X₁₄X₁₅X₁₆RSDKLT | |
| | | | GEKPYKCPECGKSFSRSDKLTEH | | EHX₁₇X₁₈X₁₉HX₂₀X₂₁X₂₂X₂₃X₂₄X₈X₉CX₁₀X₁₁CX₁₂X₁₃X₁₄X₁₅X₁₆HTGH | |
| | | | QRTHTGEKPYKCPECGKSFSHTG | | LLEHX₁₇X₁₈X₁₉HX₂₀X₂₁X₂₂X₂₃X₂₄X₈X₉CX₁₀X₁₁CX₁₂X₁₃X₁₄X₁₅X₁₆SK | |
| | | | HLLEHQRTHTGEKPYKCPECGKS | | KHLAEHX₁₇X₁₈X₁₉HX₂₀X₂₁X₂₂X₂₃X₂₄X₂₅X₂₆X₂₇X₂₈X₂₉X₃₀ | |
| | | | FSSKKHLAEHQRTHTGEKPTGKK | | | |
| | | | TS | | | |
| ggctgggcg | GGC TGG | 1349 | LEPGEKPYKCPECGKSFSQRAHL | 1898 | X₁X₂X₃X₄X₅X₆X₇X₈X₉CX₁₀X₁₁CX₁₂X₁₃X₁₄X₁₅X₁₆QRAHLERHX₁₇X₁₈X₁₉ | 2447 |
| gggctgcag | GCG ggg | | ERHQRTHTGEKPYKCPECGKSFS | | HX₂₀X₂₁X₂₂X₂₃X₂₄X₈X₉CX₁₀X₁₁CX₁₂X₁₃X₁₄X₁₅X₁₆RADNLTEHX₁₇X₁₈ | |
| gga | CTG CAG | | RADNLTEHQRTHTGEKPYKCPEC | | X₁₉HX₂₀X₂₁X₂₂X₂₃X₂₄X₈X₉CX₁₀X₁₁CX₁₂X₁₃X₁₄X₁₅X₁₆RNDALTEHX₁₇ | |
| | GGA | | GKSFSRNDALTEHQRTHTGEKPY | | X₁₈X₁₉HX₂₀X₂₁X₂₂X₂₃X₂₄X₈X₉CX₁₀X₁₁CX₁₂X₁₃X₁₄X₁₅X₁₆RSDKLVRH | |
| | | | KCPECGKSFSRSDKLVRHQRTHT | | X₁₇X₁₈X₁₉HX₂₀X₂₁X₂₂X₂₃X₂₄X₈X₉CX₁₀X₁₁CX₁₂X₁₃X₁₄X₁₅X₁₆RSDDLV | |
| | | | GEKPYKCPECGKSFSRSDDLVRH | | RHX₁₇X₁₈X₁₉HX₂₀X₂₁X₂₂X₂₃X₂₄X₈X₉CX₁₀X₁₁CX₁₂X₁₃X₁₄X₁₅X₁₆RSDH | |
| | | | QRTHTGEKPYKCPECGKSFSRSD | | LTTHX₁₇X₁₈X₁₉HX₂₀X₂₁X₂₂X₂₃X₂₄X₈X₉CX₁₀X₁₁CX₁₂X₁₃X₁₄X₁₅X₁₆DP | |
| | | | HLTTHQRTHTGEKPYKCPECGKS | | GHLVRHX₁₇X₁₈X₁₉HX₂₀X₂₁X₂₂X₂₃X₂₄X₂₅X₂₆X₂₇X₂₈X₂₉X₃₀ | |
| | | | FSDPGHLVRHQRTHTGEKPTGKK | | | |
| | | | TS | | | |
| ggtggatag | GGT GGA | 1350 | LEPGEKPYKCPECGKSFSDPGHL | 1899 | X₁X₂X₃X₄X₅X₆X₇X₈X₉CX₁₀X₁₁CX₁₂X₁₃X₁₄X₁₅X₁₆DPGHLVRHX₁₇X₁₈X₁₉ | 2448 |
| gctgggcgg | TAG GCT | | VRHQRTHTGEKPYKCPECGKSFS | | HX₂₀X₂₁X₂₂X₂₃X₂₄X₈X₉CX₁₀X₁₁CX₁₂X₁₃X₁₄X₁₅X₁₆RSDKLTEHX₁₇X₁₈ | |
| ggc | ggg CGG | | RSDKLTEHQRTHTGEKPYKCPEC | | X₁₉HX₂₀X₂₁X₂₂X₂₃X₂₄X₈X₉CX₁₀X₁₁CX₁₂X₁₃X₁₄X₁₅X₁₆RSDKLVRHX₁₇ | |
| | GGC | | GKSFSRSDKLVRHQRTHTGEKPY | | X₁₈X₁₉HX₂₀X₂₁X₂₂X₂₃X₂₄X₈X₉CX₁₀X₁₁CX₁₂X₁₃X₁₄X₁₅X₁₆TSGELVRH | |
| | | | KCPECGKSFSTSGELVRHQRTHT | | X₁₇X₁₈X₁₉HX₂₀X₂₁X₂₂X₂₃X₂₄X₈X₉CX₁₀X₁₁CX₁₂X₁₃X₁₄X₁₅X₁₆REDNLH | |
| | | | GEKPYKCPECGKSFSREDNLHTH | | THX₁₇X₁₈X₁₉HX₂₀X₂₁X₂₂X₂₃X₂₄X₈X₉CX₁₀X₁₁CX₁₂X₁₃X₁₄X₁₅X₁₆QRAH | |
| | | | QRTHTGEKPYKCPECGKSFSQRA | | LERHX₁₇X₁₈X₁₉HX₂₀X₂₁X₂₂X₂₃X₂₄X₈X₉CX₁₀X₁₁CX₁₂X₁₃X₁₄X₁₅X₁₆TS | |
| | | | HLERHQRTHTGEKPYKCPECGKS | | GHLVRHX₁₇X₁₃X₁₉HX₂₀X₂₁X₂₂X₂₃X₂₄X₂₅X₂₆X₂₇X₂₈X₂₉X₃₀ | |
| | | | FSTSGHLVRHQRTHTGEKPTGKK | | | |
| | | | TS | | | |
| gccggtgga | GCC GGT | 1351 | LEPGEKPYKCPECGKSFSRSDKL | 1900 | X₁X₂X₃X₄X₅X₆X₇X₈X₉CX₁₀X₁₁CX₁₂X₁₃X₁₄X₁₅X₁₆RSDKLTEHX₁₇X₁₈X₁₉ | 2449 |
| taggctggg | GGA TAG | | TEHQRTHTGEKPYKCPECGKSFS | | HX₂₀X₂₁X₂₂X₂₃X₂₄X₈X₉CX₁₀X₁₁CX₁₂X₁₃X₁₄X₁₅X₁₆RSDKLVRHX₁₇X₁₈ | |
| cgg | GCT ggg | | RSDKLVRHQRTHTGEKPYKCPEC | | X₁₉HX₂₀X₂₁X₂₂X₂₃X₂₄X₈X₉CX₁₀X₁₁CX₁₂X₁₃X₁₄X₁₅X₁₆TSGELVRHX₁₇ | |
| | CGG | | GKSFSTSGELVRHQRTHTGEKPY | | X₁₈X₁₉HX₂₀X₂₁X₂₂X₂₃X₂₄X₈X₉CX₁₀X₁₁CX₁₂X₁₃X₁₄X₁₅X₁₆REDNLHTH | |
| | | | KCPECGKSFSREDNLHTHQRTHT | | X₁₇X₁₈X₁₉HX₂₀X₂₁X₂₂X₂₃X₂₄X₈X₉CX₁₀X₁₁CX₁₂X₁₃X₁₄X₁₅X₁₆QRAHLE | |
| | | | GEKPYKCPECGKSFSQRAHLERH | | RHX₁₇X₁₈X₁₉HX₂₀X₂₁X₂₂X₂₃X₂₄X₈X₉CX₁₀X₁₁CX₁₂X₁₃X₁₄X₁₅X₁₆TSGH | |
| | | | QRTHTGEKPYKCPECGKSFSTSG | | LVRHX₁₇X₁₈X₁₉HX₂₀X₂₁X₂₂X₂₃X₂₄X₈X₉CX₁₀X₁₁CX₁₂X₁₃X₁₄X₁₅X₁₆DC | |
| | | | HLVRHQRTHTGEKPYKCPECGKS | | RDLARHX₁₇X₁₈X₁₉HX₂₀X₂₁X₂₂X₂₃X₂₄X₂₅X₂₆X₂₇X₂₈X₂₉X₃₀ | |
| | | | FSDCRDLARHQRTHTGEKPTGKK | | | |
| | | | TS | | | |
| cccgccggt | CCC GCC | 1352 | LEPGEKPYKCPECGKSFSRSDKL | 1901 | X₁X₂X₃X₄X₅X₆X₇X₈X₉CX₁₀X₁₁CX₁₂X₁₃X₁₄X₁₅X₁₆RSDKLVRHX₁₇X₁₈X₁₉ | 2450 |
| ggataggct | GGT GGA | | VRHQRTHTGEKPYKCPECGKSFS | | HX₂₀X₂₁X₂₂X₂₃X₂₄X₈X₉CX₁₀X₁₁CX₁₂X₁₃X₁₄X₁₅X₁₆TSGELVRHX₁₇X₁₈ | |
| ggg | TAG GCT | | TSGELVRHQRTHTGEKPYKCPEC | | X₁₉HX₂₀X₂₁X₂₂X₂₃X₂₄X₈X₉CX₁₀X₁₁CX₁₂X₁₃X₁₄X₁₅X₁₆REDNLHTHX₁₇ | |
| | GGG | | GKSFSREDNLHTHQRTHTGEKPY | | X₁₈X₁₉HX₂₀X₂₁X₂₂X₂₃X₂₄X₈X₉CX₁₀X₁₁CX₁₂X₁₃X₁₄X₁₅X₁₆QRAHLERH | |
| | | | KCPECGKSFSQRAHLERHQRTHT | | X₁₇X₁₈X₁₉HX₂₀X₂₁X₂₂X₂₃X₂₄X₈X₉CX₁₀X₁₁CX₁₂X₁₃X₁₄X₁₅X₁₆TSGHLV | |
| | | | GEKPYKCPECGKSFSTSGHLVRH | | RHX₁₇X₁₈X₁₉HX₂₀X₂₁X₂₂X₂₃X₂₄X₈X₉CX₁₀X₁₁CX₁₂X₁₃X₁₄X₁₅X₁₆DCRD | |
| | | | QRTHTGEKPYKCPECGKSFSDCR | | LARHX₁₇X₁₈X₁₉HX₂₀X₂₁X₂₂X₂₃X₂₄X₈X₉CX₁₀X₁₁CX₁₂X₁₃X₁₄X₁₅X₁₆SK | |
| | | | DLARHQRTHTGEKPYKCPECGKS | | KHLAEHX₁₇X₁₈X₁₉HX₂₀X₂₁X₂₂X₂₃X₂₄X₂₅X₂₆X₂₇X₂₈X₂₉X₃₀ | |
| | | | FSSKKHLAEHQRTHTGEKPTGKK | | | |
| | | | TS | | | |
| gctgacacc | GCT GAC | 1353 | LEPGEKPYKCPECGKSFSTTGNL | 1902 | X₁X₂X₃X₄X₅X₆X₇X₈X₉CX₁₀X₁₁CX₁₂X₁₃X₁₄X₁₅X₁₆TTGNLTVHX₁₇X₁₈X₁₉ | 2451 |
| cggggtgct | ACC CGG | | TVHQRTHTGEKPYKCPECGKSFS | | HX₂₀X₂₁X₂₂X₂₃X₂₄X₈X₉CX₁₀X₁₁CX₁₂X₁₃X₁₄X₁₅X₁₆TSGELVRHX₁₇X₁₈ | |
| aat | GGT GCT | | TSGELVRHQRTHTGEKPYKCPEC | | X₁₉HX₂₀X₂₁X₂₂X₂₃X₂₄X₈X₉CX₁₀X₁₁CX₁₂X₁₃X₁₄X₁₅X₁₆TSGHLVRHX₁₇ | |
| | AAT | | GKSFSTSGHLVRHQRTHTGEKPY | | X₁₈X₁₉HX₂₀X₂₁X₂₂X₂₃X₂₄X₈X₉CX₁₀X₁₁CX₁₂X₁₃X₁₄X₁₅X₁₆RSDKLTEH | |
| | | | KCPECGKSFSRSDKLTEHQRTHT | | X₁₇X₁₈X₁₉HX₂₀X₂₁X₂₂X₂₃X₂₄X₈X₉CX₁₀X₁₁CX₁₂X₁₃X₁₄X₁₅X₁₆DKKDLT | |
| | | | GEKPYKCPECGKSFSDKKDLTRH | | RHX₁₇X₁₈X₁₉HX₂₀X₂₁X₂₂X₂₃X₂₄X₈X₉CX₁₀X₁₁CX₁₂X₁₃X₁₄X₁₅X₁₆DPGN | |
| | | | QRTHTGEKPYKCPECGKSFSDPG | | LVRHX₁₇X₁₈X₁₉HX₂₀X₂₁X₂₂X₂₃X₂₄X₈X₉CX₁₀X₁₁CX₁₂X₁₃X₁₄X₁₅X₁₆TS | |
| | | | NLVRHQRTHTGEKPYKCPECGKS | | GELVRHX₁₇X₁₈X₁₉HX₂₀X₂₁X₂₂X₂₃X₂₄X₂₅X₂₆X₂₇X₂₈X₂₉X₃₀ | |
| | | | FSTSGELVRHQRTHTGEKPTGKK | | | |
| | | | TS | | | |
| ctggctgac | CTG GCT | 1354 | LEPGEKPYKCPECGKSFSTSGEL | 1903 | X₁X₂X₃X₄X₅X₆X₇X₈X₉CX₁₀X₁₁CX₁₂X₁₃X₁₄X₁₅X₁₆TSGELVRHX₁₇X₁₈X₁₉ | 2452 |
| acccggggt | GAC ACC | | VRHQRTHTGEKPYKCPECGKSFS | | HX₂₀X₂₁X₂₂X₂₃X₂₄X₈X₉CX₁₀X₁₁CX₁₂X₁₃X₁₄X₁₅X₁₆TSGHLVRHX₁₇X₁₈ | |
| gct | CGG GGT | | TSGHLVRHQRTHTGEKPYKCPEC | | X₁₉HX₂₀X₂₁X₂₂X₂₃X₂₄X₈X₉CX₁₀X₁₁CX₁₂X₁₃X₁₄X₁₅X₁₆RSDKLTEHX₁₇ | |
| | GCT | | GKSFSRSDKLTEHQRTHTGEKPY | | X₁₈X₁₉HX₂₀X₂₁X₂₂X₂₃X₂₄X₈X₉CX₁₀X₁₁CX₁₂X₁₃X₁₄X₁₅X₁₆DKKDLTRH | |
| | | | KCPECGKSFSDKKDLTRHQRTHT | | X₁₇X₁₈X₁₉HX₂₀X₂₁X₂₂X₂₃X₂₄X₈X₉CX₁₀X₁₁CX₁₂X₁₃X₁₄X₁₅X₁₆DPGNLV | |
| | | | GEKPYKCPECGKSFSDPGNLVRH | | RHX₁₇X₁₈X₁₉HX₂₀X₂₁X₂₂X₂₃X₂₄X₈X₉CX₁₀X₁₁CX₁₂X₁₃X₁₄X₁₅X₁₆TSGE | |
| | | | QRTHTGEKPYKCPECGKSFSTSG | | LVRHX₁₇X₁₈X₁₉HX₂₀X₂₁X₂₂X₂₃X₂₄X₈X₉CX₁₀X₁₁CX₁₂X₁₃X₁₄X₁₅X₁₆RN | |
| | | | ELVRHQRTHTGEKPYKCPECGKS | | DALTEHX₁₇X₁₈X₁₉HX₂₀X₂₁X₂₂X₂₃X₂₄X₂₅X₂₆X₂₇X₂₈X₂₉X₃₀ | |
| | | | FSRNDALTEHQRTHTGEKPTGKK | | | |
| | | | TS | | | |
| acaactgct | ACA ACT | 1355 | LEPGEKPYKCPECGKSFSTHLDL | 1904 | X₁X₂X₃X₄X₅X₆X₇X₈X₉CX₁₀X₁₁CX₁₂X₁₃X₁₄X₁₅X₁₆THLDLIRHX₁₇X₁₈X₁₉ | 2453 |
| ggggcccta | GCT GGG | | IRHQRTHTGEKPYKCPECGKSFS | | HX₂₀X₂₁X₂₂X₂₃X₂₄X₈X₉CX₁₀X₁₁CX₁₂X₁₃X₁₄X₁₅X₁₆QNSTLTEHX₁₇X₁₈ | |
| act | GCC CTA | | QNSTLTEHQRTHTGEKPYKCPEC | | X₁₉HX₂₀X₂₁X₂₂X₂₃X₂₄X₈X₉CX₁₀X₁₁CX₁₂X₁₃X₁₄X₁₅X₁₆DCRDLARHX₁₇ | |
| | ACT | | GKSFSDCRDLARHQRTHTGEKPY | | X₁₈X₁₉HX₂₀X₂₁X₂₂X₂₃X₂₄X₈X₉CX₁₀X₁₁CX₁₂X₁₃X₁₄X₁₅X₁₆RSDKLVRH | |
| | | | KCPECGKSFSRSDKLVRHQRTHT | | X₁₇X₁₈X₁₉HX₂₀X₂₁X₂₂X₂₃X₂₄X₈X₉CX₁₀X₁₁CX₁₂X₁₃X₁₄X₁₅X₁₆TSGELV | |
| | | | GEKPYKCPECGKSFSTSGELVRH | | RHX₁₇X₁₈X₁₉HX₂₀X₂₁X₂₂X₂₃X₂₄X₈X₉CX₁₀X₁₁CX₁₂X₁₃X₁₄X₁₅X₁₆THLD | |
| | | | QRTHTGEKPYKCPECGKSFSTHL | | LIRHX₁₇X₁₈X₁₉HX₂₀X₂₁X₂₂X₂₃X₂₄X₈X₉CX₁₀X₁₁CX₁₂X₁₃X₁₄X₁₅X₁₆SP | |
| | | | DLIRHQRTHTGEKPYKCPECGKS | | ADLTRHX₁₇X₁₈X₁₉HX₂₀X₂₁X₂₂X₂₃X₂₄X₂₅X₂₆X₂₇X₂₈X₂₉X₃₀ | |
| | | | FSSPADLTRHQRTHTGEKPTGKK | | | |
| | | | TS | | | |
| ctaattaca | CTA ATT | 1356 | LEPGEKPYKCPECGKSFSDCRDL | 1905 | X₁X₂X₃X₄X₅X₆X₇X₈X₉CX₁₀X₁₁CX₁₂X₁₃X₁₄X₁₅X₁₆DCRDLARHX₁₇X₁₈X₁₉ | 2454 |
| actgctggg | ACA ACT | | ARHQRTHTGEKPYKCPECGKSFS | | HX₂₀X₂₁X₂₂X₂₃X₂₄X₈X₉CX₁₀X₁₁CX₁₂X₁₃X₁₄X₁₅X₁₆RSDKLVRHX₁₇X₁₈ | |
| gcc | GCT GGG | | RSDKLVRHQRTHTGEKPYKCPEC | | X₁₉HX₂₀X₂₁X₂₂X₂₃X₂₄X₈X₉CX₁₀X₁₁CX₁₂X₁₃X₁₄X₁₅X₁₆TSGELVRHX₁₇ | |
| | GCC | | GKSFSTSGELVRHQRTHTGEKPY | | X₁₈X₁₉HX₂₀X₂₁X₂₂X₂₃X₂₄X₈X₉CX₁₀X₁₁CX₁₂X₁₃X₁₄X₁₅X₁₆THLDLIRH | |
| | | | KCPECGKSFSTHLDLIRHQRTHT | | X₁₇X₁₈X₁₉HX₂₀X₂₁X₂₂X₂₃X₂₄X₈X₉CX₁₀X₁₁CX₁₂X₁₃X₁₄X₁₅X₁₆SPADLT | |
| | | | GEKPYKCPECGKSFSSPADLTRH | | RHX₁₇X₁₈X₁₉HX₂₀X₂₁X₂₂X₂₃X₂₄X₈X₉CX₁₀X₁₁CX₁₂X₁₃X₁₄X₁₅X₁₆HKNA | |
| | | | QRTHTGEKPYKCPECGKSFSHKN | | LQNHX₁₇X₁₈X₁₉HX₂₀X₂₁X₂₂X₂₃X₂₄X₈X₉CX₁₀X₁₁CX₁₂X₁₃X₁₄X₁₅X₁₆QN | |
| | | | ALQNHQRTHTGEKPYKCPECGKS | | STLTEHX₁₇EHX₁₇X₁₈X₁₉HX₂₀X₂₁X₂₂X₂₃X₂₄X₂₅X₂₆X₂₇X₂₈X₂₉X₃₀ | |
| | | | FSQNSTLTEHQRTHTGEKPTGKK | | | |
| | | | TS | | | |
| attacaact | ATT ACA | 1357 | LEPGEKPYKCPECGKSFSQNSTL | 1906 | X₁X₂X₃X₄X₅X₆X₇X₈X₉CX₁₀X₁₁CX₁₂X₁₃X₁₄X₁₅X₁₆QNSTLTEHX₁₇X₁₈X₁₉ | 2455 |
| gctggggcc | ACT GCT | | TEHQRTHTGEKPYKCPECGKSFS | | HX₂₀X₂₁X₂₂X₂₃X₂₄X₈X₉CX₁₀X₁₁CX₁₂X₁₃X₁₄X₁₅X₁₆DCRDLARHX₁₇X₁₈ | |
| cta | GGG GCC | | DCRDLARHQRTHTGEKPYKCPEC | | X₁₉HX₂₀X₂₁X₂₂X₂₃X₂₄X₈X₉CX₁₀X₁₁CX₁₂X₁₃X₁₄X₁₅X₁₆RSDKLVRHX₁₇ | |
| | CTA | | GKSFSRSDKLVRHQRTHTGEKPY | | X₁₈X₁₉HX₂₀X₂₁X₂₂X₂₃X₂₄X₈X₉CX₁₀X₁₁CX₁₂X₁₃X₁₄X₁₅X₁₆TSGELVRH | |
| | | | KCPECGKSFSTSGELVRHQRTHT | | X₁₇X₁₈X₁₉HX₂₀X₂₁X₂₂X₂₃X₂₄X₈X₉CX₁₀X₁₁CX₁₂X₁₃X₁₄X₁₅X₁₆THLDLI | |
| | | | GEKPYKCPECGKSFSTHLDLIRH | | RHX₁₇X₁₈X₁₉HX₂₀X₂₁X₂₂X₂₃X₂₄X₈X₉CX₁₀X₁₁CX₁₂X₁₃X₁₄X₁₅X₁₆SPAD | |
| | | | QRTHTGEKPYKCPECGKSFSSPA | | LTRHX₁₇X₁₈X₁₉HX₂₀X₂₁X₂₂X₂₃X₂₄X₈X₉CX₁₀X₁₁CX₁₂X₁₃X₁₄X₁₅X₁₆HK | |
| | | | DLTRHQRTHTGEKPYKCPECGKS | | NALQNHX₁₇X₁₈X₁₉HX₂₀X₂₁X₂₂X₂₃X₂₄X₂₅X₂₆X₂₇X₂₈X₂₉X₃₀ | |
| | | | FSHKNALQNHQRTHTGEKPTGKK | | | |
| | | | TS | | | |
| gtgctaatt | gtg CTA | 1358 | LEPGEKPYKCPECGKSFSRSDKL | 1907 | X₁X₂X₃X₄X₅X₆X₇X₈X₉CX₁₀X₁₁CX₁₂X₁₃X₁₄X₁₅X₁₆RSDKLVRHX₁₇X₁₈X₁₉ | 2456 |
| acaactgct | ATT ACA | | VRHQRTHTGEKPYKCPECGKSFS | | HX₂₀X₂₁X₂₂X₂₃X₂₄X₈X₉CX₁₀X₁₁CX₁₂X₁₃X₁₄X₁₅X₁₆TSGELVRHX₁₇X₁₈ | |
| ggg | ACT GCT | | TSGELVRHQRTHTGEKPYKCPEC | | X₁₉HX₂₀X₂₁X₂₂X₂₃X₂₄X₈X₉CX₁₀X₁₁CX₁₂X₁₃X₁₄X₁₅X₁₆THLDLIRHX₁₇ | |
| | GGG | | GKSFSTHLDLIRHQRTHTGEKPY | | X₁₈X₁₉HX₂₀X₂₁X₂₂X₂₃X₂₄X₈X₉CX₁₀X₁₁CX₁₂X₁₃X₁₄X₁₅X₁₆SPADLTRH | |
| | | | KCPECGKSFSSPADLTRHQRTHT | | X₁₇X₁₈X₁₉HX₂₀X₂₁X₂₂X₂₃X₂₄X₈X₉CX₁₀X₁₁CX₁₂X₁₃X₁₄X₁₅X₁₆HKNALQ | |
| | | | GEKPYKCPECGKSFSHKNALQNH | | NHX₁₇X₁₈X₁₉HX₂₀X₂₁X₂₂X₂₃X₂₄X₈X₉CX₁₀X₁₁CX₁₂X₁₃X₁₄X₁₅X₁₆QNST | |
| | | | QRTHTGEKPYKCPECGKSFSQNS | | LTEHX₁₇X₁₈X₁₉HX₂₀X₂₁X₂₂X₂₃X₂₄X₈X₉CX₁₀X₁₁CX₁₂X₁₃X₁₄X₁₅X₁₆RS | |
| | | | TLTEHQRTHTGEKPYKCPECGKS | | DELVRHX₁₇X₁₈X₁₉HX₂₀X₂₁X₂₂X₂₃X₂₄X₂₅X₂₆X₂₇X₂₈X₂₉X₃₀ | |
| | | | FSRSDELVRHQRTHTGEKPTGKK | | | |
| | | | TS | | | |
| ggggtgcta | GGG gtg | 1359 | LEPGEKPYKCPECGKSFSTSGEL | 1908 | X₁X₂X₃X₄X₅X₆X₇X₈X₉CX₁₀X₁₁CX₁₂X₁₃X₁₄X₁₅X₁₆TSGELVRHX₁₇X₁₈X₁₉ | 2457 |
| attacaact | CTA ATT | | VRHQRTHTGEKPYKCPECGKSFS | | HX₂₀X₂₁X₂₂X₂₃X₂₄X₈X₉CX₁₀X₁₁CX₁₂X₁₃X₁₄X₁₅X₁₆THLDLIRHX₁₇X₁₈ | |
| gct | ACA ACT | | THLDLIRHQRTHTGEKPYKCPEC | | X₁₉HX₂₀X₂₁X₂₂X₂₃X₂₄X₈X₉CX₁₀X₁₁CX₁₂X₁₃X₁₄X₁₅X₁₆SPADLTRHX₁₇ | |
| | GCT | | GKSFSSPADLTRHQRTHTGEKPY | | X₁₈X₁₉HX₂₀X₂₁X₂₂X₂₃X₂₄X₈X₉CX₁₀X₁₁CX₁₂X₁₃X₁₄X₁₅X₁₆HKNALQNH | |
| | | | KCPECGKSFSHKNALQNHQRTHT | | X₁₇X₁₈X₁₉HX₂₀X₂₁X₂₂X₂₃X₂₄X₈X₉CX₁₀X₁₁CX₁₂X₁₃X₁₄X₁₅X₁₆QNS+32 | |
| | | | GEKPYKCPECGKSFSQNSTLTEH | | EHX₁₇X₁₈X₁₉HX₂₀X₂₁X₂₂X₂₃X₂₄X₈X₉CX₁₀X₁₁CX₁₂X₁₃X₁₄X₁₅X₁₆RSDE | |
| | | | QRTHTGEKPYKCPECGKSFSRSD | | LVRHX₁₇X₁₈X₁₉HX₂₀X₂₁X₂₂X₂₃X₂₄X₈X₉CX₁₀X₁₁CX₁₂X₁₃X₁₄X₁₅X₁₆RS | |
| | | | ELVRHQRTHTGEKPYKCPECGKS | | DKLVRHX₁₇X₁₃X₁₉HX₂₀X₂₁X₂₂X₂₃X₂₄X₂₅X₂₆X₂₇X₂₈X₂₉X₃₀ | |
| | | | FSRSDKLVRHQRTHTGEKPTGKK | | | |
| | | | TS | | | |
| actgctggg | ACT GCT | 1360 | LEPGEKPYKCPECGKSFSSKKAL | 1909 | X₁X₂X₃X₄X₅X₆X₇X₈X₉CX₁₀X₁₁CX₁₂X₁₃X₁₄X₁₅X₁₆SKKALTEHX₁₇X₁₈X₁₉ | 2458 |
| gccctaact | GGG GCC | | TEHQRTHTGEKPYKCPECGKSFS | | HX₂₀X₂₁X₂₂X₂₃X₂₄X₈X₉CX₁₀X₁₁CX₁₂X₁₃X₁₄X₁₅X₁₆THLDLIRHX₁₇X₁₈ | |
| cac | CTA ACT | | THLDLIRHQRTHTGEKPYKCPEC | | X₁₉HX₂₀X₂₁X₂₂X₂₃X₂₄X₈X₉CX₁₀X₁₁CX₁₂X₁₃X₁₄X₁₅X₁₆QNSTLTEHX₁₇ | |
| | CAC | | GKSFSQNSTLTEHQRTHTGEKPY | | X₁₈X₁₉HX₂₀X₂₁X₂₂X₂₃X₂₄X₈X₉CX₁₀X₁₁CX₁₂X₁₃X₁₄X₁₅X₁₆DCRDLARH | |
| | | | KCPECGKSFSDCRDLARHQRTHT | | X₁₇X₁₈X₁₉HX₂₀X₂₁X₂₂X₂₃X₂₄X₈X₉CX₁₀X₁₁CX₁₂X₁₃X₁₄X₁₅X₁₆RSDKLV | |
| | | | GEKPYKCPECGKSFSRSDKLVRH | | RHX₁₇X₁₈X₁₉HX₂₀X₂₁X₂₂X₂₃X₂₄X₈X₉CX₁₀X₁₁CX₁₂X₁₃X₁₄X₁₅X₁₆TSGE | |
| | | | QRTHTGEKPYKCPECGKSFSTSG | | LVRHX₁₇X₁₈X₁₉HX₂₀X₂₁X₂₂X₂₃X₂₄X₈X₉CX₁₀X₁₁CX₁₂XEX₁₄X₁₅X₁₆TH | |
| | | | ELVRHQRTHTGEKPYKCPECGKS | | LDLIRHX₁₇X₁₃X₁₉HX₂₀X₂₁X₂₂X₂₃X₂₄X₂₅X₂₆X₂₇X₂₈X₂₉X₃₀ | |
| | | | FSTHLDLIRHQRTHTGEKPTGKK | | | |
| | | | TS | | | |
| cccggggtg | CCC GGG | 1361 | LEPGEKPYKCPECGKSFSTHLDL | 1910 | X₁X₂X₃X₄X₅X₆X₇X₈X₉CX₁₀X₁₁CX₁₂X₁₃X₁₄X₁₅X₁₆THLDLIRHX₁₇X₁₈X₁₉ | 2459 |
| ctaattaca | gtg CTA | | IRHQRTHTGEKPYKCPECGKSFS | | HX₂₀X₂₁X₂₂X₂₃X₂₄X₈X₉CX₁₀X₁₁CX₁₂X₁₃X₁₄X₁₅X₁₆SPADLTRHX₁₇X₁₈ | |
| act | ATT ACA | | SPADLTRHQRTHTGEKPYKCPEC | | X₁₉HX₂₀X₂₁X₂₂X₂₃X₂₄X₈X₉CX₁₀X₁₁CX₁₂X₁₃X₁₄X₁₅X₁₆HKNALQNHX₁₇ | |
| | ACT | | GKSFSHKNALQNHQRTHTGEKPY | | X₁₈X₁₉HX₂₀X₂₁X₂₂X₂₃X₂₄X₈X₉CX₁₀X₁₁CX₁₂X₁₃X₁₄X₁₅X₁₆QNSTLTEH | |
| | | | KCPECGKSFSQNSTLTEHQRTHT | | X₁₇X₁₈X₁₉HX₂₀X₂₁X₂₂X₂₃X₂₄X₈X₉CX₁₀X₁₁CX₁₂X₁₃X₁₄X₁₅X₁₆RSDELV | |
| | | | GEKPYKCPECGKSFSRSDELVRH | | RHX₁₇X₁₈X₁₉HX₂₀X₂₁X₂₂X₂₃X₂₄X₈X₉CX₁₀X₁₁CX₁₂X₁₃X₁₄X₁₅X₁₆RSDK | |
| | | | QRTHTGEKPYKCPECGKSFSRSD | | LVRHX₁₇X₁₈X₁₉HX₂₀X₂₁X₂₂X₂₃X₂₄X₈X₉CX₁₀X₁₁CX₁₂X₁₃X₁₄X₁₅X₁₆SK | |
| | | | KLVRHQRTHTGEKPYKCPECGKS | | KHLAEHX₁₇X₁₈X₁₉HX₂₀X₂₁X₂₂X₂₃X₂₄X₂₅X₂₆X₂₇X₂₈X₂₉X₃₀ | |
| | | | FSSKKHLAEHQRTHTGEKPTGKK | | | |
| | | | TS | | | |
| tggctgaca | TGG CTG | 1362 | LEPGEKPYKCPECGKSFSQNSTL | 1911 | X₁X₂X₃X₄X₅X₆X₇X₈X₉CX₁₀X₁₁CX₁₂X₁₃X₁₄X₁₅X₁₆QNSTLTEHX₁₇X₁₈X₁₉ | 2460 |
| cccggggtg | ACA CCC | | TEHQRTHTGEKPYKCPECGKSFS | | HX₂₀X₂₁X₂₂X₂₃X₂₄X₈X₉CX₁₀X₁₁CX₁₂X₁₃X₁₄X₁₅X₁₆RSDELVRHX₁₇X₁₈ | |
| cta | GGG gtg | | RSDELVRHQRTHTGEKPYKCPEC | | X₁₉HX₂₀X₂₁X₂₂X₂₃X₂₄X₈X₉CX₁₀X₁₁CX₁₂X₁₃X₁₄X₁₅X₁₆RSDKLVRHX₁₇ | |
| | CTA | | GKSFSRSDKLVRHQRTHTGEKPY | | X₁₈X₁₉HX₂₀X₂₁X₂₂X₂₃X₂₄X₈X₉CX₁₀X₁₁CX₁₂X₁₃X₁₄X₁₅X₁₆SKKHLAEH | |
| | | | KCPECGKSFSSKKHLAEHQRTHT | | X₁₇X₁₈X₁₉HX₂₀X₂₁X₂₂X₂₃X₂₄X₈X₉CX₁₀X₁₁CX₁₂X₁₃X₁₄X₁₅X₁₆SPADLT | |
| | | | GEKPYKCPECGKSFSSPADLTRH | | RHX₁₇X₁₈X₁₉HX₂₀X₂₁X₂₂X₂₃X₂₄X₈X₉CX₁₀X₁₁CX₁₂X₁₃X₁₄X₁₅X₁₆RNDA | |
| | | | QRTHTGEKPYKCPECGKSFSRND | | LTEHX₁₇X₁₈X₁₉HX₂₀X₂₁X₂₂X₂₃X₂₄X₈X₉CX₁₀X₁₁CX₁₂X₁₃X₁₄X₁₅X₁₆RS | |
| | | | ALTEHQRTHTGEKPYKCPECGKS | | DHLTTHX₁₇X₁₈X₁₉HX₂₀X₂₁X₂₂X₂₃X₂₄X₂₅X₂₆X₂₇X₂₈X₂₉X₃₀ | |
| | | | FSRSDHLTTHQRTHTGEKPTGKK | | | |
| | | | TS | | | |
| acacccggg | ACA CCC | 1363 | LEPGEKPYKCPECGKSFSSPADL | 1912 | X₁X₂X₃X₄X₅X₆X₇X₈X₉CX₁₀X₁₁CX₁₂X₁₃X₁₄X₁₅X₁₆SPADLTRHX₁₇X₁₈X₁₉ | 2461 |
| gtgctaatt | GGG gtg | | TRHQRTHTGEKPYKCPECGKSFS | | HX₂₀X₂₁X₂₂X₂₃X₂₄X₈X₉CX₁₀X₁₁CX₁₂X₁₃X₁₄X₁₅X₁₆HKNALQNHX₁₇X₁₈ | |
| aca | CTA ATT | | HKNALQNHQRTHTGEKPYKCPEC | | X₁₉HX₂₀X₂₁X₂₂X₂₃X₂₄X₈X₉CX₁₀X₁₁CX₁₂X₁₃X₁₄X₁₅X₁₆QNSTLTEHX₁₇ | |
| | ACA | | GKSFSQNSTLTEHQRTHTGEKPY | | X₁₈X₁₉HX₂₀X₂₁X₂₂X₂₃X₂₄X₈X₉CX₁₀X₁₁CX₁₂X₁₃X₁₄X₁₅X₁₆RSDELVRH | |
| | | | KCPECGKSFSRSDELVRHQRTHT | | X₁₇X₁₈X₁₉HX₂₀X₂₁X₂₂X₂₃X₂₄X₈X₉CX₁₀X₁₁CX₁₂X₁₃X₁₄X₁₅X₁₆RSDKLV | |
| | | | GEKPYKCPECGKSFSRSDKLVRH | | RHX₁₇X₁₈X₁₉HX₂₀X₂₁X₂₂X₂₃X₂₄X₈X₉CX₁₀X₁₁CX₁₂X₁₃X₁₄X₁₅X₁₆SKKH | |
| | | | QRTHTGEKPYKCPECGKSFSSKK | | LAEHX₁₇X₁₈X₁₉HX₂₀X₂₁X₂₂X₂₃X₂₄X₈X₉CX₁₀X₁₁CX₁₂X₁₃X₁₄X₁₅X₁₆SP | |
| | | | HLAEHQRTHTGEKPYKCPECGKS | | ADLTRHX₁₇X₁₈X₁₉HX₂₀X₂₁X₂₂X₂₃X₂₄X₂₅X₂₆X₂₇X₂₈X₂₉X₃₀ | |
| | | | FSSPADLTRHQRTHTGEKPTGKK | | | |
| | | | TS | | | |
| ctgacaccc | CTG ACA | 1364 | LEPGEKPYKCPECGKSFSHKNAL | 1913 | X₁X₂X₃X₄X₅X₆X₇X₈X₉CX₁₀X₁₁CX₁₂X₁₃X₁₄X₁₅X₁₆HKNALQNHX₁₇X₁₈X₁₉ | 2462 |
| ggggtgcta | CCC GGG | | QNHQRTHTGEKPYKCPECGKSFS | | HX₂₀X₂₁X₂₂X₂₃X₂₄X₈X₉CX₁₀X₁₁CX₁₂X₁₃X₁₄X₁₅X₁₆QNSTLTEHX₁₇X₁₈ | |
| att | gtg CTA | | QNSTLTEHQRTHTGEKPYKCPEC | | X₁₉HX₂₀X₂₁X₂₂X₂₃X₂₄X₈X₉CX₁₀X₁₁CX₁₂X₁₃X₁₄X₁₅X₁₆RSDELVRHX₁₇ | |
| | ATT | | GKSFSRSDELVRHQRTHTGEKPY | | X₁₈X₁₉HX₂₀X₂₁X₂₂X₂₃X₂₄X₈X₉CX₁₀X₁₁CX₁₂X₁₃X₁₄X₁₅X₁₆RSDKLVRH | |
| | | | KCPECGKSFSRSDKLVRHQRTHT | | X₁₇X₁₈X₁₉HX₂₀X₂₁X₂₂X₂₃X₂₄X₈X₉CX₁₀X₁₁CX₁₂X₁₃X₁₄X₁₅X₁₆SKKHLA | |
| | | | GEKPYKCPECGKSFSSKKHLAEH | | EHX₁₇X₁₈X₁₉HX₂₀X₂₁X₂₂X₂₃X₂₄X₈X₉CX₁₀X₁₁CX₁₂X₁₃X₁₄X₁₅X₁₆SPAD | |
| | | | QRTHTGEKPYKCPECGKSFSSPA | | LTRHX₁₇X₁₈X₁₉HX₂₀X₂₁X₂₂X₂₃X₂₄X₈X₉CX₁₀X₁₁CX₁₂XEX₁₄X₁₅X₁₆RN | |
| | | | DLTRHQRTHTGEKPYKCPECGKS | | DALTEHX₁₇X₁₈X₁₉HX₂₀X₂₁X₂₂X₂₃X₂₄X₂₅X₂₆X₂₇X₂₈X₂₉X₃₀ | |
| | | | FSRNDALTEHQRTHTGEKPTGKK | | | |
| | | | TS | | | |
| gctggggcc | GCT GGG | 1365 | LEPGEKPYKCPECGKSFSQSGHL | 1914 | X₁X₂X₃X₄X₅X₆X₇X₈X₉CX₁₀X₁₁CX₁₂X₁₃X₁₄X₁₅X₁₆QSGHLTEHX₁₇X₁₈X₁₉ | 2463 |
| ctaactcac | GCC CTA | | TEHQRTHTGEKPYKCPECGKSFS | | HX₂₀X₂₁X₂₂X₂₃X₂₄X₈X₉CX₁₀X₁₁CX₁₂X₁₃X₁₄X₁₅X₁₆SKKALTEHX₁₇X₁₈ | |
| cga | ACT CAC | | SKKALTEHQRTHTGEKPYKCPEC | | X₁₉HX₂₀X₂₁X₂₂X₂₃X₂₄X₈X₉CX₁₀X₁₁CX₁₂X₁₃X₁₄X₁₅X₁₆THLDLIRHX₁₇ | |
| | CGA | | GKSFSTHLDLIRHQRTHTGEKPY | | X₁₈X₁₉HX₂₀X₂₁X₂₂X₂₃X₂₄X₈X₉CX₁₀X₁₁CX₁₂X₁₃X₁₄X₁₅X₁₆QNSTLTEH | |
| | | | KCPECGKSFSQNSTLTEHQRTHT | | X₁₇X₁₈X₁₉HX₂₀X₂₁X₂₂X₂₃X₂₄X₈X₉CX₁₀X₁₁CX₁₂X₁₃X₁₄X₁₅X₁₆DCRDLA | |
| | | | GEKPYKCPECGKSFSDCRDLARH | | RHX₁₇X₁₈X₁₉HX₂₀X₂₁X₂₂X₂₃X₂₄X₈X₉CX₁₀X₁₁CX₁₂X₁₃X₁₄X₁₅X₁₆RSDK | |
| | | | QRTHTGEKPYKCPECGKSFSRSD | | LVRHX₁₇X₁₈X₁₉HX₂₀X₂₁X₂₂X₂₃X₂₄X₈X₉CX₁₀X₁₁CX₁₂X₁₃X₁₄X₁₅X₁₆TS | |
| | | | KLVRHQRTHTGEKPYKCPECGKS | | GELVRHX₁₇X₁₈X₁₉HX₂₀X₂₁X₂₂X₂₃X₂₄X₂₅X₂₆X₂₇X₂₈X₂₉X₃₀ | |
| | | | FSTSGELVRHQRTHTGEKPTGKK | | | |
| | | | TS | | | |
| attgtacaa | ATT GTA | 1366 | LEPGEKPYKCPECGKSFSTSGNL | 1915 | X₁X₂X₃X₄X₅X₆X₇X₈X₉CX₁₀X₁₁CX₁₂X₁₃X₁₄X₁₅X₁₆TSGNLTEHX₁₇X₁₈X₁₉ | 2464 |
| ggcaggcat | CAA GGC | | TEHQRTHTGEKPYKCPECGKSFS | | HX₂₀X₂₁X₂₂X₂₃X₂₄X₈X₉CX₁₀X₁₁CX₁₂X₁₃X₁₄X₁₅X₁₆TSGNLTEHX₁₇X₁₈ | |
| cat | AGG CAT | | TSGNLTEHQRTHTGEKPYKCPEC | | X₁₉HX₂₀X₂₁X₂₂X₂₃X₂₄X₈X₉CX₁₀X₁₁CX₁₂X₁₃X₁₄X₁₅X₁₆RSDHLTNHX₁₇ | |
| | CAT | | GKSFSRSDHLTNHQRTHTGEKPY | | X₁₈X₁₉HX₂₀X₂₁X₂₂X₂₃X₂₄X₈X₉CX₁₀X₁₁CX₁₂X₁₃X₁₄X₁₅X₁₆DPGHLVRH | |
| | | | KCPECGKSFSDPGHLVRHQRTHT | | X₁₇X₁₈X₁₉HX₂₀X₂₁X₂₂X₂₃X₂₄X₈X₉CX₁₀X₁₁CX₁₂X₁₃X₁₄X₁₅X₁₆QSGNLT | |
| | | | GEKPYKCPECGKSFSQSGNLTEH | | EHX₁₇X₁₈X₁₉HX₂₀X₂₁X₂₂X₂₃X₂₄X₈X₉CX₁₀X₁₁CX₁₂X₁₃X₁₄X₁₅X₁₆QSSS | |
| | | | QRTHTGEKPYKCPECGKSFSQSS | | LVRHX₁₇X₁₈X₁₉HX₂₀X₂₁X₂₂X₂₃X₂₄X₈X₉CX₁₀X₁₁CX₁₂X₁₃X₁₄X₁₅X₁₆HK | |
| | | | SLVRHQRTHTGEKPYKCPECGKS | | NALQNHX₁₇X₁₃X₁₉HX₂₀X₂₁X₂₂X₂₃X₂₄X₂₅X₂₆X₂₇X₂₈X₂₉X₃₀ | |
| | | | FSHKNALQNHQRTHTGEKPTGKK | | | |
| | | | TS | | | |
| gtacaaggc | GTA CAA | 1367 | LEPGEKPYKCPECGKSFSDPGNL | 1916 | X₁X₂X₃X₄X₅X₆X₇X₈X₉CX₁₀X₁₁CX₁₂X₁₃X₁₄X₁₅X₁₆DPGNLVRHX₁₇X₁₈X₁₉ | 2465 |
| aggcatcat | GGC AGG | | VRHQRTHTGEKPYKCPECGKSFS | | HX₂₀X₂₁X₂₂X₂₃X₂₄X₈X₉CX₁₀X₁₁CX₁₂X₁₃X₁₄X₁₅X₁₆TSGNLTEHX₁₇X₁₈ | |
| gac | CAT CAT | | TSGNLTEHQRTHTGEKPYKCPEC | | X₁₉HX₂₀X₂₁X₂₂X₂₃X₂₄X₈X₉CX₁₀X₁₁CX₁₂X₁₃X₁₄X₁₅X₁₆TSGNLTEHX₁₇ | |
| | GAC | | GKSFSTSGNLTEHQRTHTGEKPY | | X₁₈X₁₉HX₂₀X₂₁X₂₂X₂₃X₂₄X₈X₉CX₁₀X₁₁CX₁₂X₁₃X₁₄X₁₅X₁₆RSDHLTNH | |
| | | | KCPECGKSFSRSDHLTNHQRTHT | | X₁₇X₁₈X₁₉HX₂₀X₂₁X₂₂X₂₃X₂₄X₈X₉CX₁₀X₁₁CX₁₂X₁₃X₁₄X₁₅X₁₆DPGHLV | |
| | | | GEKPYKCPECGKSFSDPGHLVRH | | RHX₁₇X₁₈X₁₉HX₂₀X₂₁X₂₂X₂₃X₂₄X₈X₉CX₁₀X₁₁CX₁₂X₁₃X₁₄X₁₅X₁₆QSGN | |
| | | | QRTHTGEKPYKCPECGKSFSQSG | | LTEHX₁₇X₁₈X₁₉HX₂₀X₂₁X₂₂X₂₃X₂₄X₈X₉CX₁₀X₁₁CX₁₂X₁₃X₁₄X₁₅X₁₆QS | |
| | | | NLTEHQRTHTGEKPYKCPECGKS | | SSLVRHX₁₇X₁₃X₁₉HX₂₀X₂₁X₂₂X₂₃X₂₄X₂₅X₂₆X₂₇X₂₈X₂₉X₃₀ | |
| | | | FSQSSSLVRHQRTHTGEKPTGKK | | | |
| | | | TS | | | |
| atgtcaccc | ATT GTC | 1368 | LEPGEKPYKCPECGKSFSQSGDL | 1917 | X₁X₂X₃X₄X₅X₆X₇X₈X₉CX₁₀X₁₁CX₁₂X₁₃X₁₄X₁₅X₁₆QSGDLRRHX₁₇X₁₈X₁₉ | 2466 |
| ccaagtcag | ACC CCA | | RRHQRTHTGEKPYKCPECGKSFS | | HX₂₀X₂₁X₂₂X₂₃X₂₄X₈X₉CX₁₀X₁₁CX₁₂X₁₃X₁₄X₁₅X₁₆RADNLTEHX₁₇X₁₈ | |
| gca | AGT CAG | | RADNLTEHQRTHTGEKPYKCPEC | | X₁₉HX₂₀X₂₁X₂₂X₂₃X₂₄X₈X₉CX₁₀X₁₁CX₁₂X₁₃X₁₄X₁₅X₁₆HRTTLTNHX₁₇ | |
| | GCA | | GKSFSHRTTLTNHQRTHTGEKPY | | X₁₈X₁₉HX₂₀X₂₁X₂₂X₂₃X₂₄X₈X₉CX₁₀X₁₁CX₁₂X₁₃X₁₄X₁₅X₁₆TSHSLTEH | |
| | | | KCPECGKSFSTSHSLTEHQRTHT | | X₁₇X₁₈X₁₉HX₂₀X₂₁X₂₂X₂₃X₂₄X₈X₉CX₁₀X₁₁CX₁₂X₁₃X₁₄X₁₅X₁₆DKKDLT | |
| | | | GEKPYKCPECGKSFSDKKDLTRH | | RHX₁₇X₁₈X₁₉HX₂₀X₂₁X₂₂X₂₃X₂₄X₈X₉CX₁₀X₁₁CX₁₂X₁₃X₁₄X₁₅X₁₆DPGA | |
| | | | QRTHTGEKPYKCPECGKSFSDPG | | LVRHX₁₇X₁₈X₁₉HX₂₀X₂₁X₂₂X₂₃X₂₄X₈X₉CX₁₀X₁₁CX₁₂X₁₃X₁₄X₁₅X₁₆HK | |
| | | | ALVRHQRTHTGEKPYKCPECGKS | | NALQNHX₁₇X₁₈X₁₉HX₂₀X₂₁X₂₂X₂₃X₂₄X₂₅X₂₆X₂₇X₂₈X₂₉X₃₀ | |
| | | | FSHKNALQNHQRTHTGEKPTGKK | | | |
| | | | TS | | | |
| gccattgtc | GCC ATT | 1369 | LEPGEKPYKCPECGKSFSRADNL | 1918 | X₁X₂X₃X₄X₅X₆X₇X₈X₉CX₁₀X₁₁CX₁₂X₁₃X₁₄X₁₅X₁₆RADNLTEHX₁₇X₁₈X₁₉ | 2467 |
| accccaagt | GTC ACC | | TEHQRTHTGEKPYKCPECGKSFS | | HX₂₀X₂₁X₂₂X₂₃X₂₄X₈X₉CX₁₀X₁₁CX₁₂X₁₃X₁₄X₁₅X₁₆HRTTLTNHX₁₇X₁₈ | |
| cag | CCA AGT | | HRTTLTNHQRTHTGEKPYKCPEC | | X₁₉HX₂₀X₂₁X₂₂X₂₃X₂₄X₈X₉CX₁₀X₁₁CX₁₂X₁₃X₁₄X₁₅X₁₆TSHSLTEHX₁₇ | |
| | CAG | | GKSFSTSHSLTEHQRTHTGEKPY | | X₁₈X₁₉HX₂₀X₂₁X₂₂X₂₃X₂₄X₈X₉CX₁₀X₁₁CX₁₂X₁₃X₁₄X₁₅X₁₆DKKDLTRH | |
| | | | KCPECGKSFSDKKDLTRHQRTHT | | X₁₇X₁₈X₁₉HX₂₀X₂₁X₂₂X₂₃X₂₄X₈X₉CX₁₀X₁₁CX₁₂X₁₃X₁₄X₁₅X₁₆DPGALV | |
| | | | GEKPYKCPECGKSFSDPGALVRH | | RHX₁₇X₁₈X₁₉HX₂₀X₂₁X₂₂X₂₃X₂₄X₈X₉CX₁₀X₁₁CX₁₂X₁₃X₁₄X₁₅X₁₆HKNA | |
| | | | QRTHTGEKPYKCPECGKSFSHKN | | LQNHX₁₇X₁₈X₁₉HX₂₀X₂₁X₂₂X₂₃X₂₄X₈X₉CX₁₀X₁₁CX₁₂X₁₃X₁₄X₁₅X₁₆DC | |
| | | | ALQNHQRTHTGEKPYKCPECGKS | | RDLARHX₁₇X₁₈X₁₉HX₂₀X₂₁X₂₂X₂₃X₂₄X₂₅X₂₆X₂₇X₂₈X₂₉X₃₀ | |
| | | | FSDCRDLARHQRTHTGEKPTGKK | | | |
| | | | TS | | | |
| caagccatt | CAA GCC | 1370 | LEPGEKPYKCPECGKSFSHRTTL | 1919 | X₁X₂X₃X₄X₅X₆X₇X₈X₉CX₁₀X₁₁CX₁₂X₁₃X₁₄X₁₅X₁₆HRTTLTNHX₁₇X₁₈X₁₉ | 2468 |
| gtcacccca | ATT GTC | | TNHQRTHTGEKPYKCPECGKSFS | | HX₂₀X₂₁X₂₂X₂₃X₂₄X₈X₉CX₁₀X₁₁CX₁₂X₁₃X₁₄X₁₅X₁₆TSHSLTEHX₁₇X₁₈ | |
| agt | ACC CCA | | TSHSLTEHQRTHTGEKPYKCPEC | | X₁₉HX₂₀X₂₁X₂₂X₂₃X₂₄X₈X₉CX₁₀X₁₁CX₁₂X₁₃X₁₄X₁₅X₁₆DKKDLTRHX₁₇ | |
| | AGT | | GKSFSDKKDLTRHQRTHTGEKPY | | X₁₈X₁₉HX₂₀X₂₁X₂₂X₂₃X₂₄X₈X₉CX₁₀X₁₁CX₁₂X₁₃X₁₄X₁₅X₁₆DPGALVRH | |
| | | | KCPECGKSFSDPGALVRHQRTHT | | X₁₇X₁₈X₁₉HX₂₀X₂₁X₂₂X₂₃X₂₄X₈X₉CX₁₀X₁₁CX₁₂X₁₃X₁₄X₁₅X₁₆HKNALQ | |
| | | | GEKPYKCPECGKSFSHKNALQNH | | NHX₁₇X₁₈X₁₉HX₂₀X₂₁X₂₂X₂₃X₂₄X₈X₉CX₁₀X₁₁CX₁₂X₁₃X₁₄X₁₅X₁₆DCRD | |
| | | | QRTHTGEKPYKCPECGKSFSDCR | | LARHX₁₇X₁₈X₁₉HX₂₀X₂₁X₂₂X₂₃X₂₄X₈X₉CX₁₀X₁₁CX₁₂X₁₃X₁₄X₁₅X₁₆QS | |
| | | | DLARHQRTHTGEKPYKCPECGKS | | GNLTEHX₁₇X₁₈X₁₉HX₂₀X₂₁X₂₂X₂₃X₂₄X₂₅X₂₆X₂₇X₂₈X₂₉X₃₀ | |
| | | | FSQSGNLTEHQRTHTGEKPTGKK | | | |
| | | | TS | | | |
| ggcactgac | GGC ACT | 1371 | LEPGEKPYKCPECGKSFSRNDTL | 1920 | X₁X₂X₃X₄X₅X₆X₇X₈X₉CX₁₀X₁₁CX₁₂X₁₃X₁₄X₁₅X₁₆RNDTLTEHX₁₇X₁₈X₁₉ | 2469 |
| agcctacct | GAC AGC | | TEHQRTHTGEKPYKCPECGKSFS | | HX₂₀X₂₁X₂₂X₂₃X₂₄X₈X₉CX₁₀X₁₁CX₁₂X₁₃X₁₄X₁₅X₁₆TKNSLTEHX₁₇X₁₈ | |
| ccg | CTA CCT | | TKNSLTEHQRTHTGEKPYKCPEC | | X₁₉HX₂₀X₂₁X₂₂X₂₃X₂₄X₈X₉CX₁₀X₁₁CX₁₂X₁₃X₁₄X₁₅X₁₆QNSTLTEHX₁₇ | |
| | CCG | | GKSFSQNSTLTEHQRTHTGEKPY | | X₁₈X₁₉HX₂₀X₂₁X₂₂X₂₃X₂₄X₈X₉CX₁₀X₁₁CX₁₂X₁₃X₁₄X₁₅X₁₆ERSHLREH | |
| | | | KCPECGKSFSERSHLREHQRTHT | | X₁₇X₁₈X₁₉HX₂₀X₂₁X₂₂X₂₃X₂₄X₈X₉CX₁₀X₁₁CX₁₂X₁₃X₁₄X₁₅X₁₆DPGNLV | |
| | | | GEKPYKCPECGKSFSDPGNLVRH | | RHX₁₇X₁₈X₁₉HX₂₀X₂₁X₂₂X₂₃X₂₄X₈X₉CX₁₀X₁₁CX₁₂X₁₃X₁₄X₁₅X₁₆THLD | |
| | | | QRTHTGEKPYKCPECGKSFSTHL | | LIRHX₁₇X₁₈X₁₉HX₂₀X₂₁X₂₂X₂₃X₂₄X₈X₉CK₁₀X₁₁CX₁₂X₁₃X₁₄X₁₅X₁₆DP | |
| | | | DLIRHQRTHTGEKPYKCPECGKS | | GHLVRHX₁₇X₁₈X₁₉HX₂₀X₂₁X₂₂X₂₃X₂₄X₂₅X₂₆X₂₇X₂₈X₂₉X₃₀ | |
| | | | FSDPGHLVRHQRTHTGEKPTGKK | | | |
| | | | TS | | | |
| actgacagc | ACT GAC | 1372 | LEPGEKPYKCPECGKSFSQLAHL | 1921 | X₁X₂X₃X₄X₅X₆X₇X₈X₉CX₁₀X₁₁CX₁₂X₁₃X₁₄X₁₅X₁₆QLAHLRAHX₁₇X₁₈X₁₉ | 2470 |
| ctacctccg | AGC CTA | | RAHQRTHTGEKPYKCPECGKSFS | | HX₂₀X₂₁X₂₂X₂₃X₂₄X₈X₉CX₁₀X₁₁CX₁₂X₁₃X₁₄X₁₅X₁₆RNDTLTEHX₁₇X₁₈ | |
| aga | CCT CCG | | RNDTLTEHQRTHTGEKPYKCPEC | | X₁₉HX₂₀X₂₁X₂₂X₂₃X₂₄X₈X₉CX₁₀X₁₁CX₁₂X₁₃X₁₄X₁₅X₁₆TKNSLTEHX₁₇ | |
| | AGA | | GKSFSTKNSLTEHQRTHTGEKPY | | X₁₈X₁₉HX₂₀X₂₁X₂₂X₂₃X₂₄X₈X₉CX₁₀X₁₁CX₁₂X₁₃X₁₄X₁₅X₁₆QNSTLTEH | |
| | | | KCPECGKSFSQNSTLTEHQRTHT | | X₁₇X₁₈X₁₉HX₂₀X₂₁X₂₂X₂₃X₂₄X₈X₉CX₁₀X₁₁CX₁₂X₁₃X₁₄X₁₅X₁₆ERSHLR | |
| | | | GEKPYKCPECGKSFSERSHLREH | | EHX₁₇X₁₈X₁₉HX₂₀X₂₁X₂₂X₂₃X₂₄X₈X₉CX₁₀X₁₁CX₁₂X₁₃X₁₄X₁₅X₁₆DPGN | |
| | | | QRTHTGEKPYKCPECGKSFSDPG | | LVRHX₁₇X₁₈X₁₉HX₂₀X₂₁X₂₂X₂₃X₂₄X₈X₉CX₁₀X₁₁CX₁₂X₁₃X₁₄X₁₅X₁₆TH | |
| | | | NLVRHQRTHTGEKPYKCPECGKS | | LDLIRHX₁₇X₁₈X₁₉HX₂₀X₂₁X₂₂X₂₃X₂₄X₂₅X₂₆X₂₇X₂₈X₂₉X₃₀ | |
| | | | FSTHLDLIRHQRTHTGEKPTGKK | | | |
| | | | TS | | | |
| ccaaatcat | CCA AAT | 1373 | LEPGEKPYKCPECGKSFSSKKHL | 1922 | X₁X₂X₃X₄X₅X₆X₇X₈X₉CX₁₀X₁₁CX₁₂X₁₃X₁₄X₁₅X₁₆SKKHLAEHX₁₇X₁₈X₁₉ | 2471 |
| tgacttcta | CAT TGA | | AEHQRTHTGEKPYKCPECGKSFS | | HX₂₀X₂₁X₂₂X₂₃X₂₄X₈X₉CX₁₀X₁₁CX₁₂X₁₃X₁₄X₁₅X₁₆QNSTLTEHX₁₇X₁₈ | |
| ccc | CTT CTA | | QNSTLTEHQRTHTGEKPYKCPEC | | X₁₉HX₂₀X₂₁X₂₂X₂₃X₂₄X₈X₉CX₁₀X₁₁CX₁₂X₁₃X₁₄X₁₅X₁₆TTGALTEHX₁₇ | |
| | CCC | | GKSFSTTGALTEHQRTHTGEKPY | | X₁₈X₁₉HX₂₀X₂₁X₂₂X₂₃X₂₄X₈X₉CX₁₀X₁₁CX₁₂X₁₃X₁₄X₁₅X₁₆QAGHLASH | |
| | | | KCPECGKSFSQAGHLASHQRTHT | | X₁₇X₁₈X₁₉HX₂₀X₂₁X₂₂X₂₃X₂₄X₈X₉CX₁₀X₁₁CX₁₂X₁₃X₁₄X₁₅X₁₆TSGNLT | |
| | | | GEKPYKCPECGKSFSTSGNLTEH | | EHX₁₇X₁₈X₁₉HX₂₀X₂₁X₂₂X₂₃X₂₄X₈X₉CX₁₀X₁₁CX₁₂X₁₃X₁₄X₁₅X₁₆TTGN | |
| | | | QRTHTGEKPYKCPECGKSFSTTG | | LTVHX₁₇X₁₈X₁₉HX₂₀X₂₁X₂₂X₂₃X₂₄X₈X₉CX₁₀X₁₁CX₁₂X₁₃X₁₄X₁₅X₁₆TS | |
| | | | NLTVHQRTHTGEKPYKCPECGKS | | HSLTEHX₁₇X₁₈X₁₉HX₂₀X₂₁X₂₂X₂₃X₂₄X₂₅X₂₆X₂₇X₂₈X₂₉X₃₀ | |
| | | | FSTSHSLTEHQRTHTGEKPTGKK | | | |
| | | | TS | | | |
| gcagagata | GCA gag | 1374 | LEPGEKPYKCPECGKSFSTSGNL | 1923 | X₁X₂X₃X₄X₅X₆X₇X₈X₉CX₁₀X₁₁CX₁₂X₁₃X₁₄X₁₅X₁₆TSGNLTEHX₁₇X₁₈X₁₉ | 2472 |
| aggctgccc | ATA AGG | | TEHQRTHTGEKPYKCPECGKSFS | | HX₂₀X₂₁X₂₂X₂₃X₂₄X₈X₉CX₁₀X₁₁CX₁₂X₁₃X₁₄X₁₅X₁₆SKKHLAEHX₁₇X₁₈ | |
| cat | CTG CCC | | SKKHLAEHQRTHTGEKPYKCPEC | | X₁₉HX₂₀X₂₁X₂₂X₂₃X₂₄X₈X₉CX₁₀X₁₁CX₁₂X₁₃X₁₄X₁₅X₁₆RNDALTEHX₁₇ | |
| | CAT | | GKSFSRNDALTEHQRTHTGEKPY | | X₁₈X₁₉HX₂₀X₂₁X₂₂X₂₃X₂₄X₈X₉CX₁₀X₁₁CX₁₂X₁₃X₁₄X₁₅X₁₆RSDHLTNH | |
| | | | KCPECGKSFSRSDHLTNHQRTHT | | X₁₇X₁₈X₁₉HX₂₀X₂₁X₂₂X₂₃X₂₄X₈X₉CXHX₁₁CX₁₂X₁₃X₁₄X₁₅X₁₆QKSSLI | |
| | | | GEKPYKCPECGKSFSQKSSLIAH | | AHX₁₇X₁₈X₁₉HX₂₀X₂₁X₂₂X₂₃X₂₄X₈X₉CX₁₀X₁₁CX₁₂X₁₃X₁₄X₁₅X₁₆RSDN | |
| | | | QRTHTGEKPYKCPECGKSFSRSD | | LVRHX₁₇X₁₈X₁₉HX₂₀X₂₁X₂₂X₂₃X₂₄X₈X₉CX₁₀X₁₁CX₁₂X₁₃X₁₄X₁₅X₁₆QS | |
| | | | NLVRHQRTHTGEKPYKCPECGKS | | GDLRRHX₁₇X₁₈X₁₉HX₂₀X₂₁X₂₂X₂₃X₂₄X₂₅X₂₆X₂₇X₂₈X₂₉X₃₀ | |
| | | | FSQSGDLRRHQRTHTGEKPTGKK | | | |
| | | | TS | | | |
| gagataagg | gag ATA | 1375 | LEPGEKPYKCPECGKSFSDPGHL | 1924 | X₁X₂X₃X₄X₅X₆X₇X₈X₉CX₁₀X₁₁CX₁₂X₁₃X₁₄X₁₅X₁₆DPGHLVRHX₁₇X₁₈X₁₉ | 2473 |
| ctgccccat | AGG CTG | | VRHQRTHTGEKPYKCPECGKSFS | | HX₂₀X₂₁X₂₂X₂₃X₂₄X₈X₉CX₁₀X₁₁CX₁₂X₁₃X₁₄X₁₅X₁₆TSGNLTEHX₁₇X₁₈ | |
| ggc | CCC CAT | | TSGNLTEHQRTHTGEKPYKCPEC | | X₁₉HX₂₀X₂₁X₂₂X₂₃X₂₄X₈X₉CX₁₀X₁₁CX₁₂X₁₃X₁₄X₁₅X₁₆SKKHLAEHX₁₇ | |
| | GGC | | GKSFSSKKHLAEHQRTHTGEKPY | | X₁₈X₁₉HX₂₀X₂₁X₂₂X₂₃X₂₄X₈X₉CX₁₀X₁₁CX₁₂X₁₃X₁₄X₁₅X₁₆RNDALTEH | |
| | | | KCPECGKSFSRNDALTEHQRTHT | | X₁₇X₁₈X₁₉HX₂₀X₂₁X₂₂X₂₃X₂₄X₈X₉CX₁₀X₁₁CX₁₂X₁₃X₁₄X₁₅X₁₆RSDHLT | |
| | | | GEKPYKCPECGKSFSRSDHLTNH | | NHX₁₇X₁₈X₁₉HX₂₀X₂₁X₂₂X₂₃X₂₄X₈X₉CX₁₀X₁₁CX₁₂X₁₃X₁₄X₁₅X₁₆QKSS | |
| | | | QRTHTGEKPYKCPECGKSFSQKS | | LIAHX₁₇X₁₈X₁₉HX₂₀X₂₁X₂₂X₂₃X₂₄X₈X₉CX₁₀X₁₁CX₁₂X₁₃X₁₄X₁₅X₁₆RS | |
| | | | SLIAHQRTHTGEKPYKCPECGKS | | DNLVRHX₁₇X₁₈X₁₉HX₂₀X₂₁X₂₂X₂₃X₂₄X₂₅X₂₆X₂₇X₂₈X₂₉X₃₀ | |
| | | | FSRSDNLVRHQRTHTGEKPTGKK | | | |
| | | | TS | | | |
| ataaggctg | ATA AGG | 1376 | LEPGEKPYKCPECGKSFSTSHSL | 1925 | X₁X₂X₃X₄X₅X₆X₇X₈X₉CX₁₀X₁₁CX₁₂X₁₃X₁₄X₁₅X₁₆TSHSLTEHX₁₇X₁₈X₁₉ | 2474 |
| ccccatggc | CTG CCC | | TEHQRTHTGEKPYKCPECGKSFS | | HX₂₀X₂₁X₂₂X₂₃X₂₄X₈X₉CX₁₀X₁₁CX₁₂X₁₃X₁₄X₁₅X₁₆DPGHLVRHX₁₇X₁₈ | |
| cca | CAT GGC | | DPGHLVRHQRTHTGEKPYKCPEC | | X₁₉HX₂₀X₂₁X₂₂X₂₃X₂₄X₈X₉CX₁₀X₁₁CX₁₂X₁₃X₁₄X₁₅X₁₆TSGNLTEHX₁₇ | |
| | CCA | | GKSFSTSGNLTEHQRTHTGEKPY | | X₁₈X₁₉HX₂₀X₂₁X₂₂X₂₃X₂₄X₈X₉CX₁₀X₁₁CX₁₂X₁₃X₁₄X₁₅X₁₆SKKHLAEH | |
| | | | KCPECGKSFSSKKHLAEHQRTHT | | X₁₇X₁₈X₁₉HX₂₀X₂₁X₂₂X₂₃X₂₄X₈X₉CX₁₀X₁₁CX₁₂X₁₃X₁₄X₁₅X₁₆RNDALT | |
| | | | GEKPYKCPECGKSFSRNDALTEH | | EHX₁₇X₁₈X₁₉HX₂₀X₂₁X₂₂X₂₃X₂₄X₈X₉CX₁₀X₁₁CX₁₂X₁₃X₁₄X₁₅X₁₆RSDH | |
| | | | QRTHTGEKPYKCPECGKSFSRSD | | LTNHX₁₇X₁₈X₁₉HX₂₀X₂₁X₂₂X₂₃X₂₄X₈X₉CX₁₀X₁₁CX₁₂X₁₃X₁₄X₁₅X₁₆QK | |
| | | | HLTNHQRTHTGEKPYKCPECGKS | | SSLIAHX₁₇X₁₈X₁₉HX₂₀X₂₁X₂₂X₂₃X₂₄X₂₅X₂₆X₂₇X₂₈X₂₉X₃₀ | |
| | | | FSQKSSLIAHQRTHTGEKPTGKK | | | |
| | | | TS | | | |
| aggctgccc | AGG CTG | 1377 | LEPGEKPYKCPECGKSFSQSGHL | 1926 | X₁X₂X₃X₄X₅X₆X₇X₈X₉CX₁₀X₁₁CX₁₂X₁₃X₁₄X₁₅X₁₆QSGHLTEHX₁₇X₁₈X₁₉ | 2475 |
| catggccca | CCC CAT | | TEHQRTHTGEKPYKCPECGKSFS | | HX₂₀X₂₁X₂₂X₂₃X₂₄X₈X₉CX₁₀X₁₁CX₁₂X₁₃X₁₄X₁₅X₁₆TSHSLTEHX₁₇X₁₈ | |
| cga | GGC CCA | | TSHSLTEHQRTHTGEKPYKCPEC | | X₁₉HX₂₀X₂₁X₂₂X₂₃X₂₄X₈X₉CX₁₀X₁₁CX₁₂X₁₃X₁₄X₁₅X₁₆DPGHLVRHX₁₇ | |
| | CGA | | GKSFSDPGHLVRHQRTHTGEKPY | | X₁₈X₁₉HX₂₀X₂₁X₂₂X₂₃X₂₄X₈X₉CX₁₀X₁₁CX₁₂X₁₃X₁₄X₁₅X₁₆TSGNLTEH | |
| | | | KCPECGKSFSTSGNLTEHQRTHT | | X₁₇X₁₈X₁₉HX₂₀X₂₁X₂₂X₂₃X₂₄X₈X₉CX₁₀X₁₁CX₁₂X₁₃X₁₄X₁₅X₁₆SKKHLA | |
| | | | GEKPYKCPECGKSFSSKKHLAEH | | EHX₁₇X₁₈X₁₉HX₂₀X₂₁X₂₂X₂₃X₂₄X₈X₉CX₁₀X₁₁CX₁₂X₁₃X₁₄X₁₅X₁₆RNDA | |
| | | | QRTHTGEKPYKCPECGKSFSRND | | LTEHX₁₇X₁₈X₁₉HX₂₀X₂₁X₂₂X₂₃X₂₄X₈X₉CX₁₀X₁₁CX₁₂X₁₃X₁₄X₁₅X₁₆RS | |
| | | | ALTEHQRTHTGEKPYKCPECGKS | | DHLTNHX₁₇X₁₈X₁₉HX₂₀X₂₁X₂₂X₂₃X₂₄X₂₅X₂₆X₂₇X₂₈X₂₉X₃₀ | |
| | | | FSRSDHLTNHQRTHTGEKPTGKK | | | |
| | | | TS | | | |
| agagataag | AGA GAT | 1378 | LEPGEKPYKCPECGKSFSRSDHL | 1927 | X₁X₂X₃X₄X₅X₆X₇X₈X₉CX₁₀X₁₁CX₁₂X₁₃X₁₄X₁₅X₁₆RSDHLTTHX₁₇X₁₈X₁₉ | 2476 |
| gctgcccca | AAG GCT | | TTHQRTHTGEKPYKCPECGKSFS | | HX₂₀X₂₁X₂₂X₂₃X₂₄X₈X₉CX₁₀X₁₁CX₁₂X₁₃X₁₄X₁₅X₁₆TSHSLTEHX₁₇X₁₈ | |
| tgg | GCC CCA | | TSHSLTEHQRTHTGEKPYKCPEC | | X₁₉HX₂₀X₂₁X₂₂X₂₃X₂₄X₈X₉CX₁₀X₁₁CX₁₂X₁₃X₁₄X₁₅X₁₆DCRDLARHX₁₇ | |
| | TGG | | GKSFSDCRDLARHQRTHTGEKPY | | X₁₈X₁₉HX₂₀X₂₁X₂₂X₂₃X₂₄X₈X₉CX₁₀X₁₁CX₁₂X₁₃X₁₄X₁₅X₁₆TSGELVRH | |
| | | | KCPECGKSFSTSGELVRHQRTHT | | X₁₇X₁₈X₁₉HX₂₀X₂₁X₂₂X₂₃X₂₄X₈X₉CX₁₀X₁₁CX₁₂X₁₃X₁₄X₁₅X₁₆RKDNLK | |
| | | | GEKPYKCPECGKSFSRKDNLKNH | | NHX₁₇X₁₈X₁₉HX₂₀X₂₁X₂₂X₂₃X₂₄X₈X₉CX₁₀X₁₁CX₁₂X₁₃X₁₄X₁₅X₁₆TSGN | |
| | | | QRTHTGEKPYKCPECGKSFSTSG | | LVRHX₁₇X₁₈X₁₉HX₂₀X₂₁X₂₂X₂₃X₂₄X₈X₉CX₁₀X₁₁CX₁₂X₁₃X₁₄X₁₅X₁₆QL | |
| | | | NLVRHQRTHTGEKPYKCPECGKS | | AHLRAHX₁₇X₁₈X₁₉HX₂₀X₂₁X₂₂X₂₃X₂₄X₂₅X₂₆X₂₇X₂₈X₂₉X₃₀ | |
| | | | FSQLAHLRAHQRTHTGEKPTGKK | | | |
| | | | TS | | | |
| cccacgatt | CCC ACG | 1379 | LEPGEKPYKCPECGKSFSQRANL | 1928 | X₁X₂X₃X₄X₅X₆X₇X₈X₉CX₁₀X₁₁CX₁₂X₁₃X₁₄X₁₅X₁₆QRANLRAHX₁₇X₁₈X₁₉ | 2477 |
| tagaaacct | ATT TAG | | RAHQRTHTGEKPYKCPECGKSFS | | HX₂₀X₂₁X₂₂X₂₃X₂₄X₈X₉CX₁₀X₁₁CX₁₂X₁₃X₁₄X₁₅X₁₆TKNSLTEHX₁₇X₁₈ | |
| aaa | AAA CCT | | TKNSLTEHQRTHTGEKPYKCPEC | | X₁₉HX₂₀X₂₁X₂₂X₂₃X₂₄X₈X₉CX₁₀X₁₁CX₁₂X₁₃X₁₄X₁₅X₁₆QRANLRAHX₁₇ | |
| | AAA | | GKSFSQRANLRAHQRTHTGEKPY | | X₁₈X₁₉HX₂₀X₂₁X₂₂X₂₃X₂₄X₈X₉CX₁₀X₁₁CX₁₂X₁₃X₁₄X₁₅X₁₆REDNLHTH | |
| | | | KCPECGKSFSREDNLHTHQRTHT | | X₁₇X₁₈X₁₉HX₂₀X₂₁X₂₂X₂₃X₂₄X₈X₉CX₁₀X₁₁CX₁₂X₁₃X₁₄X₁₅X₁₆HKNALQ | |
| | | | GEKPYKCPECGKSFSHKNALQNH | | NHX₁₇X₁₈X₁₉HX₂₀X₂₁X₂₂X₂₃X₂₄X₈X₉CX₁₀X₁₁CX₁₂X₁₃X₁₄X₁₅X₁₆RTDT | |
| | | | QRTHTGEKPYKCPECGKSFSRTD | | LRDHX₁₇X₁₈X₁₉HX₂₀X₂₁X₂₂X₂₃X₂₄X₈X₉CX₁₀X₁₁CX₁₂X₁₃X₁₄X₁₅X₁₆SK | |
| | | | TLRDHQRTHTGEKPYKCPECGKS | | KHLAEHX₁₇X₁₈X₁₉HX₂₀X₂₁X₂₂X₂₃X₂₄X₂₅X₂₆X₂₇X₂₈X₂₉X₃₀ | |
| | | | FSSKKHLAEHQRTHTGEKPTGKK | | | |
| | | | TS | | | |
| tggcccacg | TGG CCC | 1380 | LEPGEKPYKCPECGKSFSTKNSL | 1929 | X₁X₂X₃X₄X₅X₆X₇X₈X₉CX₁₀X₁₁CX₁₂X₁₃X₁₄X₁₅X₁₆TKNSLTEHX₁₇X₁₈X₁₉ | 2478 |
| atttagaaa | ACG ATT | | TEHQRTHTGEKPYKCPECGKSFS | | HX₂₀X₂₁X₂₂X₂₃X₂₄X₈X₉CX₁₀X₁₁CX₁₂X₁₃X₁₄X₁₅X₁₆QRANLRAHX₁₇X₁₈ | |
| cct | TAG AAA | | QRANLRAHQRTHTGEKPYKCPEC | | X₁₉HX₂₀X₂₁X₂₂X₂₃X₂₄X₈X₉CX₁₀X₁₁CX₁₂X₁₃X₁₄X₁₅X₁₆REDNLHTHX₁₇ | |
| | CCT | | GKSFSREDNLHTHQRTHTGEKPY | | X₁₈X₁₉HX₂₀X₂₁X₂₂X₂₃X₂₄X₈X₉CX₁₀X₁₁CX₁₂X₁₃X₁₄X₁₅X₁₆HKNALQNH | |
| | | | KCPECGKSFSHKNALQNHQRTHT | | X₁₇X₁₈X₁₉HX₂₀X₂₁X₂₂X₂₃X₂₄X₈X₉CXHX₁₁CX₁₂X₁₃X₁₄X₁₅X₁₆RTDTLR | |
| | | | GEKPYKCPECGKSFSRTDTLRDH | | DHX₁₇X₁₈X₁₉HX₂₀X₂₁X₂₂X₂₃X₂₄X₈X₉CX₁₀X₁₁CX₁₂X₁₃X₁₄X₁₅X₁₆SKKH | |
| | | | QRTHTGEKPYKCPECGKSFSSKK | | LAEHX₁₇X₁₈X₁₉HX₂₀X₂₁X₂₂X₂₃X₂₄X₈X₉CX₁₀X₁₁CX₁₂X₁₃X₁₄X₁₅X₁₆RS | |
| | | | HLAEHQRTHTGEKPYKCPECGKS | | DHLTTHX₁₇X₁₈X₁₉HX₂₀X₂₁X₂₂X₂₃X₂₄X₂₅X₂₆X₂₇X₂₈X₂₉X₃₀ | |
| | | | FSRSDHLTTHQRTHTGEKPTGKK | | | |
| | | | TS | | | |
| ccatggccc | CCA TGG | 1381 | LEPGEKPYKCPECGKSFSQRANL | 1930 | X₁X₂X₃X₄X₅X₆X₇X₈X₉CX₁₀X₁₁CX₁₂X₁₃X₁₄X₁₅X₁₆QRANLRAHX₁₇X₁₈X₁₉ | 2479 |
| acgatttag | CCC ACG | | RAHQRTHTGEKPYKCPECGKSFS | | HX₂₀X₂₁X₂₂X₂₃X₂₄X₈X₉CX₁₀X₁₁CX₁₂X₁₃X₁₄X₁₅X₁₆REDNLHTHX₁₇X₁₈ | |
| aaa | ATT TAG | | REDNLHTHQRTHTGEKPYKCPEC | | X₁₉HX₂₀X₂₁X₂₂X₂₃X₂₄X₈X₉CX₁₀X₁₁CX₁₂X₁₃X₁₄X₁₅X₁₆HKNALQNHX₁₇ | |
| | AAA | | GKSFSHKNALQNHQRTHTGEKPY | | X₁₈X₁₉HX₂₀X₂₁X₂₂X₂₃X₂₄X₈X₉CX₁₀X₁₁CX₁₂X₁₃X₁₄X₁₅X₁₆RTDTLRDH | |
| | | | KCPECGKSFSRTDTLRDHQRTHT | | X₁₇X₁₈X₁₉HX₂₀X₂₁X₂₂X₂₃X₂₄X₈X₉CX₁₀X₁₁CX₁₂X₁₃X₁₄X₁₅X₁₆SKKHLA | |
| | | | GEKPYKCPECGKSFSSKKHLAEH | | EHX₁₇X₁₈X₁₉HX₂₀X₂₁X₂₂X₂₃X₂₄X₈X₉CX₁₀X₁₁CX₁₂X₁₃X₁₄X₁₅X₁₆RSDH | |
| | | | QRTHTGEKPYKCPECGKSFSRSD | | LTTHX₁₇X₁₈X₁₉HX₂₀X₂₁X₂₂X₂₃X₂₄X₈X₉CX₁₀X₁₁CX₁₂X₁₃X₁₄X₁₅X₁₆TS | |
| | | | HLTTHQRTHTGEKPYKCPECGKS | | HSLTEHX₁₇X₁₈X₁₉HX₂₀X₂₁X₂₂X₂₃X₂₄X₂₅X₂₆X₂₇X₂₈X₂₉X₃₀ | |
| | | | FSTSHSLTEHQRTHTGEKPTGKK | | | |
| | | | TS | | | |
| gccccatgg | GCC CCA | 1382 | LEPGEKPYKCPECGKSFSREDNL | 1931 | X₁X₂X₃X₄X₅X₆X₇X₈X₉CX₁₀X₁₁CX₁₂X₁₃X₁₄X₁₅X₁₆REDNLHTHX₁₇X₁₈X₁₉ | 2480 |
| cccacgatt | TGG CCC | | HTHQRTHTGEKPYKCPECGKSFS | | HX₂₀X₂₁X₂₂X₂₃X₂₄X₈X₉CX₁₀X₁₁CX₁₂X₁₃X₁₄X₁₅X₁₆HKNALQNHX₁₇X₁₈ | |
| tag | ACG ATT | | HKNALQNHQRTHTGEKPYKCPEC | | X₁₉HX₂₀X₂₁X₂₂X₂₃X₂₄X₈X₉CX₁₀X₁₁CX₁₂X₁₃X₁₄X₁₅X₁₆RTDTLRDHX₁₇ | |
| | TAG | | GKSFSRTDTLRDHQRTHTGEKPY | | X₁₈X₁₉HX₂₀X₂₁X₂₂X₂₃X₂₄X₈X₉CX₁₀X₁₁CX₁₂X₁₃X₁₄X₁₅X₁₆SKKHLAEH | |
| | | | KCPECGKSFSSKKHLAEHQRTHT | | X₁₇X₁₈X₁₉HX₂₀X₂₁X₂₂X₂₃X₂₄X₈X₉CX₁₀X₁₁CX₁₂X₁₃X₁₄X₁₅X₁₆RSDHLT | |
| | | | GEKPYKCPECGKSFSRSDHLTTH | | THX₁₇X₁₈X₁₉HX₂₀X₂₁X₂₂X₂₃X₂₄X₈X₉CX₁₀X₁₁CX₁₂X₁₃X₁₄X₁₅X₁₆TSHS | |
| | | | QRTHTGEKPYKCPECGKSFSTSH | | LTEHX₁₇X₁₈X₁₉HX₂₀X₂₁X₂₂X₂₃X₂₄X₈X₉CX₁₀X₁₁CX₁₂X₁₃X₁₄X₁₅X₁₆DC | |
| | | | SLTEHQRTHTGEKPYKCPECGKS | | RDLARHX₁₇X₁₈X₁₉HX₂₀X₂₁X₂₂X₂₃X₂₄X₂₅X₂₆X₂₇X₂₈X₂₉X₃₀ | |
| | | | FSDCRDLARHQRTHTGEKPTGKK | | | |
| | | | TS | | | |
| gataaggct | GAT AAG | 1383 | LEPGEKPYKCPECGKSFSSKKHL | 1932 | X₁X₂X₃X₄X₅X₆X₇X₈X₉CX₁₀X₁₁CX₁₂X₁₃X₁₄X₁₅X₁₆SKKHLAEHX₁₇X₁₈X₁₉ | 2481 |
| gccccatgg | GCT GCC | | AEHQRTHTGEKPYKCPECGKSFS | | HX₂₀X₂₁X₂₂X₂₃X₂₄X₈X₉CX₁₀X₁₁CX₁₂X₁₃X₁₄X₁₅X₁₆RSDHLTTHX₁₇X₁₈ | |
| ccc | CCA TGG | | RSDHLTTHQRTHTGEKPYKCPEC | | X₁₉HX₂₀X₂₁X₂₂X₂₃X₂₄X₈X₉CX₁₀X₁₁CX₁₂X₁₃X₁₄X₁₅X₁₆TSHSLTEHX₁₇ | |
| | CCC | | GKSFSTSHSLTEHQRTHTGEKPY | | X₁₈X₁₉HX₂₀X₂₁X₂₂X₂₃X₂₄X₈X₉CX₁₀X₁₁CX₁₂X₁₃X₁₄X₁₅X₁₆DCRDLARH | |
| | | | KCPECGKSFSDCRDLARHQRTHT | | X₁₇X₁₈X₁₉HX₂₀X₂₁X₂₂X₂₃X₂₄X₈X₉CX₁₀X₁₁CX₁₂X₁₃X₁₄X₁₅X₁₆TSGELV | |
| | | | GEKPYKCPECGKSFSTSGELVRH | | RHX₁₇X₁₈X₁₉HX₂₀X₂₁X₂₂X₂₃X₂₄X₈X₉CX₁₀X₁₁CX₁₂X₁₃X₁₄X₁₅X₁₆RKDN | |
| | | | QRTHTGEKPYKCPECGKSFSRKD | | LKNHX₁₇X₁₈X₁₉HX₂₀X₂₁X₂₂X₂₃X₂₄X₈X₉CX₁₀X₁₁CX₁₂X₁₃X₁₄X₁₅X₁₆TS | |
| | | | NLKNHQRTHTGEKPYKCPECGKS | | GNLVRHX₁₇X₁₈X₁₉HX₂₀X₂₁X₂₂X₂₃X₂₄X₂₅X₂₆X₂₇X₂₈X₂₉X₃₀ | |
| | | | FSTSGNLVRHQRTHTGEKPTGKK | | | |
| | | | TS | | | |
| gctgcccca | GCT GCC | 1384 | LEPGEKPYKCPECGKSFSHKNAL | 1933 | X₁X₂X₃X₄X₅X₆X₇X₈X₉CX₁₀X₁₁CX₁₂X₁₃X₁₄X₁₅X₁₆HKNALQNHX₁₇X₁₈X₁₉ | 2482 |
| tggcccacg | CCA TGG | | QNHQRTHTGEKPYKCPECGKSFS | | HX₂₀X₂₁X₂₂X₂₃X₂₄X₈X₉CX₁₀X₁₁CX₁₂X₁₃X₁₄X₁₅X₁₆RTDTLRDHX₁₇X₁₈ | |
| att | CCC ACG | | RTDTLRDHQRTHTGEKPYKCPEC | | X₁₉HX₂₀X₂₁X₂₂X₂₃X₂₄X₈X₉CX₁₀X₁₁CX₁₂X₁₃X₁₄X₁₅X₁₆SKKHLAEHX₁₇ | |
| | ATT | | GKSFSSKKHLAEHQRTHTGEKPY | | X₁₈X₁₉HX₂₀X₂₁X₂₂X₂₃X₂₄X₈X₉CX₁₀X₁₁CX₁₂X₁₃X₁₄X₁₅X₁₆RSDHLTTH | |
| | | | KCPECGKSFSRSDHLTTHQRTHT | | X₁₇X₁₈X₁₉HX₂₀X₂₁X₂₂X₂₃X₂₄X₈X₉CX₁₀X₁₁CX₁₂X₁₃X₁₄X₁₅X₁₆TSHSLT | |
| | | | GEKPYKCPECGKSFSTSHSLTEH | | EHX₁₇X₁₈X₁₉HX₂₀X₂₁X₂₂X₂₃X₂₄X₈X₉CX₁₀X₁₁CX₁₂X₁₃X₁₄X₁₅X₁₆DCRD | |
| | | | QRTHTGEKPYKCPECGKSFSDCR | | LARHX₁₇X₁₈X₁₉HX₂₀X₂₁X₂₂X₂₃X₂₄X₈X₉CX₁₀X₁₁CX₁₂X₁₃X₁₄X₁₅X₁₆TS | |
| | | | DLARHQRTHTGEKPYKCPECGKS | | GELVRHX₁₇X₁₈X₁₉HX₂₀X₂₁X₂₂X₂₃X₂₄X₂₅X₂₆X₂₇X₂₈X₂₉X₃₀ | |
| | | | FSTSGELVRHQRTHTGEKPTGKK | | | |
| | | | TS | | | |
| aaggctgcc | AAG GCT | 1385 | LEPGEKPYKCPECGKSFSRTDTL | 1934 | X₁X₂X₃X₄X₅X₆X₇X₈X₉CX₁₀X₁₁CX₁₂X₁₃X₁₄X₁₅X₁₆RTDTLRDHX₁₇X₁₈X₁₉ | 2483 |
| ccatggccc | GCC CCA | | RDHQRTHTGEKPYKCPECGKSFS | | HX₂₀X₂₁X₂₂X₂₃X₂₄X₈X₉CX₁₀X₁₁CX₁₂X₁₃X₁₄X₁₅X₁₆SKKHLAEHX₁₇X₁₈ | |
| acg | TGG CCC | | SKKHLAEHQRTHTGEKPYKCPEC | | X₁₉HX₂₀X₂₁X₂₂X₂₃X₂₄X₈X₉CX₁₀X₁₁CX₁₂X₁₃X₁₄X₁₅X₁₆RSDHLTTHX₁₇ | |
| | ACG | | GKSFSRSDHLTTHQRTHTGEKPY | | X₁₈X₁₉HX₂₀X₂₁X₂₂X₂₃X₂₄X₈X₉CX₁₀X₁₁CX₁₂X₁₃X₁₄X₁₅X₁₆TSHSLTEH | |
| | | | KCPECGKSFSTSHSLTEHQRTHT | | X₁₇X₁₈X₁₉HX₂₀X₂₁X₂₂X₂₃X₂₄X₈X₉CX₁₀X₁₁CX₁₂X₁₃X₁₄X₁₅X₁₆DCRDLA | |
| | | | GEKPYKCPECGKSFSDCRDLARH | | RHX₁₇X₁₈X₁₉HX₂₀X₂₁X₂₂X₂₃X₂₄X₈X₉CX₁₀X₁₁CX₁₂X₁₃X₁₄X₁₅X₁₆TSGE | |
| | | | QRTHTGEKPYKCPECGKSFSTSG | | LVRHX₁₇X₁₈X₁₉HX₂₀X₂₁X₂₂X₂₃X₂₄X₈X₉CX₁₀X₁₁CX₁₂XEX₁₄X₁₅X₁₆RK | |
| | | | ELVRHQRTHTGEKPYKCPECGKS | | DNLKNHX₁₇X₁₈X₁₉HX₂₀X₂₁X₂₂X₂₃X₂₄X₂₅X₂₆X₂₇X₂₈X₂₉X₃₀ | |
| | | | FSRKDNLKNHQRTHTGEKPTGKK | | | |
| | | | TS | | | |
| agaaaccta | AGA AAC | 1386 | LEPGEKPYKCPECGKSFSSKKHL | 1935 | X₁X₂X₃X₄X₅X₆X₇X₈X₉CX₁₀X₁₁CX₁₂X₁₃X₁₄X₁₅X₁₆SKKHLAEHX₁₇X₁₈X₁₉ | 2484 |
| aatcccagg | CTA AAT | | AEHQRTHTGEKPYKCPECGKSFS | | HX₂₀X₂₁X₂₂X₂₃X₂₄X₈X₉CX₁₀X₁₁CX₁₂X₁₃X₁₄X₁₅X₁₆RSDHLTNHX₁₇X₁₈ | |
| ccc | CCC AGG | | RSDHLTNHQRTHTGEKPYKCPEC | | X₁₉HX₂₀X₂₁X₂₂X₂₃X₂₄X₈X₉CX₁₀X₁₁CX₁₂X₁₃X₁₄X₁₅X₁₆SKKHLAEHX₁₇ | |
| | CCC | | GKSFSSKKHLAEHQRTHTGEKPY | | X₁₈X₁₉HX₂₀X₂₁X₂₂X₂₃X₂₄X₈X₉CX₁₀X₁₁CX₁₂X₁₃X₁₄X₁₅X₁₆TTGNLTVH | |
| | | | KCPECGKSFSTTGNLTVHQRTHT | | X₁₇X₁₈X₁₉HX₂₀X₂₁X₂₂X₂₃X₂₄X₈X₉CX₁₀X₁₁CX₁₂X₁₃X₁₄X₁₅X₁₆QNSTLT | |
| | | | GEKPYKCPECGKSFSQNSTLTEH | | EHX₁₇X₁₈X₁₉HX₂₀X₂₁X₂₂X₂₃X₂₄X₈X₉CX₁₀X₁₁CX₁₂X₁₃X₁₄X₁₅X₁₆DSGN | |
| | | | QRTHTGEKPYKCPECGKSFSDSG | | LRVHX₁₇X₁₈X₁₉HX₂₀X₂₁X₂₂X₂₃X₂₄X₈X₉CX₁₀X₁₁CX₁₂X₁₃X₁₄X₁₅X₁₆QL | |
| | | | NLRVHQRTHTGEKPYKCPECGKS | | AHLRAHX₁₇X₁₈X₁₉HX₂₀X₂₁X₂₂X₂₃X₂₄X₂₅X₂₆X₂₇X₂₈X₂₉X₃₀ | |
| | | | FSQLAHLRAHQRTHTGEKPTGKK | | | |
| | | | TS | | | |
| aacctaaat | AAC CTA | 1387 | LEPGEKPYKCPECGKSFSRADNL | 1936 | X₁X₂X₃X₄X₅X₆X₇X₈X₉CX₁₀X₁₁CX₁₂X₁₃X₁₄X₁₅X₁₆RADNLTEHX₁₇X₁₈X₁₉ | 2485 |
| cccaggccc | AAT CCC | | TEHQRTHTGEKPYKCPECGKSFS | | HX₂₀X₂₁X₂₂X₂₃X₂₄X₈X₉CX₁₀X₁₁CX₁₂X₁₃X₁₄X₁₅X₁₆SKKHLAEHX₁₇X₁₈ | |
| cag | AGG CCC | | SKKHLAEHQRTHTGEKPYKCPEC | | X₁₉HX₂₀X₂₁X₂₂X₂₃X₂₄X₈X₉CX₁₀X₁₁CX₁₂X₁₃X₁₄X₁₅X₁₆RSDHLTNHX₁₇ | |
| | CAG | | GKSFSRSDHLTNHQRTHTGEKPY | | X₁₈X₁₉HX₂₀X₂₁X₂₂X₂₃X₂₄X₈X₉CX₁₀X₁₁CX₁₂X₁₃X₁₄X₁₅X₁₆SKKHLAEH | |
| | | | KCPECGKSFSSKKHLAEHQRTHT | | X₁₇X₁₈X₁₉HX₂₀X₂₁X₂₂X₂₃X₂₄X₈X₉CX₁₀X₁₁CX₁₂X₁₃X₁₄X₁₅X₁₆TTGNLT | |
| | | | GEKPYKCPECGKSFSTTGNLTVH | | VHX₁₇X₁₈X₁₉HX₂₀X₂₁X₂₂X₂₃X₂₄X₈X₉CX₁₀X₁₁CX₁₂X₁₃X₁₄X₁₅X₁₆QNST | |
| | | | QRTHTGEKPYKCPECGKSFSQNS | | LTEHX₁₇X₁₈X₁₉HX₂₀X₂₁X₂₂X₂₃X₂₄X₈X₉CX₁₀X₁₁CX₁₂X₁₃X₁₄X₁₅X₁₆DS | |
| | | | TLTEHQRTHTGEKPYKCPECGKS | | GNLRVHX₁₇X₁₃X₁₉HX₂₀X₂₁X₂₂X₂₃X₂₄X₂₅X₂₆X₂₇X₂₈X₂₉X₃₀ | |
| | | | FSDSGNLRVHQRTHTGEKPTGKK | | | |
| | | | TS | | | |
| ctaaatccc | CTA AAT | 1388 | LEPGEKPYKCPECGKSFSRRDEL | 1937 | X₁X₂X₃X₄X₅X₆X₇X₈X₉CX₁₀X₁₁CX₁₂X₁₃X₁₄X₁₅X₁₆RRDELNVHX₁₇X₁₈X₁₉ | 2486 |
| aggccccag | CCC AGG | | NVHQRTHTGEKPYKCPECGKSFS | | HX₂₀X₂₁X₂₂X₂₃X₂₄X₈X₉CX₁₀X₁₁CX₁₂X₁₃X₁₄X₁₅X₁₆RADNLTEHX₁₇X₁₈ | |
| atg | CCC CAG | | RADNLTEHQRTHTGEKPYKCPEC | | X₁₉HX₂₀X₂₁X₂₂X₂₃X₂₄X₈X₉CX₁₀X₁₁CX₁₂X₁₃X₁₄X₁₅X₁₆SKKHLAEHX₁₇ | |
| | ATG | | GKSFSSKKHLAEHQRTHTGEKPY | | X₁₈X₁₉HX₂₀X₂₁X₂₂X₂₃X₂₄X₈X₉CX₁₀X₁₁CX₁₂X₁₃X₁₄X₁₅X₁₆RSDHLTNH | |
| | | | KCPECGKSFSRSDHLTNHQRTHT | | X₁₇X₁₈X₁₉HX₂₀X₂₁X₂₂X₂₃X₂₄X₈X₉CX₁₀X₁₁CX₁₂X₁₃X₁₄X₁₅X₁₆SKKHLA | |
| | | | GEKPYKCPECGKSFSSKKHLAEH | | EHX₁₇X₁₈X₁₉HX₂₀X₂₁X₂₂X₂₃X₂₄X₈X₉CX₁₀X₁₁CX₁₂X₁₃X₁₄X₁₅X₁₆TTGN | |
| | | | QRTHTGEKPYKCPECGKSFSTTG | | LTVHX₁₇X₁₈X₁₉HX₂₀X₂₁X₂₂X₂₃X₂₄X₈X₉CX₁₀X₁₁CX₁₂XEX₁₄X₁₅X₁₆QN | |
| | | | NLTVHQRTHTGEKPYKCPECGKS | | STLTEHX₁₇X₁₃X₁₉HX₂₀X₂₁X₂₂X₂₃X₂₄X₂₅X₂₆X₂₇X₂₈X₂₉X₃₀ | |
| | | | FSQNSTLTEHQRTHTGEKPTGKK | | | |
| | | | TS | | | |
| aatcccagg | AAT CCC | 1389 | LEPGEKPYKCPECGKSFSTSHSL | 1938 | X₁X₂X₃X₄X₅X₆X₇X₈X₉CX₁₀X₁₁CX₁₂X₁₃X₁₄X₁₅X₁₆TSHSLTEHX₁₇X₁₈X₁₉ | 2487 |
| ccccagatg | AGG CCC | | TEHQRTHTGEKPYKCPECGKSFS | | HX₂₀X₂₁X₂₂X₂₃X₂₄X₈X₉CX₁₀X₁₁CX₁₂X₁₃X₁₄X₁₅X₁₆RRDELNVHX₁₇X₁₈ | |
| cca | CAG ATG | | RRDELNVHQRTHTGEKPYKCPEC | | X₁₉HX₂₀X₂₁X₂₂X₂₃X₂₄X₈X₉CX₁₀X₁₁CX₁₂X₁₃X₁₄X₁₅X₁₆RADNLTEHX₁₇ | |
| | CCA | | GKSFSRADNLTEHQRTHTGEKPY | | X₁₇X₁₈X₁₉HX₂₀X₂₁X₂₂X₂₃X₂₄X₈X₉CX₁₀X₁₁CX₁₂X₁₃X₁₄X₁₅X₁₆SKKHLAEH | |
| | | | KCPECGKSFSSKKHLAEHQRTHT | | X₁₇X₁₈X₁₉HX₂₀X₂₁X₂₂X₂₃X₂₄X₈X₉CX₁₀X₁₁CX₁₂X₁₃X₁₄X₁₅X₁₆RSDHLT | |
| | | | GEKPYKCPECGKSFSRSDHLTNH | | NHX₁₇X₁₈X₁₉HX₂₀X₂₁X₂₂X₂₃X₂₄X₈X₉CX₁₀X₁₁CX₁₂X₁₃X₁₄X₁₅X₁₆SKKH | |
| | | | QRTHTGEKPYKCPECGKSFSSKK | | LAEHX₁₇X₁₈X₁₉HX₂₀X₂₁X₂₂X₂₃X₂₄X₈X₉CX₁₀X₁₁CX₁₂X₁₃X₁₄X₁₅X₁₆TT | |
| | | | HLAEHQRTHTGEKPYKCPECGKS | | GNLTVHX₁₇X₁₈X₁₉HX₂₀X₂₁X₂₂X₂₃X₂₄X₂₅X₂₆X₂₇X₂₈X₂₉X₃₀ | |
| | | | FSTTGNLTVHQRTHTGEKPTGKK | | | |
| | | | TS | | | |
| caggcccca | CAG GCC | 1390 | LEPGEKPYKCPECGKSFSTTGAL | 1939 | X₁X₂X₃X₄X₅X₆X₇X₈X₉CX₁₀X₁₁CX₁₂X₁₃X₁₄X₁₅X₁₆TTGALTEHX₁₇X₁₈X₁₉ | 2488 |
| gatgccaat | CCA GAT | | TEHQRTHTGEKPYKCPECGKSFS | | HX₂₀X₂₁X₂₂X₂₃X₂₄X₈X₉CX₁₀X₁₁CX₁₂X₁₃X₁₄X₁₅X₁₆TTGNLTVHX₁₇X₁₈ | |
| ctt | GCC AAT | | TTGNLTVHQRTHTGEKPYKCPEC | | X₁₉HX₂₀X₂₁X₂₂X₂₃X₂₄X₈X₉CX₁₀X₁₁CX₁₂X₁₃X₁₄X₁₅X₁₆DCRDLARHX₁₇ | |
| | CTT | | GKSFSDCRDLARHQRTHTGEKPY | | X₁₈X₁₉HX₂₀X₂₁X₂₂X₂₃X₂₄X₈X₉CX₁₀X₁₁CX₁₂X₁₃X₁₄X₁₅X₁₆TSGNLVRH | |
| | | | KCPECGKSFSTSGNLVRHQRTHT | | X₁₇X₁₈X₁₉HX₂₀X₂₁X₂₂X₂₃X₂₄X₈X₉CX₁₀X₁₁CX₁₂X₁₃X₁₄X₁₅X₁₆TSHSLT | |
| | | | GEKPYKCPECGKSFSTSHSLTEH | | EHX₁₇X₁₈X₁₉HX₂₀X₂₁X₂₂X₂₃X₂₄X₈X₉CX₁₀X₁₁CX₁₂X₁₃X₁₄X₁₅X₁₆DCRD | |
| | | | QRTHTGEKPYKCPECGKSFSDCR | | LARHX₁₇X₁₈X₁₉HX₂₀X₂₁X₂₂X₂₃X₂₄X₈X₉CX₁₀X₁₁CX₁₂X₁₃X₁₄X₁₅X₁₆RA | |
| | | | DLARHQRTHTGEKPYKCPECGKS | | DNLTEHX₁₇X₁₈X₁₉HX₂₀X₂₁X₂₂X₂₃X₂₄X₂₅X₂₆X₂₇X₂₈X₂₉X₃₀ | |
| | | | FSRADNLTEHQRTHTGEKPTGKK | | | |
| | | | TS | | | |
| gatgccaat | GAT GCC | 1391 | LEPGEKPYKCPECGKSFSTKNSL | 1940 | X₁X₂X₃X₄X₅X₆X₇X₈X₉CX₁₀X₁₁CX₁₂X₁₃X₁₄X₁₅X₁₆TKNSLTEHX₁₇X₁₈X₁₉ | 2489 |
| cttctggat | AAT CTT | | TEHQRTHTGEKPYKCPECGKSFS | | HX₂₀X₂₁X₂₂X₂₃X₂₄X₈X₉CX₁₀X₁₁CX₁₂X₁₃X₁₄X₁₅X₁₆TSGNLVRHX₁₇X₁₈ | |
| cct | CTG GAT | | TSGNLVRHQRTHTGEKPYKCPEC | | X₁₉HX₂₀X₂₁X₂₂X₂₃X₂₄X₈X₉CX₁₀X₁₁CX₁₂X₁₃X₁₄X₁₅X₁₆RNDALTEHX₁₇ | |
| | CCT | | GKSFSRNDALTEHQRTHTGEKPY | | X₁₈X₁₉HX₂₀X₂₁X₂₂X₂₃X₂₄X₈X₉CX₁₀X₁₁CX₁₂X₁₃X₁₄X₁₅X₁₆TTGALTEH | |
| | | | KCPECGKSFSTTGALTEHQRTHT | | X₁₇X₁₈X₁₉HX₂₀X₂₁X₂₂X₂₃X₂₄X₈X₉CX₁₀X₁₁CX₁₂X₁₃X₁₄X₁₅X₁₆TTGNLT | |
| | | | GEKPYKCPECGKSFSTTGNLTVH | | VHX₁₇X₁₈X₁₉HX₂₀X₂₁X₂₂X₂₃X₂₄X₈X₉CX₁₀X₁₁CX₁₂X₁₃X₁₄X₁₅X₁₆DCRD | |
| | | | QRTHTGEKPYKCPECGKSFSDCR | | LARHX₁₇X₁₈X₁₉HX₂₀X₂₁X₂₂X₂₃X₂₄X₈X₉CX₁₀X₁₁CX₁₂X₁₃X₁₄X₁₅X₁₆TS | |
| | | | DLARHQRTHTGEKPYKCPECGKS | | GNLVRHX₁₇X₁₈X₁₉HX₂₀X₂₁X₂₂X₂₃X₂₄X₂₅X₂₆X₂₇X₂₈X₂₉X₃₀ | |
| | | | FSTSGNLVRHQRTHTGEKPTGKK | | | |
| | | | TS | | | |
| gccccagat | GCC CCA | 1392 | LEPGEKPYKCPECGKSFSRNDAL | 1941 | X₁X₂X₃X₄X₅X₆X₇X₈X₉CX₁₀X₁₁CX₁₂X₁₃X₁₄X₁₅X₁₆RNDALTEHX₁₇X₁₈X₁₉ | 2490 |
| gccaatctt | GAT GCC | | TEHQRTHTGEKPYKCPECGKSFS | | HX₂₀X₂₁X₂₂X₂₃X₂₄X₈X₉CX₁₀X₁₁CX₁₂X₁₃X₁₄X₁₅X₁₆TTGALTEHX₁₇X₁₈ | |
| ctg | AAT CTT | | TTGALTEHQRTHTGEKPYKCPEC | | X₁₉HX₂₀X₂₁X₂₂X₂₃X₂₄X₈X₉CX₁₀X₁₁CX₁₂X₁₃X₁₄X₁₅X₁₆TTGNLTVHX₁₇ | |
| | CTG | | GKSFSTTGNLTVHQRTHTGEKPY | | X₁₈X₁₉HX₂₀X₂₁X₂₂X₂₃X₂₄X₈X₉CX₁₀X₁₁CX₁₂X₁₃X₁₄X₁₅X₁₆DCRDLARH | |
| | | | KCPECGKSFSDCRDLARHQRTHT | | X₁₇X₁₈X₁₉HX₂₀X₂₁X₂₂X₂₃X₂₄X₈X₉CX₁₀X₁₁CX₁₂X₁₃X₁₄X₁₅X₁₆TSGNLV | |
| | | | GEKPYKCPECGKSFSTSGNLVRH | | RHX₁₇X₁₈X₁₉HX₂₀X₂₁X₂₂X₂₃X₂₄X₈X₉CX₁₀X₁₁CX₁₂X₁₃X₁₄X₁₅X₁₆TSHS | |
| | | | QRTHTGEKPYKCPECGKSFSTSH | | LTEHX₁₇X₁₈X₁₉HX₂₀X₂₁X₂₂X₂₃X₂₄X₈X₉CX₁₀X₁₁CX₁₂X₁₃X₁₄X₁₅X₁₆DC | |
| | | | SLTEHQRTHTGEKPYKCPECGKS | | RDLARHX₁₇X₁₈X₁₉HX₂₀X₂₁X₂₂X₂₃X₂₄X₂₅X₂₆X₂₇X₂₈X₂₉X₃₀ | |
| | | | FSDCRDLARHQRTHTGEKPTGKK | | | |
| | | | TS | | | |
| ccagatgcc | CCA GAT | 1393 | LEPGEKPYKCPECGKSFSTSGNL | 1942 | X₁X₂X₃X₄X₅X₆X₇X₈X₉CX₁₀X₁₁CX₁₂X₁₃X₁₄X₁₅X₁₆TSGNLVRHX₁₇X₁₈X₁₉ | 2491 |
| aatcttctg | GCC AAT | | VRHQRTHTGEKPYKCPECGKSFS | | HX₂₀X₂₁X₂₂X₂₃X₂₄X₈X₉CX₁₀X₁₁CX₁₂XEX₁₄X₁₅X₁₆RNDALTEHX₁₇X₁₈ | |
| gat | CTT CTG | | RNDALTEHQRTHTGEKPYKCPEC | | X₁₉HX₂₀X₂₁X₂₂X₂₃X₂₄X₈X₉CX₁₀X₁₁CX₁₂X₁₃X₁₄X₁₅X₁₆TTGALTEHX₁₇ | |
| | GAT | | GKSFTTGALTEHQRTHTGEKPY | | X₁₈X₁₉HX₂₀X₂₁X₂₂X₂₃X₂₄X₈X₉CX₁₀X₁₁CX₁₂X₁₃X₁₄X₁₅X₁₆TTGNLTVH | |
| | | | KCPECGKSFSTTGNLTVHQRTHT | | X₁₇X₁₈X₁₉HX₂₀X₂₁X₂₂X₂₃X₂₄X₈X₉CX₁₀X₁₁CX₁₂X₁₃X₁₄X₁₅X₁₆DCRDLA | |
| | | | GEKPYKCPECGKSFSDCRDLARH | | RHX₁₇X₁₈X₁₉HX₂₀X₂₁X₂₂X₂₃X₂₄X₈X₉CX₁₀X₁₁CX₁₂X₁₃X₁₄X₁₅X₁₆TSGN | |
| | | | QRTHTGEKPYKCPECGKSFSTSG | | LVRHX₁₇X₁₈X₁₉HX₂₀X₂₁X₂₂X₂₃X₂₄X₈X₉CX₁₀X₁₁CX₁₂X₁₃X₁₄X₁₅X₁₆TS | |
| | | | NLVRHQRTHTGEKPYKCPECGKS | | HSLTEHX₁₇X₁₈X₁₉HX₂₀X₂₁X₂₂X₂₃X₂₄X₂₅X₂₆X₂₇X₂₈X₂₉X₃₀ | |
| | | | FSTSHSLTEHQRTHTGEKPTGKK | | | |
| | | | TS | | | |
| ctgggagca | CTG GGA | 1394 | LEPGEKPYKCPECGKSFSQRAHL | 1943 | X₁X₂X₃X₄X₅X₆X₇X₈X₉CX₁₀X₁₁CX₁₂X₁₃X₁₄X₁₅X₁₆QRAHLERHX₁₇X₁₈X₁₉ | 2492 |
| gaatggact | GCA GAA | | ERHQRTHTGEKPYKCPECGKSFS | | HX₂₀X₂₁X₂₂X₂₃X₂₄X₈X₉CX₁₀X₁₁CX₁₂X₁₃X₁₄X₁₅X₁₆THLDLIRHX₁₇X₁₈ | |
| gga | TGG ACT | | THLDLIRHQRTHTGEKPYKCPEC | | X₁₉HX₂₀X₂₁X₂₂X₂₃X₂₄X₈X₉CX₁₀X₁₁CX₁₂X₁₃X₁₄X₁₅X₁₆RSDHLTTHX₁₇ | |
| | GGA | | GKSFSRSDHLTTHQRTHTGEKPY | | X₁₈X₁₉HX₂₀X₂₁X₂₂X₂₃X₂₄X₈X₉CX₁₀X₁₁CX₁₂X₁₃X₁₄X₁₅X₁₆QSSNLVRH | |
| | | | KCPECGKSFSQSSNLVRHQRTHT | | X₁₇X₁₈X₁₉HX₂₀X₂₁X₂₂X₂₃X₂₄X₈X₉CX₁₀X₁₁CX₁₂X₁₃X₁₄X₁₅X₁₆QSGDLR | |
| | | | GEKPYKCPECGKSFSQSGDLRRH | | RHX₁₇X₁₈X₁₉HX₂₀X₂₁X₂₂X₂₃X₂₄X₈X₉CX₁₀X₁₁CX₁₂X₁₃X₁₄X₁₅X₁₆QRAH | |
| | | | QRTHTGEKPYKCPECGKSFSQRA | | LERHX₁₇X₁₈X₁₉HX₂₀X₂₁X₂₂X₂₃X₂₄X₈X₉CX₁₀X₁₁CX₁₂X₁₃X₁₄X₁₅X₁₆RN | |
| | | | HLERHQRTHTGEKPYKCPECGKS | | DALTEHX₁₇X₁₃X₁₉HX₂₀X₂₁X₂₂X₂₃X₂₄X₂₅X₂₆X₂₇X₂₈X₂₉X₃₀ | |
| | | | FSRNDALTEHQRTHTGEKPTGKK | | | |
| | | | TS | | | |
| cccctggga | CCC CTG | 1395 | LEPGEKPYKCPECGKSFSTHLDL | 1944 | X₁X₂X₃X₄X₅X₆X₇X₈X₉CX₁₀X₁₁CX₁₂X₁₃X₁₄X₁₅X₁₆THLDLIRHX₁₇X₁₈X₁₉ | 2493 |
| gcagaatgg | GGA GCA | | IRHQRTHTGEKPYKCPECGKSFS | | HX₂₀X₂₁X₂₂X₂₃X₂₄X₈X₉CX₁₀X₁₁CX₁₂X₁₃X₁₄X₁₅X₁₆RSDHLTTHX₁₇X₁₈ | |
| act | GAA TGG | | RSDHLTTHQRTHTGEKPYKCPEC | | X₁₉HX₂₀X₂₁X₂₂X₂₃X₂₄X₈X₉CX₁₀X₁₁CX₁₂X₁₃X₁₄X₁₅X₁₆QSSNLVRHX₁₁ | |
| | ACT | | GKSFSQSSNLVRHQRTHTGEKPY | | X₁₈X₁₉HX₂₀X₂₁X₂₂X₂₃X₂₄X₈X₉CX₁₀X₁₁CX₁₂X₁₃X₁₄X₁₅X₁₆QSGDLRRH | |
| | | | KCPECGKSFSQSGDLRRHQRTHT | | X₁₇X₁₈X₁₉HX₂₀X₂₁X₂₂X₂₃X₂₄X₈X₉CX₁₀X₁₁CX₁₂X₁₃X₁₄X₁₅X₁₆QRAHLE | |
| | | | GEKPYKCPECGKSFSQRAHLERH | | RHX₁₇X₁₈X₁₉HX₂₀X₂₁X₂₂X₂₃X₂₄X₈X₉CX₁₀X₁₁CX₁₂X₁₃X₁₄X₁₅X₁₆RNDA | |
| | | | QRTHTGEKPYKCPECGKSFSRND | | LTEHX₁₇X₁₈X₁₉HX₂₀X₂₁X₂₂X₂₃X₂₄X₈X₉CX₁₀X₁₁CX₁₂X₁₃X₁₄X₁₅X₁₆SK | |
| | | | ALTEHQRTHTGEKPYKCPECGKS | | KHLAEHX₁₇X₁₃X₁₉HX₂₀X₂₁X₂₂X₂₃X₂₄X₂₅X₂₆X₂₇X₂₈X₂₉X₃₀ | |
| | | | FSSKKHLAEHQRTHTGEKPTGKK | | | |
| | | | TS | | | |
| ggagcagaa | GGA GCA | 1396 | LEPGEKPYKCPECGKSFSHRTTL | 1945 | X₁X₂X₃X₄X₅X₆X₇X₈X₉CX₁₀X₁₁CX₁₂X₁₃X₁₄X₁₅X₁₆HRTTLTNHX₁₇X₁₈X₁₉ | 2494 |
| tggactgga | GAA TGG | | TNHQRTHTGEKPYKCPECGKSFS | | HX₂₀X₂₁X₂₂X₂₃X₂₄X₈X₉CX₁₀X₁₁CX₁₂XEX₁₄X₁₅X₁₆QRAHLERHX₁₇X₁₈ | |
| agt | ACT GGA | | QRAHLERHQRTHTGEKPYKCPEC | | X₁₉HX₂₀X₂₁X₂₂X₂₃X₂₄X₈X₉CX₁₀X₁₁CX₁₂X₁₃X₁₄X₁₅X₁₆THLDLIRHX₁₇ | |
| | AGT | | GKSFSTHLDLIRHQRTHTGEKPY | | X₁₈X₁₉HX₂₀X₂₁X₂₂X₂₃X₂₄X₈X₉CX₁₀X₁₁CX₁₂X₁₃X₁₄X₁₅X₁₆RSDHLTTH | |
| | | | KCPECGKSFSRSDHLTTHQRTHT | | X₁₇X₁₈X₁₉HX₂₀X₂₁X₂₂X₂₃X₂₄X₈X₉CX₁₀X₁₁CX₁₂X₁₃X₁₄X₁₅X₁₆QSSNLV | |
| | | | GEKPYKCPECGKSFSQSSNLVRH | | RHX₁₇X₁₈X₁₉HX₂₀X₂₁X₂₂X₂₃X₂₄X₈X₉CX₁₀X₁₁CX₁₂X₁₃X₁₄X₁₅X₁₆QSGD | |
| | | | QRTHTGEKPYKCPECGKSFSQSG | | LRRHX₁₇X₁₈X₁₉HX₂₀X₂₁X₂₂X₂₃X₂₄X₈X₉CX₁₀X₁₁CX₁₂X₁₃X₁₄X₁₅X₁₆QR | |
| | | | DLRRHQRTHTGEKPYKCPECGKS | | AHLERHX₁₇X₁₈X₁₉HX₂₀X₂₁X₂₂X₂₃X₂₄X₂₅X₂₆X₂₇X₂₈X₂₉X₃₀ | |
| | | | FSQRAHLERHQRTHTGEKPTGKK | | | |
| | | | TS | | | |
| gttcccctg | GTT CCC | 1397 | LEPGEKPYKCPECGKSFSRSDHL | 1946 | X₁X₂X₃X₄X₅X₆X₇X₈X₉CX₁₀X₁₁CX₁₂X₁₃X₁₄X₁₅X₁₆RSDHLTTHX₁₇X₁₈X₁₉ | 2495 |
| ggagcagaa | CTG GGA | | TTHQRTHTGEKPYKCPECGKSFS | | HX₂₀X₂₁X₂₂X₂₃X₂₄X₈X₉CX₁₀X₁₁CX₁₂X₁₃X₁₄X₁₅X₁₆QSSNLVRHX₁₇X₁₈ | |
| tgg | GCA GAA | | QSSNLVRHQRTHTGEKPYKCPEC | | X₁₉HX₂₀X₂₁X₂₂X₂₃X₂₄X₈X₉CX₁₀X₁₁CX₁₂X₁₃X₁₄X₁₅X₁₆QSGDLRRHX₁₇ | |
| | TGG | | GKSFSQSGDLRRHQRTHTGEKPY | | X₁₈X₁₉HX₂₀X₂₁X₂₂X₂₃X₂₄X₈X₉CX₁₀X₁₁CX₁₂X₁₃X₁₄X₁₅X₁₆QRAHLERH | |
| | | | KCPECGKSFSQRAHLERHQRTHT | | X₁₇X₁₈X₁₉HX₂₀X₂₁X₂₂X₂₃X₂₄X₈X₉CX₁₀X₁₁CX₁₂X₁₃X₁₄X₁₅X₁₆RNDALT | |
| | | | GEKPYKCPECGKSFSRNDALTEH | | EHX₁₇X₁₈X₁₉HX₂₀X₂₁X₂₂X₂₃X₂₄X₈X₉CX₁₀X₁₁CX₁₂X₁₃X₁₄X₁₅X₁₆SKKH | |
| | | | QRTHTGEKPYKCPECGKSFSSKK | | LAEHX₁₇X₁₈X₁₉HX₂₀X₂₁X₂₂X₂₃X₂₄X₈X₉CX₁₀X₁₁CX₁₂X₁₃X₁₄X₁₅X₁₆TS | |
| | | | HLAEHQRTHTGEKPYKCPECGKS | | GSLVRHX₁₇X₁₈X₁₉HX₂₀X₂₁X₂₂X₂₃X₂₄X₂₅X₂₆X₂₇X₂₈X₂₉X₃₀ | |
| | | | FSTSGSLVRHQRTHTGEKPTGKK | | | |
| | | | TS | | | |
| ccggttccc | CCG GTT | 1398 | LEPGEKPYKCPECGKSFSQSSNL | 1947 | X₁X₂X₃X₄X₅X₆X₇X₈X₉CX₁₀X₁₁CX₁₂X₁₃X₁₄X₁₅X₁₆QSSNLVRHX₁₇X₁₈X₁₉ | 2496 |
| ctgggagca | CCC CTG | | VRHQRTHTGEKPYKCPECGKSFS | | HX₂₀X₂₁X₂₂X₂₃X₂₄X₈X₉CX₁₀X₁₁CX₁₂X₁₃X₁₄X₁₅X₁₆QSGDLRRHX₁₇X₁₈ | |
| gaa | GGA GCA | | QSGDLRRHQRTHTGEKPYKCPEC | | X₁₉HX₂₀X₂₁X₂₂X₂₃X₂₄X₈X₉CX₁₀X₁₁CX₁₂X₁₃X₁₄X₁₅X₁₆QRAHLERHX₁₇ | |
| | GAA | | GKSFSQRAHLERHQRTHTGEKPY | | X₁₈X₁₉HX₂₀X₂₁X₂₂X₂₃X₂₄X₈X₉CX₁₀X₁₁CX₁₂X₁₃X₁₄X₁₅X₁₆RNDALTEH | |
| | | | KCPECGKSFSRNDALTEHQRTHT | | X₁₇X₁₈X₁₉HX₂₀X₂₁X₂₂X₂₃X₂₄X₈X₉CX₁₀X₁₁CX₁₂X₁₃X₁₄X₁₅X₁₆SKKHLA | |
| | | | GEKPYKCPECGKSFSSKKHLAEH | | EHX₁₇X₁₈X₁₉HX₂₀X₂₁X₂₂X₂₃X₂₄X₈X₉CX₁₀X₁₁CX₁₂X₁₃X₁₄X₁₅X₁₆TSGS | |
| | | | QRTHTGEKPYKCPECGKSFSTSG | | LVRHX₁₇X₁₈X₁₉HX₂₀X₂₁X₂₂X₂₃X₂₄X₈X₉CX₁₀X₁₁CX₁₂X₁₃X₁₄X₁₅X₁₆RN | |
| | | | SLVRHQRTHTGEKPYKCPECGKS | | DTLTEHX₁₇X₁₃X₁₉HX₂₀X₂₁X₂₂X₂₃X₂₄X₂₅X₂₆X₂₇X₂₈X₂₉X₃₀ | |
| | | | FSRNDTLTEHQRTHTGEKPTGKK | | | |
| | | | TS | | | |
| tgggagcag | TGG gag | 1399 | LEPGEKPYKCPECGKSFSQSSNL | 1948 | X₁X₂X₃X₄X₅X₆X₇X₈X₉CX₁₀X₁₁CX₁₂X₁₃X₁₄X₁₅X₁₆QSSNLVRHX₁₇X₁₈X₁₉ | 2497 |
| aatggactg | CAG AAT | | VRHQRTHTGEKPYKCPECGKSFS | | HX₂₀X₂₁X₂₂X₂₃X₂₄X₈X₉CX₁₀X₁₁CX₁₂X₁₃X₁₄X₁₅X₁₆RNDALTEHX₁₇X₁₈ | |
| gaa | GGA CTG | | RNDALTEHQRTHTGEKPYKCPEC | | X₁₉HX₂₀X₂₁X₂₂X₂₃X₂₄X₈X₉CX₁₀X₁₁CX₁₂X₁₃X₁₄X₁₅X₁₆QRAHLERHX₁₇ | |
| | GAA | | GKSFSQRAHLERHQRTHTGEKPY | | X₁₈X₁₉HX₂₀X₂₁X₂₂X₂₃X₂₄X₈X₉CX₁₀X₁₁CX₁₂X₁₃X₁₄X₁₅X₁₆TTGNLTVH | |
| | | | KCPECGKSFSTTGNLTVHQRTHT | | X₁₇X₁₈X₁₉HX₂₀X₂₁X₂₂X₂₃X₂₄X₈X₉CX₁₀X₁₁CX₁₂X₁₃X₁₄X₁₅X₁₆RADNLT | |
| | | | GEKPYKCPECGKSFSRADNLTEH | | EHX₁₇X₁₈X₁₉HX₂₀X₂₁X₂₂X₂₃X₂₄X₈X₉CX₁₀X₁₁CX₁₂X₁₃X₁₄X₁₅X₁₆RSDN | |
| | | | QRTHTGEKPYKCPECGKSFSRSD | | LVRHX₁₇X₁₈X₁₉HX₂₀X₂₁X₂₂X₂₃X₂₄X₈X₉CX₁₀X₁₁CX₁₂X₁₃X₁₄X₁₅X₁₆RS | |
| | | | NLVRHQRTHTGEKPYKCPECGKS | | DHLTTHX₁₇X₁₈X₁₉HX₂₀X₂₁X₂₂X₂₃X₂₄X₂₅X₂₆X₂₇X₂₈X₂₉X₃₀ | |
| | | | FSRSDHLTTHQRTHTGEKPTGKK | | | |
| ccctgggag | CCC TGG | 1400 | LEPGEKPYKCPECGKSFSRNDAL | 1949 | X₁X₂X₃X₄X₅X₆X₇X₈X₉CX₁₀X₁₁CX₁₂X₁₃X₁₄X₁₅X₁₆RNDALTEHX₁₇X₁₈X₁₉ | 2498 |
| cagaatgga | gag CAG | | TEHQRTHTGEKPYKCPECGKSFS | | HX₂₀X₂₁X₂₂X₂₃X₂₄X₈X₉CX₁₀X₁₁CX₁₂X₁₃X₁₄X₁₅X₁₆QRAHLERHX₁₇X₁₈ | |
| ctg | AAT GGA | | QRAHLERHQRTHTGEKPYKCPEC | | X₁₉HX₂₀X₂₁X₂₂X₂₃X₂₄X₈X₉CX₁₀X₁₁CX₁₂X₁₃X₁₄X₁₅X₁₆TTGNLTVHX₁₇ | |
| | CTG | | GKSFSTTGNLTVHQRTHTGEKPY | | X₁₈X₁₉HX₂₀X₂₁X₂₂X₂₃X₂₄X₈X₉CX₁₀X₁₁CX₁₂X₁₃X₁₄X₁₅X₁₆RADNLTEH | |
| | | | KCPECGKSFSRADNLTEHQRTHT | | X₁₇X₁₈X₁₉HX₂₀X₂₁X₂₂X₂₃X₂₄X₈X₉CX₁₀X₁₁CX₁₂X₁₃X₁₄X₁₅X₁₆RSDNLV | |
| | | | GEKPYKCPECGKSFSRSDNLVRH | | RHX₁₇X₁₈X₁₉HX₂₀X₂₁X₂₂X₂₃X₂₄X₈X₉CX₁₀X₁₁CX₁₂X₁₃X₁₄X₁₅X₁₆RSDH | |
| | | | QRTHTGEKPYKCPECGKSFSRSD | | LTTHX₁₇X₁₈X₁₉HX₂₀X₂₁X₂₂X₂₃X₂₄X₈X₉CX₁₀X₁₁CX₁₂X₁₃X₁₄X₁₅X₁₆SK | |
| | | | HLTTHQRTHTGEKPYKCPECGKS | | KHLAEHX₁₇X₁₈X₁₉HX₂₀X₂₁X₂₂X₂₃X₂₄X₂₅X₂₆X₂₇X₂₈X₂₉X₃₀ | |
| | | | FSSKKHLAEHQRTHTGEKPTGKK | | | |
| | | | TS | | | |
| ctggaagtt | CTG GAA | 1401 | LEPGEKPYKCPECGKSFSRADNL | 1950 | X₁X₂X₃X₄X₅X₆X₇X₈X₉CX₁₀X₁₁CX₁₂X₁₃X₁₄X₁₅X₁₆RADNLTEHX₁₇X₁₈X₁₉ | 2499 |
| tgggagggc | GTT TGG | | TEHQRTHTGEKPYKCPECGKSFS | | HX₂₀X₂₁X₂₂X₂₃X₂₄X₈X₉CX₁₀X₁₁CX₁₂X₁₃X₁₄X₁₅X₁₆DPGHLVRHX₁₇X₁₈ | |
| cag | GAG GGC | | DPGHLVRHQRTHTGEKPYKCPEC | | X₁₉HX₂₀X₂₁X₂₂X₂₃X₂₄X₈X₉CX₁₀X₁₁CX₁₂X₁₃X₁₄X₁₅X₁₆RSDNLVRHX₁₇ | |
| | CAG | | GKSFSRSDNLVRHQRTHTGEKPY | | X₁₈X₁₉HX₂₀X₂₁X₂₂X₂₃X₂₄X₈X₉CX₁₀X₁₁CX₁₂X₁₃X₁₄X₁₅X₁₆RSDHLTTH | |
| | | | KCPECGKSFSRSDHLTTHQRTHT | | X₁₇X₁₈X₁₉HX₂₀X₂₁X₂₂X₂₃X₂₄X₈X₉CX₁₀X₁₁CX₁₂X₁₃X₁₄X₁₅X₁₆TSGSLV | |
| | | | GEKPYKCPECGKSFSTSGSLVRH | | RHX₁₇X₁₈X₁₉HX₂₀X₂₁X₂₂X₂₃X₂₄X₈X₉CX₁₀X₁₁CX₁₂X₁₃X₁₄X₁₅X₁₆QSSN | |
| | | | QRTHTGEKPYKCPECGKSFSQSS | | LVRHX₁₇X₁₈X₁₉HX₂₀X₂₁X₂₂X₂₃X₂₄X₈X₉CX₁₀X₁₁CX₁₂X₁₃X₁₄X₁₅X₁₆RN | |
| | | | NLVRHQRTHTGEKPYKCPECGKS | | DALTEHX₁₇X₁₈X₁₉HX₂₀X₂₁X₂₂X₂₃X₂₄X₂₅X₂₆X₂₇X₂₈X₂₉X₃₀ | |
| | | | FSRNDALTEHQRTHTGEKPTGKK | | | |
| | | | TS | | | |
| gaagtttgg | GAA GTT | 1402 | LEPGEKPYKCPECGKSFSHKNAL | 1951 | X₁X₂X₃X₄X₅X₆X₇X₈X₉CX₁₀X₁₁CX₁₂X₁₃X₁₄X₁₅X₁₆HKNALQNHX₁₇X₁₈X₁₉ | 2500 |
| gagggccag | TGG GAG | | QNHQRTHTGEKPYKCPECGKSFS | | HX₂₀X₂₁X₂₂X₂₃X₂₄X₈X₉CX₁₀X₁₁CX₁₂XEX₁₄X₁₅X₁₆RADNLTEHX₁₇X₁₈ | |
| att | GGC CAG | | RADNLTEHQRTHTGEKPYKCPEC | | X₁₉HX₂₀X₂₁X₂₂X₂₃X₂₄X₈X₉CX₁₀X₁₁CX₁₂X₁₃X₁₄X₁₅X₁₆DPGHLVRHX₁₇ | |
| | ATT | | GKSFSDPGHLVRHQRTHTGEKPY | | X₁₈X₁₉HX₂₀X₂₁X₂₂X₂₃X₂₄X₈X₉CX₁₀X₁₁CX₁₂X₁₃X₁₄X₁₅X₁₆RSDNLVRH | |
| | | | KCPECGKSFSRSDNLVRHQRTHT | | X₁₇X₁₈X₁₉HX₂₀X₂₁X₂₂X₂₃X₂₄X₈X₉CX₁₀X₁₁CX₁₂X₁₃X₁₄X₁₅X₁₆RSDHLT | |
| | | | GEKPYKCPECGXSFSRSDHLTTH | | THX₁₇X₁₈X₁₉HX₂₀X₂₁X₂₂X₂₃X₂₄X₈X₉CX₁₀X₁₁CX₁₂X₁₃X₁₄X₁₅X₁₆TSGS | |
| | | | QRTHTGEKPYKCPECGKSFSTSG | | LVRHX₁₇X₁₈X₁₉HX₂₀X₂₁X₂₂X₂₃X₂₄X₈X₉CX₁₀X₁₁CX₁₂X₁₃X₁₄X₁₅X₁₆QS | |
| | | | SLVRHQRTHTGEKPYKCPECGKS | | SNLVRHX₁₇X₁₈X₁₉HX₂₀X₂₁X₂₂X₂₃X₂₄X₂₅X₂₆X₂₇X₂₈X₂₉X₃₀ | |
| | | | FSQSSNLVRHQRTHTGEKPTGKK | | | |
| | | | TS | | | |
| gtttgggag | GTT TGG | 1403 | LEPGEKPYKCPECGKSFSSKKAL | 1952 | X₁X₂X₃X₄X₅X₆X₇X₈X₉CX₁₀X₁₁CX₁₂X₁₃X₁₄X₁₅X₁₆TSGSLVRHX₁₇X₁₈X₁₉ | 2501 |
| ggccagatt | GAG GGC | | TEHQRTHTGEKPYKCPECGKSFS | | HX₂₀X₂₁X₂₂X₂₃X₂₄X₈X₉CX₁₀X₁₁CX₁₂X₁₃X₁₄X₁₅X₁₆QSSNLVRHX₁₇X₁₈ | |
| cac | CAG ATT | | HKNALQNHQRTHTGEKPYKCPEC | | X₁₉HX₂₀X₂₁X₂₂X₂₃X₂₄X₈X₉CX₁₀X₁₁CX₁₂X₁₃X₁₄X₁₅X₁₆RNDALTEHX₁₇ | |
| | CAC | | GKSFSRADNLTEHQRTHTGEKPY | | X₁₈X₁₉HX₂₀X₂₁X₂₂X₂₃X₂₄X₈X₉CX₁₀X₁₁CX₁₂X₁₃X₁₄X₁₅X₁₆QRAHLERH | |
| | | | KCPECGKSFSDPGHLVRHQRTHT | | X₁₇X₁₈X₁₉HX₂₀X₂₁X₂₂X₂₃X₂₄X₈X₉CX₁₀X₁₁CX₁₂X₁₃X₁₄X₁₅X₁₆RSDNLV | |
| | | | GEKPYKCPECGKSFSRSDNLVRH | | RHX₁₇X₁₈X₁₉HX₂₀X₂₁X₂₂X₂₃X₂₄X₈X₉CX₁₀X₁₁CX₁₂X₁₃X₁₄X₁₅X₁₆RSDH | |
| | | | QRTHTGEKPYKCPECGKSFSRSD | | LTTHX₁₇X₁₈X₁₉HX₂₀X₂₁X₂₂X₂₃X₂₄X₈X₉CX₁₀X₁₁CX₁₂X₁₃X₁₄X₁₅X₁₆TS | |
| | | | HLTTHQRTHTGEKPYKCPECGKS | | GSLVRHX₁₇X₁₈X₁₉HX₂₀X₂₁X₂₂X₂₃X₂₄X₂₅X₂₆X₂₇X₂₈X₂₉X₃₀ | |
| | | | FSTSGSLVRHQRTHTGEKPTGKK | | | |
| | | | TS | | | |
| gagcagaat | gag CAG | 1404 | LEPGEKPYKCPECGKSFSTSGSL | 1953 | X₁X₂X₃X₄X₅X₆X₇X₈X₉CX₁₀X₁₁CX₁₂X₁₃X₁₄X₁₅X₁₆TSGSLVRHX₁₇X₁₈X₁₉ | 2502 |
| ggactggaa | AAT GGA | | VRHQRTHTGEKPYKCPECGKSFS | | HX₂₀X₂₁X₂₂X₂₃X₂₄X₈X₉CX₁₀X₁₁CX₁₂X₁₃X₁₄X₁₅X₁₆QSSNLVRHX₁₇X₁₈ | |
| gtt | CTG GAA | | QSSNLVRHQRTHTGEKPYKCPEC | | X₁₉HX₂₀X₂₁X₂₂X₂₃X₂₄X₈X₉CX₁₀X₁₁CX₁₂X₁₃X₁₄X₁₅X₁₆RNDALTEHX₁₇ | |
| | GTT | | GKSFSRNDALTEHQRTHTGEKPY | | X₁₈X₁₉HX₂₀X₂₁X₂₂X₂₃X₂₄X₈X₉CX₁₀X₁₁CX₁₂X₁₃X₁₄X₁₅X₁₆QRAHLERH | |
| | | | KCPECGKSFSQRAHLERHQRTHT | | X₁₇X₁₈X₁₉HX₂₀X₂₁X₂₂X₂₃X₂₄X₈X₉CX₁₀X₁₁CX₁₂X₁₃X₁₄X₁₅X₁₆TTGNLT | |
| | | | GEKPYKCPECGKSFSTTGNLTVH | | VHX₁₇X₁₈X₁₉HX₂₀X₂₁X₂₂X₂₃X₂₄X₈X₉CX₁₀X₁₁CX₁₂X₁₃X₁₄X₁₅X₁₆RADN | |
| | | | QRTHTGEKPYKCPECGKSFSRAD | | LTEHX₁₇X₁₈X₁₉HX₂₀X₂₁X₂₂X₂₃X₂₄X₈X₉CX₁₀X₁₁CX₁₂X₁₃X₁₄X₁₅X₁₆RS | |
| | | | NLTEHQRTHTGEKPYKCPECGKS | | DNLVRHX₁₇X₁₈X₁₉HX₂₀X₂₁X₂₂X₂₃X₂₄X₂₅X₂₆X₂₇X₂₈X₂₉X₃₀ | |
| | | | FSRSDNLVRHQRTHTGEKPTGKK | | | |
| | | | TS | | | |
| aatggactg | AAT GGA | 1405 | LEPGEKPYKCPECGKSFSRSDNL | 1954 | X₁X₂X₃X₄X₅X₆X₇X₈X₉CX₁₀X₁₁CX₁₂X₁₃X₁₄X₁₅X₁₆RSDNLVRHX₁₇X₁₈X₁₉ | 2503 |
| gaagtttgg | CTG GAA | | VRHQRTHTGEKPYKCPECGKSFS | | HX₂₀X₂₁X₂₂X₂₃X₂₄X₈X₉CX₁₀X₁₁CX₁₂X₁₃X₁₄X₁₅X₁₆RSDHLTTHX₁₇X₁₈ | |
| gag | GTT TGG | | RSDHLTTHQRTHTGEKPYKCPEC | | X₁₉HX₂₀X₂₁X₂₂X₂₃X₂₄X₈X₉CX₁₀X₁₁CX₁₂X₁₃X₁₄X₁₅X₁₆TSGSLVRHX₁₇ | |
| | GAG | | GKSFSTSGSLVRHQRTHTGEKPY | | X₁₈X₁₉HX₂₀X₂₁X₂₂X₂₃X₂₄X₈X₉CX₁₀X₁₁CX₁₂X₁₃X₁₄X₁₅X₁₆QSSNLVRH | |
| | | | KCPECGKSFSQSSNLVRHQRTHT | | X₁₇X₁₈X₁₉HX₂₀X₂₁X₂₂X₂₃X₂₄X₈X₉CX₁₀X₁₁CX₁₂X₁₃X₁₄X₁₅X₁₆RNDALT | |
| | | | GEKPYKCPECGKSFSRNDALTEH | | EHX₁₇X₁₈X₁₉HX₂₀X₂₁X₂₂X₂₃X₂₄X₈X₉CX₁₀X₁₁CX₁₂X₁₃X₁₄X₁₅X₁₆QRAH | |
| | | | QRTHTGEKPYKCPECGKSFSQRA | | LERHX₁₇X₁₈X₁₉HX₂₀X₂₁X₂₂X₂₃X₂₄X₈X₉CX₁₀X₁₁CX₁₂X₁₃X₁₄X₁₅X₁₆TT | |
| | | | HLERHQRTHTGEKPYKCPECGKS | | GNLTVHX₁₇X₁₈X₁₉HX₂₀X₂₁X₂₂X₂₃X₂₄X₂₅X₂₆X₂₇X₂₈X₂₉X₃₀ | |
| | | | FSTTGNLTVHQRTHTGEKPTGKK | | | |
| | | | TS | | | |
| ggactggaa | GGA CTG | 1406 | LEPGEKPYKCPECGKSFSDPGHL | 1955 | X₁X₂X₃X₄X₅X₆X₇X₈X₉CX₁₀X₁₁CX₁₂X₁₃X₁₄X₁₅X₁₆DPGHLVRHX₁₇X₁₈X₁₉ | 2504 |
| gtttgggag | GAA GTT | | VRHQRTHTGEKPYKCPECGKSFS | | HX₂₀X₂₁X₂₂X₂₃X₂₄X₈X₉CX₁₀X₁₁CX₁₂X₁₃X₁₄X₁₅X₁₆RSDNLVRHX₁₇X₁₈ | |
| ggc | TGG GAG | | RSDNLVRHQRTHTGEKPYKCPEC | | X₁₉HX₂₀X₂₁X₂₂X₂₃X₂₄X₈X₉CX₁₀X₁₁CX₁₂X₁₃X₁₄X₁₅X₁₆RSDHLTTHX₁₇ | |
| | GGC | | GKSFSRSDHLTTHQRTHTGEKPY | | X₁₈X₁₉HX₂₀X₂₁X₂₂X₂₃X₂₄X₈X₉CX₁₀X₁₁CX₁₂X₁₃X₁₄X₁₅X₁₆TSGSLVRH | |
| | | | KCPECGKSFSTSGSLVRHQRTHT | | X₁₇X₁₈X₁₉HX₂₀X₂₁X₂₂X₂₃X₂₄X₈X₉CX₁₀X₁₁CX₁₂X₁₃X₁₄X₁₅X₁₆QSSNLV | |
| | | | GEKPYKCPECGKSFSQSSNLVRH | | RHX₁₇X₁₈X₁₉HX₂₀X₂₁X₂₂X₂₃X₂₄X₈X₉CX₁₀X₁₁CX₁₂X₁₃X₁₄X₁₅X₁₆RNDA | |
| | | | QRTHTGEKPYKCPECGKSFSRND | | LTEHX₁₇X₁₈X₁₉HX₂₀X₂₁X₂₂X₂₃X₂₄X₈X₉CX₁₀X₁₁CX₁₂XEX₁₄X₁₅X₁₆QR | |
| | | | ALTEHQRTHTGEKPYKCPECGKS | | AHLERHX₁₇X₁₈X₁₉HX₂₀X₂₁X₂₂X₂₃X₂₄X₂₅X₂₆X₂₇X₂₈X₂₉X₃₀ | |
| | | | FSQRAHLERHQRTHTGEKPTGKK | | | |
| | | | TS | | | |
| cagaatgga | CAG AAT | 1407 | LEPGEKPYKCPECGKSFSRSDHL | 1956 | X₁X₂X₃X₄X₅X₆X₇X₈X₉CX₁₀X₁₁CX₁₂X₁₃X₁₄X₁₅X₁₆RSDHLTTHX₁₇X₁₈X₁₉ | 2505 |
| ctggaagtt | GGA CTG | | TTHQRTHTGEKPYKCPECGKSFS | | HX₂₀X₂₁X₂₂X₂₃X₂₄X₈X₉CX₁₀X₁₁CX₁₂X₁₃X₁₄X₁₅X₁₆TSGSLVRHX₁₇X₁₈ | |
| tgg | GAA GTT | | TSGSLVRHQRTHTGEKPYKCPEC | | X₁₉HX₂₀X₂₁X₂₂X₂₃X₂₄X₈X₉CX₁₀X₁₁CX₁₂X₁₃X₁₄X₁₅X₁₆QSSNLVRHX₁₇ | |
| | TGG | | GKSFSQSSNLVRHQRTHTGEKPY | | X₁₈X₁₉HX₂₀X₂₁X₂₂X₂₃X₂₄X₈X₉CX₁₀X₁₁CX₁₂X₁₃X₁₄X₁₅X₁₆RNDALTEH | |
| | | | KCPECGKSFSRNDALTEHQRTHT | | X₁₇X₁₈X₁₉HX₂₀X₂₁X₂₂X₂₃X₂₄X₈X₉CX₁₀X₁₁CX₁₂X₁₃X₁₄X₁₅X₁₆QRAHLE | |
| | | | GEKPYKCPECGKSFSQRAHLERH | | RHX₁₇X₁₈X₁₉HX₂₀X₂₁X₂₂X₂₃X₂₄X₈X₉CX₁₀X₁₁CX₁₂X₁₃X₁₄X₁₅X₁₆TTGN | |
| | | | QRTHTGEKPYKCPECGKSFSTTG | | LTVHX₁₇X₁₈X₁₉HX₂₀X₂₁X₂₂X₂₃X₂₄X₈X₉CX₁₀X₁₁CX₁₂X₁₃X₁₄X₁₅X₁₆RA | |
| | | | NLTVHQRTHTGEKPYKCPECGKS | | DNLTEHX₁₇X₁₈X₁₉HX₂₀X₂₁X₂₂X₂₃X₂₄X₂₅X₂₆X₂₇X₂₈X₂₉X₃₀ | |
| | | | FSRADNLTEHQRTHTGEKPTGKK | | | |
| | | | TS | | | |
| cctgggagc | CCT ggg | 1408 | LEPGEKPYKCPECGKSFSRSDHL | 1957 | X₁X₂X₃X₄X₅X₆X₇X₈X₉CX₁₀X₁₁CX₁₂X₁₃X₁₄X₁₅X₁₆RSDHLTTHX₁₇X₁₈X₁₉ | 2506 |
| agaatggac | AGC AGA | | TTHQRTHTGEKPYKCPECGKSFS | | HX₂₀X₂₁X₂₂X₂₃X₂₄X₈X₉CX₁₀X₁₁CX₁₂X₁₃X₁₄X₁₅X₁₆DPGNLVRHX₁₇X₁₈ | |
| tgg | ATG GAC | | DPGNLVRHQRTHTGEKPYKCPEC | | X₁₉HX₂₀X₂₁X₂₂X₂₃X₂₄X₈X₉CX₁₀X₁₁CX₁₂X₁₃X₁₄X₁₅X₁₆RRDELNVHX₁₇ | |
| | TGG | | GKSFSRRDELNVHQRTHTGEKPY | | X₁₈X₁₉HX₂₀X₂₁X₂₂X₂₃X₂₄X₈X₉CX₁₀X₁₁CX₁₂X₁₃X₁₄X₁₅X₁₆QLAHLRAH | |
| | | | KCPECGKSFSQLAHLRAHQRTHT | | X₁₇X₁₈X₁₉HX₂₀X₂₁X₂₂X₂₃X₂₄X₈X₉CX₁₀X₁₁CX₁₂X₁₃X₁₄X₁₅X₁₆ERSHLR | |
| | | | GEKPYKCPECGKSFSERSHLREH | | EHX₁₇X₁₈X₁₉HX₂₀X₂₁X₂₂X₂₃X₂₄X₈X₉CX₁₀X₁₁CX₁₂X₁₃X₁₄X₁₅X₁₆RSDK | |
| | | | QRTHTGEKPYKCPECGKSFSRSD | | LVRHX₁₇X₁₈X₁₉HX₂₀X₂₁X₂₂X₂₃X₂₄K₈X₉CX₁₀X₁₁CX₁₂X₁₃X₁₄X₁₅X₁₆TK | |
| | | | KLVRHQRTHTGEKPYKCPECGKS | | NSLTEHX₁₇X₁₈X₁₉HX₂₀X₂₁X₂₂X₂₃X₂₄X₂₅X₂₆X₂₇X₂₈X₂₉X₃₀ | |
| | | | FSTKNSLTEHQRTHTGEKPTGKK | | | |
| | | | TS | | | |
| gggagcaga | ggg AGC | 1409 | LEPGEKPYKCPECGKSFSRKDNL | 1958 | X₁X₂X₃X₄X₅X₆X₇X₈X₉CX₁₀X₁₁CX₁₂X₁₃X₁₄X₁₅X₁₆RKDNLKNHX₁₇X₁₈X₁₉ | 2507 |
| atggactgg | AGA ATG | | KNHQRTHTGEKPYKCPECGKSFS | | HX₂₀X₂₁X₂₂X₂₃X₂₄X₈X₉CX₁₀X₁₁CX₁₂X₁₃X₁₄X₁₅X₁₆RSDHLTTHX₁₇X₁₈ | |
| aag | GAC TGG | | RSDHLTTHQRTHTGEKPYKCPEC | | X₁₉HX₂₀X₂₁X₂₂X₂₃X₂₄X₈X₉CX₁₀X₁₁CX₁₂X₁₃X₁₄X₁₅X₁₆DPGNLVRHX₁₇ | |
| | AAG | | GKSFSDPGNLVRHQRTHTGEKPY | | X₁₈X₁₉HX₂₀X₂₁X₂₂X₂₃X₂₄X₈X₉CX₁₀X₁₁CX₁₂X₁₃X₁₄X₁₅X₁₆RRDELNVH | |
| | | | KCPECGKSFSRRDELNVHQRTHT | | X₁₇X₁₈X₁₉HX₂₀X₂₁X₂₂X₂₃X₂₄X₈X₉CX₁₀X₁₁CX₁₂X₁₃X₁₄X₁₅X₁₆QLAHLR | |
| | | | GEKPYKCPECGKSFSQLAHLRAH | | AHX₁₇X₁₈X₁₉HX₂₀X₂₁X₂₂X₂₃X₂₄X₈X₉CX₁₀X₁₁CX₁₂X₁₃X₁₄X₁₅X₁₆ERSH | |
| | | | QRTHTGEKPYKCPECGKSFSERS | | LREHX₁₇X₁₈X₁₉HX₂₀X₂₁X₂₂X₂₃X₂₄X₈X₉CX₁₀K₁₁CX₁₂X₁₃X₁₄X₁₅X₁₆RS | |
| | | | HLREHQRTHTGEKPYKCPECGKS | | DKLVRHX₁₇X₁₈X₁₉HX₂₀X₂₁X₂₂X₂₃X₂₄X₂₅X₂₆X₂₇X₂₈X₂₉X₃₀ | |
| | | | FSRSDKLVRHQRTHTGEKPTGKK | | | |
| | | | TS | | | |

Informal Sequence Listing
>dCas9-VPR Protein
SEQ ID NO.: 95
MAPKKKRKVGIHGVPAADKKYSIGLAIGTNSVGWAVITDEYKVPSKKFKVLGNTDRHSIKKNLIGALLFDSGETAEATRLKRT
ARRRYTRRKNRICYLQEIFSNEMAKVDDSFFHRLEESFLVEEDKKHERHPIFGNIVDEVAYHEKYPTIYHLRKKLVDSTDKAD
LRLIYLALAHMIKFRGHFLIEGDLNPDNSDVDKLFIQLVQTYNQLFEENPINASGVDAKAILSARLSKSRRLENLIAQLPGEK
KNGLFGNLIALSLGLTPNFKSNFDLAEDAKLQLSKDTYDDDLDNLLAQIGDQYADLFLAAKNLSDAILLSDILRVNTEITKAP
LSASMIKRYDEHHQDLTLLKALVRQQLPEKYKEIFFDQSKNGYAGYIDGGASQEEFYKFIKPILEKMDGTEELLVKLNREDLL
RKQRTFDNGSIPHQIHLGELHAILRRQEDFYPFLKDNREKIEKILTFRIPYYVGPLARGNSRFAWMTRKSEETITPWNFEEVV
DKGASAQSFIERMTNFDKNLPNEKVLPKHSLLYEYFTVYNELTKVKYVTEGMRKPAFLSGEQKKAIVDLLFKTNRKVTVKQLK
EDYFKKIECFDSVEISGVEDRFNASLGTYHDLLKIIKDKDFLDNEENEDILEDIVLTLTLFEDREMIEERLKTYAHLFDDKVM
KQLKRRRYTGWGRLSRKLINGIRDKQSGKTILDFLKSDGFANRNFMQLIHDDSLTFKEDIQKAQVSGQGDSLHEHIANLAGSP
AIKKGILQTVKVVDELVKVMGRHKPENIVIEMARENQTTQKGQKNSRERMKRIEEGIKELGSQILKEHPVENTQLQNEKLYLY
YLQNGRDMYVDQELDINRLSDYDVAAIVPQSFLKDDSIDNKVLTRSDKARGKSDNVPSEEVVKKMKNYWRQLLNAKLITQRKF
DNLTKAERGGLSELDKAGFIKRQLVETRQITKHVAQILDSRMNTKYDENDKLIREVKVITLKSKLVSDFRKDFQFYKVREINN
YHHAHDAYLNAVVGTALIKKYPKLESEFVYGDYKVYDVRKMIAKSEQEIGKATAKYFFYSNIMNFFKTEITLANGEIRKRPLI
ETNGETGEIVWDKGRDFATVRKVLSMPQVNIVKKTEVQTGGFSKESILPKRNSDKLIARKKDWDPKKYGGFDSPTVAYSVLVV
AKVEKGKSKKLKSVKELLGITIMERSSFEKNPIDFLEAKGYKEVKKDLIIKLPKYSLFELENGRKRMLASAGELQKGNELALP
SKYVNFLYLASHYEKLKGSPEDNEQKQLFVEQHKHYLDEIIEQISEFSKRVILADANLDKVLSAYNKHRDKPIREQAENIIHL
FTLTNLGAPAAFKYFDTTIDRKRYTSTKEVLDATLIHQSITGLYETRIDLSQLGGDKRPAATKKAGQAKKKKGRADALDDFDL
DMLGSDALDDFDLDMLGSDALDDFDLDMLGSDALDDFDLDMLSGGPKKKRKVGSQYLPDTDDRHRIEEKRKRTYETFKSIMKK
SPFSGPTDPRPPPRRIAVPSRSSASVPKPAPQPYPFTSSLSTINYDEFPTMVFPSGQISQASALAPAPPQVLPQAPAPAPAPA
MVSALAQAPAPVPVLAPGPPQAVAPPAPKPTQAGEGTLSEALLQLQFDDEDLGALLGNSTDPAVFTDLASVDNSEFQQLLNQG
IPVAPHTTEPMLMEYPEAITRLVTGAQRPPDPAPAPLGAPGLPNGLLSGDEDFSSIADMDFSALLGSGSGSRDSREGMFLPKP
EAGSAISDVFEGREVCQPKRIRPFHPPGSPWANRPLPASLAPTPTGPVHEPVGSLTPAPVPQPLDPAPAVTPEASHLLEDPDE
ETSQAVKALREMADTVIPQKEEAAICGQMDLSHPPPRGHLDELTTTLESMTEDLNLDSPLTPELNEILDTFLNDECLLHAMHI
STGLSIFDTSLFSGGKRPAATKKAGQAKKKKGSYPYDVPDYA
>dCas9-VPR mRNA
SEQ ID NO.: 96
AGGAAAUAAGAGAGAAAAGAAGAGUAAGAAGAAAUAUAAGAGCCACCAUGGCCCCCAAGAAGAAGCGGAAGGUGGGCAUCCAC
GGCGUGCCCGCCGCCGACAAGAAGUACAGCAUCGGCCUGGCCAUCGGCACCAACAGCGUGGGCUGGGCCGUGAUCACCGACGA
GUACAAGGUGCCCAGCAAGAAGUUCAAGGUGCUGGGCAACACCGACCGGCACAGCAUCAAGAAGAACCUGAUCGGCGCCCUGC
UGUUCGACAGCGGCGAGACCGCCGAGGCCACCCGGCUGAAGCGGACCGCCCGGCGGCGGUACACCCGGCGGAAGAACCGGAUC
UGCUACCUGCAGGAGAUCUUCAGCAACGAGAUGGCCAAGGUGGACGACAGCUUCUUCCACCGGCUGGAGGAGAGCUUCCUGGU
GGAGGAGGACAAGAAGCACGAGCGGCACCCCAUCUUCGGCAACAUCGUGGACGAGGUGGCCUACCACGAGAAGUACCCCACCA
UCUACCACCUGCGGAAGAAGCUGGUGGACAGCACCGACAAGGCCGACCUGCGGCUGAUCUACCUGGCCCUGGCCCACAUGAUC
AAGUUCCGGGGCCACUUCCUGAUCGAGGGCGACCUGAACCCCGACAACAGCGACGUGGACAAGCUGUUCAUCCAGCUGGUGCA
GACCUACAACCAGCUGUUCGAGGAGAACCCCAUCAACGCCAGCGGCGUGGACGCCAAGGCCAUCCUGAGCGCCCGGCUGAGCA
AGAGCCGGCGGCUGGAGAACCUGAUCGCCCAGCUGCCCGGCGAGAAGAAGAACGGCCUGUUCGGCAACCUGAUCGCCCUGAGC
CUGGGCCUGACCCCCAACUUCAAGAGCAACUUCGACCUGGCCGAGGACGCCAAGCUGCAGCUGAGCAAGGACACCUACGACGA
CGACCUGGACAACCUGCUGGCCCAGAUCGGCGACCAGUACGCCGACCUGUUCCUGGCCGCCAAGAACCUGAGCGACGCCAUCC
UGCUGAGCGACAUCCUGCGGGUGAACACCGAGAUCACCAAGGCCCCCCUGAGCGCCAGCAUGAUCAAGCGGUACGACGAGCAC
CACCAGGACCUGACCCUGCUGAAGGCCCUGGUGCGGCAGCAGCUGCCCGAGAAGUACAAGGAGAUCUUCUUCGACCAGAGCAA
GAACGGCUACGCCGGCUACAUCGACGGCGGCGCCAGCCAGGAGGAGUUCUACAAGUUCAUCAAGCCCAUCCUGGAGAAGAUGG
ACGGCACCGAGGAGCUGCUGGUGAAGCUGAACCGGGAGGACCUGCUGCGGAAGCAGCGGACCUUCGACAACGGCAGCAUCCCC
CACCAGAUCCACCUGGGCGAGCUGCACGCCAUCCUGCGGCGGCAGGAGGACUUCUACCCCUUCCUGAAGGACAACCGGGAGAA
GAUCGAGAAGAUCCUGACCUUCCGGAUCCCCUACUACGUGGGCCCCCUGGCCCGGGGCAACAGCCGGUUCGCCUGGAUGACCC
GGAAAUCCGAGGAGACCAUCACCCCCUGGAACUUCGAGGAGGUGGUGGACAAGGGCGCCAGCGCCCAGAGCUUCAUCGAGCGG
AUGACCAACUUCGACAAGAACCUGCCCAACGAGAAGGUGCUGCCCAAGCACAGCCUGCUGUACGAGUACUUCACCGUGUACAA
CGAGCUGACCAAGGUGAAGUACGUGACCGAGGGCAUGCGGAAGCCCGCCUUCCUGAGCGGCGAGCAGAAGAAGGCCAUCGUGG
ACCUGCUGUUCAAGACCAACCGGAAGGUGACCGUGAAGCAGCUGAAGGAGGACUACUUCAAGAAGAUCGAGUGCUUCGACAGC
GUGGAGAUCAGCGGCGUGGAGGACCGGUUCAACGCCAGCCUGGGCACCUACCACGACCUGCUGAAGAUCAUCAAGGACAAGGA
CUUCCUGGACAACGAGGAGAACGAGGACAUCCUGGAGGACAUCGUGCUGACCCUGACCCUGUUCGAGGACCGGGAGAUGAUCG
AGGAGCGGCUGAAAACCUACGCCCACCUGUUCGACGACAAGGUGAUGAAGCAGCUGAAGCGGCGGCGGUACACCGGCUGGGGC
CGGCUGAGCCGGAAGCUGAUCAACGGCAUCCGGGACAAGCAGAGCGGCAAGACCAUCCUGGACUUCCUGAAAUCCGACGGCUU
CGCCAACCGGAACUUCAUGCAGCUGAUCCACGACGACAGCCUGACCUUCAAGGAGGACAUCCAGAAGGCCCAGGUGAGCGGCC
AGGGCGACAGCCUGCACGAGCACAUCGCCAACCUGGCCGGCAGCCCCGCCAUCAAGAAGGGCAUCCUGCAGACCGUGAAGGUG
GUGGACGAGCUGGUGAAGGUGAUGGGCCGGCACAAGCCCGAGAACAUCGUGAUCGAGAUGGCCCGGGAGAACCAGACCACCCA
GAAGGGCCAGAAGAACAGCCGGGAGCGGAUGAAGCGGAUCGAGGAGGGCAUCAAGGAGCUGGGCAGCCAGAUCCUGAAGGAGC
ACCCCGUGGAGAACACCCAGCUGCAGAACGAGAAGCUGUACCUGUACUACCUGCAGAACGGCCGGGACAUGUACGUGGACCAG
GAGCUGGACAUCAACCGGCUGAGCGACUACGACGUGGCCGCCAUCGUGCCCCAGAGCUUCCUGAAGGACGACAGCAUCGACAA
CAAGGUGCUGACCCGGAGCGACAAGGCCCGGGGCAAGAGCGACAACGUGCCCAGCGAGGAGGUGGUGAAGAAGAUGAAGAACU
ACUGGCGGCAGCUGCUGAACGCCAAGCUGAUCACCCAGCGGAAGUUCGACAACCUGACCAAGGCCGAGCGGGGCGGCCUGAGC
GAGCUGGACAAGGCCGGCUUCAUCAAGCGGCAGCUGGUGGAGACCCGGCAGAUCACCAAGCACGUGGCCCAGAUCCUGGACAG
CCGGAUGAACACCAAGUACGACGAGAACGACAAGCUGAUCCGGGAGGUGAAGGUGAUCACCCUGAAAUCCAAGCUGGUGAGCG
ACUUCCGGAAGGACUUCCAGUUCUACAAGGUGCGGGAGAUCAACAACUACCACCACGCCCACGACGCCUACCUGAACGCCGUG
GUGGGCACCGCCCUGAUCAAGAAGUACCCCAAGCUGGAGAGCGAGUUCGUGUACGGCGACUACAAGGUGUACGACGUGCGGAA
GAUGAUCGCCAAGAGCGAGCAGGAGAUCGGCAAGGCCACCGCCAAGUACUUCUUCUACAGCAACAUCAUGAACUUCUUCAAGA
CCGAGAUCACCCUGGCCAACGGCGAGAUCCGGAAGCGGCCCCUGAUCGAGACCAACGGCGAGACCGGCGAGAUCGUGUGGGAC
AAGGGCCGGGACUUCGCCACCGUGCGGAAGGUGCUGAGCAUGCCCCAGGUGAACAUCGUGAAGAAAACCGAGGUGCAGACCGG
CGGCUUCAGCAAGGAGAGCAUCCUGCCCAAGCGGAACAGCGACAAGCUGAUCGCCCGGAAGAAGGACUGGGACCCCAAGAAGU
ACGGCGGCUUCGACAGCCCCACCGUGGCCUACAGCGUGCUGGUGGUGGCCAAGGUGGAGAAGGGCAAGAGCAAGAAGCUGAAA
UCCGUGAAGGAGCUGCUGGGCAUCACCAUCAUGGAGCGGAGCAGCUUCGAGAAGAACCCCAUCGACUUCCUGGAGGCCAAGGG
CUACAAGGAGGUGAAGAAGGACCUGAUCAUCAAGCUGCCCAAGUACAGCCUGUUCGAGCUGGAGAACGGCCGGAAGCGGAUGC
UGGCCAGCGCCGGCGAGCUGCAGAAGGGCAACGAGCUGGCCCUGCCCAGCAAGUACGUGAACUUCCUGUACCUGGCCAGCCAC
UACGAGAAGCUGAAGGGCAGCCCCGAGGACAACGAGCAGAAGCAGCUGUUCGUGGAGCAGCACAAGCACUACCUGGACGAGAU
CAUCGAGCAGAUCAGCGAGUUCAGCAAGCGGGUGAUCCUGGCCGACGCCAACCUGGACAAGGUGCUGAGCGCCUACAACAAGC
ACCGGGACAAGCCCAUCCGGGAGCAGGCCGAGAACAUCAUCCACCUGUUCACCCUGACCAACCUGGGCGCCCCCGCCGCCUUC
AAGUACUUCGACACCACCAUCGACCGGAAGCGGUACACCAGCACCAAGGAGGUGCUGGACGCCACCCUGAUCCACCAGAGCAU
CACCGGCCUGUACGAGACCCGGAUCGACCUGAGCCAGCUGGGCGGCGACAAGCGGCCCGCCGCCACCAAGAAGGCCGGCCAGG
CCAAGAAGAAGAAGGGCCGGGCCGACGCCCUGGACGACUUCGACCUGGACAUGCUGGGCAGCGACGCCCUGGACGACUUCGAC
CUGGACAUGCUGGGCAGCGACGCCCUGGACGACUUCGACCUGGACAUGCUGGGCAGCGACGCCCUGGACGACUUCGACCUGGA
CAUGCUGAGCGGCGGCCCCAAGAAGAAGCGGAAGGUGGGCAGCCAGUACCUGCCCGACACCGACGACCGGCACCGGAUCGAGG
AGAAGCGGAAGCGGACCUACGAGACCUUCAAGAGCAUCAUGAAGAAAUCCCCCUUCAGCGGCCCCACCGACCCCCGGCCCCCC
CCCCGGCGGAUCGCCGUGCCCAGCCGGAGCAGCGCCAGCGUGCCCAAGCCCGCCCCCCAGCCCUACCCCUUCACCAGCAGCCU
GAGCACCAUCAACUACGACGAGUUCCCCACCAUGGUGUUCCCCAGCGGCCAGAUCAGCCAGGCCAGCGCCCUGGCCCCCGCCC
CCCCCCAGGUGCUGCCCCAGGCCCCCGCCCCCGCCCCCGCCCCCGCCAUGGUGAGCGCCCUGGCCCAGGCCCCCGCCCCCGUG
CCCGUGCUGGCCCCCGGCCCCCCCCAGGCCGUGGCCCCCCCCGCCCCCAAGCCCACCCAGGCCGGCGAGGGCACCCUGAGCGA
GGCCCUGCUGCAGCUGCAGUUCGACGACGAGGACCUGGGCGCCCUGCUGGGCAACAGCACCGACCCCGCCGUGUUCACCGACC
UGGCCAGCGUGGACAACAGCGAGUUCCAGCAGCUGCUGAACCAGGGCAUCCCCGUGGCCCCCCACACCACCGAGCCCAUGCUG
AUGGAGUACCCCGAGGCCAUCACCCGGCUGGUGACCGGCGCCCAGCGGCCCCCCGACCCCGCCCCCGCCCCCCUGGGCGCCCC
CGGCCUGCCCAACGGCCUGCUGAGCGGCGACGAGGACUUCAGCAGCAUCGCCGACAUGGACUUCAGCGCCCUGCUGGGCAGCG
GCAGCGGCAGCCGGGACAGCCGGGAGGGCAUGUUCCUGCCCAAGCCCGAGGCCGGCAGCGCCAUCAGCGACGUGUUCGAGGGC
CGGGAGGUGUGCCAGCCCAAGCGGAUCCGGCCCUUCCACCCCCCCGGCAGCCCCUGGGCCAACCGGCCCCUGCCCGCCAGCCU
GGCCCCCACCCCCACCGGCCCCGUGCACGAGCCCGUGGGCAGCCUGACCCCCGCCCCCGUGCCCCAGCCCCUGGACCCCGCCC
CCGCCGUGACCCCCGAGGCCAGCCACCUGCUGGAGGACCCCGACGAGGAGACCAGCCAGGCCGUGAAGGCCCUGCGGGAGAUG
GCCGACACCGUGAUCCCCCAGAAGGAGGAGGCCGCCAUCUGCGGCCAGAUGGACCUGAGCCACCCCCCCCCCCGGGGCCACCU
GGACGAGCUGACCACCACCCUGGAGAGCAUGACCGAGGACCUGAACCUGGACAGCCCCCUGACCCCCGAGCUGAACGAGAUCC
UGGACACCUUCCUGAACGACGAGUGCCUGCUGCACGCCAUGCACAUCAGCACCGGCCUGAGCAUCUUCGACACCAGCCUGUUC
AGCGGCGGCAAGCGGCCCGCCGCCACCAAGAAGGCCGGCCAGGCCAAGAAGAAGAAGGGCAGCUACCCCUACGACGUGCCCGA
CUACGCCUGAGCGGCCGCUUAAUUAAGCUGCCUUCUGCGGGGCUUGCCUUCUGGCCAUGCCCUUCUUCUCUCCCUUGCACCUG
UACCUCUUGGUCUUUGAAUAAAGCCUGAGUAGGAAGUCUAGAAAAAAAAAAAAAAAAAAAAAAAAAAAAAAAAAAAAAAAAAA
AAAAAAAAAAAAAAAAAAAAAAAAAAAAAAAAAAAAAA
>dCas9 amino acid sequence
SEQ ID NO.: 97
DKKYSIGLAIGTNSVGWAVITDEYKVPSKKFKVLGNTDRHSIKKNLIGALLFDSGETAEATRLKRTARRRYTRRKNRICYLQE
IFSNEMAKVDDSFFHRLEESFLVEEDKKHERHPIFGNIVDEVAYHEKYPTIYHLRKKLVDSTDKADLRLIYLALAHMIKFRGH
FLIEGDLNPDNSDVDKLFIQLVQTYNQLFEENPINASGVDAKAILSARLSKSRRLENLIAQLPGEKKNGLFGNLIALSLGLTP
NFKSNFDLAEDAKLQLSKDTYDDDLDNLLAQIGDQYADLFLAAKNLSDAILLSDILRVNTEITKAPLSASMIKRYDEHHQDLT
LLKALVRQQLPEKYKEIFFDQSKNGYAGYIDGGASQEEFYKFIKPILEKMDGTEELLVKLNREDLLRKQRTFDNGSIPHQIHL
GELHAILRRQEDFYPFLKDNREKIEKILTFRIPYYVGPLARGNSRFAWMTRKSEETITPWNFEEVVDKGASAQSFIERMTNFD
KNLPNEKVLPKHSLLYEYFTVYNELTKVKYVTEGMRKPAFLSGEQKKAIVDLLFKTNRKVTVKQLKEDYFKKIECFDSVEISG
VEDRFNASLGTYHDLLKIIKDKDFLDNEENEDILEDIVLTLTLFEDREMIEERLKTYAHLFDDKVMKQLKRRRYTGWGRLSRK
LINGIRDKQSGKTILDFLKSDGFANRNFMQLIHDDSLTFKEDIQKAQVSGQGDSLHEHIANLAGSPAIKKGILQTVKVVDELV
KVMGRHKPENIVIEMARENQTTQKGQKNSRERMKRIEEGIKELGSQILKEHPVENTQLQNEKLYLYYLQNGRDMYVDQELDIN
RLSDYDVAAIVPQSFLKDDSIDNKVLTRSDKARGKSDNVPSEEVVKKMKNYWRQLLNAKLITQRKFDNLTKAERGGLSELDKA
GFIKRQLVETRQITKHVAQILDSRMNTKYDENDKLIREVKVITLKSKLVSDFRKDFQFYKVREINNYHHAHDAYLNAVVGTAL
IKKYPKLESEFVYGDYKVYDVRKMIAKSEQEIGKATAKYFFYSNIMNFFKTEITLANGEIRKRPLIETNGETGEIVWDKGRDF
ATVRKVLSMPQVNIVKKTEVQTGGFSKESILPKRNSDKLIARKKDWDPKKYGGFDSPTVAYSVLVVAKVEKGKSKKLKSVKEL
LGITIMERSSFEKNPIDFLEAKGYKEVKKDLIIKLPKYSLFELENGRKRMLASAGELQKGNELALPSKYVNFLYLASHYEKLK
GSPEDNEQKQLFVEQHKHYLDEIIEQISEFSKRVILADANLDKVLSAYNKHRDKPIREQAENIIHLFTLTNLGAPAAFKYFDT
TIDRKRYTSTKEVLDATLIHQSITGLYETRIDLSQLGGD
>dCas9 mRNA sequence
SEQ ID NO.: 300
GACAAGAAGUACAGCAUCGGCCUGGCCAUCGGCACCAACAGCGUGGGCUGGGCCGUGAUCACCGACGAGUACAAGGUGCCCAG
CAAGAAGUUCAAGGUGCUGGGCAACACCGACCGGCACAGCAUCAAGAAGAACCUGAUCGGCGCCCUGCUGUUCGACAGCGGCG
AGACCGCCGAGGCCACCCGGCUGAAGCGGACCGCCCGGCGGCGGUACACCCGGCGGAAGAACCGGAUCUGCUACCUGCAGGAG
AUCUUCAGCAACGAGAUGGCCAAGGUGGACGACAGCUUCUUCCACCGGCUGGAGGAGAGCUUCCUGGUGGAGGAGGACAAGAA
GCACGAGCGGCACCCCAUCUUCGGCAACAUCGUGGACGAGGUGGCCUACCACGAGAAGUACCCCACCAUCUACCACCUGCGGA
AGAAGCUGGUGGACAGCACCGACAAGGCCGACCUGCGGCUGAUCUACCUGGCCCUGGCCCACAUGAUCAAGUUCCGGGGCCAC
UUCCUGAUCGAGGGCGACCUGAACCCCGACAACAGCGACGUGGACAAGCUGUUCAUCCAGCUGGUGCAGACCUACAACCAGCU
GUUCGAGGAGAACCCCAUCAACGCCAGCGGCGUGGACGCCAAGGCCAUCCUGAGCGCCCGGCUGAGCAAGAGCCGGCGGCUGG
AGAACCUGAUCGCCCAGCUGCCCGGCGAGAAGAAGAACGGCCUGUUCGGCAACCUGAUCGCCCUGAGCCUGGGCCUGACCCCC
AACUUCAAGAGCAACUUCGACCUGGCCGAGGACGCCAAGCUGCAGCUGAGCAAGGACACCUACGACGACGACCUGGACAACCU
GCUGGCCCAGAUCGGCGACCAGUACGCCGACCUGUUCCUGGCCGCCAAGAACCUGAGCGACGCCAUCCUGCUGAGCGACAUCC
UGCGGGUGAACACCGAGAUCACCAAGGCCCCCCUGAGCGCCAGCAUGAUCAAGCGGUACGACGAGCACCACCAGGACCUGACC
CUGCUGAAGGCCCUGGUGCGGCAGCAGCUGCCCGAGAAGUACAAGGAGAUCUUCUUCGACCAGAGCAAGAACGGCUACGCCGG
CUACAUCGACGGCGGCGCCAGCCAGGAGGAGUUCUACAAGUUCAUCAAGCCCAUCCUGGAGAAGAUGGACGGCACCGAGGAGC
UGCUGGUGAAGCUGAACCGGGAGGACCUGCUGCGGAAGCAGCGGACCUUCGACAACGGCAGCAUCCCCCACCAGAUCCACCUG
GGCGAGCUGCACGCCAUCCUGCGGCGGCAGGAGGACUUCUACCCCUUCCUGAAGGACAACCGGGAGAAGAUCGAGAAGAUCCU
GACCUUCCGGAUCCCCUACUACGUGGGCCCCCUGGCCCGGGGCAACAGCCGGUUCGCCUGGAUGACCCGGAAAUCCGAGGAGA
CCAUCACCCCCUGGAACUUCGAGGAGGUGGUGGACAAGGGCGCCAGCGCCCAGAGCUUCAUCGAGCGGAUGACCAACUUCGAC
AAGAACCUGCCCAACGAGAAGGUGCUGCCCAAGCACAGCCUGCUGUACGAGUACUUCACCGUGUACAACGAGCUGACCAAGGU
GAAGUACGUGACCGAGGGCAUGCGGAAGCCCGCCUUCCUGAGCGGCGAGCAGAAGAAGGCCAUCGUGGACCUGCUGUUCAAGA
CCAACCGGAAGGUGACCGUGAAGCAGCUGAAGGAGGACUACUUCAAGAAGAUCGAGUGCUUCGACAGCGUGGAGAUCAGCGGC
GUGGAGGACCGGUUCAACGCCAGCCUGGGCACCUACCACGACCUGCUGAAGAUCAUCAAGGACAAGGACUUCCUGGACAACGA
GGAGAACGAGGACAUCCUGGAGGACAUCGUGCUGACCCUGACCCUGUUCGAGGACCGGGAGAUGAUCGAGGAGCGGCUGAAAA
CCUACGCCCACCUGUUCGACGACAAGGUGAUGAAGCAGCUGAAGCGGCGGCGGUACACCGGCUGGGGCCGGCUGAGCCGGAAG
CUGAUCAACGGCAUCCGGGACAAGCAGAGCGGCAAGACCAUCCUGGACUUCCUGAAAUCCGACGGCUUCGCCAACCGGAACUU
CAUGCAGCUGAUCCACGACGACAGCCUGACCUUCAAGGAGGACAUCCAGAAGGCCCAGGUGAGCGGCCAGGGCGACAGCCUGC
ACGAGCACAUCGCCAACCUGGCCGGCAGCCCCGCCAUCAAGAAGGGCAUCCUGCAGACCGUGAAGGUGGUGGACGAGCUGGUG
AAGGUGAUGGGCCGGCACAAGCCCGAGAACAUCGUGAUCGAGAUGGCCCGGGAGAACCAGACCACCCAGAAGGGCCAGAAGAA
CAGCCGGGAGCGGAUGAAGCGGAUCGAGGAGGGCAUCAAGGAGCUGGGCAGCCAGAUCCUGAAGGAGCACCCCGUGGAGAACA
CCCAGCUGCAGAACGAGAAGCUGUACCUGUACUACCUGCAGAACGGCCGGGACAUGUACGUGGACCAGGAGCUGGACAUCAAC
CGGCUGAGCGACUACGACGUGGCCGCCAUCGUGCCCCAGAGCUUCCUGAAGGACGACAGCAUCGACAACAAGGUGCUGACCCG
GAGCGACAAGGCCCGGGGCAAGAGCGACAACGUGCCCAGCGAGGAGGUGGUGAAGAAGAUGAAGAACUACUGGCGGCAGCUGC
UGAACGCCAAGCUGAUCACCCAGCGGAAGUUCGACAACCUGACCAAGGCCGAGCGGGGCGGCCUGAGCGAGCUGGACAAGGCC
GGCUUCAUCAAGCGGCAGCUGGUGGAGACCCGGCAGAUCACCAAGCACGUGGCCCAGAUCCUGGACAGCCGGAUGAACACCAA
GUACGACGAGAACGACAAGCUGAUCCGGGAGGUGAAGGUGAUCACCCUGAAAUCCAAGCUGGUGAGCGACUUCCGGAAGGACU
UCCAGUUCUACAAGGUGCGGGAGAUCAACAACUACCACCACGCCCACGACGCCUACCUGAACGCCGUGGUGGGCACCGCCCUG
AUCAAGAAGUACCCCAAGCUGGAGAGCGAGUUCGUGUACGGCGACUACAAGGUGUACGACGUGCGGAAGAUGAUCGCCAAGAG
CGAGCAGGAGAUCGGCAAGGCCACCGCCAAGUACUUCUUCUACAGCAACAUCAUGAACUUCUUCAAGACCGAGAUCACCCUGG
CCAACGGCGAGAUCCGGAAGCGGCCCCUGAUCGAGACCAACGGCGAGACCGGCGAGAUCGUGUGGGACAAGGGCCGGGACUUC
GCCACCGUGCGGAAGGUGCUGAGCAUGCCCCAGGUGAACAUCGUGAAGAAAACCGAGGUGCAGACCGGCGGCUUCAGCAAGGA
GAGCAUCCUGCCCAAGCGGAACAGCGACAAGCUGAUCGCCCGGAAGAAGGACUGGGACCCCAAGAAGUACGGCGGCUUCGACA
GCCCCACCGUGGCCUACAGCGUGCUGGUGGUGGCCAAGGUGGAGAAGGGCAAGAGCAAGAAGCUGAAAUCCGUGAAGGAGCUG
CUGGGCAUCACCAUCAUGGAGCGGAGCAGCUUCGAGAAGAACCCCAUCGACUUCCUGGAGGCCAAGGGCUACAAGGAGGUGAA
GAAGGACCUGAUCAUCAAGCUGCCCAAGUACAGCCUGUUCGAGCUGGAGAACGGCCGGAAGCGGAUGCUGGCCAGCGCCGGCG
AGCUGCAGAAGGGCAACGAGCUGGCCCUGCCCAGCAAGUACGUGAACUUCCUGUACCUGGCCAGCCACUACGAGAAGCUGAAG
GGCAGCCCCGAGGACAACGAGCAGAAGCAGCUGUUCGUGGAGCAGCACAAGCACUACCUGGACGAGAUCAUCGAGCAGAUCAG
CGAGUUCAGCAAGCGGGUGAUCCUGGCCGACGCCAACCUGGACAAGGUGCUGAGCGCCUACAACAAGCACCGGGACAAGCCCA
UCCGGGAGCAGGCCGAGAACAUCAUCCACCUGUUCACCCUGACCAACCUGGGCGCCCCCGCCGCCUUCAAGUACUUCGACACC
ACCAUCGACCGGAAGCGGUACACCAGCACCAAGGAGGUGCUGGACGCCACCCUGAUCCACCAGAGCAUCACCGGCCUGUACGA
GACCCGGAUCGACCUGAGCCAGCUGGGCGGCGAC
>dCas9-P300 protein
SEQ ID NO.: 98
MAPKKKRKVGIHGVPAADKKYSIGLAIGTNSVGWAVITDEYKVPSKKFKVLGNTDRHSIKKNLIGALLFDSGETAEATRLKRT
ARRRYTRRKNRICYLQEIFSNEMAKVDDSFFHRLEESFLVEEDKKHERHPIFGNIVDEVAYHEKYPTIYHLRKKLVDSTDKAD
LRLIYLALAHMIKFRGHFLIEGDLNPDNSDVDKLFIQLVQTYNQLFEENPINASGVDAKAILSARLSKSRRLENLIAQLPGEK
KNGLFGNLIALSLGLTPNFKSNFDLAEDAKLQLSKDTYDDDLDNLLAQIGDQYADLFLAAKNLSDAILLSDILRVNTEITKAP
LSASMIKRYDEHHQDLTLLKALVRQQLPEKYKEIFFDQSKNGYAGYIDGGASQEEFYKFIKPILEKMDGTEELLVKLNREDLL
RKQRTEDNGSIPHQIHLGELHAILRRQEDFYPFLKDNREKIEKILTFRIPYYVGPLARGNSRFAWMTRKSEETITPWNFEEVV
DKGASAQSFIERMTNFDKNLPNEKVLPKHSLLYEYFTVYNELTKVKYVTEGMRKPAFLSGEQKKAIVDLLFKTNRKVTVKQLK
EDYFKKIECFDSVEISGVEDRFNASLGTYHDLLKIIKDKDFLDNEENEDILEDIVLTLTLFEDREMIEERLKTYAHLFDDKVM
KQLKRRRYTGWGRLSRKLINGIRDKQSGKTILDFLKSDGFANRNFMQLIHDDSLTFKEDIQKAQVSGQGDSLHEHIANLAGSP
AIKKGILQTVKVVDELVKVMGRHKPENIVIEMARENQTTQKGQKNSRERMKRIEEGIKELGSQILKEHPVENTQLQNEKLYLY
YLQNGRDMYVDQELDINRLSDYDVAAIVPQSFLKDDSIDNKVLTRSDKARGKSDNVPSEEVVKKMKNYWRQLLNAKLITQRKF
DNLTKAERGGLSELDKAGFIKRQLVETRQITKHVAQILDSRMNTKYDENDKLIREVKVITLKSKLVSDFRKDFQFYKVREINN
YHHAHDAYLNAVVGTALIKKYPKLESEFVYGDYKVYDVRKMIAKSEQEIGKATAKYFFYSNIMNFFKTEITLANGEIRKRPLI
ETNGETGEIVWDKGRDFATVRKVLSMPQVNIVKKTEVQTGGFSKESILPKRNSDKLIARKKDWDEKKYGGFDSPTVAYSVLVV
AKVEKGKSKKLKSVKELLGITIMERSSFEKNPIDFLEAKGYKEVKKDLIIKLPKYSLFELENGRKRMLASAGELQKGNELALP
SKYVNFLYLASHYEKLKGSPEDNEQKQLFVEQHKHYLDEIIEQISEFSKRVILADANLDKVLSAYNKHRDKPIREQAENIIHL
FTLTNLGAPAAFKYFDTTIDRKRYTSTKEVLDATLIHQSITGLYETRIDLSQLGGDKRPAATKKAGQAKKKKGRAIFKPEELR
QALMPTLEALYRQDPESLPFRQPVDPQLLGIPDYFDIVKSPMDLSTIKRKLDTGQYQEPWQYVDDIWLMFNNAWLYNRKTSRV
YKYCSKLSEVFEQEIDPVMQSLGYCCGRKLEFSPQTLCCYGKQLCTIPRDATYYSYQNRYHFCEKCFNEIQGESVSLGDDPSQ
PQTTINKEQFSKRKNDTLDPELFVECTECGRKMHQICVLHHEIIWPAGFVCDGCLKKSARTRKENKFSAKRLPSTRLGTFLEN
RVNDFLRRQNHPESGEVTVRVVHASDKTVEVKPGMKARFVDSGEMAESFPYRTKALFAFEEIDGVDLCFFGMHVQEYGSDCPP
PNQRRVYISYLDSVHFFREKCLRTAVYHEILIGYLEYVKKLGYTTGHIWACPPSEGDDYIFHCHPPDQKIPKPKRLQEWYKKM
LDKAVSERIVHDYKDIFKQATEDRLTSAKELPYFEGDFWPNVLEESIKELEQEEEERKREENTSNESTDVTKGDSKNAKKKNN
KKTSKNKSSLSRGNKKKPGMPNVSNDLSQKLYATMEKHKEVFFVIRLIAGPAANSLPPIVDPDPLIPCDLMDGRDAFLTLARD
KHLEFSSLRRAQWSTMCMLVELHTQSQDSGGKRPAATKKAGQAKKKKGSYPYDVPDYA*
>dCas9-p300 mRNA
SEQ ID NO.: 99
AGGAAAUAAGAGAGAAAAGAAGAGUAAGAAGAAAUAUAAGAGCCACCAUGGCCCCCAAGAAGAAGCGGAAGGUGGGCAUCCAC
GGCGUGCCCGCCGCCGACAAGAAGUACAGCAUCGGCCUGGCCAUCGGCACCAACAGCGUGGGCUGGGCCGUGAUCACCGACGA
GUACAAGGUGCCCAGCAAGAAGUUCAAGGUGCUGGGCAACACCGACCGGCACAGCAUCAAGAAGAACCUGAUCGGCGCCCUGC
UGUUCGACAGCGGCGAGACCGCCGAGGCCACCCGGCUGAAGCGGACCGCCCGGCGGCGGUACACCCGGCGGAAGAACCGGAUC
UGCUACCUGCAGGAGAUCUUCAGCAACGAGAUGGCCAAGGUGGACGACAGCUUCUUCCACCGGCUGGAGGAGAGCUUCCUGGU
GGAGGAGGACAAGAAGCACGAGCGGCACCCCAUCUUCGGCAACAUCGUGGACGAGGUGGCCUACCACGAGAAGUACCCCACCA
UCUACCACCUGCGGAAGAAGCUGGUGGACAGCACCGACAAGGCCGACCUGCGGCUGAUCUACCUGGCCCUGGCCCACAUGAUC
AAGUUCCGGGGCCACUUCCUGAUCGAGGGCGACCUGAACCCCGACAACAGCGACGUGGACAAGCUGUUCAUCCAGCUGGUGCA
GACCUACAACCAGCUGUUCGAGGAGAACCCCAUCAACGCCAGCGGCGUGGACGCCAAGGCCAUCCUGAGCGCCCGGCUGAGCA
AGAGCCGGCGGCUGGAGAACCUGAUCGCCCAGCUGCCCGGCGAGAAGAAGAACGGCCUGUUCGGCAACCUGAUCGCCCUGAGC
CUGGGCCUGACCCCCAACUUCAAGAGCAACUUCGACCUGGCCGAGGACGCCAAGCUGCAGCUGAGCAAGGACACCUACGACGA
CGACCUGGACAACCUGCUGGCCCAGAUCGGCGACCAGUACGCCGACCUGUUCCUGGCCGCCAAGAACCUGAGCGACGCCAUCC
UGCUGAGCGACAUCCUGCGGGUGAACACCGAGAUCACCAAGGCCCCCCUGAGCGCCAGCAUGAUCAAGCGGUACGACGAGCAC
CACCAGGACCUGACCCUGCUGAAGGCCCUGGUGCGGCAGCAGCUGCCCGAGAAGUACAAGGAGAUCUUCUUCGACCAGAGCAA
GAACGGCUACGCCGGCUACAUCGACGGCGGCGCCAGCCAGGAGGAGUUCUACAAGUUCAUCAAGCCCAUCCUGGAGAAGAUGG
ACGGCACCGAGGAGCUGCUGGUGAAGCUGAACCGGGAGGACCUGCUGCGGAAGCAGCGGACCUUCGACAACGGCAGCAUCCCC
CACCAGAUCCACCUGGGCGAGCUGCACGCCAUCCUGCGGCGGCAGGAGGACUUCUACCCCUUCCUGAAGGACAACCGGGAGAA
GAUCGAGAAGAUCCUGACCUUCCGGAUCCCCUACUACGUGGGCCCCCUGGCCCGGGGCAACAGCCGGUUCGCCUGGAUGACCC
GGAAAUCCGAGGAGACCAUCACCCCCUGGAACUUCGAGGAGGUGGUGGACAAGGGCGCCAGCGCCCAGAGCUUCAUCGAGCGG
AUGACCAACUUCGACAAGAACCUGCCCAACGAGAAGGUGCUGCCCAAGCACAGCCUGCUGUACGAGUACUUCACCGUGUACAA
CGAGCUGACCAAGGUGAAGUACGUGACCGAGGGCAUGCGGAAGCCCGCCUUCCUGAGCGGCGAGCAGAAGAAGGCCAUCGUGG
ACCUGCUGUUCAAGACCAACCGGAAGGUGACCGUGAAGCAGCUGAAGGAGGACUACUUCAAGAAGAUCGAGUGCUUCGACAGC
GUGGAGAUCAGCGGCGUGGAGGACCGGUUCAACGCCAGCCUGGGCACCUACCACGACCUGCUGAAGAUCAUCAAGGACAAGGA
CUUCCUGGACAACGAGGAGAACGAGGACAUCCUGGAGGACAUCGUGCUGACCCUGACCCUGUUCGAGGACCGGGAGAUGAUCG
AGGAGCGGCUGAAAACCUACGCCCACCUGUUCGACGACAAGGUGAUGAAGCAGCUGAAGCGGCGGCGGUACACCGGCUGGGGC
CGGCUGAGCCGGAAGCUGAUCAACGGCAUCCGGGACAAGCAGAGCGGCAAGACCAUCCUGGACUUCCUGAAAUCCGACGGCUU
CGCCAACCGGAACUUCAUGCAGCUGAUCCACGACGACAGCCUGACCUUCAAGGAGGACAUCCAGAAGGCCCAGGUGAGCGGCC
AGGGCGACAGCCUGCACGAGCACAUCGCCAACCUGGCCGGCAGCCCCGCCAUCAAGAAGGGCAUCCUGCAGACCGUGAAGGUG
GUGGACGAGCUGGUGAAGGUGAUGGGCCGGCACAAGCCCGAGAACAUCGUGAUCGAGAUGGCCCGGGAGAACCAGACCACCCA
GAAGGGCCAGAAGAACAGCCGGGAGCGGAUGAAGCGGAUCGAGGAGGGCAUCAAGGAGCUGGGCAGCCAGAUCCUGAAGGAGC
ACCCCGUGGAGAACACCCAGCUGCAGAACGAGAAGCUGUACCUGUACUACCUGCAGAACGGCCGGGACAUGUACGUGGACCAG
GAGCUGGACAUCAACCGGCUGAGCGACUACGACGUGGCCGCCAUCGUGCCCCAGAGCUUCCUGAAGGACGACAGCAUCGACAA
CAAGGUGCUGACCCGGAGCGACAAGGCCCGGGGCAAGAGCGACAACGUGCCCAGCGAGGAGGUGGUGAAGAAGAUGAAGAACU
ACUGGCGGCAGCUGCUGAACGCCAAGCUGAUCACCCAGCGGAAGUUCGACAACCUGACCAAGGCCGAGCGGGGCGGCCUGAGC
GAGCUGGACAAGGCCGGCUUCAUCAAGCGGCAGCUGGUGGAGACCCGGCAGAUCACCAAGCACGUGGCCCAGAUCCUGGACAG
CCGGAUGAACACCAAGUACGACGAGAACGACAAGCUGAUCCGGGAGGUGAAGGUGAUCACCCUGAAAUCCAAGCUGGUGAGCG
ACUUCCGGAAGGACUUCCAGUUCUACAAGGUGCGGGAGAUCAACAACUACCACCACGCCCACGACGCCUACCUGAACGCCGUG
GUGGGCACCGCCCUGAUCAAGAAGUACCCCAAGCUGGAGAGCGAGUUCGUGUACGGCGACUACAAGGUGUACGACGUGCGGAA
GAUGAUCGCCAAGAGCGAGCAGGAGAUCGGCAAGGCCACCGCCAAGUACUUCUUCUACAGCAACAUCAUGAACUUCUUCAAGA
CCGAGAUCACCCUGGCCAACGGCGAGAUCCGGAAGCGGCCCCUGAUCGAGACCAACGGCGAGACCGGCGAGAUCGUGUGGGAC
AAGGGCCGGGACUUCGCCACCGUGCGGAAGGUGCUGAGCAUGCCCCAGGUGAACAUCGUGAAGAAAACCGAGGUGCAGACCGG
CGGCUUCAGCAAGGAGAGCAUCCUGCCCAAGCGGAACAGCGACAAGCUGAUCGCCCGGAAGAAGGACUGGGACCCCAAGAAGU
ACGGCGGCUUCGACAGCCCCACCGUGGCCUACAGCGUGCUGGUGGUGGCCAAGGUGGAGAAGGGCAAGAGCAAGAAGCUGAAA
UCCGUGAAGGAGCUGCUGGGCAUCACCAUCAUGGAGCGGAGCAGCUUCGAGAAGAACCCCAUCGACUUCCUGGAGGCCAAGGG
CUACAAGGAGGUGAAGAAGGACCUGAUCAUCAAGCUGCCCAAGUACAGCCUGUUCGAGCUGGAGAACGGCCGGAAGCGGAUGC
UGGCCAGCGCCGGCGAGCUGCAGAAGGGCAACGAGCUGGCCCUGCCCAGCAAGUACGUGAACUUCCUGUACCUGGCCAGCCAC
UACGAGAAGCUGAAGGGCAGCCCCGAGGACAACGAGCAGAAGCAGCUGUUCGUGGAGCAGCACAAGCACUACCUGGACGAGAU
CAUCGAGCAGAUCAGCGAGUUCAGCAAGCGGGUGAUCCUGGCCGACGCCAACCUGGACAAGGUGCUGAGCGCCUACAACAAGC
ACCGGGACAAGCCCAUCCGGGAGCAGGCCGAGAACAUCAUCCACCUGUUCACCCUGACCAACCUGGGCGCCCCCGCCGCCUUC
AAGUACUUCGACACCACCAUCGACCGGAAGCGGUACACCAGCACCAAGGAGGUGCUGGACGCCACCCUGAUCCACCAGAGCAU
CACCGGCCUGUACGAGACCCGGAUCGACCUGAGCCAGCUGGGCGGCGACAAGCGGCCCGCCGCCACCAAGAAGGCCGGCCAGG
CCAAGAAGAAGAAGGGCCGGGCCAUCUUCAAGCCCGAGGAGCUGCGGCAGGCCCUGAUGCCCACCCUGGAGGCCCUGUACCGG
CAGGACCCCGAGAGCCUGCCCUUCCGGCAGCCCGUGGACCCCCAGCUGCUGGGCAUCCCCGACUACUUCGACAUCGUGAAAUC
CCCCAUGGACCUGAGCACCAUCAAGCGGAAGCUGGACACCGGCCAGUACCAGGAGCCCUGGCAGUACGUGGACGACAUCUGGC
UGAUGUUCAACAACGCCUGGCUGUACAACCGGAAAACCAGCCGGGUGUACAAGUACUGCAGCAAGCUGAGCGAGGUGUUCGAG
CAGGAGAUCGACCCCGUGAUGCAGAGCCUGGGCUACUGCUGCGGCCGGAAGCUGGAGUUCAGCCCCCAGACCCUGUGCUGCUA
CGGCAAGCAGCUGUGCACCAUCCCCCGGGACGCCACCUACUACAGCUACCAGAACCGGUACCACUUCUGCGAGAAGUGCUUCA
ACGAGAUCCAGGGCGAGAGCGUGAGCCUGGGCGACGACCCCAGCCAGCCCCAGACCACCAUCAACAAGGAGCAGUUCAGCAAG
CGGAAGAACGACACCCUGGACCCCGAGCUGUUCGUGGAGUGCACCGAGUGCGGCCGGAAGAUGCACCAGAUCUGCGUGCUGCA
CCACGAGAUCAUCUGGCCCGCCGGCUUCGUGUGCGACGGCUGCCUGAAGAAAUCCGCCCGGACCCGGAAGGAGAACAAGUUCA
GCGCCAAGCGGCUGCCCAGCACCCGGCUGGGCACCUUCCUGGAGAACCGGGUGAACGACUUCCUGCGGCGGCAGAACCACCCC
GAGAGCGGCGAGGUGACCGUGCGGGUGGUGCACGCCAGCGACAAGACCGUGGAGGUGAAGCCCGGCAUGAAGGCCCGGUUCGU
GGACAGCGGCGAGAUGGCCGAGAGCUUCCCCUACCGGACCAAGGCCCUGUUCGCCUUCGAGGAGAUCGACGGCGUGGACCUGU
GCUUCUUCGGCAUGCACGUGCAGGAGUACGGCAGCGACUGCCCCCCCCCCAACCAGCGGCGGGUGUACAUCAGCUACCUGGAC
AGCGUGCACUUCUUCCGGCCCAAGUGCCUGCGGACCGCCGUGUACCACGAGAUCCUGAUCGGCUACCUGGAGUACGUGAAGAA
GCUGGGCUACACCACCGGCCACAUCUGGGCCUGCCCCCCCAGCGAGGGCGACGACUACAUCUUCCACUGCCACCCCCCCGACC
AGAAGAUCCCCAAGCCCAAGCGGCUGCAGGAGUGGUACAAGAAGAUGCUGGACAAGGCCGUGAGCGAGCGGAUCGUGCACGAC
UACAAGGACAUCUUCAAGCAGGCCACCGAGGACCGGCUGACCAGCGCCAAGGAGCUGCCCUACUUCGAGGGCGACUUCUGGCC
CAACGUGCUGGAGGAGAGCAUCAAGGAGCUGGAGCAGGAGGAGGAGGAGCGGAAGCGGGAGGAGAACACCAGCAACGAGAGCA
CCGACGUGACCAAGGGCGACAGCAAGAACGCCAAGAAGAAGAACAACAAGAAAACCAGCAAGAACAAGAGCAGCCUGAGCCGG
GGCAACAAGAAGAAGCCCGGCAUGCCCAACGUGAGCAACGACCUGAGCCAGAAGCUGUACGCCACCAUGGAGAAGCACAAGGA
GGUGUUCUUCGUGAUCCGGCUGAUCGCCGGCCCCGCCGCCAACAGCCUGCCCCCCAUCGUGGACCCCGACCCCCUGAUCCCCU
GCGACCUGAUGGACGGCCGGGACGCCUUCCUGACCCUGGCCCGGGACAAGCACCUGGAGUUCAGCAGCCUGCGGCGGGCCCAG
UGGAGCACCAUGUGCAUGCUGGUGGAGCUGCACACCCAGAGCCAGGACAGCGGCGGCAAGCGGCCCGCCGCCACCAAGAAGGC
CGGCCAGGCCAAGAAGAAGAAGGGCAGCUACCCCUACGACGUGCCCGACUACGCCUGAGCGGCCGCUUAAUUAAGCUGCCUUC
UGCGGGGCUUGCCUUCUGGCCAUGCCCUUCUUCUCUCCCUUGCACCUGUACCUCUUGGUCUUUGAAUAAAGCCUGAGUAGGAA
GUCUAGAAAAAAAAAAAAAAAAAAAAAAAAAAAAAAAAAAAAAAAAAAAAAAAAAAAAAAAAAAAAAAAAAAAAAAAAAAAAA
AAA
>ZF1-VPR protein
SEQ ID NO.: 100
MAPKKKRKVGIHGVPAAGSSGSLEPGEKPYKCPECGKSFSRSDNLVRHQRTHTGEKPYKCPECGKSFSRSDHLTNHQRTHTGE
KPYKCPECGKSFSDPGHLVRHQRTHTGEKPYKCPECGKSFSQRAHLERHQRTHTGEKPYKCPECGKSFSSRRTCRAHQRTHTG
EKPYKCPECGKSFSRSDKLTEHQRTHTGEKPYKCPECGKSFSRNDTLTEHQRTHTGEKPTGKKTSASGSGGGSGGDALDDFDL
DMLGSDALDDFDLDMLGSDALDDFDLDMLGSDALDDFDLDMLSGGPKKKRKVGSQYLPDTDDRHRIEEKRKRTYETFKSIMKK
SPFSGPTDPRPPPRRIAVPSRSSASVPKPAPQPYPFTSSLSTINYDEFPTMVFPSGQISQASALAPAPPQVLPQAPAPAPAPA
MVSALAQAPAPVPVLAPGPPQAVAPPAPKPTQAGEGTLSEALLQLQFDDEDLGALLGNSTDPAVFTDLASVDNSEFQQLLNQG
IPVAPHTTEPMLMEYPEAITRLVTGAQRPPDPAPAPLGAPGLPNGLLSGDEDFSSIADMDFSALLGSGSGSRDSREGMFLPKP
EAGSAISDVFEGREVCQPKRLRPFHPPGSPWANRPLPASLAPTPTGPVHEPVGSLTPAPVPQPLDPAPAVTPEASHLLEDPDE
ETSQAVKALREMADTVIPQKEEAAICGQMDLSHPPPRGHLDELTTTLESMTEDLNLDSPLTPELNEILDTFLNDECLLHAMHI
STGLSIFDTSLFSGGKRPAATKKAGQAKKKKGSYPYDVPDYA*
ZF1-VPR mRNA
SEQ ID No.: 101
AGGAAAUAAGAGAGAAAAGAAGAGUAAGAAGAAAUAUAAGAGCCACCAUGGCCCCCAAGAAGAAGCGGAAGGUGGGCAUCCAC
GGCGUGCCCGCCGCCGGCAGCAGCGGAUCCCUGGAGCCGGGUGAGAAGCCAUACAAGUGCCCAGAAUGCGGCAAGAGCUUUAG
CCGCAGCGAUAAUCUGGUUCGUCAUCAGCGCACGCAUACGGGUGAGAAACCGUACAAAUGUCCAGAAUGCGGCAAAAGCUUUA
GUCGCAGCGAUCAUCUGACGAAUCACCAGCGCACCCAUACCGGCGAAAAACCGUACAAGUGCCCGGAGUGCGGUAAAAGCUUC
AGCGACCCGGGUCAUCUGGUGCGCCACCAACGCACGCACACCGGUGAGAAACCAUAUAAAUGUCCAGAGUGCGGCAAGAGUUU
UAGCCAGCGUGCCCAUCUGGAACGUCAUCAGCGUACCCACACGGGUGAAAAACCAUAUAAGUGCCCGGAGUGCGGUAAGAGUU
UUAGUAGCCGCCGUACGUGCCGUGCGCACCAACGCACCCACACCGGUGAAAAGCCAUACAAGUGUCCGGAAUGCGGCAAGAGC
UUCAGCCGCAGCGACAAACUCACCGAACAUCAACGUACCCAUACGGGCGAGAAGCCGUACAAAUGCCCAGAAUGUGGCAAAAG
CUUCAGUCGCAACGAUACGCUGACCGAGCAUCAGCGUACGCACACCGGCGAAAAGCCAACCGGCAAGAAAACCAGCGCUAGCG
GCAGCGGCGGCGGCAGCGGCGGCGACGCCCUGGACGACUUCGACCUGGACAUGCUGGGCAGCGACGCCCUGGACGACUUCGAC
CUGGACAUGCUGGGCAGCGACGCCCUGGACGACUUCGACCUGGACAUGCUGGGCAGCGACGCCCUGGACGACUUCGACCUGGA
CAUGCUGAGCGGCGGCCCCAAGAAGAAGCGGAAGGUGGGCAGCCAGUACCUGCCCGACACCGACGACCGGCACCGGAUCGAGG
AGAAGCGGAAGCGGACCUACGAGACCUUCAAGAGCAUCAUGAAGAAAUCCCCCUUCAGCGGCCCCACCGACCCCCGGCCCCCC
CCCCGGCGGAUCGCCGUGCCCAGCCGGAGCAGCGCCAGCGUGCCCAAGCCCGCCCCCCAGCCCUACCCCUUCACCAGCAGCCU
GAGCACCAUCAACUACGACGAGUUCCCCACCAUGGUGUUCCCCAGCGGCCAGAUCAGCCAGGCCAGCGCCCUGGCCCCCGCCC
CCCCCCAGGUGCUGCCCCAGGCCCCCGCCCCCGCCCCCGCCCCCGCCAUGGUGAGCGCCCUGGCCCAGGCCCCCGCCCCCGUG
CCCGUGCUGGCCCCCGGCCCCCCCCAGGCCGUGGCCCCCCCCGCCCCCAAGCCCACCCAGGCCGGCGAGGGCACCCUGAGCGA
GGCCCUGCUGCAGCUGCAGUUCGACGACGAGGACCUGGGCGCCCUGCUGGGCAACAGCACCGACCCCGCCGUGUUCACCGACC
UGGCCAGCGUGGACAACAGCGAGUUCCAGCAGCUGCUGAACCAGGGCAUCCCCGUGGCCCCCCACACCACCGAGCCCAUGCUG
AUGGAGUACCCCGAGGCCAUCACCCGGCUGGUGACCGGCGCCCAGCGGCCCCCCGACCCCGCCCCCGCCCCCCUGGGCGCCCC
CGGCCUGCCCAACGGCCUGCUGAGCGGCGACGAGGACUUCAGCAGCAUCGCCGACAUGGACUUCAGCGCCCUGCUGGGCAGCG
GCAGCGGCAGCCGGGACAGCCGGGAGGGCAUGUUCCUGCCCAAGCCCGAGGCCGGCAGCGCCAUCAGCGACGUGUUCGAGGGC
CGGGAGGUGUGCCAGCCCAAGCGGCUCCGGCCCUUCCACCCCCCCGGCAGCCCCUGGGCCAACCGGCCCCUGCCCGCCAGCCU
GGCCCCCACCCCCACCGGCCCCGUGCACGAGCCCGUGGGCAGCCUGACCCCCGCCCCCGUGCCCCAGCCCCUGGACCCCGCCC
CCGCCGUGACCCCCGAGGCCAGCCACCUGCUGGAGGACCCCGACGAGGAGACCAGCCAGGCCGUGAAGGCCCUGCGGGAGAUG
GCCGACACCGUGAUCCCCCAGAAGGAGGAGGCCGCCAUCUGCGGCCAGAUGGACCUGAGCCACCCCCCCCCCCGGGGCCACCU
GGACGAGCUGACCACCACCCUGGAGAGCAUGACCGAGGACCUGAACCUGGACAGCCCCCUGACCCCCGAGCUGAACGAGAUCC
UGGACACCUUCCUGAACGACGAGUGCCUGCUGCACGCCAUGCACAUCAGCACCGGCCUGAGCAUCUUCGACACCAGCCUGUUC
AGCGGCGGCAAGCGGCCCGCCGCCACCAAGAAGGCCGGCCAGGCCAAGAAGAAGAAGGGCAGCUACCCCUACGACGUGCCCGA
CUACGCCUGAGCGGCCGCUUAAUUAAGCUGCCUUCUGCGGGGCUUGCCUUCUGGCCAUGCCCUUCUUCUCUCCCUUGCACCUG
UACCUCUUGGUCUUUGAAUAAAGCCUGAGUAGGAAGUCUAGAAAAAAAAAAAAAAAAAAAAAAAAAAAAAAAAAAAAAAAAAA
AAAAAAAAAAAAAAAAAAAAAAAAAAAAAAAAAAAAAA
>ZF1 target sequence
SEQ ID NO.: 102
CCGCGGCGTGGAGGCAGGGAG
>ZF1 amino acid sequence
SEQ ID NO.: 103
LEPGEKPYKCPECGKSFSRSDNLVRHQRTHTGEKPYKCPECGKSFSRSDHLTNHQRTHTGEKPYKCPECGKSFSDPGHLVRHQ
RTHTGEKPYKCPECGKSFSQRAHLERHQRTHTGEKPYKCPECGKSFSSRRTCRAHQRTHTGEKPYKCPECGKSFSRSDKLTEH
QRTHTGEKPYKCPECGKSFSRNDTLTEHQRTHTGEKPTGKKTS
>ZF1 mRNA sequence
SEQ ID NO.: 211
CUGGAGCCGGGUGAGAAGCCAUACAAGUGCCCAGAAUGCGGCAAGAGCUUUAGCCGCAGCGAUAAUCUGGUUCGUCAUCAGCG
CACGCAUACGGGUGAGAAACCGUACAAAUGUCCAGAAUGCGGCAAAAGCUUUAGUCGCAGCGAUCAUCUGACGAAUCACCAGC
GCACCCAUACCGGCGAAAAACCGUACAAGUGCCCGGAGUGCGGUAAAAGCUUCAGCGACCCGGGUCAUCUGGUGCGCCACCAA
CGCACGCACACCGGUGAGAAACCAUAUAAAUGUCCAGAGUGCGGCAAGAGUUUUAGCCAGCGUGCCCAUCUGGAACGUCAUCA
GCGUACCCACACGGGUGAAAAACCAUAUAAGUGCCCGGAGUGCGGUAAGAGUUUUAGUAGCCGCCGUACGUGCCGUGCGCACC
AACGCACCCACACCGGUGAAAAGCCAUACAAGUGUCCGGAAUGCGGCAAGAGCUUCAGCCGCAGCGACAAACUCACCGAACAU
CAACGUACCCAUACGGGCGAGAAGCCGUACAAAUGCCCAGAAUGUGGCAAAAGCUUCAGUCGCAACGAUACGCUGACCGAGCA
UCAGCGUACGCACACCGGCGAAAAGCCAACCGGCAAGAAAACCAGC
>ZF2-VPR protein
SEQ ID NO.: 104
MAPKKKRKVGIHGVPAAGSSGSLEPGEKPYKCPECGKSFSQSSNLVRHQRTHTGEKPYKCPECGKSFSSKKHLAEHQRTHTGE
KPYKCPECGKSFSSKKALTEHQRTHTGEKPYKCPECGKSFSDCRDLARHQRTHTGEKPYKCPECGKSFSDPGHLVRHQRTHTG
EKPYKCPECGKSFSRNDALTEHQRTHTGEKPYKCPECGKSFSDKKDLTRHQRTHTGEKPTGKKTSASGSGGGSGGDALDDFDL
DMLGSDALDDFDLDMLGSDALDDFDLDMLGSDALDDFDLDMLSGGPKKKRKVGSQYLPDTDDRHRIEEKRKRTYETFKSIMKK
SPFSGPTDPRPPPRRIAVPSRSSASVPKPAPQPYPFTSSLSTINYDEFPTMVFPSGQISQASALAPAPPQVLPQAPAPAPAPA
MVSALAQAPAPVPVLAPGPPQAVAPPAPKPTQAGEGTLSEALLQLQFDDEDLGALLGNSTDPAVFTDLASVDNSEFQQLLNQG
IPVAPHTTEPMLMEYPEAITRLVTGAQRPPDPAPAPLGAPGLPNGLLSGDEDFSSIADMDFSALLGSGSGSRDSREGMFLPKP
EAGSAISDVFEGREVCQPKRLRPFHPPGSPWANRPLPASLAPTPTGPVHEPVGSLTPAPVPQPLDPAPAVTPEASHLLEDPDE
ETSQAVKALREMADTVIPQKEEAAICGQMDLSHPPPRGHLDELTTTLESMTEDLNLDSPLTPELNEILDTFLNDECLLHAMHI
STGLSIFDTSLFSGGKRPAATKKAGQAKKKKGSYPYDVPDYA*
>ZF2-VPR mRNA
SEQ ID NO.: 105
AGGAAAUAAGAGAGAAAAGAAGAGUAAGAAGAAAUAUAAGAGCCACCAUGGCCCCCAAGAAGAAGCGGAAGGUGGGCAUCCAC
GGCGUGCCCGCCGCCGGCAGCAGCGGAUCCCUGGAACCGGGCGAGAAACCGUACAAGUGCCCAGAAUGCGGUAAAAGCUUCAG
CCAGAGCAGUAAUCUGGUUCGUCACCAGCGCACCCACACGGGUGAAAAGCCAUACAAAUGUCCAGAGUGUGGUAAGAGUUUCA
GUAGCAAAAAGCAUCUGGCGGAACACCAACGUACGCAUACGGGUGAAAAGCCGUACAAGUGUCCGGAAUGUGGCAAGAGCUUU
AGCAGCAAGAAGGCGCUGACCGAACAUCAGCGUACCCAUACCGGUGAAAAACCAUACAAGUGCCCGGAGUGCGGCAAAAGUUU
CAGCGAUUGUCGCGAUCUGGCCCGUCAUCAACGCACCCACACCGGCGAGAAACCAUAUAAGUGUCCGGAGUGCGGUAAAAGCU
UUAGCGAUCCGGGCCAUCUGGUUCGCCACCAACGCACGCACACCGGCGAGAAACCGUAUAAGUGCCCAGAGUGCGGUAAGAGU
UUUAGCCGUAACGAUGCGCUGACGGAGCAUCAGCGCACGCACACGGGCGAGAAACCAUAUAAAUGCCCGGAAUGUGGUAAGAG
CUUCAGUGACAAAAAGGAUCUGACCCGCCAUCAACGUACGCAUACGGGCGAGAAGCCAACCGGCAAGAAAACCAGCGCUAGCG
GCAGCGGCGGCGGCAGCGGCGGCGACGCCCUGGACGACUUCGACCUGGACAUGCUGGGCAGCGACGCCCUGGACGACUUCGAC
CUGGACAUGCUGGGCAGCGACGCCCUGGACGACUUCGACCUGGACAUGCUGGGCAGCGACGCCCUGGACGACUUCGACCUGGA
CAUGCUGAGCGGCGGCCCCAAGAAGAAGCGGAAGGUGGGCAGCCAGUACCUGCCCGACACCGACGACCGGCACCGGAUCGAGG
AGAAGCGGAAGCGGACCUACGAGACCUUCAAGAGCAUCAUGAAGAAAUCCCCCUUCAGCGGCCCCACCGACCCCCGGCCCCCC
CCCCGGCGGAUCGCCGUGCCCAGCCGGAGCAGCGCCAGCGUGCCCAAGCCCGCCCCCCAGCCCUACCCCUUCACCAGCAGCCU
GAGCACCAUCAACUACGACGAGUUCCCCACCAUGGUGUUCCCCAGCGGCCAGAUCAGCCAGGCCAGCGCCCUGGCCCCCGCCC
CCCCCCAGGUGCUGCCCCAGGCCCCCGCCCCCGCCCCCGCCCCCGCCAUGGUGAGCGCCCUGGCCCAGGCCCCCGCCCCCGUG
CCCGUGCUGGCCCCCGGCCCCCCCCAGGCCGUGGCCCCCCCCGCCCCCAAGCCCACCCAGGCCGGCGAGGGCACCCUGAGCGA
GGCCCUGCUGCAGCUGCAGUUCGACGACGAGGACCUGGGCGCCCUGCUGGGCAACAGCACCGACCCCGCCGUGUUCACCGACC
UGGCCAGCGUGGACAACAGCGAGUUCCAGCAGCUGCUGAACCAGGGCAUCCCCGUGGCCCCCCACACCACCGAGCCCAUGCUG
AUGGAGUACCCCGAGGCCAUCACCCGGCUGGUGACCGGCGCCCAGCGGCCCCCCGACCCCGCCCCCGCCCCCCUGGGCGCCCC
CGGCCUGCCCAACGGCCUGCUGAGCGGCGACGAGGACUUCAGCAGCAUCGCCGACAUGGACUUCAGCGCCCUGCUGGGCAGCG
GCAGCGGCAGCCGGGACAGCCGGGAGGGCAUGUUCCUGCCCAAGCCCGAGGCCGGCAGCGCCAUCAGCGACGUGUUCGAGGGC
CGGGAGGUGUGCCAGCCCAAGCGGCUCCGGCCCUUCCACCCCCCCGGCAGCCCCUGGGCCAACCGGCCCCUGCCCGCCAGCCU
GGCCCCCACCCCCACCGGCCCCGUGCACGAGCCCGUGGGCAGCCUGACCCCCGCCCCCGUGCCCCAGCCCCUGGACCCCGCCC
CCGCCGUGACCCCCGAGGCCAGCCACCUGCUGGAGGACCCCGACGAGGAGACCAGCCAGGCCGUGAAGGCCCUGCGGGAGAUG
GCCGACACCGUGAUCCCCCAGAAGGAGGAGGCCGCCAUCUGCGGCCAGAUGGACCUGAGCCACCCCCCCCCCCGGGGCCACCU
GGACGAGCUGACCACCACCCUGGAGAGCAUGACCGAGGACCUGAACCUGGACAGCCCCCUGACCCCCGAGCUGAACGAGAUCC
UGGACACCUUCCUGAACGACGAGUGCCUGCUGCACGCCAUGCACAUCAGCACCGGCCUGAGCAUCUUCGACACCAGCCUGUUC
AGCGGCGGCAAGCGGCCCGCCGCCACCAAGAAGGCCGGCCAGGCCAAGAAGAAGAAGGGCAGCUACCCCUACGACGUGCCCGA
CUACGCCUGAGCGGCCGCUUAAUUAAGCUGCCUUCUGCGGGGCUUGCCUUCUGGCCAUGCCCUUCUUCUCUCCCUUGCACCUG
UACCUCUUGGUCUUUGAAUAAA
>ZF2 target sequence
SEQ ID NO.: 106
ACCCTGGGCGCCCACCCCGAA
>ZF2 amino acid sequence
SEQ ID NO.: 107
LEPGEKPYKCPECGKSFSQSSNLVRHQRTHTGEKPYKCPECGKSFSSKKHLAEHQRTHTGEKPYKCPECGKSFSSKKALTEHQ
RTHTGEKPYKCPECGKSFSDCRDLARHQRTHTGEKPYKCPECGKSFSDPGHLVRHQRTHTGEKPYKCPECGKSFSRNDALTEH
QRTHTGEKPYKCPECGKSFSDKKDLTRHQRTHTGEKPTGKKTS
>ZF2 mRNA sequence
SEQ ID NO.: 212
CUGGAACCGGGCGAGAAACCGUACAAGUGCCCAGAAUGCGGUAAAAGCUUCAGCCAGAGCAGUAAUCUGGUUCGUCACCAGCG
CACCCACACGGGUGAAAAGCCAUACAAAUGUCCAGAGUGUGGUAAGAGUUUCAGUAGCAAAAAGCAUCUGGCGGAACACCAAC
GUACGCAUACGGGUGAAAAGCCGUACAAGUGUCCGGAAUGUGGCAAGAGCUUUAGCAGCAAGAAGGCGCUGACCGAACAUCAG
CGUACCCAUACCGGUGAAAAACCAUACAAGUGCCCGGAGUGCGGCAAAAGUUUCAGCGAUUGUCGCGAUCUGGCCCGUCAUCA
ACGCACCCACACCGGCGAGAAACCAUAUAAGUGUCCGGAGUGCGGUAAAAGCUUUAGCGAUCCGGGCCAUCUGGUUCGCCACC
AACGCACGCACACCGGCGAGAAACCGUAUAAGUGCCCAGAGUGCGGUAAGAGUUUUAGCCGUAACGAUGCGCUGACGGAGCAU
CAGCGCACGCACACGGGCGAGAAACCAUAUAAAUGCCCGGAAUGUGGUAAGAGCUUCAGUGACAAAAAGGAUCUGACCCGCCA
UCAACGUACGCAUACGGGCGAGAAGCCAACCGGCAAGAAAACCAGC
>ZF3-VPR protein
SEQ ID No.: 108
MAPKKKRKVGIHGVPAAGSSGSLEPGEKPYKCPECGKSFSRSDNLVRHQRTHTGEKPYKCPECGKSFSQLAHLRAHQRTHTGE
KPYKCPECGKSFSDPGHLVRHQRTHTGEKPYKCPECGKSFSQSSNLVRHQRTHTGEKPYKCPECGKSFSRKDNLKNHQRTHTG
EKPYKCPECGKSFSQAGHLASHQRTHTGEKPYKCPECGKSFSTSGSLVRHQRTHTGEKPTGKKTSASGSGGGSGGDALDDFDL
DMLGSDALDDFDLDMLGSDALDDFDLDMLGSDALDDFDLDMLSGGPKKKRKVGSQYLPDTDDRHRIEEKRKRTYETFKSIMKK
SPFSGPTDPRPPPRRIAVPSRSSASVPKPAPQPYPFTSSLSTINYDEFPTMVFPSGQISQASALAPAPPQVLPQAPAPAPAPA
MVSALAQAPAPVPVLAPGPPQAVAPPAPKPTQAGEGTLSEALLQLQFDDEDLGALLGNSTDPAVFTDLASVDNSEFQQLLNQG
IPVAPHTTEPMLMEYPEAITRLVTGAQRPPDPAPAPLGAPGLPNGLLSGDEDFSSIADMDFSALLGSGSGSRDSREGMFLPKP
EAGSAISDVFEGREVCQPKRLRPFHPPGSPWANRPLPASLAPTPTGPVHEPVGSLTPAPVPQPLDPAPAVTPEASHLLEDPDE
ETSQAVKALREMADTVIPQKEEAAICGQMDLSHPPPRGHLDELTTTLESMTEDLNLDSPLTPELNEILDTFLNDECLLHAMHI
STGLSIFDTSLFSGGKRPAATKKAGQAKKKKGSYPYDVPDYA*
>ZF3-VPR mRNA
SEQ ID NO.: 109
AGGAAAUAAGAGAGAAAAGAAGAGUAAGAAGAAAUAUAAGAGCCACCAUGGCCCCCAAGAAGAAGCGGAAGGUGGGCAUCCAC
GGCGUGCCCGCCGCCGGCAGCAGCGGAUCCCUCGAACCGGGCGAGAAACCAUAUAAGUGUCCGGAAUGUGGUAAAAGUUUUAG
CCGCAGCGAUAAUCUCGUGCGUCACCAGCGUACGCAUACCGGUGAGAAGCCAUACAAGUGUCCGGAGUGUGGCAAAAGCUUCA
GUCAGCUGGCGCAUCUGCGCGCGCAUCAGCGCACCCACACCGGUGAGAAACCGUACAAGUGUCCAGAAUGCGGCAAAAGCUUU
AGCGAUCCGGGUCAUCUGGUGCGUCAUCAACGUACGCACACGGGCGAAAAACCGUACAAAUGUCCGGAGUGCGGCAAGAGCUU
CAGCCAGAGCAGCAAUCUGGUUCGCCACCAGCGUACGCACACCGGUGAAAAGCCAUACAAGUGCCCGGAGUGCGGCAAGAGUU
UCAGUCGCAAGGACAAUCUGAAGAACCAUCAACGCACCCAUACGGGCGAGAAGCCGUACAAAUGUCCGGAAUGCGGUAAAAGU
UUUAGCCAAGCCGGUCAUCUGGCCAGCCAUCAGCGUACCCAUACGGGUGAGAAACCGUAUAAAUGUCCAGAAUGUGGUAAGAG
UUUCAGCACCAGCGGUAGUCUGGUUCGUCAUCAACGCACGCAUACGGGUGAAAAACCAACCGGCAAGAAAACCAGCGCUAGCG
GCAGCGGCGGCGGCAGCGGCGGCGACGCCCUGGACGACUUCGACCUGGACAUGCUGGGCAGCGACGCCCUGGACGACUUCGAC
CUGGACAUGCUGGGCAGCGACGCCCUGGACGACUUCGACCUGGACAUGCUGGGCAGCGACGCCCUGGACGACUUCGACCUGGA
CAUGCUGAGCGGCGGCCCCAAGAAGAAGCGGAAGGUGGGCAGCCAGUACCUGCCCGACACCGACGACCGGCACCGGAUCGAGG
AGAAGCGGAAGCGGACCUACGAGACCUUCAAGAGCAUCAUGAAGAAAUCCCCCUUCAGCGGCCCCACCGACCCCCGGCCCCCC
CCCCGGCGGAUCGCCGUGCCCAGCCGGAGCAGCGCCAGCGUGCCCAAGCCCGCCCCCCAGCCCUACCCCUUCACCAGCAGCCU
GAGCACCAUCAACUACGACGAGUUCCCCACCAUGGUGUUCCCCAGCGGCCAGAUCAGCCAGGCCAGCGCCCUGGCCCCCGCCC
CCCCCCAGGUGCUGCCCCAGGCCCCCGCCCCCGCCCCCGCCCCCGCCAUGGUGAGCGCCCUGGCCCAGGCCCCCGCCCCCGUG
CCCGUGCUGGCCCCCGGCCCCCCCCAGGCCGUGGCCCCCCCCGCCCCCAAGCCCACCCAGGCCGGCGAGGGCACCCUGAGCGA
GGCCCUGCUGCAGCUGCAGUUCGACGACGAGGACCUGGGCGCCCUGCUGGGCAACAGCACCGACCCCGCCGUGUUCACCGACC
UGGCCAGCGUGGACAACAGCGAGUUCCAGCAGCUGCUGAACCAGGGCAUCCCCGUGGCCCCCCACACCACCGAGCCCAUGCUG
AUGGAGUACCCCGAGGCCAUCACCCGGCUGGUGACCGGCGCCCAGCGGCCCCCCGACCCCGCCCCCGCCCCCCUGGGCGCCCC
CGGCCUGCCCAACGGCCUGCUGAGCGGCGACGAGGACUUCAGCAGCAUCGCCGACAUGGACUUCAGCGCCCUGCUGGGCAGCG
GCAGCGGCAGCCGGGACAGCCGGGAGGGCAUGUUCCUGCCCAAGCCCGAGGCCGGCAGCGCCAUCAGCGACGUGUUCGAGGGC
CGGGAGGUGUGCCAGCCCAAGCGGCUCCGGCCCUUCCACCCCCCCGGCAGCCCCUGGGCCAACCGGCCCCUGCCCGCCAGCCU
GGCCCCCACCCCCACCGGCCCCGUGCACGAGCCCGUGGGCAGCCUGACCCCCGCCCCCGUGCCCCAGCCCCUGGACCCCGCCC
CCGCCGUGACCCCCGAGGCCAGCCACCUGCUGGAGGACCCCGACGAGGAGACCAGCCAGGCCGUGAAGGCCCUGCGGGAGAUG
GCCGACACCGUGAUCCCCCAGAAGGAGGAGGCCGCCAUCUGCGGCCAGAUGGACCUGAGCCACCCCCCCCCCCGGGGCCACCU
GGACGAGCUGACCACCACCCUGGAGAGCAUGACCGAGGACCUGAACCUGGACAGCCCCCUGACCCCCGAGCUGAACGAGAUCC
UGGACACCUUCCUGAACGACGAGUGCCUGCUGCACGCCAUGCACAUCAGCACCGGCCUGAGCAUCUUCGACACCAGCCUGUUC
AGCGGCGGCAAGCGGCCCGCCGCCACCAAGAAGGCCGGCCAGGCCAAGAAGAAGAAGGGCAGCUACCCCUACGACGUGCCCGA
CUACGCCUGAGCGGCCGCUUAAUUAAGCUGCCUUCUGCGGGGCUUGCCUUCUGGCCAUGCCCUUCUUCUCUCCCUUGCACCUG
UACCUCUUGGUCUUUGAAUAAAGCCUGAGUAGGAAGUCUAGAAAAAAAAAAAAAAAAAAAAAAAAAAAAAAAAAAAAAAAAAA
AAAAAAAAAAAAAAAAAAAAAAAAAAAAAAAAAAAAAA
>ZF3 target sequence
SEQ ID No.: 110
GTTTGAAAGGAAGGCAGAGAG
>ZF3 amino acid sequence
SEQ ID NO.: 111
LEPGEKPYKCPECGKSFSRSDNLVRHQRTHTGEKPYKCPECGKSFSQLAHLRAHQRTHTGEKPYKCPECGKSFSDPGHLVRHQ
RTHTGEKPYKCPECGKSFSQSSNLVRHQRTHTGEKPYKCPECGKSFSRKDNLKNHQRTHTGEKPYKCPECGKSFSQAGHLASH
QRTHTGEKPYKCPECGKSFSTSGSLVRHQRTHTGEKPTGKKTS
>ZF3 mRNA
SEQ ID NO.: 213
CUCGAACCGGGCGAGAAACCAUAUAAGUGUCCGGAAUGUGGUAAAAGUUUUAGCCGCAGCGAUAAUCUCGUGCGUCACCAGCG
UACGCAUACCGGUGAGAAGCCAUACAAGUGUCCGGAGUGUGGCAAAAGCUUCAGUCAGCUGGCGCAUCUGCGCGCGCAUCAGC
GCACCCACACCGGUGAGAAACCGUACAAGUGUCCAGAAUGCGGCAAAAGCUUUAGCGAUCCGGGUCAUCUGGUGCGUCAUCAA
CGUACGCACACGGGCGAAAAACCGUACAAAUGUCCGGAGUGCGGCAAGAGCUUCAGCCAGAGCAGCAAUCUGGUUCGCCACCA
GCGUACGCACACCGGUGAAAAGCCAUACAAGUGCCCGGAGUGCGGCAAGAGUUUCAGUCGCAAGGACAAUCUGAAGAACCAUC
AACGCACCCAUACGGGCGAGAAGCCGUACAAAUGUCCGGAAUGCGGUAAAAGUUUUAGCCAAGCCGGUCAUCUGGCCAGCCAU
CAGCGUACCCAUACGGGUGAGAAACCGUAUAAAUGUCCAGAAUGUGGUAAGAGUUUCAGCACCAGCGGUAGUCUGGUUCGUCA
UCAACGCACGCAUACGGGUGAAAAACCAACCGGCAAGAAAACCAGC
>ZF4-VPR protein
SEQ ID NO.: 112
MAPKKKRKVGIHGVPAAGSSGSLEPGEKPYKCPECGKSFSQRAHLERHQRTHTGEKPYKCPECGKSFSQLAHLRAHQRTHTGE
KPYKCPECGKSFSSKKHLAEHQRTHTGEKPYKCPECGKSFSTTGALTEHQRTHTGEKPYKCPECGKSFSTSGNLVRHQRTHTG
EKPYKCPECGKSFSQSGDLRRHQRTHTGEKPYKCPECGKSFSTSHSLTEHQRTHTGEKPTGKKTSASGSGGGSGGDALDDFDL
DMLGSDALDDFDLDMLGSDALDDFDLDMLGSDALDDFDLDMLSGGPKKKRKVGSQYLPDTDDRHRIEEKRKRTYETFKSIMKK
SPFSGPTDPRPPPRRIAVPSRSSASVPKPAPQPYPFTSSLSTINYDEFPTMVFPSGQISQASALAPAPPQVLPQAPAPAPAPA
MVSALAQAPAPVPVLAPGPPQAVAPPAPKPTQAGEGTLSEALLQLQFDDEDLGALLGNSTDPAVFTDLASVDNSEFQQLLNQG
IPVAPHTTEPMLMEYPEAITRLVTGAQRPPDPAPAPLGAPGLPNGLLSGDEDFSSIADMDFSALLGSGSGSRDSREGMFLPKP
EAGSAISDVFEGREVCQPKRLRPFHPPGSPWANRPLPASLAPTPTGPVHEPVGSLTPAPVPQPLDPAPAVTPEASHLLEDPDE
ETSQAVKALREMADTVIPQKEEAAICGQMDLSHPPPRGHLDELTTTLESMTEDLNLDSPLTPELNEILDTFLNDECLLHAMHI
STGLSIFDTSLFSGGKRPAATKKAGQAKKKKGSYPYDVPDYA*
>ZF4-mRNA
SEQ ID NO.: 113
AGGAAAUAAGAGAGAAAAGAAGAGUAAGAAGAAAUAUAAGAGCCACCAUGGCCCCCAAGAAGAAGCGGAAGGUGGGCAUCCAC
GGCGUGCCCGCCGCCGGCAGCAGCGGAUCCCUCGAACCGGGCGAAAAGCCGUAUAAGUGCCCGGAAUGCGGCAAGAGUUUUAG
CCAGCGCGCCCAUCUGGAACGUCACCAGCGUACCCAUACCGGUGAAAAGCCAUAUAAAUGCCCAGAAUGUGGUAAAAGCUUUA
GUCAGCUGGCCCAUCUGCGCGCCCACCAACGUACGCACACGGGCGAGAAGCCGUACAAAUGCCCAGAAUGCGGUAAAAGCUUC
AGCAGCAAAAAGCAUCUGGCGGAACAUCAACGUACCCACACCGGCGAGAAACCAUACAAGUGCCCGGAAUGCGGUAAAAGCUU
CAGCACCACCGGUGCGCUGACGGAGCAUCAGCGCACCCACACGGGCGAAAAACCGUAUAAGUGUCCGGAGUGUGGCAAAAGUU
UUAGUACCAGCGGCAAUCUGGUGCGCCAUCAACGUACGCAUACCGGCGAGAAGCCAUAUAAAUGUCCAGAGUGUGGCAAGAGC
UUUAGCCAAAGCGGUGAUCUGCGUCGCCACCAACGCACGCACACCGGCGAAAAACCAUACAAAUGUCCGGAAUGCGGUAAGAG
UUUCAGCACGAGCCAUAGUCUGACCGAACAUCAACGUACCCAUACGGGUGAGAAACCAACCGGCAAGAAAACCAGCGCUAGCG
GCAGCGGCGGCGGCAGCGGCGGCGACGCCCUGGACGACUUCGACCUGGACAUGCUGGGCAGCGACGCCCUGGACGACUUCGAC
CUGGACAUGCUGGGCAGCGACGCCCUGGACGACUUCGACCUGGACAUGCUGGGCAGCGACGCCCUGGACGACUUCGACCUGGA
CAUGCUGAGCGGCGGCCCCAAGAAGAAGCGGAAGGUGGGCAGCCAGUACCUGCCCGACACCGACGACCGGCACCGGAUCGAGG
AGAAGCGGAAGCGGACCUACGAGACCUUCAAGAGCAUCAUGAAGAAAUCCCCCUUCAGCGGCCCCACCGACCCCCGGCCCCCC
CCCCGGCGGAUCGCCGUGCCCAGCCGGAGCAGCGCCAGCGUGCCCAAGCCCGCCCCCCAGCCCUACCCCUUCACCAGCAGCCU
GAGCACCAUCAACUACGACGAGUUCCCCACCAUGGUGUUCCCCAGCGGCCAGAUCAGCCAGGCCAGCGCCCUGGCCCCCGCCC
CCCCCCAGGUGCUGCCCCAGGCCCCCGCCCCCGCCCCCGCCCCCGCCAUGGUGAGCGCCCUGGCCCAGGCCCCCGCCCCCGUG
CCCGUGCUGGCCCCCGGCCCCCCCCAGGCCGUGGCCCCCCCCGCCCCCAAGCCCACCCAGGCCGGCGAGGGCACCCUGAGCGA
GGCCCUGCUGCAGCUGCAGUUCGACGACGAGGACCUGGGCGCCCUGCUGGGCAACAGCACCGACCCCGCCGUGUUCACCGACC
UGGCCAGCGUGGACAACAGCGAGUUCCAGCAGCUGCUGAACCAGGGCAUCCCCGUGGCCCCCCACACCACCGAGCCCAUGCUG
AUGGAGUACCCCGAGGCCAUCACCCGGCUGGUGACCGGCGCCCAGCGGCCCCCCGACCCCGCCCCCGCCCCCCUGGGCGCCCC
CGGCCUGCCCAACGGCCUGCUGAGCGGCGACGAGGACUUCAGCAGCAUCGCCGACAUGGACUUCAGCGCCCUGCUGGGCAGCG
GCAGCGGCAGCCGGGACAGCCGGGAGGGCAUGUUCCUGCCCAAGCCCGAGGCCGGCAGCGCCAUCAGCGACGUGUUCGAGGGC
CGGGAGGUGUGCCAGCCCAAGCGGCUCCGGCCCUUCCACCCCCCCGGCAGCCCCUGGGCCAACCGGCCCCUGCCCGCCAGCCU
GGCCCCCACCCCCACCGGCCCCGUGCACGAGCCCGUGGGCAGCCUGACCCCCGCCCCCGUGCCCCAGCCCCUGGACCCCGCCC
CCGCCGUGACCCCCGAGGCCAGCCACCUGCUGGAGGACCCCGACGAGGAGACCAGCCAGGCCGUGAAGGCCCUGCGGGAGAUG
GCCGACACCGUGAUCCCCCAGAAGGAGGAGGCCGCCAUCUGCGGCCAGAUGGACCUGAGCCACCCCCCCCCCCGGGGCCACCU
GGACGAGCUGACCACCACCCUGGAGAGCAUGACCGAGGACCUGAACCUGGACAGCCCCCUGACCCCCGAGCUGAACGAGAUCC
UGGACACCUUCCUGAACGACGAGUGCCUGCUGCACGCCAUGCACAUCAGCACCGGCCUGAGCAUCUUCGACACCAGCCUGUUC
AGCGGCGGCAAGCGGCCCGCCGCCACCAAGAAGGCCGGCCAGGCCAAGAAGAAGAAGGGCAGCUACCCCUACGACGUGCCCGA
CUACGCCUGAGCGGCCGCUUAAUUAAGCUGCCUUCUGCGGGGCUUGCCUUCUGGCCAUGCCCUUCUUCUCUCCCUUGCACCUG
UACCUCUUGGUCUUUGAAUAAAGCCUGAGUAGGAAGUCUAGAAAAAAAAAAAAAAAAAAAAAAAAAAAAAAAAAAAAAAAAAA
AAAAAAAAAAAAAAAAAAAAAAAAAAAAAAAAAAAAAA
>ZF4 target sequence
SEQ ID NO.: 114
CCAGCAGATCTTCCCAGAGGA
>ZF4 amino acid sequence
SEQ ID NO.: 115
LEPGEKPYKCPECGKSFSQRAHLERHQRTHTGEKPYKCPECGKSFSQLAHLRAHQRTHTGEKPYKCPECGKSFSSKKHLAEHQ
RTHTGEKPYKCPECGKSFSTTGALTEHQRTHTGEKPYKCPECGKSFSTSGNLVRHQRTHTGEKPYKCPECGKSFSQSGDLRRH
QRTHTGEKPYKCPECGKSFSTSHSLTEHQRTHTGEKPTGKKTS
>ZF4 mRNA sequence
SEQ ID NO.: 214
CUCGAACCGGGCGAAAAGCCGUAUAAGUGCCCGGAAUGCGGCAAGAGUUUUAGCCAGCGCGCCCAUCUGGAACGUCACCAGCG
UACCCAUACCGGUGAAAAGCCAUAUAAAUGCCCAGAAUGUGGUAAAAGCUUUAGUCAGCUGGCCCAUCUGCGCGCCCACCAAC
GUACGCACACGGGCGAGAAGCCGUACAAAUGCCCAGAAUGCGGUAAAAGCUUCAGCAGCAAAAAGCAUCUGGCGGAACAUCAA
CGUACCCACACCGGCGAGAAACCAUACAAGUGCCCGGAAUGCGGUAAAAGCUUCAGCACCACCGGUGCGCUGACGGAGCAUCA
GCGCACCCACACGGGCGAAAAACCGUAUAAGUGUCCGGAGUGUGGCAAAAGUUUUAGUACCAGCGGCAAUCUGGUGCGCCAUC
AACGUACGCAUACCGGCGAGAAGCCAUAUAAAUGUCCAGAGUGUGGCAAGAGCUUUAGCCAAAGCGGUGAUCUGCGUCGCCAC
CAACGCACGCACACCGGCGAAAAACCAUACAAAUGUCCGGAAUGCGGUAAGAGUUUCAGCACGAGCCAUAGUCUGACCGAACA
UCAACGUACCCAUACGGGUGAGAAACCAACCGGCAAGAAAACCAGC
>ZF5-VPR protein
SEQ ID NO.: 116
MAPKKKRKVGIHGVPAAGSSGSLEPGEKPYKCPECGKSFSTSGNLTEHQRTHTGEKPYKCPECGKSFSDSGNLRVHQRTHTGE
KPYKCPECGKSFSHKNALQNHQRTHTGEKPYKCPECGKSFSRNDTLTEHQRTHTGEKPYKCPECGKSFSQRAHLERHQRTHTG
EKPYKCPECGKSFSRSDKLVRHQRTHTGEKPYKCPECGKSFSDPGHLVRHQRTHTGEKPTGKKTSASGSGGGSGGDALDDFDL
DMLGSDALDDFDLDMLGSDALDDFDLDMLGSDALDDFDLDMLSGGPKKKRKVGSQYLPDTDDRHRIEEKRKRTYETFKSIMKK
SPFSGPTDPRPPPRRIAVPSRSSASVPKPAPQPYPFTSSLSTINYDEFPTMVFPSGQISQASALAPAPPQVLPQAPAPAPAPA
MVSALAQAPAPVPVLAPGPPQAVAPPAPKPTQAGEGTLSEALLQLQFDDEDLGALLGNSTDPAVFTDLASVDNSEFQQLLNQG
IPVAPHTTEPMLMEYPEAITRLVTGAQRPPDPAPAPLGAPGLPNGLLSGDEDFSSIADMDFSALLGSGSGSRDSREGMFLPKP
EAGSAISDVFEGREVCQPKRLRPFHPPGSPWANRPLPASLAPTPTGPVHEPVGSLTPAPVPQPLDPAPAVTPEASHLLEDPDE
ETSQAVKALREMADTVIPQKEEAAICGQMDLSHPPPRGHLDELTTTLESMTEDLNLDSPLTPELNEILDTFLNDECLLHAMHI
STGLSIFDTSLFSGGKRPAATKKAGQAKKKKGSYPYDVPDYA*
>ZF5-VPR mRNA
SEQ ID NO.: 117
AGGAAAUAAGAGAGAAAAGAAGAGUAAGAAGAAAUAUAAGAGCCACCAUGGCCCCCAAGAAGAAGCGGAAGGUGGGCAUCCAC
GGCGUGCCCGCCGCCGGCAGCAGCGGAUCCCUCGAACCGGGCGAGAAACCAUAUAAGUGUCCAGAGUGUGGUAAGAGCUUUAG
CACCAGUGGCAAUCUGACCGAGCAUCAACGCACGCAUACGGGUGAGAAACCGUACAAGUGCCCGGAAUGCGGCAAAAGUUUCA
GCGAUAGCGGCAAUCUGCGUGUGCACCAGCGUACGCAUACGGGCGAAAAGCCGUAUAAGUGCCCAGAAUGCGGUAAGAGUUUU
AGCCACAAAAACGCGCUGCAGAACCACCAGCGCACCCACACGGGUGAGAAGCCAUACAAAUGUCCGGAAUGCGGCAAAAGCUU
CAGCCGCAACGAUACGCUGACGGAACACCAACGUACGCAUACCGGCGAAAAGCCAUACAAGUGCCCGGAGUGCGGUAAAAGCU
UUAGCCAGCGCGCGCAUCUCGAACGUCAUCAACGUACCCAUACCGGUGAAAAACCAUAUAAAUGCCCGGAAUGUGGUAAAAGU
UUUAGCCGCAGCGACAAACUGGUGCGUCAUCAACGCACCCAUACCGGUGAAAAGCCAUAUAAGUGCCCGGAGUGUGGUAAAAG
CUUCAGCGAUCCGGGUCAUCUGGUUCGCCAUCAACGUACGCACACCGGCGAGAAGCCAACCGGCAAGAAAACCAGCGCUAGCG
GCAGCGGCGGCGGCAGCGGCGGCGACGCCCUGGACGACUUCGACCUGGACAUGCUGGGCAGCGACGCCCUGGACGACUUCGAC
CUGGACAUGCUGGGCAGCGACGCCCUGGACGACUUCGACCUGGACAUGCUGGGCAGCGACGCCCUGGACGACUUCGACCUGGA
CAUGCUGAGCGGCGGCCCCAAGAAGAAGCGGAAGGUGGGCAGCCAGUACCUGCCCGACACCGACGACCGGCACCGGAUCGAGG
AGAAGCGGAAGCGGACCUACGAGACCUUCAAGAGCAUCAUGAAGAAAUCCCCCUUCAGCGGCCCCACCGACCCCCGGCCCCCC
CCCCGGCGGAUCGCCGUGCCCAGCCGGAGCAGCGCCAGCGUGCCCAAGCCCGCCCCCCAGCCCUACCCCUUCACCAGCAGCCU
GAGCACCAUCAACUACGACGAGUUCCCCACCAUGGUGUUCCCCAGCGGCCAGAUCAGCCAGGCCAGCGCCCUGGCCCCCGCCC
CCCCCCAGGUGCUGCCCCAGGCCCCCGCCCCCGCCCCCGCCCCCGCCAUGGUGAGCGCCCUGGCCCAGGCCCCCGCCCCCGUG
CCCGUGCUGGCCCCCGGCCCCCCCCAGGCCGUGGCCCCCCCCGCCCCCAAGCCCACCCAGGCCGGCGAGGGCACCCUGAGCGA
GGCCCUGCUGCAGCUGCAGUUCGACGACGAGGACCUGGGCGCCCUGCUGGGCAACAGCACCGACCCCGCCGUGUUCACCGACC
UGGCCAGCGUGGACAACAGCGAGUUCCAGCAGCUGCUGAACCAGGGCAUCCCCGUGGCCCCCCACACCACCGAGCCCAUGCUG
AUGGAGUACCCCGAGGCCAUCACCCGGCUGGUGACCGGCGCCCAGCGGCCCCCCGACCCCGCCCCCGCCCCCCUGGGCGCCCC
CGGCCUGCCCAACGGCCUGCUGAGCGGCGACGAGGACUUCAGCAGCAUCGCCGACAUGGACUUCAGCGCCCUGCUGGGCAGCG
GCAGCGGCAGCCGGGACAGCCGGGAGGGCAUGUUCCUGCCCAAGCCCGAGGCCGGCAGCGCCAUCAGCGACGUGUUCGAGGGC
CGGGAGGUGUGCCAGCCCAAGCGGCUCCGGCCCUUCCACCCCCCCGGCAGCCCCUGGGCCAACCGGCCCCUGCCCGCCAGCCU
GGCCCCCACCCCCACCGGCCCCGUGCACGAGCCCGUGGGCAGCCUGACCCCCGCCCCCGUGCCCCAGCCCCUGGACCCCGCCC
CCGCCGUGACCCCCGAGGCCAGCCACCUGCUGGAGGACCCCGACGAGGAGACCAGCCAGGCCGUGAAGGCCCUGCGGGAGAUG
GCCGACACCGUGAUCCCCCAGAAGGAGGAGGCCGCCAUCUGCGGCCAGAUGGACCUGAGCCACCCCCCCCCCCGGGGCCACCU
GGACGAGCUGACCACCACCCUGGAGAGCAUGACCGAGGACCUGAACCUGGACAGCCCCCUGACCCCCGAGCUGAACGAGAUCC
UGGACACCUUCCUGAACGACGAGUGCCUGCUGCACGCCAUGCACAUCAGCACCGGCCUGAGCAUCUUCGACACCAGCCUGUUC
AGCGGCGGCAAGCGGCCCGCCGCCACCAAGAAGGCCGGCCAGGCCAAGAAGAAGAAGGGCAGCUACCCCUACGACGUGCCCGA
CUACGCCUGAGCGGCCGCUUAAUUAAGCUGCCUUCUGCGGGGCUUGCCUUCUGGCCAUGCCCUUCUUCUCUCCCUUGCACCUG
UACCUCUUGGUCUUUGAAUAAAGCCUGAGUAGGAAGUCUAGAAAAAAAAAAAAAAAAAAAAAAAAAAAAAAAAAAAAAAAAAA
AAAAAAAAAAAAAAAAAAAAAAAAAAAAAAAAAAAAAA
>ZF5 target sequence
SEQ ID NO.: 118
GGCGGGGGACCGATTAACCAT
>ZF5 amino acid sequence
SEQ ID NO.: 119
LEPGEKPYKCPECGKSFSTSGNLTEHQRTHTGEKPYKCPECGKSFSDSGNLRVHQRTHTGEKPYKCPECGKSFSHKNALQNHQ
RTHTGEKPYKCPECGKSFSRNDTLTEHQRTHTGEKPYKCPECGKSFSQRAHLERHQRTHTGEKPYKCPECGKSFSRSDKLVRH
QRTHTGEKPYKCPECGKSFSDPGHLVRHQRTHTGEKPTGKKTS
>ZF5 mRNA sequence
SEQ ID NO.: 215
CUCGAACCGGGCGAGAAACCAUAUAAGUGUCCAGAGUGUGGUAAGAGCUUUAGCACCAGUGGCAAUCUGACCGAGCAUCAACG
CACGCAUACGGGUGAGAAACCGUACAAGUGCCCGGAAUGCGGCAAAAGUUUCAGCGAUAGCGGCAAUCUGCGUGUGCACCAGC
GUACGCAUACGGGCGAAAAGCCGUAUAAGUGCCCAGAAUGCGGUAAGAGUUUUAGCCACAAAAACGCGCUGCAGAACCACCAG
CGCACCCACACGGGUGAGAAGCCAUACAAAUGUCCGGAAUGCGGCAAAAGCUUCAGCCGCAACGAUACGCUGACGGAACACCA
ACGUACGCAUACCGGCGAAAAGCCAUACAAGUGCCCGGAGUGCGGUAAAAGCUUUAGCCAGCGCGCGCAUCUCGAACGUCAUC
AACGUACCCAUACCGGUGAAAAACCAUAUAAAUGCCCGGAAUGUGGUAAAAGUUUUAGCCGCAGCGACAAACUGGUGCGUCAU
CAACGCACCCAUACCGGUGAAAAGCCAUAUAAGUGCCCGGAGUGUGGUAAAAGCUUCAGCGAUCCGGGUCAUCUGGUUCGCCA
UCAACGUACGCACACCGGCGAGAAGCCAACCGGCAAGAAAACCAGC
>ZF6-VPR protein
SEQ ID NO.: 120
MAPKKKRKVGIHGVPAAGSSGSLEPGEKPYKCPECGKSFSTSHSLTEHQRTHTGEKPYKCPECGKSFSQRANLRAHQRTHTGE
KPYKCPECGKSFSRADNLTEHQRTHTGEKPYKCPECGKSFSERSHLREHQRTHTGEKPYKCPECGKSFSDPGALVRHQRTHTG
EKPYKCPECGKSFSTSGHLVRHQRTHTGEKPYKCPECGKSFSRNDTLTEHQRTHTGEKPTGKKTSASGSGGGSGGDALDDFDL
DMLGSDALDDFDLDMLGSDALDDFDLDMLGSDALDDFDLDMLSGGPKKKRKVGSQYLPDTDDRHRIEEKRKRTYETFKSIMKK
SPFSGPTDPRPPPRRIAVPSRSSASVPKPAPQPYPFTSSLSTINYDEFPTMVFPSGQISQASALAPAPPQVLPQAPAPAPAPA
MVSALAQAPAPVPVLAPGPPQAVAPPAPKPTQAGEGTLSEALLQLQFDDEDLGALLGNSTDPAVFTDLASVDNSEFQQLLNQG
IPVAPHTTEPMLMEYPEAITRLVTGAQRPPDPAPAPLGAPGLPNGLLSGDEDFSSIADMDFSALLGSGSGSRDSREGMFLPKP
EAGSAISDVFEGREVCQPKRLRPFHPPGSPWANRPLPASLAPTPTGPVHEPVGSLTPAPVPQPLDPAPAVTPEASHLLEDPDE
ETSQAVKALREMADTVIPQKEEAAICGQMDLSHPPPRGHLDELTTTLESMTEDLNLDSPLTPELNEILDTFLNDECLLHAMHI
STGLSIFDTSLFSGGKRPAATKKAGQAKKKKGSYPYDVPDYA*
>ZF6-VPR mRNA
SEQ ID NO.: 121
AGGAAAUAAGAGAGAAAAGAAGAGUAAGAAGAAAUAUAAGAGCCACCAUGGCCCCCAAGAAGAAGCGGAAGGUGGGCAUCCAC
GGCGUGCCCGCCGCCGGCAGCAGCGGAUCCCUCGAACCGGGCGAAAAACCGUAUAAGUGUCCGGAGUGCGGCAAGAGCUUCAG
CACGAGCCAUAGUCUGACCGAACACCAGCGCACCCACACGGGCGAAAAGCCGUACAAAUGUCCAGAGUGUGGUAAGAGUUUCA
GCCAGCGUGCCAAUCUGCGCGCCCACCAACGUACCCACACCGGUGAGAAGCCGUAUAAGUGCCCAGAGUGUGGUAAAAGCUUC
AGCCGCGCCGAUAAUCUGACGGAGCACCAACGCACCCACACCGGCGAAAAGCCAUACAAGUGCCCGGAGUGUGGCAAGAGCUU
UAGCGAACGCAGCCAUCUGCGCGAACACCAACGUACGCACACGGGUGAGAAACCAUACAAAUGUCCAGAAUGUGGUAAAAGUU
UUAGCGAUCCGGGCGCGCUGGUUCGCCACCAGCGCACGCACACCGGUGAAAAGCCGUAUAAAUGUCCAGAAUGCGGCAAAAGC
UUCAGUACCAGCGGUCAUCUGGUUCGUCAUCAGCGUACCCAUACCGGCGAGAAGCCAUAUAAGUGCCCGGAGUGUGGCAAAAG
UUUCAGCCGCAAUGAUACGCUGACCGAGCAUCAGCGUACGCAUACCGGUGAAAAACCAACCGGCAAGAAAACCAGCGCUAGCG
GCAGCGGCGGCGGCAGCGGCGGCGACGCCCUGGACGACUUCGACCUGGACAUGCUGGGCAGCGACGCCCUGGACGACUUCGAC
CUGGACAUGCUGGGCAGCGACGCCCUGGACGACUUCGACCUGGACAUGCUGGGCAGCGACGCCCUGGACGACUUCGACCUGGA
CAUGCUGAGCGGCGGCCCCAAGAAGAAGCGGAAGGUGGGCAGCCAGUACCUGCCCGACACCGACGACCGGCACCGGAUCGAGG
AGAAGCGGAAGCGGACCUACGAGACCUUCAAGAGCAUCAUGAAGAAAUCCCCCUUCAGCGGCCCCACCGACCCCCGGCCCCCC
CCCCGGCGGAUCGCCGUGCCCAGCCGGAGCAGCGCCAGCGUGCCCAAGCCCGCCCCCCAGCCCUACCCCUUCACCAGCAGCCU
GAGCACCAUCAACUACGACGAGUUCCCCACCAUGGUGUUCCCCAGCGGCCAGAUCAGCCAGGCCAGCGCCCUGGCCCCCGCCC
CCCCCCAGGUGCUGCCCCAGGCCCCCGCCCCCGCCCCCGCCCCCGCCAUGGUGAGCGCCCUGGCCCAGGCCCCCGCCCCCGUG
CCCGUGCUGGCCCCCGGCCCCCCCCAGGCCGUGGCCCCCCCCGCCCCCAAGCCCACCCAGGCCGGCGAGGGCACCCUGAGCGA
GGCCCUGCUGCAGCUGCAGUUCGACGACGAGGACCUGGGCGCCCUGCUGGGCAACAGCACCGACCCCGCCGUGUUCACCGACC
UGGCCAGCGUGGACAACAGCGAGUUCCAGCAGCUGCUGAACCAGGGCAUCCCCGUGGCCCCCCACACCACCGAGCCCAUGCUG
AUGGAGUACCCCGAGGCCAUCACCCGGCUGGUGACCGGCGCCCAGCGGCCCCCCGACCCCGCCCCCGCCCCCCUGGGCGCCCC
CGGCCUGCCCAACGGCCUGCUGAGCGGCGACGAGGACUUCAGCAGCAUCGCCGACAUGGACUUCAGCGCCCUGCUGGGCAGCG
GCAGCGGCAGCCGGGACAGCCGGGAGGGCAUGUUCCUGCCCAAGCCCGAGGCCGGCAGCGCCAUCAGCGACGUGUUCGAGGGC
CGGGAGGUGUGCCAGCCCAAGCGGCUCCGGCCCUUCCACCCCCCCGGCAGCCCCUGGGCCAACCGGCCCCUGCCCGCCAGCCU
GGCCCCCACCCCCACCGGCCCCGUGCACGAGCCCGUGGGCAGCCUGACCCCCGCCCCCGUGCCCCAGCCCCUGGACCCCGCCC
CCGCCGUGACCCCCGAGGCCAGCCACCUGCUGGAGGACCCCGACGAGGAGACCAGCCAGGCCGUGAAGGCCCUGCGGGAGAUG
GCCGACACCGUGAUCCCCCAGAAGGAGGAGGCCGCCAUCUGCGGCCAGAUGGACCUGAGCCACCCCCCCCCCCGGGGCCACCU
GGACGAGCUGACCACCACCCUGGAGAGCAUGACCGAGGACCUGAACCUGGACAGCCCCCUGACCCCCGAGCUGAACGAGAUCC
UGGACACCUUCCUGAACGACGAGUGCCUGCUGCACGCCAUGCACAUCAGCACCGGCCUGAGCAUCUUCGACACCAGCCUGUUC
AGCGGCGGCAAGCGGCCCGCCGCCACCAAGAAGGCCGGCCAGGCCAAGAAGAAGAAGGGCAGCUACCCCUACGACGUGCCCGA
CUACGCCUGAGCGGCCGCUUAAUUAAGCUGCCUUCUGCGGGGCUUGCCUUCUGGCCAUGCCCUUCUUCUCUCCCUUGCACCUG
UACCUCUUGGUCUUUGAAUAAAGCCUGAGUAGGAAGUCUAGAAAAAAAAAAAAAAAAAAAAAAAAAAAAAAAAAAAAAAAAAA
AAAAAAAAAAAAAAAAAAAAAAAAAAAAAAAAAAAAAA
>ZF6 target sequence
SEQ ID NO.: 122
CCGGGTGTCAGCCAGAAACCA
>ZF6 amino acid sequence
SEQ ID No.: 123
LEPGEKPYKCPECGKSFSTSHSLTEHQRTHTGEKPYKCPECGKSFSQRANLRAHQRTHTGEKPYKCPECGKSFSRADNLTEHQ
RTHTGEKPYKCPECGKSFSERSHLREHQRTHTGEKPYKCPECGKSFSDPGALVRHQRTHTGEKPYKCPECGKSFSTSGHLVRH
QRTHTGEKPYKCPECGKSFSRNDTLTEHQRTHTGEKPTGKKTS
>ZF6 mRNA sequence
SEQ ID NO.: 216
CUCGAACCGGGCGAAAAACCGUAUAAGUGUCCGGAGUGCGGCAAGAGCUUCAGCACGAGCCAUAGUCUGACCGAACACCAGCG
CACCCACACGGGCGAAAAGCCGUACAAAUGUCCAGAGUGUGGUAAGAGUUUCAGCCAGCGUGCCAAUCUGCGCGCCCACCAAC
GUACCCACACCGGUGAGAAGCCGUAUAAGUGCCCAGAGUGUGGUAAAAGCUUCAGCCGCGCCGAUAAUCUGACGGAGCACCAA
CGCACCCACACCGGCGAAAAGCCAUACAAGUGCCCGGAGUGUGGCAAGAGCUUUAGCGAACGCAGCCAUCUGCGCGAACACCA
ACGUACGCACACGGGUGAGAAACCAUACAAAUGUCCAGAAUGUGGUAAAAGUUUUAGCGAUCCGGGCGCGCUGGUUCGCCACC
AGCGCACGCACACCGGUGAAAAGCCGUAUAAAUGUCCAGAAUGCGGCAAAAGCUUCAGUACCAGCGGUCAUCUGGUUCGUCAU
CAGCGUACCCAUACCGGCGAGAAGCCAUAUAAGUGCCCGGAGUGUGGCAAAAGUUUCAGCCGCAAUGAUACGCUGACCGAGCA
UCAGCGUACGCAUACCGGUGAAAAACCAACCGGCAAGAAAACCAGC
>ZF7-VPR protein
SEQ ID NO.: 124
MAPKKKRKVGIHGVPAAGSSGSLEPGEKPYKCPECGKSFSRSDHLTNHQRTHTGEKPYKCPECGKSFSTSGSLVRHQRTHTGE
KPYKCPECGKSFSQAGHLASHQRTHTGEKPYKCPECGKSFSRSDKLTEHQRTHTGEKPYKCPECGKSFSTSGNLTEHQRTHTG
EKPYKCPECGKSFSQSSNLVRHQRTHTGEKPYKCPECGKSFSTHLDLIRHQRTHTGEKPTGKKTSASGSGGGSGGDALDDFDL
DMLGSDALDDFDLDMLGSDALDDFDLDMLGSDALDDFDLDMLSGGPKKKRKVGSQYLPDTDDRHRIEEKRKRTYETFKSIMKK
SPFSGPTDPRPPPRRIAVPSRSSASVPKPAPQPYPFTSSLSTINYDEFPTMVFPSGQISQASALAPAPPQVLPQAPAPAPAPA
MVSALAQAPAPVPVLAPGPPQAVAPPAPKPTQAGEGTLSEALLQLQFDDEDLGALLGNSTDPAVFTDLASVDNSEFQQLLNQG
IPVAPHTTEPMLMEYPEAITRLVTGAQRPPDPAPAPLGAPGLPNGLLSGDEDFSSIADMDFSALLGSGSGSRDSREGMFLPKP
EAGSAISDVFEGREVCQPKRLRPFHPPGSPWANRPLPASLAPTPTGPVHEPVGSLTPAPVPQPLDPAPAVTPEASHLLEDPDE
ETSQAVKALREMADTVIPQKEEAAICGQMDLSHPPPRGHLDELTTTLESMTEDLNLDSPLTPELNEILDTFLNDECLLHAMHI
STGLSIFDTSLFSGGKRPAATKKAGQAKKKKGSYPYDVPDYA*
>ZF7-VPR mRNA
SEQ ID No.: 125
AGGAAAUAAGAGAGAAAAGAAGAGUAAGAAGAAAUAUAAGAGCCACCAUGGCCCCCAAGAAGAAGCGGAAGGUGGGCAUCCAC
GGCGUGCCCGCCGCCGGCAGCAGCGGAUCCCUGGAACCGGGCGAGAAGCCAUACAAGUGCCCAGAGUGCGGCAAAAGCUUCAG
CCGCAGCGACCAUCUGACCAAUCACCAACGCACCCAUACCGGUGAGAAGCCGUACAAAUGCCCAGAGUGCGGUAAGAGCUUUA
GUACCAGUGGCAGUCUGGUUCGUCAUCAGCGCACGCACACGGGCGAAAAACCAUACAAAUGCCCGGAGUGCGGCAAAAGCUUU
AGCCAAGCCGGUCAUCUGGCGAGCCAUCAACGUACGCACACCGGCGAGAAGCCGUAUAAAUGUCCGGAGUGCGGUAAGAGCUU
UAGCCGUAGCGAUAAACUGACCGAACACCAACGUACGCAUACGGGCGAGAAACCAUAUAAAUGUCCAGAGUGUGGCAAGAGUU
UCAGCACCAGCGGCAAUCUGACCGAGCAUCAACGUACCCAUACCGGUGAAAAGCCAUAUAAAUGUCCAGAAUGCGGUAAGAGU
UUUAGUCAGAGCAGUAAUCUGGUGCGCCAUCAGCGUACCCACACGGGUGAGAAACCAUAUAAGUGUCCGGAAUGCGGCAAGAG
UUUUAGCACCCAUCUGGAUCUGAUCCGUCAUCAGCGCACCCACACCGGUGAAAAACCAACCGGCAAGAAAACCAGUGCUAGCG
GCAGCGGCGGCGGCAGCGGCGGCGACGCCCUGGACGACUUCGACCUGGACAUGCUGGGCAGCGACGCCCUGGACGACUUCGAC
CUGGACAUGCUGGGCAGCGACGCCCUGGACGACUUCGACCUGGACAUGCUGGGCAGCGACGCCCUGGACGACUUCGACCUGGA
CAUGCUGAGCGGCGGCCCCAAGAAGAAGCGGAAGGUGGGCAGCCAGUACCUGCCCGACACCGACGACCGGCACCGGAUCGAGG
AGAAGCGGAAGCGGACCUACGAGACCUUCAAGAGCAUCAUGAAGAAAUCCCCCUUCAGCGGCCCCACCGACCCCCGGCCCCCC
CCCCGGCGGAUCGCCGUGCCCAGCCGGAGCAGCGCCAGCGUGCCCAAGCCCGCCCCCCAGCCCUACCCCUUCACCAGCAGCCU
GAGCACCAUCAACUACGACGAGUUCCCCACCAUGGUGUUCCCCAGCGGCCAGAUCAGCCAGGCCAGCGCCCUGGCCCCCGCCC
CCCCCCAGGUGCUGCCCCAGGCCCCCGCCCCCGCCCCCGCCCCCGCCAUGGUGAGCGCCCUGGCCCAGGCCCCCGCCCCCGUG
CCCGUGCUGGCCCCCGGCCCCCCCCAGGCCGUGGCCCCCCCCGCCCCCAAGCCCACCCAGGCCGGCGAGGGCACCCUGAGCGA
GGCCCUGCUGCAGCUGCAGUUCGACGACGAGGACCUGGGCGCCCUGCUGGGCAACAGCACCGACCCCGCCGUGUUCACCGACC
UGGCCAGCGUGGACAACAGCGAGUUCCAGCAGCUGCUGAACCAGGGCAUCCCCGUGGCCCCCCACACCACCGAGCCCAUGCUG
AUGGAGUACCCCGAGGCCAUCACCCGGCUGGUGACCGGCGCCCAGCGGCCCCCCGACCCCGCCCCCGCCCCCCUGGGCGCCCC
CGGCCUGCCCAACGGCCUGCUGAGCGGCGACGAGGACUUCAGCAGCAUCGCCGACAUGGACUUCAGCGCCCUGCUGGGCAGCG
GCAGCGGCAGCCGGGACAGCCGGGAGGGCAUGUUCCUGCCCAAGCCCGAGGCCGGCAGCGCCAUCAGCGACGUGUUCGAGGGC
CGGGAGGUGUGCCAGCCCAAGCGGCUCCGGCCCUUCCACCCCCCCGGCAGCCCCUGGGCCAACCGGCCCCUGCCCGCCAGCCU
GGCCCCCACCCCCACCGGCCCCGUGCACGAGCCCGUGGGCAGCCUGACCCCCGCCCCCGUGCCCCAGCCCCUGGACCCCGCCC
CCGCCGUGACCCCCGAGGCCAGCCACCUGCUGGAGGACCCCGACGAGGAGACCAGCCAGGCCGUGAAGGCCCUGCGGGAGAUG
GCCGACACCGUGAUCCCCCAGAAGGAGGAGGCCGCCAUCUGCGGCCAGAUGGACCUGAGCCACCCCCCCCCCCGGGGCCACCU
GGACGAGCUGACCACCACCCUGGAGAGCAUGACCGAGGACCUGAACCUGGACAGCCCCCUGACCCCCGAGCUGAACGAGAUCC
UGGACACCUUCCUGAACGACGAGUGCCUGCUGCACGCCAUGCACAUCAGCACCGGCCUGAGCAUCUUCGACACCAGCCUGUUC
AGCGGCGGCAAGCGGCCCGCCGCCACCAAGAAGGCCGGCCAGGCCAAGAAGAAGAAGGGCAGCUACCCCUACGACGUGCCCGA
CUACGCCUGAGCGGCCGCUUAAUUAAGCUGCCUUCUGCGGGGCUUGCCUUCUGGCCAUGCCCUUCUUCUCUCCCUUGCACCUG
UACCUCUUGGUCUUUGAAUAAAGCCUGAGUAGGAAGUCUAGAAAAAAAAAAAAAAAAAAAAAAAAAAAAAAAAAAAAAAAAAA
AAAAAAAAAAAAAAAAAAAAAAAAAAAAAAAAAAAAAA
>ZF7.4-VPR mRNA sequence
SEQ ID NO.: 2508
AGGAAAUAAGAGAGAAAAGAAGAGUAAGAAGAAAUAUAAGAGCCACCAUGGCCCCGAAGAAAAAGAGGAAGGUCGGGAUCCAC
GGAGUCCCAGCCGCAGGAAGCAGCGGAAGCCUGGAACCCGGAGAAAAACCCUACAAGUGCCCAGAAUGCGGCAAGAGCUUCAG
CCGCAGCGACCACCUGACCAACCACCAGAGAACCCACACCGGAGAAAAGCCAUACAAAUGCCCAGAGUGCGGGAAAAGCUUCA
GCACAAGCGGCAGCCUCGUCAGGCACCAGCGGACACACACCGGCGAGAAGCCCUACAAGUGCCCGGAAUGCGGAAAGAGCUUC
AGCCAAGCCGGACACCUCGCCAGCCACCAGAGGACCCACACAGGAGAGAAACCGUACAAAUGCCCGGAGUGCGGCAAGAGCUU
CAGCCGGAGCGACAAGCUGACCGAACACCAGCGAACCCACACGGGCGAAAAGCCGUACAAGUGCCCCGAGUGCGGAAAAAGCU
UCAGCACGAGCGGAAACCUCACCGAGCACCAGCGCACCCACACGGGAGAGAAGCCGUACAAGUGCCCCGAAUGCGGAAAGAGC
UUCAGCCAGAGCAGCAACCUCGUGCGCCACCAACGGACGCACACAGGGGAAAAGCCCUACAAGUGCCCGGAAUGCGGCAAAAG
CUUCAGCACCCACCUGGACCUGAUCCGGCACCAACGCACGCACACCGGGGAAAAACCGACCGGAAAAAAGACCAGCGCGAGCG
GAAGCGGAGGAGGAAGCGGAGGCGACGCCCUGGACGACUUCGACCUGGACAUGCUGGGGAGCGACGCACUGGACGACUUCGAC
CUGGACAUGCUGGGAAGCGACGCGCUGGACGACUUCGACCUGGACAUGCUGGGCAGCGACGCCCUCGACGACUUCGACCUCGA
CAUGCUGAGCGGCGGACCCAAGAAGAAGAGAAAGGUCGGAAGCCAGUACCUCCCGGACACCGACGACAGGCACCGCAUCGAAG
AGAAGCGGAAAAGAACCUACGAAACCUUCAAGAGCAUCAUGAAAAAGAGCCCGUUCAGCGGACCAACCGACCCCAGACCACCA
CCGAGAAGAAUCGCGGUCCCAAGCAGGAGCAGCGCCAGCGUCCCGAAGCCAGCCCCACAGCCGUACCCCUUCACCAGCAGCCU
GAGCACCAUCAACUACGACGAGUUCCCCACCAUGGUGUUCCCGAGCGGCCAGAUAAGCCAGGCCAGCGCACUGGCACCAGCCC
CACCGCAAGUGCUGCCCCAAGCACCCGCACCAGCACCCGCCCCCGCGAUGGUCAGCGCCCUGGCACAAGCCCCAGCCCCAGUC
CCGGUGCUCGCACCAGGACCACCCCAAGCAGUCGCACCGCCAGCCCCAAAGCCGACCCAAGCCGGAGAAGGCACCCUCAGCGA
GGCGCUCCUGCAACUCCAAUUCGACGACGAGGACCUGGGAGCCCUGCUGGGCAACAGCACCGACCCGGCAGUGUUCACCGACC
UGGCCAGCGUGGACAACAGCGAAUUCCAGCAGCUCCUGAACCAAGGAAUCCCAGUCGCGCCACACACCACCGAGCCGAUGCUG
AUGGAAUACCCAGAAGCGAUCACGAGACUGGUCACCGGGGCCCAAAGACCGCCGGACCCAGCGCCAGCACCACUGGGAGCCCC
AGGACUGCCCAACGGACUGCUCAGCGGCGACGAGGACUUCAGCAGCAUCGCGGACAUGGACUUCAGCGCACUCCUCGGAAGCG
GAAGCGGCAGCAGAGACAGCCGGGAAGGAAUGUUCCUCCCCAAGCCAGAAGCCGGAAGCGCAAUCAGCGACGUGUUCGAAGGA
CGGGAAGUCUGCCAGCCGAAGCGCCUCAGACCGUUCCACCCACCGGGAAGCCCAUGGGCCAACAGACCGCUGCCAGCCAGCCU
GGCACCGACCCCAACCGGACCAGUCCACGAACCAGUCGGCAGCCUGACACCAGCACCAGUGCCCCAGCCACUGGACCCAGCAC
CGGCAGUGACCCCAGAAGCCAGCCACCUCCUGGAGGACCCCGACGAAGAAACCAGCCAGGCCGUGAAGGCCCUGAGGGAGAUG
GCCGACACGGUGAUCCCACAGAAGGAAGAAGCAGCGAUCUGCGGCCAAAUGGACCUCAGCCACCCACCGCCAAGAGGCCACCU
GGACGAGCUCACCACCACCCUGGAAAGCAUGACCGAGGACCUCAACCUCGACAGCCCCCUGACACCGGAGCUCAACGAGAUCC
UGGACACCUUCCUCAACGACGAAUGCCUGCUCCACGCCAUGCACAUCAGCACCGGACUGAGCAUCUUCGACACCAGCCUGUUC
AGCGGGGGAAAACGACCGGCAGCCACCAAAAAGGCCGGACAGGCGAAGAAGAAGAAGGGGAGCUACCCGUACGACGUGCCCGA
CUACGCCUGAGCGGCCGCUUAAUUAAGCUGCCUUCUGCGGGGCUUGCCUUCUGGCCAUGCCCUUCUUCUCUCCCUUGCACCUG
UACCUCUUGGUCUUUGAAUAAAGCCUGAGUAGGAAGUCUAGAAAAAAAAAAAAAAAAAAAAAAAAAAAAAAAAAAAAAAAAAA
AAAAAAAAAAAAAAAAAAAAAAAAAAAAAAAAAAAAAAAAAAAAAAAAAAAAAAAAAAAAAAAAAAAAAAAA
>ZF7 target sequence
SEQ ID NO.: 126
ACTGAACATCGGTGAGTTAGG
>ZF7 amino acid sequence
SEQ ID NO.: 127
LEPGEKPYKCPECGKSFSRSDHLTNHQRTHTGEKPYKCPECGKSFSTSGSLVRHQRTHTGEKPYKCPECGKSFSQAGHLASHQ
RTHTGEKPYKCPECGKSFSRSDKLTEHQRTHTGEKPYKCPECGKSFSTSGNLTEHQRTHTGEKPYKCPECGKSFSQSSNLVRH
QRTHTGEKPYKCPECGKSFSTHLDLIRHQRTHTGEKPTGKKTS
>ZF7 mRNA
SEQ ID NO.: 217
CUGGAACCGGGCGAGAAGCCAUACAAGUGCCCAGAGUGCGGCAAAAGCUUCAGCCGCAGCGACCAUCUGACCAAUCACCAACG
CACCCAUACCGGUGAGAAGCCGUACAAAUGCCCAGAGUGCGGUAAGAGCUUUAGUACCAGUGGCAGUCUGGUUCGUCAUCAGC
GCACGCACACGGGCGAAAAACCAUACAAAUGCCCGGAGUGCGGCAAAAGCUUUAGCCAAGCCGGUCAUCUGGCGAGCCAUCAA
CGUACGCACACCGGCGAGAAGCCGUAUAAAUGUCCGGAGUGCGGUAAGAGCUUUAGCCGUAGCGAUAAACUGACCGAACACCA
ACGUACGCAUACGGGCGAGAAACCAUAUAAAUGUCCAGAGUGUGGCAAGAGUUUCAGCACCAGCGGCAAUCUGACCGAGCAUC
AACGUACCCAUACCGGUGAAAAGCCAUAUAAAUGUCCAGAAUGCGGUAAGAGUUUUAGUCAGAGCAGUAAUCUGGUGCGCCAU
CAGCGUACCCACACGGGUGAGAAACCAUAUAAGUGUCCGGAAUGCGGCAAGAGUUUUAGCACCCAUCUGGAUCUGAUCCGUCA
UCAGCGCACCCACACCGGUGAAAAACCAACCGGCAAGAAAACCAGU
>ZF7.4 mRNA sequence
SEQ ID NO.: 2509
CUGGAACCCGGAGAAAAACCCUACAAGUGCCCAGAAUGCGGCAAGAGCUUCAGCCGCAGCGACCACCUGACCAACCACCAGAG
AACCCACACCGGAGAAAAGCCAUACAAAUGCCCAGAGUGCGGGAAAAGCUUCAGCACAAGCGGCAGCCUCGUCAGGCACCAGC
GGACACACACCGGCGAGAAGCCCUACAAGUGCCCGGAAUGCGGAAAGAGCUUCAGCCAAGCCGGACACCUCGCCAGCCACCAG
AGGACCCACACAGGAGAGAAACCGUACAAAUGCCCGGAGUGCGGCAAGAGCUUCAGCCGGAGCGACAAGCUGACCGAACACCA
GCGAACCCACACGGGCGAAAAGCCGUACAAGUGCCCCGAGUGCGGAAAAAGCUUCAGCACGAGCGGAAACCUCACCGAGCACC
AGCGCACCCACACGGGAGAGAAGCCGUACAAGUGCCCCGAAUGCGGAAAGAGCUUCAGCCAGAGCAGCAACCUCGUGCGCCAC
CAACGGACGCACACAGGGGAAAAGCCCUACAAGUGCCCGGAAUGCGGCAAAAGCUUCAGCACCCACCUGGACCUGAUCCGGCA
CCAACGCACGCACACCGGGGAAAAACCGACCGGAAAAAAGACCAGC
>ZF8-VPR protein
SEQ ID NO.: 128
MAPKKKRKVGIHGVPAAGSSGSLEPGEKPYKCPECGKSFSRSDHLTTHQRTHTGEKPYKCPECGKSFSTSGELVRHQRTHTGE
KPYKCPECGKSFSRRDELNVHQRTHTGEKPYKCPECGKSFSSPADLTRHQRTHTGEKPYKCPECGKSFSRSDELVRHQRTHTG
EKPYKCPECGKSFSRSDKLVRHQRTHTGEKPYKCPECGKSFSTTGALTEHQRTHTGEKPTGKKTSASGSGGGSGGDALDDFDL
DMLGSDALDDFDLDMLGSDALDDFDLDMLGSDALDDFDLDMLSGGPKKKRKVGSQYLPDTDDRHRIEEKRKRTYETFKSIMKK
SPFSGPTDPRPPPRRIAVPSRSSASVPKPAPQPYPFTSSLSTINYDEFPTMVFPSGQISQASALAPAPPQVLPQAPAPAPAPA
MVSALAQAPAPVPVLAPGPPQAVAPPAPKPTQAGEGTLSEALLQLQFDDEDLGALLGNSTDPAVFTDLASVDNSEFQQLLNQG
IPVAPHTTEPMLMEYPEAITRLVTGAQRPPDPAPAPLGAPGLPNGLLSGDEDFSSIADMDFSALLGSGSGSRDSREGMFLPKP
EAGSAISDVFEGREVCQPKRLRPFHPPGSPWANRPLPASLAPTPTGPVHEPVGSLTPAPVPQPLDPAPAVTPEASHLLEDPDE
ETSQAVKALREMADTVIPQKEEAAICGQMDLSHPPPRGHLDELTTTLESMTEDLNLDSPLTPELNEILDTFLNDECLLHAMHI
STGLSIFDTSLFSGGKRPAATKKAGQAKKKKGSYPYDVPDYA*
>ZF8-VPR mRNA
SEQ ID No.: 129
AGGAAAUAAGAGAGAAAAGAAGAGUAAGAAGAAAUAUAAGAGCCACCAUGGCCCCCAAGAAGAAGCGGAAGGUGGGCAUCCAC
GGCGUGCCCGCCGCCGGCAGCAGCGGAUCCCUGGAACCGGGCGAAAAGCCGUACAAGUGCCCGGAAUGUGGCAAAAGUUUUAG
UCGCAGCGAUCAUCUGACCACCCAUCAGCGUACCCAUACCGGUGAGAAGCCAUACAAAUGCCCAGAAUGUGGUAAGAGCUUUA
GCACCAGCGGCGAGCUGGUUCGUCACCAGCGUACCCACACCGGCGAGAAGCCGUAUAAGUGUCCAGAAUGCGGUAAAAGCUUU
AGCCGCCGCGACGAGCUGAAUGUGCAUCAACGCACCCACACGGGCGAGAAGCCAUAUAAGUGCCCGGAGUGUGGUAAGAGUUU
CAGUAGCCCAGCGGAUCUGACCCGUCAUCAACGUACGCACACGGGCGAGAAACCAUACAAGUGUCCGGAGUGCGGCAAAAGUU
UUAGCCGCAGUGAUGAACUGGUGCGCCACCAGCGCACCCAUACCGGCGAAAAACCGUAUAAGUGCCCAGAGUGCGGUAAGAGC
UUCAGCCGCAGCGACAAACUGGUGCGUCACCAGCGCACGCAUACGGGUGAGAAACCGUACAAGUGCCCGGAGUGCGGCAAAAG
CUUCAGCACCACCGGCGCGCUGACCGAACAUCAACGUACCCAUACGGGUGAGAAACCAACGGGCAAAAAGACCAGCGCUAGCG
GCAGCGGCGGCGGCAGCGGCGGCGACGCCCUGGACGACUUCGACCUGGACAUGCUGGGCAGCGACGCCCUGGACGACUUCGAC
CUGGACAUGCUGGGCAGCGACGCCCUGGACGACUUCGACCUGGACAUGCUGGGCAGCGACGCCCUGGACGACUUCGACCUGGA
CAUGCUGAGCGGCGGCCCCAAGAAGAAGCGGAAGGUGGGCAGCCAGUACCUGCCCGACACCGACGACCGGCACCGGAUCGAGG
AGAAGCGGAAGCGGACCUACGAGACCUUCAAGAGCAUCAUGAAGAAAUCCCCCUUCAGCGGCCCCACCGACCCCCGGCCCCCC
CCCCGGCGGAUCGCCGUGCCCAGCCGGAGCAGCGCCAGCGUGCCCAAGCCCGCCCCCCAGCCCUACCCCUUCACCAGCAGCCU
GAGCACCAUCAACUACGACGAGUUCCCCACCAUGGUGUUCCCCAGCGGCCAGAUCAGCCAGGCCAGCGCCCUGGCCCCCGCCC
CCCCCCAGGUGCUGCCCCAGGCCCCCGCCCCCGCCCCCGCCCCCGCCAUGGUGAGCGCCCUGGCCCAGGCCCCCGCCCCCGUG
CCCGUGCUGGCCCCCGGCCCCCCCCAGGCCGUGGCCCCCCCCGCCCCCAAGCCCACCCAGGCCGGCGAGGGCACCCUGAGCGA
GGCCCUGCUGCAGCUGCAGUUCGACGACGAGGACCUGGGCGCCCUGCUGGGCAACAGCACCGACCCCGCCGUGUUCACCGACC
UGGCCAGCGUGGACAACAGCGAGUUCCAGCAGCUGCUGAACCAGGGCAUCCCCGUGGCCCCCCACACCACCGAGCCCAUGCUG
AUGGAGUACCCCGAGGCCAUCACCCGGCUGGUGACCGGCGCCCAGCGGCCCCCCGACCCCGCCCCCGCCCCCCUGGGCGCCCC
CGGCCUGCCCAACGGCCUGCUGAGCGGCGACGAGGACUUCAGCAGCAUCGCCGACAUGGACUUCAGCGCCCUGCUGGGCAGCG
GCAGCGGCAGCCGGGACAGCCGGGAGGGCAUGUUCCUGCCCAAGCCCGAGGCCGGCAGCGCCAUCAGCGACGUGUUCGAGGGC
CGGGAGGUGUGCCAGCCCAAGCGGCUCCGGCCCUUCCACCCCCCCGGCAGCCCCUGGGCCAACCGGCCCCUGCCCGCCAGCCU
GGCCCCCACCCCCACCGGCCCCGUGCACGAGCCCGUGGGCAGCCUGACCCCCGCCCCCGUGCCCCAGCCCCUGGACCCCGCCC
CCGCCGUGACCCCCGAGGCCAGCCACCUGCUGGAGGACCCCGACGAGGAGACCAGCCAGGCCGUGAAGGCCCUGCGGGAGAUG
GCCGACACCGUGAUCCCCCAGAAGGAGGAGGCCGCCAUCUGCGGCCAGAUGGACCUGAGCCACCCCCCCCCCCGGGGCCACCU
GGACGAGCUGACCACCACCCUGGAGAGCAUGACCGAGGACCUGAACCUGGACAGCCCCCUGACCCCCGAGCUGAACGAGAUCC
UGGACACCUUCCUGAACGACGAGUGCCUGCUGCACGCCAUGCACAUCAGCACCGGCCUGAGCAUCUUCGACACCAGCCUGUUC
AGCGGCGGCAAGCGGCCCGCCGCCACCAAGAAGGCCGGCCAGGCCAAGAAGAAGAAGGGCAGCUACCCCUACGACGUGCCCGA
CUACGCCUGAGCGGCCGCUUAAUUAAGCUGCCUUCUGCGGGGCUUGCCUUCUGGCCAUGCCCUUCUUCUCUCCCUUGCACCUG
UACCUCUUGGUCUUUGAAUAAAGCCUGAGUAGGAAGUCUAGAAAAAAAAAAAAAAAAAAAAAAAAAAAAAAAAAAAAAAAAAA
AAAAAAAAAAAAAAAAAAAAAAAAAAAAAAAAAAAAAA
>ZF8 target sequence
SEQ ID NO.: 130
CTTGGGGTGACAATGGCTTGG
>ZF8 amino acid sequence
SEQ ID NO.: 131
LEPGEKPYKCPECGKSFSRSDHLTTHQRTHTGEKPYKCPECGKSFSTSGELVRHQRTHTGEKPYKCPECGKSFSRRDELNVHQ
RTHTGEKPYKCPECGKSFSSPADLTRHQRTHTGEKPYKCPECGKSFSRSDELVRHQRTHTGEKPYKCPECGKSFSRSDKLVRH
QRTHTGEKPYKCPECGKSFSTTGALTEHQRTHTGEKPTGKKTS
>ZF8 mRNA sequence
SEQ ID NO.: 218
CUGGAACCGGGCGAAAAGCCGUACAAGUGCCCGGAAUGUGGCAAAAGUUUUAGUCGCAGCGAUCAUCUGACCACCCAUCAGCG
UACCCAUACCGGUGAGAAGCCAUACAAAUGCCCAGAAUGUGGUAAGAGCUUUAGCACCAGCGGCGAGCUGGUUCGUCACCAGC
GUACCCACACCGGCGAGAAGCCGUAUAAGUGUCCAGAAUGCGGUAAAAGCUUUAGCCGCCGCGACGAGCUGAAUGUGCAUCAA
CGCACCCACACGGGCGAGAAGCCAUAUAAGUGCCCGGAGUGUGGUAAGAGUUUCAGUAGCCCAGCGGAUCUGACCCGUCAUCA
ACGUACGCACACGGGCGAGAAACCAUACAAGUGUCCGGAGUGCGGCAAAAGUUUUAGCCGCAGUGAUGAACUGGUGCGCCACC
AGCGCACCCAUACCGGCGAAAAACCGUAUAAGUGCCCAGAGUGCGGUAAGAGCUUCAGCCGCAGCGACAAACUGGUGCGUCAC
CAGCGCACGCAUACGGGUGAGAAACCGUACAAGUGCCCGGAGUGCGGCAAAAGCUUCAGCACCACCGGCGCGCUGACCGAACA
UCAACGUACCCAUACGGGUGAGAAACCAACGGGCAAAAAGACCAGC
>ZF9-VPR protein
SEQ ID NO.: 132
MAPKKKRKVGIHGVPAAGSSGSLEPGEKPYKCPECGKSFSQSGNLTEHQRTHTGEKPYKCPECGKSFSHKNALQNHQRTHTGE
KPYKCPECGKSFSQNSTLTEHQRTHTGEKPYKCPECGKSFSSKKHLAEHQRTHTGEKPYKCPECGKSFSTSGNLVRHQRTHTG
EKPYKCPECGKSFSQSGHLTEHQRTHTPNPHRRTDPSHKPFQYKCPECGKSFSDKKDLTRHQRTHTGEKPTGKKTSASGSGGG
SGGDALDDFDLDMLGSDALDDFDLDMLGSDALDDFDLDMLGSDALDDFDLDMLSGGPKKKRKVGSQYLPDTDDRHRIEEKRKR
TYETFKSIMKKSPFSGPTDPRPPPRRIAVPSRSSASVPKPAPQPYPFTSSLSTINYDEFPTMVFPSGQISQASALAPAPPQVL
PQAPAPAPAPAMVSALAQAPAPVPVLAPGPPQAVAPPAPKPTQAGEGTLSEALLQLQFDDEDLGALLGNSTDPAVFTDLASVD
NSEFQQLLNQGIPVAPHTTEPMLMEYPEAITRLVTGAQRPPDPAPAPLGAPGLPNGLLSGDEDFSSIADMDFSALLGSGSGSR
DSREGMFLPKPEAGSAISDVFEGREVCQPKRLRPFHPPGSPWANRPLPASLAPTPTGPVHEPVGSLTPAPVPQPLDPAPAVTP
EASHLLEDPDEETSQAVKALREMADTVIPQKEEAAICGQMDLSHPPPRGHLDELTTTLESMTEDLNLDSPLTPELNEILDTFL
NDECLLHAMHISTGLSIFDTSLFSGGKRPAATKKAGQAKKKKGSYPYDVPDYA*
>ZF9-VPR mRNA
SEQ ID NO.: 133
AGGAAAUAAGAGAGAAAAGAAGAGUAAGAAGAAAUAUAAGAGCCACCAUGGCCCCCAAGAAGAAGCGGAAGGUGGGCAUCCAC
GGCGUGCCCGCCGCCGGCAGCAGCGGAUCCCUCGAACCGGGCGAAAAGCCAUACAAAUGUCCGGAGUGUGGCAAGAGUUUCAG
CCAAAGCGGCAACCUCACCGAGCACCAGCGCACGCACACCGGCGAGAAGCCAUAUAAAUGUCCAGAAUGCGGCAAGAGCUUCA
GCCAUAAGAAUGCGCUGCAGAACCAUCAGCGCACCCACACCGGUGAGAAGCCAUACAAGUGCCCAGAGUGCGGCAAAAGUUUC
AGCCAGAAUAGCACCCUCACGGAGCAUCAACGCACGCAUACGGGUGAAAAGCCGUACAAAUGCCCAGAAUGUGGCAAGAGCUU
UAGCAGCAAGAAACAUCUGGCGGAGCAUCAGCGUACCCACACGGGCGAAAAGCCAUACAAAUGUCCGGAAUGCGGCAAAAGCU
UCAGCACGAGUGGCAAUCUGGUGCGCCAUCAACGUACGCACACGGGUGAGAAACCGUAUAAAUGCCCAGAGUGUGGUAAAAGC
UUCAGUCAGAGCGGCCAUCUGACCGAACACCAGCGCACCCAUACGCCAAACCCGCAUCGCCGCACCGAUCCGAGCCACAAGCC
GUUCCAGUACAAGUGUCCAGAGUGCGGUAAAAGUUUUAGCGACAAGAAGGAUCUGACCCGUCACCAACGUACCCAUACCGGUG
AAAAACCAACGGGCAAGAAAACCAGCGCUAGCGGCAGCGGCGGCGGCAGCGGCGGCGACGCCCUGGACGACUUCGACCUGGAC
AUGCUGGGCAGCGACGCCCUGGACGACUUCGACCUGGACAUGCUGGGCAGCGACGCCCUGGACGACUUCGACCUGGACAUGCU
GGGCAGCGACGCCCUGGACGACUUCGACCUGGACAUGCUGAGCGGCGGCCCCAAGAAGAAGCGGAAGGUGGGCAGCCAGUACC
UGCCCGACACCGACGACCGGCACCGGAUCGAGGAGAAGCGGAAGCGGACCUACGAGACCUUCAAGAGCAUCAUGAAGAAAUCC
CCCUUCAGCGGCCCCACCGACCCCCGGCCCCCCCCCCGGCGGAUCGCCGUGCCCAGCCGGAGCAGCGCCAGCGUGCCCAAGCC
CGCCCCCCAGCCCUACCCCUUCACCAGCAGCCUGAGCACCAUCAACUACGACGAGUUCCCCACCAUGGUGUUCCCCAGCGGCC
AGAUCAGCCAGGCCAGCGCCCUGGCCCCCGCCCCCCCCCAGGUGCUGCCCCAGGCCCCCGCCCCCGCCCCCGCCCCCGCCAUG
GUGAGCGCCCUGGCCCAGGCCCCCGCCCCCGUGCCCGUGCUGGCCCCCGGCCCCCCCCAGGCCGUGGCCCCCCCCGCCCCCAA
GCCCACCCAGGCCGGCGAGGGCACCCUGAGCGAGGCCCUGCUGCAGCUGCAGUUCGACGACGAGGACCUGGGCGCCCUGCUGG
GCAACAGCACCGACCCCGCCGUGUUCACCGACCUGGCCAGCGUGGACAACAGCGAGUUCCAGCAGCUGCUGAACCAGGGCAUC
CCCGUGGCCCCCCACACCACCGAGCCCAUGCUGAUGGAGUACCCCGAGGCCAUCACCCGGCUGGUGACCGGCGCCCAGCGGCC
CCCCGACCCCGCCCCCGCCCCCCUGGGCGCCCCCGGCCUGCCCAACGGCCUGCUGAGCGGCGACGAGGACUUCAGCAGCAUCG
CCGACAUGGACUUCAGCGCCCUGCUGGGCAGCGGCAGCGGCAGCCGGGACAGCCGGGAGGGCAUGUUCCUGCCCAAGCCCGAG
GCCGGCAGCGCCAUCAGCGACGUGUUCGAGGGCCGGGAGGUGUGCCAGCCCAAGCGGCUCCGGCCCUUCCACCCCCCCGGCAG
CCCCUGGGCCAACCGGCCCCUGCCCGCCAGCCUGGCCCCCACCCCCACCGGCCCCGUGCACGAGCCCGUGGGCAGCCUGACCC
CCGCCCCCGUGCCCCAGCCCCUGGACCCCGCCCCCGCCGUGACCCCCGAGGCCAGCCACCUGCUGGAGGACCCCGACGAGGAG
ACCAGCCAGGCCGUGAAGGCCCUGCGGGAGAUGGCCGACACCGUGAUCCCCCAGAAGGAGGAGGCCGCCAUCUGCGGCCAGAU
GGACCUGAGCCACCCCCCCCCCCGGGGCCACCUGGACGAGCUGACCACCACCCUGGAGAGCAUGACCGAGGACCUGAACCUGG
ACAGCCCCCUGACCCCCGAGCUGAACGAGAUCCUGGACACCUUCCUGAACGACGAGUGCCUGCUGCACGCCAUGCACAUCAGC
ACCGGCCUGAGCAUCUUCGACACCAGCCUGUUCAGCGGCGGCAAGCGGCCCGCCGCCACCAAGAAGGCCGGCCAGGCCAAGAA
GAAGAAGGGCAGCUACCCCUACGACGUGCCCGACUACGCCUGAGCGGCCGCUUAAUUAAGCUGCCUUCUGCGGGGCUUGCCUU
CUGGCCAUGCCCUUCUUCUCUCCCUUGCACCUGUACCUCUUGGUCUUUGAAUAAAGCCUGAGUAGGAAGUCUAGAAAAAAAAA
AAAAAAAAAAAAAAAAAAAAAAAAAAAAAAAAAAAAAAAAAAAAAAAAAAAAAAAAAAAAAAAAAAAAAAA
>ZF9 target
SEQ ID NO.: 134
ACCTCCGAGATCCCCTAATTCAA
>ZF9 amino acid sequence
SEQ ID NO.: 135
LEPGEKPYKCPECGKSFSQSGNLTEHQRTHTGEKPYKCPECGKSFSHKNALQNHQRTHTGEKPYKCPECGKSFSQNSTLTEHQ
RTHTGEKPYKCPECGKSFSSKKHLAEHQRTHTGEKPYKCPECGKSFSTSGNLVRHQRTHTGEKPYKCPECGKSFSQSGHLTEH
QRTHTPNPHRRTDPSHKPFQYKCPECGKSFSDKKDLTRHQRTHTGEKPTGKKTS
>ZF9 mRNA sequnce
SEQ ID NO.: 219
CUCGAACCGGGCGAAAAGCCAUACAAAUGUCCGGAGUGUGGCAAGAGUUUCAGCCAAAGCGGCAACCUCACCGAGCACCAGCG
CACGCACACCGGCGAGAAGCCAUAUAAAUGUCCAGAAUGCGGCAAGAGCUUCAGCCAUAAGAAUGCGCUGCAGAACCAUCAGC
GCACCCACACCGGUGAGAAGCCAUACAAGUGCCCAGAGUGCGGCAAAAGUUUCAGCCAGAAUAGCACCCUCACGGAGCAUCAA
CGCACGCAUACGGGUGAAAAGCCGUACAAAUGCCCAGAAUGUGGCAAGAGCUUUAGCAGCAAGAAACAUCUGGCGGAGCAUCA
GCGUACCCACACGGGCGAAAAGCCAUACAAAUGUCCGGAAUGCGGCAAAAGCUUCAGCACGAGUGGCAAUCUGGUGCGCCAUC
AACGUACGCACACGGGUGAGAAACCGUAUAAAUGCCCAGAGUGUGGUAAAAGCUUCAGUCAGAGCGGCCAUCUGACCGAACAC
CAGCGCACCCAUACGCCAAACCCGCAUCGCCGCACCGAUCCGAGCCACAAGCCGUUCCAGUACAAGUGUCCAGAGUGCGGUAA
AAGUUUUAGCGACAAGAAGGAUCUGACCCGUCACCAACGUACCCAUACCGGUGAAAAACCAACGGGCAAGAAAACCAGC
>ZF10-VPR protein
SEQ ID NO.: 136
MAPKKKRKVGIHGVPAAGSSGSLEPGEKPYKCPECGKSFSQNSTLTEHQRTHTGEKPYKCPECGKSFSERSHLREHQRTHTGE
KPYKCPECGKSFSSKKHLAEHQRTHTGEKPYKCPECGKSFSRNDTLTEHQRTHTGEKPYKCPECGKSFSDCRDLARHQRTHTG
EKPYKCPECGKSFSQSGDLRRHQRTHTGEKPYKCPECGKSFSTKNSLTEHQRTHTGEKPTGKKTSASGSGGGSGGDALDDFDL
DMLGSDALDDFDLDMLGSDALDDFDLDMLGSDALDDFDLDMLSGGPKKKRKVGSQYLPDTDDRHRIEEKRKRTYETFKSIMKK
SPFSGPTDPRPPPRRIAVPSRSSASVPKPAPQPYPFTSSLSTINYDEFPTMVFPSGQISQASALAPAPPQVLPQAPAPAPAPA
MVSALAQAPAPVPVLAPGPPQAVAPPAPKPTQAGEGTLSEALLQLQFDDEDLGALLGNSTDPAVFTDLASVDNSEFQQLLNQG
IPVAPHTTEPMLMEYPEAITRLVTGAQRPPDPAPAPLGAPGLPNGLLSGDEDFSSIADMDFSALLGSGSGSRDSREGMFLPKP
EAGSAISDVFEGREVCQPKRLRPFHPPGSPWANRPLPASLAPTPTGPVHEPVGSLTPAPVPQPLDPAPAVTPEASHLLEDPDE
ETSQAVKALREMADTVIPQKEEAAICGQMDLSHPPPRGHLDELTTTLESMTEDLNLDSPLTPELNEILDTFLNDECLLHAMHI
STGLSIFDTSLFSGGKRPAATKKAGQAKKKKGSYPYDVPDYA*
>ZF10-VPR mRNA
SEQ ID NO.: 137
AGGAAAUAAGAGAGAAAAGAAGAGUAAGAAGAAAUAUAAGAGCCACCAUGGCCCCCAAGAAGAAGCGGAAGGUGGGCAUCCAC
GGCGUGCCCGCCGCCGGCAGCAGCGGAUCCCUGGAGCCCGGCGAGAAGCCCUACAAAUGUCCCGAGUGUGGCAAGUCCUUCUC
CCAGAAUAGCACACUGACAGAACACCAGAGGACACACACCGGCGAGAAACCUUAUAAGUGCCCCGAAUGCGGCAAAAGCUUUU
CCGAGAGGAGCCACCUGAGGGAACACCAGAGAACACACACCGGAGAAAAACCUUACAAAUGCCCCGAGUGCGGAAAGUCCUUC
AGCAGCAAGAAGCACCUGGCUGAACACCAGAGAACCCACACCGGCGAGAAGCCUUACAAGUGCCCCGAAUGUGGCAAAAGCUU
CUCUAGAAACGACACACUCACCGAGCACCAGAGAACCCACACCGGCGAAAAGCCUUAUAAGUGUCCCGAGUGUGGCAAGAGCU
UCAGCGAUUGUAGAGAUCUGGCCAGACACCAAAGGACCCACACCGGAGAAAAACCUUACAAGUGCCCCGAGUGUGGAAAGAGC
UUUAGCCAAAGCGGCGAUCUGAGGAGACACCAGAGAACACACACCGGCGAAAAACCCUAUAAGUGUCCCGAAUGCGGAAAAUC
CUUCAGCACCAAAAACUCUCUGACCGAGCACCAAAGAACCCACACCGGCGAAAAGCCUACCGGCAAAAAGACAAGCGCUAGCG
GCAGCGGCGGCGGCAGCGGCGGCGACGCCCUGGACGACUUCGACCUGGACAUGCUGGGCAGCGACGCCCUGGACGACUUCGAC
CUGGACAUGCUGGGCAGCGACGCCCUGGACGACUUCGACCUGGACAUGCUGGGCAGCGACGCCCUGGACGACUUCGACCUGGA
CAUGCUGAGCGGCGGCCCCAAGAAGAAGCGGAAGGUGGGCAGCCAGUACCUGCCCGACACCGACGACCGGCACCGGAUCGAGG
AGAAGCGGAAGCGGACCUACGAGACCUUCAAGAGCAUCAUGAAGAAAUCCCCCUUCAGCGGCCCCACCGACCCCCGGCCCCCC
CCCCGGCGGAUCGCCGUGCCCAGCCGGAGCAGCGCCAGCGUGCCCAAGCCCGCCCCCCAGCCCUACCCCUUCACCAGCAGCCU
GAGCACCAUCAACUACGACGAGUUCCCCACCAUGGUGUUCCCCAGCGGCCAGAUCAGCCAGGCCAGCGCCCUGGCCCCCGCCC
CCCCCCAGGUGCUGCCCCAGGCCCCCGCCCCCGCCCCCGCCCCCGCCAUGGUGAGCGCCCUGGCCCAGGCCCCCGCCCCCGUG
CCCGUGCUGGCCCCCGGCCCCCCCCAGGCCGUGGCCCCCCCCGCCCCCAAGCCCACCCAGGCCGGCGAGGGCACCCUGAGCGA
GGCCCUGCUGCAGCUGCAGUUCGACGACGAGGACCUGGGCGCCCUGCUGGGCAACAGCACCGACCCCGCCGUGUUCACCGACC
UGGCCAGCGUGGACAACAGCGAGUUCCAGCAGCUGCUGAACCAGGGCAUCCCCGUGGCCCCCCACACCACCGAGCCCAUGCUG
AUGGAGUACCCCGAGGCCAUCACCCGGCUGGUGACCGGCGCCCAGCGGCCCCCCGACCCCGCCCCCGCCCCCCUGGGCGCCCC
CGGCCUGCCCAACGGCCUGCUGAGCGGCGACGAGGACUUCAGCAGCAUCGCCGACAUGGACUUCAGCGCCCUGCUGGGCAGCG
GCAGCGGCAGCCGGGACAGCCGGGAGGGCAUGUUCCUGCCCAAGCCCGAGGCCGGCAGCGCCAUCAGCGACGUGUUCGAGGGC
CGGGAGGUGUGCCAGCCCAAGCGGCUCCGGCCCUUCCACCCCCCCGGCAGCCCCUGGGCCAACCGGCCCCUGCCCGCCAGCCU
GGCCCCCACCCCCACCGGCCCCGUGCACGAGCCCGUGGGCAGCCUGACCCCCGCCCCCGUGCCCCAGCCCCUGGACCCCGCCC
CCGCCGUGACCCCCGAGGCCAGCCACCUGCUGGAGGACCCCGACGAGGAGACCAGCCAGGCCGUGAAGGCCCUGCGGGAGAUG
GCCGACACCGUGAUCCCCCAGAAGGAGGAGGCCGCCAUCUGCGGCCAGAUGGACCUGAGCCACCCCCCCCCCCGGGGCCACCU
GGACGAGCUGACCACCACCCUGGAGAGCAUGACCGAGGACCUGAACCUGGACAGCCCCCUGACCCCCGAGCUGAACGAGAUCC
UGGACACCUUCCUGAACGACGAGUGCCUGCUGCACGCCAUGCACAUCAGCACCGGCCUGAGCAUCUUCGACACCAGCCUGUUC
AGCGGCGGCAAGCGGCCCGCCGCCACCAAGAAGGCCGGCCAGGCCAAGAAGAAGAAGGGCAGCUACCCCUACGACGUGCCCGA
CUACGCCUGAGCGGCCGCUUAAUUAAGCUGCCUUCUGCGGGGCUUGCCUUCUGGCCAUGCCCUUCUUCUCUCCCUUGCACCUG
UACCUCUUGGUCUUUGAAUAAAGCCUGAGUAGGAAGUCUAGAAAAAAAAAAAAAAAAAAAAAAAAAAAAAAAAAAAAAAAAAA
AAAAAAAAAAAAAAAAAAAAAAAAAAAAAAAAAAAAAA
>ZF10 target sequence
SEQ ID NO.: 138
CCTGCAGCCCCGCCCAGCCTA
>ZF10 amino acid sequence
SEQ ID NO.: 139
LEPGEKPYKCPECGKSFSQNSTLTEHQRTHTGEKPYKCPECGKSFSERSHLREHQRTHTGEKPYKCPECGKSFSSKKHLAEHQ
RTHTGEKPYKCPECGKSFSRNDTLTEHQRTHTGEKPYKCPECGKSFSDCRDLARHQRTHTGEKPYKCPECGKSFSQSGDLRRH
QRTHTGEKPYKCPECGKSFSTKNSLTEHQRTHTGEKPTGKKTS
>ZF10 mRNA sequence
SEQ ID NO.: 220
CUGGAGCCCGGCGAGAAGCCCUACAAAUGUCCCGAGUGUGGCAAGUCCUUCUCCCAGAAUAGCACACUGACAGAACACCAGAG
GACACACACCGGCGAGAAACCUUAUAAGUGCCCCGAAUGCGGCAAAAGCUUUUCCGAGAGGAGCCACCUGAGGGAACACCAGA
GAACACACACCGGAGAAAAACCUUACAAAUGCCCCGAGUGCGGAAAGUCCUUCAGCAGCAAGAAGCACCUGGCUGAACACCAG
AGAACCCACACCGGCGAGAAGCCUUACAAGUGCCCCGAAUGUGGCAAAAGCUUCUCUAGAAACGACACACUCACCGAGCACCA
GAGAACCCACACCGGCGAAAAGCCUUAUAAGUGUCCCGAGUGUGGCAAGAGCUUCAGCGAUUGUAGAGAUCUGGCCAGACACC
AAAGGACCCACACCGGAGAAAAACCUUACAAGUGCCCCGAGUGUGGAAAGAGCUUUAGCCAAAGCGGCGAUCUGAGGAGACAC
CAGAGAACACACACCGGCGAAAAACCCUAUAAGUGUCCCGAAUGCGGAAAAUCCUUCAGCACCAAAAACUCUCUGACCGAGCA
CCAAAGAACCCACACCGGCGAAAAGCCUACCGGCAAAAAGACAAGC
>ZF11-VPR protein
SEQ ID NO.: 140
MAPKKKRKVGIHGVPAAGSSGSLEPGEKPYKCPECGKSFSERSHLREHQRTHTGEKPYKCPECGKSFSRADNLTEHQRTHTGE
KPYKCPECGKSFSRSDKLTEHQRTHTGEKPYKCPECGKSFSSKKHLAEHQRTHTGEKPYKCPECGKSFSTKNSLTEHQRTHTG
EKPYKCPECGKSFSDKKDLTRHQRTHTGEKPYKCPECGKSFSSKKHLAEHQRTHTGEKPTGKKTSASGSGGGSGGDALDDFDL
DMLGSDALDDFDLDMLGSDALDDFDLDMLGSDALDDFDLDMLSGGPKKKRKVGSQYLPDTDDRHRIEEKRKRTYETFKSIMKK
SPFSGPTDPRPPPRRIAVPSRSSASVPKPAPQPYPFTSSLSTINYDEFPTMVFPSGQISQASALAPAPPQVLPQAPAPAPAPA
MVSALAQAPAPVPVLAPGPPQAVAPPAPKPTQAGEGTLSEALLQLQFDDEDLGALLGNSTDPAVFTDLASVDNSEFQQLLNQG
IPVAPHTTEPMLMEYPEAITRLVTGAQRPPDPAPAPLGAPGLPNGLLSGDEDFSSIADMDFSALLGSGSGSRDSREGMFLPKP
EAGSAISDVFEGREVCQPKRLRPFHPPGSPWANRPLPASLAPTPTGPVHEPVGSLTPAPVPQPLDPAPAVTPEASHLLEDPDE
ETSQAVKALREMADTVIPQKEEAAICGQMDLSHPPPRGHLDELTTTLESMTEDLNLDSPLTPELNEILDTFLNDECLLHAMHI
STGLSIFDTSLFSGGKRPAATKKAGQAKKKKGSYPYDVPDYA*
>ZF11-VPR mRNA
SEQ ID NO.: 141
AGGAAAUAAGAGAGAAAAGAAGAGUAAGAAGAAAUAUAAGAGCCACCAUGGCCCCCAAGAAGAAGCGGAAGGUGGGCAUCCAC
GGCGUGCCCGCCGCCGGCAGCAGCGGAUCCCUGGAGCCCGGCGAGAAACCCUACAAGUGUCCCGAGUGUGGCAAGAGCUUUUC
CGAGAGAAGCCACCUGAGGGAACACCAGAGAACCCACACCGGCGAGAAGCCUUACAAAUGCCCCGAAUGUGGAAAGAGCUUUU
CUAGAGCCGACAAUCUGACCGAACACCAAAGAACCCACACCGGCGAAAAACCCUAUAAGUGUCCCGAGUGUGGAAAAAGCUUC
UCUAGAAGCGACAAACUCACAGAGCACCAGAGGACACACACCGGCGAGAAGCCCUACAAAUGUCCCGAGUGCGGCAAAAGCUU
CAGCAGCAAGAAGCACCUGGCCGAGCACCAAAGAACACACACCGGCGAAAAACCUUAUAAAUGCCCCGAGUGCGGCAAGUCCU
UUUCCACCAAGAACUCUCUGACAGAACACCAAAGGACACACACCGGAGAAAAACCCUACAAAUGUCCCGAAUGUGGCAAAUCC
UUCAGCGAUAAGAAGGACCUCACCAGACACCAGAGGACACACACCGGCGAAAAACCUUAUAAAUGUCCCGAGUGCGGAAAGUC
CUUCUCCAGCAAAAAGCACCUCGCUGAGCACCAAAGGACCCACACCGGCGAGAAGCCCACCGGAAAAAAGACCAGCGCUAGCG
GCAGCGGCGGCGGCAGCGGCGGCGACGCCCUGGACGACUUCGACCUGGACAUGCUGGGCAGCGACGCCCUGGACGACUUCGAC
CUGGACAUGCUGGGCAGCGACGCCCUGGACGACUUCGACCUGGACAUGCUGGGCAGCGACGCCCUGGACGACUUCGACCUGGA
CAUGCUGAGCGGCGGCCCCAAGAAGAAGCGGAAGGUGGGCAGCCAGUACCUGCCCGACACCGACGACCGGCACCGGAUCGAGG
AGAAGCGGAAGCGGACCUACGAGACCUUCAAGAGCAUCAUGAAGAAAUCCCCCUUCAGCGGCCCCACCGACCCCCGGCCCCCC
CCCCGGCGGAUCGCCGUGCCCAGCCGGAGCAGCGCCAGCGUGCCCAAGCCCGCCCCCCAGCCCUACCCCUUCACCAGCAGCCU
GAGCACCAUCAACUACGACGAGUUCCCCACCAUGGUGUUCCCCAGCGGCCAGAUCAGCCAGGCCAGCGCCCUGGCCCCCGCCC
CCCCCCAGGUGCUGCCCCAGGCCCCCGCCCCCGCCCCCGCCCCCGCCAUGGUGAGCGCCCUGGCCCAGGCCCCCGCCCCCGUG
CCCGUGCUGGCCCCCGGCCCCCCCCAGGCCGUGGCCCCCCCCGCCCCCAAGCCCACCCAGGCCGGCGAGGGCACCCUGAGCGA
GGCCCUGCUGCAGCUGCAGUUCGACGACGAGGACCUGGGCGCCCUGCUGGGCAACAGCACCGACCCCGCCGUGUUCACCGACC
UGGCCAGCGUGGACAACAGCGAGUUCCAGCAGCUGCUGAACCAGGGCAUCCCCGUGGCCCCCCACACCACCGAGCCCAUGCUG
AUGGAGUACCCCGAGGCCAUCACCCGGCUGGUGACCGGCGCCCAGCGGCCCCCCGACCCCGCCCCCGCCCCCCUGGGCGCCCC
CGGCCUGCCCAACGGCCUGCUGAGCGGCGACGAGGACUUCAGCAGCAUCGCCGACAUGGACUUCAGCGCCCUGCUGGGCAGCG
GCAGCGGCAGCCGGGACAGCCGGGAGGGCAUGUUCCUGCCCAAGCCCGAGGCCGGCAGCGCCAUCAGCGACGUGUUCGAGGGC
CGGGAGGUGUGCCAGCCCAAGCGGCUCCGGCCCUUCCACCCCCCCGGCAGCCCCUGGGCCAACCGGCCCCUGCCCGCCAGCCU
GGCCCCCACCCCCACCGGCCCCGUGCACGAGCCCGUGGGCAGCCUGACCCCCGCCCCCGUGCCCCAGCCCCUGGACCCCGCCC
CCGCCGUGACCCCCGAGGCCAGCCACCUGCUGGAGGACCCCGACGAGGAGACCAGCCAGGCCGUGAAGGCCCUGCGGGAGAUG
GCCGACACCGUGAUCCCCCAGAAGGAGGAGGCCGCCAUCUGCGGCCAGAUGGACCUGAGCCACCCCCCCCCCCGGGGCCACCU
GGACGAGCUGACCACCACCCUGGAGAGCAUGACCGAGGACCUGAACCUGGACAGCCCCCUGACCCCCGAGCUGAACGAGAUCC
UGGACACCUUCCUGAACGACGAGUGCCUGCUGCACGCCAUGCACAUCAGCACCGGCCUGAGCAUCUUCGACACCAGCCUGUUC
AGCGGCGGCAAGCGGCCCGCCGCCACCAAGAAGGCCGGCCAGGCCAAGAAGAAGAAGGGCAGCUACCCCUACGACGUGCCCGA
CUACGCCUGAGCGGCCGCUUAAUUAAGCUGCCUUCUGCGGGGCUUGCCUUCUGGCCAUGCCCUUCUUCUCUCCCUUGCACCUG
UACCUCUUGGUCUUUGAAUAAAGCCUGAGUAGGAAGUCUAGAAAAAAAAAAAAAAAAAAAAAAAAAAAAAAAAAAAAAAAAAA
AAAAAAAAAAAAAAAAAAAAAAAAAAAAAAAAAAAAAA
>ZF11 target sequence
SEQ ID NO.: 142
CCCACCCCTCCCCGGCAGAGC
>ZF11 amino acid sequence
SEQ ID NO.: 143
LEPGEKPYKCPECGKSFSERSHLREHQRTHTGEKPYKCPECGKSFSRADNLTEHQRTHTGEKPYKCPECGKSFSRSDKLTEHQ
RTHTGEKPYKCPECGKSFSSKKHLAEHQRTHTGEKPYKCPECGKSFSTKNSLTEHQRTHTGEKPYKCPECGKSFSDKKDLTRH
QRTHTGEKPYKCPECGKSFSSKKHLAEHQRTHTGEKPTGKKTS
>ZF11 mRNA sequence
SEQ ID NO.: 221
CUGGAGCCCGGCGAGAAACCCUACAAGUGUCCCGAGUGUGGCAAGAGCUUUUCCGAGAGAAGCCACCUGAGGGAACACCAGAG
AACCCACACCGGCGAGAAGCCUUACAAAUGCCCCGAAUGUGGAAAGAGCUUUUCUAGAGCCGACAAUCUGACCGAACACCAAA
GAACCCACACCGGCGAAAAACCCUAUAAGUGUCCCGAGUGUGGAAAAAGCUUCUCUAGAAGCGACAAACUCACAGAGCACCAG
AGGACACACACCGGCGAGAAGCCCUACAAAUGUCCCGAGUGCGGCAAAAGCUUCAGCAGCAAGAAGCACCUGGCCGAGCACCA
AAGAACACACACCGGCGAAAAACCUUAUAAAUGCCCCGAGUGCGGCAAGUCCUUUUCCACCAAGAACUCUCUGACAGAACACC
AAAGGACACACACCGGAGAAAAACCCUACAAAUGUCCCGAAUGUGGCAAAUCCUUCAGCGAUAAGAAGGACCUCACCAGACAC
CAGAGGACACACACCGGCGAAAAACCUUAUAAAUGUCCCGAGUGCGGAAAGUCCUUCUCCAGCAAAAAGCACCUCGCUGAGCA
CCAAAGGACCCACACCGGCGAGAAGCCCACCGGAAAAAAGACCAGC
>ZF12-VPR protein
SEQ ID NO.: 144
MAPKKKRKVGIHGVPAAGSSGSLEPGEKPYKCPECGKSFSSKKHLAEHQRTHTGEKPYKCPECGKSFSTHLDLIRHQRTHTGE
KPYKCPECGKSFSRKDNLKNHQRTHTGEKPYKCPECGKSFSDCRDLARHQRTHTGEKPYKCPECGKSFSREDNLHTHQRTHTG
EKPYKCPECGKSFSDPGHLVRHQRTHTGEKPYKCPECGKSFSQLAHLRAHQRTHTGEKPTGKKTSASGSGGGSGGDALDDFDL
DMLGSDALDDFDLDMLGSDALDDFDLDMLGSDALDDFDLDMLSGGPKKKRKVGSQYLPDTDDRHRIEEKRKRTYETFKSIMKK
SPFSGPTDPRPPPRRIAVPSRSSASVPKPAPQPYPFTSSLSTINYDEFPTMVFPSGQISQASALAPAPPQVLPQAPAPAPAPA
MVSALAQAPAPVPVLAPGPPQAVAPPAPKPTQAGEGTLSEALLQLQFDDEDLGALLGNSTDPAVFTDLASVDNSEFQQLLNQG
IPVAPHTTEPMLMEYPEAITRLVTGAQRPPDPAPAPLGAPGLPNGLLSGDEDFSSIADMDFSALLGSGSGSRDSREGMFLPKP
EAGSAISDVFEGREVCQPKRLRPFHPPGSPWANRPLPASLAPTPTGPVHEPVGSLTPAPVPQPLDPAPAVTPEASHLLEDPDE
ETSQAVKALREMADTVIPQKEEAAICGQMDLSHPPPRGHLDELTTTLESMTEDLNLDSPLTPELNEILDTFLNDECLLHAMHI
STGLSIFDTSLFSGGKRPAATKKAGQAKKKKGSYPYDVPDYA*
>ZF12-VPR mRNA
SEQ ID NO.: 145
AGGAAAUAAGAGAGAAAAGAAGAGUAAGAAGAAAUAUAAGAGCCACCAUGGCCCCCAAGAAGAAGCGGAAGGUGGGCAUCCAC
GGCGUGCCCGCCGCCGGCAGCAGCGGAUCCCUGGAGCCCGGCGAAAAGCCCUACAAAUGUCCCGAAUGUGGCAAGAGCUUCAG
CAGCAAAAAGCACCUGGCUGAACACCAGAGGACCCACACCGGAGAGAAACCCUAUAAAUGUCCCGAGUGUGGAAAAAGCUUCA
GCACCCACCUCGACCUCAUUAGGCACCAAAGAACCCACACCGGCGAAAAACCCUAUAAGUGUCCCGAGUGUGGAAAAUCCUUU
UCUAGAAAGGACAAUCUCAAGAAUCACCAAAGAACACACACCGGCGAGAAACCUUACAAGUGUCCCGAGUGCGGAAAGUCCUU
CUCCGACUGUAGAGAUCUGGCUAGACACCAGAGAACCCACACCGGCGAGAAGCCCUAUAAGUGCCCCGAGUGCGGCAAGUCCU
UCUCUAGAGAGGACAAUCUGCACACACACCAGAGGACCCACACCGGCGAAAAACCUUACAAAUGCCCCGAGUGUGGCAAGAGC
UUUAGCGAUCCCGGACACCUGGUGAGACACCAAAGAACCCACACCGGCGAGAAGCCUUACAAGUGUCCCGAAUGUGGAAAAUC
CUUUAGCCAGCUGGCCCACCUGAGGGCCCACCAAAGGACACACACCGGCGAAAAACCCACCGGCAAAAAGACCAGCGCUAGCG
GCAGCGGCGGCGGCAGCGGCGGCGACGCCCUGGACGACUUCGACCUGGACAUGCUGGGCAGCGACGCCCUGGACGACUUCGAC
CUGGACAUGCUGGGCAGCGACGCCCUGGACGACUUCGACCUGGACAUGCUGGGCAGCGACGCCCUGGACGACUUCGACCUGGA
CAUGCUGAGCGGCGGCCCCAAGAAGAAGCGGAAGGUGGGCAGCCAGUACCUGCCCGACACCGACGACCGGCACCGGAUCGAGG
AGAAGCGGAAGCGGACCUACGAGACCUUCAAGAGCAUCAUGAAGAAAUCCCCCUUCAGCGGCCCCACCGACCCCCGGCCCCCC
CCCCGGCGGAUCGCCGUGCCCAGCCGGAGCAGCGCCAGCGUGCCCAAGCCCGCCCCCCAGCCCUACCCCUUCACCAGCAGCCU
GAGCACCAUCAACUACGACGAGUUCCCCACCAUGGUGUUCCCCAGCGGCCAGAUCAGCCAGGCCAGCGCCCUGGCCCCCGCCC
CCCCCCAGGUGCUGCCCCAGGCCCCCGCCCCCGCCCCCGCCCCCGCCAUGGUGAGCGCCCUGGCCCAGGCCCCCGCCCCCGUG
CCCGUGCUGGCCCCCGGCCCCCCCCAGGCCGUGGCCCCCCCCGCCCCCAAGCCCACCCAGGCCGGCGAGGGCACCCUGAGCGA
GGCCCUGCUGCAGCUGCAGUUCGACGACGAGGACCUGGGCGCCCUGCUGGGCAACAGCACCGACCCCGCCGUGUUCACCGACC
UGGCCAGCGUGGACAACAGCGAGUUCCAGCAGCUGCUGAACCAGGGCAUCCCCGUGGCCCCCCACACCACCGAGCCCAUGCUG
AUGGAGUACCCCGAGGCCAUCACCCGGCUGGUGACCGGCGCCCAGCGGCCCCCCGACCCCGCCCCCGCCCCCCUGGGCGCCCC
CGGCCUGCCCAACGGCCUGCUGAGCGGCGACGAGGACUUCAGCAGCAUCGCCGACAUGGACUUCAGCGCCCUGCUGGGCAGCG
GCAGCGGCAGCCGGGACAGCCGGGAGGGCAUGUUCCUGCCCAAGCCCGAGGCCGGCAGCGCCAUCAGCGACGUGUUCGAGGGC
CGGGAGGUGUGCCAGCCCAAGCGGCUCCGGCCCUUCCACCCCCCCGGCAGCCCCUGGGCCAACCGGCCCCUGCCCGCCAGCCU
GGCCCCCACCCCCACCGGCCCCGUGCACGAGCCCGUGGGCAGCCUGACCCCCGCCCCCGUGCCCCAGCCCCUGGACCCCGCCC
CCGCCGUGACCCCCGAGGCCAGCCACCUGCUGGAGGACCCCGACGAGGAGACCAGCCAGGCCGUGAAGGCCCUGCGGGAGAUG
GCCGACACCGUGAUCCCCCAGAAGGAGGAGGCCGCCAUCUGCGGCCAGAUGGACCUGAGCCACCCCCCCCCCCGGGGCCACCU
GGACGAGCUGACCACCACCCUGGAGAGCAUGACCGAGGACCUGAACCUGGACAGCCCCCUGACCCCCGAGCUGAACGAGAUCC
UGGACACCUUCCUGAACGACGAGUGCCUGCUGCACGCCAUGCACAUCAGCACCGGCCUGAGCAUCUUCGACACCAGCCUGUUC
AGCGGCGGCAAGCGGCCCGCCGCCACCAAGAAGGCCGGCCAGGCCAAGAAGAAGAAGGGCAGCUACCCCUACGACGUGCCCGA
CUACGCCUGAGCGGCCGCUUAAUUAAGCUGCCUUCUGCGGGGCUUGCCUUCUGGCCAUGCCCUUCUUCUCUCCCUUGCACCUG
UACCUCUUGGUCUUUGAAUAAAGCCUGAGUAGGAAGUCUAGAAAAAAAAAAAAAAAAAAAAAAAAAAAAAAAAAAAAAAAAAA
AAAAAAAAAAAAAAAAAAAAAAAAAAAAAAAAAAAAAA
>ZF12 target sequence
SEQ ID NO.: 146
AGAGGCTAGGCCAAGACTCCC
>ZF12 amino acid sequence
SEQ ID NO.: 147
LEPGEKPYKCPECGKSFSSKKHLAEHQRTHTGEKPYKCPECGKSFSTHLDLIRHQRTHTGEKPYKCPECGKSFSRKDNLKNHQ
RTHTGEKPYKCPECGKSFSDCRDLARHQRTHTGEKPYKCPECGKSFSREDNLHTHQRTHTGEKPYKCPECGKSFSDPGHLVRH
QRTHTGEKPYKCPECGKSFSQLAHLRAHQRTHTGEKPTGKKTS
>ZF12 mRNA sequence
SEQ ID NO.: 222
CUGGAGCCCGGCGAAAAGCCCUACAAAUGUCCCGAAUGUGGCAAGAGCUUCAGCAGCAAAAAGCACCUGGCUGAACACCAGAG
GACCCACACCGGAGAGAAACCCUAUAAAUGUCCCGAGUGUGGAAAAAGCUUCAGCACCCACCUCGACCUCAUUAGGCACCAAA
GAACCCACACCGGCGAAAAACCCUAUAAGUGUCCCGAGUGUGGAAAAUCCUUUUCUAGAAAGGACAAUCUCAAGAAUCACCAA
AGAACACACACCGGCGAGAAACCUUACAAGUGUCCCGAGUGCGGAAAGUCCUUCUCCGACUGUAGAGAUCUGGCUAGACACCA
GAGAACCCACACCGGCGAGAAGCCCUAUAAGUGCCCCGAGUGCGGCAAGUCCUUCUCUAGAGAGGACAAUCUGCACACACACC
AGAGGACCCACACCGGCGAAAAACCUUACAAAUGCCCCGAGUGUGGCAAGAGCUUUAGCGAUCCCGGACACCUGGUGAGACAC
CAAAGAACCCACACCGGCGAGAAGCCUUACAAGUGUCCCGAAUGUGGAAAAUCCUUUAGCCAGCUGGCCCACCUGAGGGCCCA
CCAAAGGACACACACCGGCGAAAAACCCACCGGCAAAAAGACCAGC
>ZF13-VPR protein
SEQ ID NO.: 148
MAPKKKRKVGIHGVPAAGSSGSLEPGEKPYKCPECGKSFSRSDKLVRHQRTHTGEKPYKCPECGKSFSQSGDLRRHQRTHTGE
KPYKCPECGKSFSTSGELVRHQRTHTGEKPYKCPECGKSFSRSDKLVRHQRTHTGEKPYKCPECGKSFSDPGHLVRHQRTHTG
EKPYKCPECGKSFSRNDALTEHQRTHTGEKPYKCPECGKSFSRSDHLTNHQRTHTGEKPTGKKTSASGSGGGSGGDALDDFDL
DMLGSDALDDFDLDMLGSDALDDFDLDMLGSDALDDFDLDMLSGGPKKKRKVGSQYLPDTDDRHRIEEKRKRTYETFKSIMKK
SPFSGPTDPRPPPRRIAVPSRSSASVPKPAPQPYPFTSSLSTINYDEFPTMVFPSGQISQASALAPAPPQVLPQAPAPAPAPA
MVSALAQAPAPVPVLAPGPPQAVAPPAPKPTQAGEGTLSEALLQLQFDDEDLGALLGNSTDPAVFTDLASVDNSEFQQLLNQG
IPVAPHTTEPMLMEYPEAITRLVTGAQRPPDPAPAPLGAPGLPNGLLSGDEDFSSIADMDFSALLGSGSGSRDSREGMFLPKP
EAGSAISDVFEGREVCQPKRLRPFHPPGSPWANRPLPASLAPTPTGPVHEPVGSLTPAPVPQPLDPAPAVTPEASHLLEDPDE
ETSQAVKALREMADTVIPQKEEAAICGQMDLSHPPPRGHLDELTTTLESMTEDLNLDSPLTPELNEILDTFLNDECLLHAMHI
STGLSIFDTSLFSGGKRPAATKKAGQAKKKKGSYPYDVPDYA*
>ZF13-VPR mRNA
SEQ ID NO.: 149
AGGAAAUAAGAGAGAAAAGAAGAGUAAGAAGAAAUAUAAGAGCCACCAUGGCCCCCAAGAAGAAGCGGAAGGUGGGCAUCCAC
GGCGUGCCCGCCGCCGGCAGCAGCGGAUCCCUGGAGCCCGGCGAAAAGCCCUAUAAGUGCCCCGAGUGCGGCAAGAGCUUCUC
UAGAAGCGACAAACUCGUGAGACACCAGAGAACACACACCGGAGAGAAACCUUACAAGUGCCCCGAGUGUGGCAAGUCCUUCU
CCCAAUCCGGCGAUCUGAGGAGACACCAGAGAACCCACACCGGCGAAAAACCCUACAAAUGCCCCGAGUGCGGAAAGUCCUUU
UCCACCUCCGGCGAGCUCGUGAGACACCAAAGGACCCACACCGGCGAGAAGCCUUACAAGUGCCCCGAGUGCGGCAAAUCCUU
CUCCAGAUCCGACAAGCUCGUGAGGCACCAGAGGACACACACCGGAGAGAAACCUUAUAAGUGUCCCGAAUGUGGAAAGUCCU
UCAGCGACCCCGGACACCUGGUGAGACACCAGAGGACCCACACCGGCGAAAAGCCUUAUAAAUGUCCCGAGUGCGGAAAAAGC
UUUUCUAGAAACGAUGCUCUGACAGAGCACCAAAGAACCCACACCGGCGAAAAACCCUACAAGUGUCCCGAGUGCGGAAAGAG
CUUCAGCAGAAGCGACCACCUGACCAACCACCAGAGAACACACACCGGAGAAAAACCCACCGGCAAAAAGACCUCCGCUAGCG
GCAGCGGCGGCGGCAGCGGCGGCGACGCCCUGGACGACUUCGACCUGGACAUGCUGGGCAGCGACGCCCUGGACGACUUCGAC
CUGGACAUGCUGGGCAGCGACGCCCUGGACGACUUCGACCUGGACAUGCUGGGCAGCGACGCCCUGGACGACUUCGACCUGGA
CAUGCUGAGCGGCGGCCCCAAGAAGAAGCGGAAGGUGGGCAGCCAGUACCUGCCCGACACCGACGACCGGCACCGGAUCGAGG
AGAAGCGGAAGCGGACCUACGAGACCUUCAAGAGCAUCAUGAAGAAAUCCCCCUUCAGCGGCCCCACCGACCCCCGGCCCCCC
CCCCGGCGGAUCGCCGUGCCCAGCCGGAGCAGCGCCAGCGUGCCCAAGCCCGCCCCCCAGCCCUACCCCUUCACCAGCAGCCU
GAGCACCAUCAACUACGACGAGUUCCCCACCAUGGUGUUCCCCAGCGGCCAGAUCAGCCAGGCCAGCGCCCUGGCCCCCGCCC
CCCCCCAGGUGCUGCCCCAGGCCCCCGCCCCCGCCCCCGCCCCCGCCAUGGUGAGCGCCCUGGCCCAGGCCCCCGCCCCCGUG
CCCGUGCUGGCCCCCGGCCCCCCCCAGGCCGUGGCCCCCCCCGCCCCCAAGCCCACCCAGGCCGGCGAGGGCACCCUGAGCGA
GGCCCUGCUGCAGCUGCAGUUCGACGACGAGGACCUGGGCGCCCUGCUGGGCAACAGCACCGACCCCGCCGUGUUCACCGACC
UGGCCAGCGUGGACAACAGCGAGUUCCAGCAGCUGCUGAACCAGGGCAUCCCCGUGGCCCCCCACACCACCGAGCCCAUGCUG
AUGGAGUACCCCGAGGCCAUCACCCGGCUGGUGACCGGCGCCCAGCGGCCCCCCGACCCCGCCCCCGCCCCCCUGGGCGCCCC
CGGCCUGCCCAACGGCCUGCUGAGCGGCGACGAGGACUUCAGCAGCAUCGCCGACAUGGACUUCAGCGCCCUGCUGGGCAGCG
GCAGCGGCAGCCGGGACAGCCGGGAGGGCAUGUUCCUGCCCAAGCCCGAGGCCGGCAGCGCCAUCAGCGACGUGUUCGAGGGC
CGGGAGGUGUGCCAGCCCAAGCGGCUCCGGCCCUUCCACCCCCCCGGCAGCCCCUGGGCCAACCGGCCCCUGCCCGCCAGCCU
GGCCCCCACCCCCACCGGCCCCGUGCACGAGCCCGUGGGCAGCCUGACCCCCGCCCCCGUGCCCCAGCCCCUGGACCCCGCCC
CCGCCGUGACCCCCGAGGCCAGCCACCUGCUGGAGGACCCCGACGAGGAGACCAGCCAGGCCGUGAAGGCCCUGCGGGAGAUG
GCCGACACCGUGAUCCCCCAGAAGGAGGAGGCCGCCAUCUGCGGCCAGAUGGACCUGAGCCACCCCCCCCCCCGGGGCCACCU
GGACGAGCUGACCACCACCCUGGAGAGCAUGACCGAGGACCUGAACCUGGACAGCCCCCUGACCCCCGAGCUGAACGAGAUCC
UGGACACCUUCCUGAACGACGAGUGCCUGCUGCACGCCAUGCACAUCAGCACCGGCCUGAGCAUCUUCGACACCAGCCUGUUC
AGCGGCGGCAAGCGGCCCGCCGCCACCAAGAAGGCCGGCCAGGCCAAGAAGAAGAAGGGCAGCUACCCCUACGACGUGCCCGA
CUACGCCUGAGCGGCCGCUUAAUUAAGCUGCCUUCUGCGGGGCUUGCCUUCUGGCCAUGCCCUUCUUCUCUCCCUUGCACCUG
UACCUCUUGGUCUUUGAAUAAAGCCUGAGUAGGAAGUCUAGAAAAAAAAAAAAAAAAAAAAAAAAAAAAAAAAAAAAAAAAAA
AAAAAAAAAAAAAAAAAAAAAAAAAAAAAAAAAAAAAA
>ZF13 target sequence
SEQ ID NO.: 150
AGGCTGGGCGGGGCTGCAGGG
>ZF13 amino acid sequence
SEQ ID NO.: 151
LEPGEKPYKCPECGKSFSRSDKLVRHQRTHTGEKPYKCPECGKSFSQSGDLRRHQRTHTGEKPYKCPECGKSFSTSGELVRHQ
RTHTGEKPYKCPECGKSFSRSDKLVRHQRTHTGEKPYKCPECGKSFSDPGHLVRHQRTHTGEKPYKCPECGKSFSRNDALTEH
QRTHTGEKPYKCPECGKSFSRSDHLTNHQRTHTGEKPTGKKTS
>ZF13 mRNA sequence
SEQ ID NO.: 223
CUGGAGCCCGGCGAAAAGCCCUAUAAGUGCCCCGAGUGCGGCAAGAGCUUCUCUAGAAGCGACAAACUCGUGAGACACCAGAG
AACACACACCGGAGAGAAACCUUACAAGUGCCCCGAGUGUGGCAAGUCCUUCUCCCAAUCCGGCGAUCUGAGGAGACACCAGA
GAACCCACACCGGCGAAAAACCCUACAAAUGCCCCGAGUGCGGAAAGUCCUUUUCCACCUCCGGCGAGCUCGUGAGACACCAA
AGGACCCACACCGGCGAGAAGCCUUACAAGUGCCCCGAGUGCGGCAAAUCCUUCUCCAGAUCCGACAAGCUCGUGAGGCACCA
GAGGACACACACCGGAGAGAAACCUUAUAAGUGUCCCGAAUGUGGAAAGUCCUUCAGCGACCCCGGACACCUGGUGAGACACC
AGAGGACCCACACCGGCGAAAAGCCUUAUAAAUGUCCCGAGUGCGGAAAAAGCUUUUCUAGAAACGAUGCUCUGACAGAGCAC
CAAAGAACCCACACCGGCGAAAAACCCUACAAGUGUCCCGAGUGCGGAAAGAGCUUCAGCAGAAGCGACCACCUGACCAACCA
CCAGAGAACACACACCGGAGAAAAACCCACCGGCAAAAAGACCUCC
>ZF14-VPR protein
SEQ ID NO.: 152
MAPKKKRKVGIHGVPAAGSSGSLEPGEKPYKCPECGKSFSTSGHLVRHQRTHTGEKPYKCPECGKSFSTTGNLTVHQRTHTGE
KPYKCPECGKSFSTSGSLVRHQRTHTGEKPYKCPECGKSFSRSDKLVRHQRTHTGEKPYKCPECGKSFSRSDELVRHQRTHTG
EKPYKCPECGKSFSRSDKLVRHQRTHTGEKPYKCPECGKSFSQRAHLERHQRTHTGEKPTGKKTSASGSGGGSGGDALDDFDL
DMLGSDALDDFDLDMLGSDALDDFDLDMLGSDALDDFDLDMLSGGPKKKRKVGSQYLPDTDDRHRIEEKRKRTYETFKSIMKK
SPFSGPTDPRPPPRRIAVPSRSSASVPKPAPQPYPFTSSLSTINYDEFPTMVFPSGQISQASALAPAPPQVLPQAPAPAPAPA
MVSALAQAPAPVPVLAPGPPQAVAPPAPKPTQAGEGTLSEALLQLQFDDEDLGALLGNSTDPAVFTDLASVDNSEFQQLLNQG
IPVAPHTTEPMLMEYPEAITRLVTGAQRPPDPAPAPLGAPGLPNGLLSGDEDFSSIADMDFSALLGSGSGSRDSREGMFLPKP
EAGSAISDVFEGREVCQPKRLRPFHPPGSPWANRPLPASLAPTPTGPVHEPVGSLTPAPVPQPLDPAPAVTPEASHLLEDPDE
ETSQAVKALREMADTVIPQKEEAAICGQMDLSHPPPRGHLDELTTTLESMTEDLNLDSPLTPELNEILDTFLNDECLLHAMHI
STGLSIFDTSLFSGGKRPAATKKAGQAKKKKGSYPYDVPDYA*
>ZF14-VPR mRNA
SEQ ID NO.: 153
AGGAAAUAAGAGAGAAAAGAAGAGUAAGAAGAAAUAUAAGAGCCACCAUGGCCCCCAAGAAGAAGCGGAAGGUGGGCAUCCAC
GGCGUGCCCGCCGCCGGCAGCAGCGGAUCCCUGGAGCCCGGCGAAAAGCCCUACAAAUGUCCCGAAUGCGGCAAAUCCUUCUC
CACCUCCGGCCACCUCGUGAGACACCAGAGGACACACACCGGCGAGAAGCCUUAUAAGUGCCCCGAAUGCGGCAAAAGCUUCU
CCACCACCGGCAAUCUGACCGUCCACCAGAGAACACACACCGGCGAAAAACCUUAUAAGUGUCCCGAGUGUGGCAAAUCCUUU
UCCACCAGCGGAUCUCUGGUGAGACACCAAAGGACACACACCGGCGAAAAACCCUACAAAUGCCCCGAGUGUGGAAAAUCCUU
CUCUAGAAGCGACAAGCUGGUGAGACACCAGAGGACCCACACCGGCGAGAAACCCUACAAGUGCCCCGAAUGUGGCAAGAGCU
UCUCUAGAUCCGACGAGCUCGUGAGACACCAAAGAACCCACACCGGCGAAAAGCCUUACAAAUGUCCCGAGUGCGGAAAGAGC
UUUAGCAGAAGCGAUAAGCUGGUCAGACACCAAAGAACACACACCGGAGAAAAACCCUAUAAGUGCCCCGAGUGUGGCAAGUC
CUUUAGCCAGAGAGCCCACCUGGAGAGACACCAAAGAACCCACACCGGCGAAAAACCCACCGGAAAAAAGACAAGCGCUAGCG
GCAGCGGCGGCGGCAGCGGCGGCGACGCCCUGGACGACUUCGACCUGGACAUGCUGGGCAGCGACGCCCUGGACGACUUCGAC
CUGGACAUGCUGGGCAGCGACGCCCUGGACGACUUCGACCUGGACAUGCUGGGCAGCGACGCCCUGGACGACUUCGACCUGGA
CAUGCUGAGCGGCGGCCCCAAGAAGAAGCGGAAGGUGGGCAGCCAGUACCUGCCCGACACCGACGACCGGCACCGGAUCGAGG
AGAAGCGGAAGCGGACCUACGAGACCUUCAAGAGCAUCAUGAAGAAAUCCCCCUUCAGCGGCCCCACCGACCCCCGGCCCCCC
CCCCGGCGGAUCGCCGUGCCCAGCCGGAGCAGCGCCAGCGUGCCCAAGCCCGCCCCCCAGCCCUACCCCUUCACCAGCAGCCU
GAGCACCAUCAACUACGACGAGUUCCCCACCAUGGUGUUCCCCAGCGGCCAGAUCAGCCAGGCCAGCGCCCUGGCCCCCGCCC
CCCCCCAGGUGCUGCCCCAGGCCCCCGCCCCCGCCCCCGCCCCCGCCAUGGUGAGCGCCCUGGCCCAGGCCCCCGCCCCCGUG
CCCGUGCUGGCCCCCGGCCCCCCCCAGGCCGUGGCCCCCCCCGCCCCCAAGCCCACCCAGGCCGGCGAGGGCACCCUGAGCGA
GGCCCUGCUGCAGCUGCAGUUCGACGACGAGGACCUGGGCGCCCUGCUGGGCAACAGCACCGACCCCGCCGUGUUCACCGACC
UGGCCAGCGUGGACAACAGCGAGUUCCAGCAGCUGCUGAACCAGGGCAUCCCCGUGGCCCCCCACACCACCGAGCCCAUGCUG
AUGGAGUACCCCGAGGCCAUCACCCGGCUGGUGACCGGCGCCCAGCGGCCCCCCGACCCCGCCCCCGCCCCCCUGGGCGCCCC
CGGCCUGCCCAACGGCCUGCUGAGCGGCGACGAGGACUUCAGCAGCAUCGCCGACAUGGACUUCAGCGCCCUGCUGGGCAGCG
GCAGCGGCAGCCGGGACAGCCGGGAGGGCAUGUUCCUGCCCAAGCCCGAGGCCGGCAGCGCCAUCAGCGACGUGUUCGAGGGC
CGGGAGGUGUGCCAGCCCAAGCGGCUCCGGCCCUUCCACCCCCCCGGCAGCCCCUGGGCCAACCGGCCCCUGCCCGCCAGCCU
GGCCCCCACCCCCACCGGCCCCGUGCACGAGCCCGUGGGCAGCCUGACCCCCGCCCCCGUGCCCCAGCCCCUGGACCCCGCCC
CCGCCGUGACCCCCGAGGCCAGCCACCUGCUGGAGGACCCCGACGAGGAGACCAGCCAGGCCGUGAAGGCCCUGCGGGAGAUG
GCCGACACCGUGAUCCCCCAGAAGGAGGAGGCCGCCAUCUGCGGCCAGAUGGACCUGAGCCACCCCCCCCCCCGGGGCCACCU
GGACGAGCUGACCACCACCCUGGAGAGCAUGACCGAGGACCUGAACCUGGACAGCCCCCUGACCCCCGAGCUGAACGAGAUCC
UGGACACCUUCCUGAACGACGAGUGCCUGCUGCACGCCAUGCACAUCAGCACCGGCCUGAGCAUCUUCGACACCAGCCUGUUC
AGCGGCGGCAAGCGGCCCGCCGCCACCAAGAAGGCCGGCCAGGCCAAGAAGAAGAAGGGCAGCUACCCCUACGACGUGCCCGA
CUACGCCUGAGCGGCCGCUUAAUUAAGCUGCCUUCUGCGGGGCUUGCCUUCUGGCCAUGCCCUUCUUCUCUCCCUUGCACCUG
UACCUCUUGGUCUUUGAAUAAAGCCUGAGUAGGAAGUCUAGAAAAAAAAAAAAAAAAAAAAAAAAAAAAAAAAAAAAAAAAAA
AAAAAAAAAAAAAAAAAAAAAAAAAAAAAAAAAAAAAA
>ZF14 target sequence
SEQ ID NO.: 154
GGAGGGGTGGGGGTTAATGGT
>ZF14 amino acid sequence
SEQ ID NO.: 155
LEPGEKPYKCPECGKSFSTSGHLVRHQRTHTGEKPYKCPECGKSFSTTGNLTVHQRTHTGEKPYKCPECGKSFSTSGSLVRHQ
RTHTGEKPYKCPECGKSFSRSDKLVRHQRTHTGEKPYKCPECGKSFSRSDELVRHQRTHTGEKPYKCPECGKSFSRSDKLVRH
QRTHTGEKPYKCPECGKSFSQRAHLERHQRTHTGEKPTGKKTS
>ZF14 mRNA sequence
SEQ ID NO.: 224
CUGGAGCCCGGCGAAAAGCCCUACAAAUGUCCCGAAUGCGGCAAAUCCUUCUCCACCUCCGGCCACCUCGUGAGACACCAGAG
GACACACACCGGCGAGAAGCCUUAUAAGUGCCCCGAAUGCGGCAAAAGCUUCUCCACCACCGGCAAUCUGACCGUCCACCAGA
GAACACACACCGGCGAAAAACCUUAUAAGUGUCCCGAGUGUGGCAAAUCCUUUUCCACCAGCGGAUCUCUGGUGAGACACCAA
AGGACACACACCGGCGAAAAACCCUACAAAUGCCCCGAGUGUGGAAAAUCCUUCUCUAGAAGCGACAAGCUGGUGAGACACCA
GAGGACCCACACCGGCGAGAAACCCUACAAGUGCCCCGAAUGUGGCAAGAGCUUCUCUAGAUCCGACGAGCUCGUGAGACACC
AAAGAACCCACACCGGCGAAAAGCCUUACAAAUGUCCCGAGUGCGGAAAGAGCUUUAGCAGAAGCGAUAAGCUGGUCAGACAC
CAAAGAACACACACCGGAGAAAAACCCUAUAAGUGCCCCGAGUGUGGCAAGUCCUUUAGCCAGAGAGCCCACCUGGAGAGACA
CCAAAGAACCCACACCGGCGAAAAACCCACCGGAAAAAAGACAAGC
>ZF15-VPR protein
SEQ ID NO.: 156
MAPKKKRKVGIHGVPAAGSSGSLEPGEKPYKCPECGKSFSRNDTLTEHQRTHTGEKPYKCPECGKSFSRNDALTEHQRTHTGE
KPYKCPECGKSFSTSGELVRHQRTHTGEKPYKCPECGKSFSRSDNLVRHQRTHTGEKPYKCPECGKSFSRSDELVRHQRTHTG
EKPYKCPECGKSFSRSDKLVRHQRTHTGEKPYKCPECGKSFSQSSNLVRHQRTHTGEKPTGKKTSASGSGGGSGGDALDDFDL
DMLGSDALDDFDLDMLGSDALDDFDLDMLGSDALDDFDLDMLSGGPKKKRKVGSQYLPDTDDRHRIEEKRKRTYETFKSIMKK
SPFSGPTDPRPPPRRIAVPSRSSASVPKPAPQPYPFTSSLSTINYDEFPTMVFPSGQISQASALAPAPPQVLPQAPAPAPAPA
MVSALAQAPAPVPVLAPGPPQAVAPPAPKPTQAGEGTLSEALLQLQFDDEDLGALLGNSTDPAVFTDLASVDNSEFQQLLNQG
IPVAPHTTEPMLMEYPEAITRLVTGAQRPPDPAPAPLGAPGLPNGLLSGDEDFSSIADMDFSALLGSGSGSRDSREGMFLPKP
EAGSAISDVFEGREVCQPKRLRPFHPPGSPWANRPLPASLAPTPTGPVHEPVGSLTPAPVPQPLDPAPAVTPEASHLLEDPDE
ETSQAVKALREMADTVIPQKEEAAICGQMDLSHPPPRGHLDELTTTLESMTEDLNLDSPLTPELNEILDTFLNDECLLHAMHI
STGLSIFDTSLFSGGKRPAATKKAGQAKKKKGSYPYDVPDYA*
>ZF15-VPR mRNA
SEQ ID NO.: 157
AGGAAAUAAGAGAGAAAAGAAGAGUAAGAAGAAAUAUAAGAGCCACCAUGGCCCCCAAGAAGAAGCGGAAGGUGGGCAUCCAC
GGCGUGCCCGCCGCCGGCAGCAGCGGAUCCCUGGAGCCCGGCGAGAAGCCCUACAAAUGUCCCGAAUGUGGCAAGAGCUUCUC
UAGAAACGACACACUGACCGAACACCAGAGAACACACACCGGCGAAAAACCUUAUAAAUGUCCCGAGUGUGGAAAAUCCUUCU
CUAGAAAUGACGCUCUCACCGAGCACCAAAGAACACACACCGGCGAAAAGCCUUACAAAUGCCCCGAAUGUGGAAAGUCCUUC
UCCACCUCCGGAGAGCUGGUGAGACACCAGAGAACCCACACCGGCGAAAAACCCUACAAGUGCCCCGAGUGCGGAAAAAGCUU
CUCUAGAAGCGAUAAUCUGGUGAGACACCAAAGGACACACACCGGCGAGAAGCCCUAUAAGUGUCCCGAAUGCGGCAAGUCCU
UUUCCAGAAGCGACGAACUGGUGAGACACCAGAGAACCCACACCGGAGAGAAGCCUUAUAAGUGUCCCGAGUGCGGAAAGAGC
UUUUCUAGAUCCGACAAGCUCGUGAGACACCAAAGGACCCACACCGGCGAGAAACCCUAUAAAUGUCCCGAGUGUGGCAAAUC
CUUUUCCCAGAGCAGCAACCUCGUGAGGCACCAGAGGACCCACACCGGCGAGAAACCCACCGGCAAAAAGACCAGCGCUAGCG
GCAGCGGCGGCGGCAGCGGCGGCGACGCCCUGGACGACUUCGACCUGGACAUGCUGGGCAGCGACGCCCUGGACGACUUCGAC
CUGGACAUGCUGGGCAGCGACGCCCUGGACGACUUCGACCUGGACAUGCUGGGCAGCGACGCCCUGGACGACUUCGACCUGGA
CAUGCUGAGCGGCGGCCCCAAGAAGAAGCGGAAGGUGGGCAGCCAGUACCUGCCCGACACCGACGACCGGCACCGGAUCGAGG
AGAAGCGGAAGCGGACCUACGAGACCUUCAAGAGCAUCAUGAAGAAAUCCCCCUUCAGCGGCCCCACCGACCCCCGGCCCCCC
CCCCGGCGGAUCGCCGUGCCCAGCCGGAGCAGCGCCAGCGUGCCCAAGCCCGCCCCCCAGCCCUACCCCUUCACCAGCAGCCU
GAGCACCAUCAACUACGACGAGUUCCCCACCAUGGUGUUCCCCAGCGGCCAGAUCAGCCAGGCCAGCGCCCUGGCCCCCGCCC
CCCCCCAGGUGCUGCCCCAGGCCCCCGCCCCCGCCCCCGCCCCCGCCAUGGUGAGCGCCCUGGCCCAGGCCCCCGCCCCCGUG
CCCGUGCUGGCCCCCGGCCCCCCCCAGGCCGUGGCCCCCCCCGCCCCCAAGCCCACCCAGGCCGGCGAGGGCACCCUGAGCGA
GGCCCUGCUGCAGCUGCAGUUCGACGACGAGGACCUGGGCGCCCUGCUGGGCAACAGCACCGACCCCGCCGUGUUCACCGACC
UGGCCAGCGUGGACAACAGCGAGUUCCAGCAGCUGCUGAACCAGGGCAUCCCCGUGGCCCCCCACACCACCGAGCCCAUGCUG
AUGGAGUACCCCGAGGCCAUCACCCGGCUGGUGACCGGCGCCCAGCGGCCCCCCGACCCCGCCCCCGCCCCCCUGGGCGCCCC
CGGCCUGCCCAACGGCCUGCUGAGCGGCGACGAGGACUUCAGCAGCAUCGCCGACAUGGACUUCAGCGCCCUGCUGGGCAGCG
GCAGCGGCAGCCGGGACAGCCGGGAGGGCAUGUUCCUGCCCAAGCCCGAGGCCGGCAGCGCCAUCAGCGACGUGUUCGAGGGC
CGGGAGGUGUGCCAGCCCAAGCGGCUCCGGCCCUUCCACCCCCCCGGCAGCCCCUGGGCCAACCGGCCCCUGCCCGCCAGCCU
GGCCCCCACCCCCACCGGCCCCGUGCACGAGCCCGUGGGCAGCCUGACCCCCGCCCCCGUGCCCCAGCCCCUGGACCCCGCCC
CCGCCGUGACCCCCGAGGCCAGCCACCUGCUGGAGGACCCCGACGAGGAGACCAGCCAGGCCGUGAAGGCCCUGCGGGAGAUG
GCCGACACCGUGAUCCCCCAGAAGGAGGAGGCCGCCAUCUGCGGCCAGAUGGACCUGAGCCACCCCCCCCCCCGGGGCCACCU
GGACGAGCUGACCACCACCCUGGAGAGCAUGACCGAGGACCUGAACCUGGACAGCCCCCUGACCCCCGAGCUGAACGAGAUCC
UGGACACCUUCCUGAACGACGAGUGCCUGCUGCACGCCAUGCACAUCAGCACCGGCCUGAGCAUCUUCGACACCAGCCUGUUC
AGCGGCGGCAAGCGGCCCGCCGCCACCAAGAAGGCCGGCCAGGCCAAGAAGAAGAAGGGCAGCUACCCCUACGACGUGCCCGA
CUACGCCUGAGCGGCCGCUUAAUUAAGCUGCCUUCUGCGGGGCUUGCCUUCUGGCCAUGCCCUUCUUCUCUCCCUUGCACCUG
UACCUCUUGGUCUUUGAAUAAAGCCUGAGUAGGAAGUCUAGAAAAAAAAAAAAAAAAAAAAAAAAAAAAAAAAAAAAAAAAAA
AAAAAAAAAAAAAAAAAAAAAAAAAAAAAAAAAAAAAA
>ZF15 target sequence
SEQ ID NO.: 158
GAAGGGGTGGAGGCTCTGCCG
>ZF15 amino acid sequence
SEQ ID NO.: 159
LEPGEKPYKCPECGKSFSRNDTLTEHQRTHTGEKPYKCPECGKSFSRNDALTEHQRTHTGEKPYKCPECGKSFSTSGELVRHQ
RTHTGEKPYKCPECGKSFSRSDNLVRHQRTHTGEKPYKCPECGKSFSRSDELVRHQRTHTGEKPYKCPECGKSFSRSDKLVRH
QRTHTGEKPYKCPECGKSFSQSSNLVRHQRTHTGEKPTGKKTS
>ZF15 mRNA sequence
SEQ ID NO.: 225
CUGGAGCCCGGCGAGAAGCCCUACAAAUGUCCCGAAUGUGGCAAGAGCUUCUCUAGAAACGACACACUGACCGAACACCAGAG
AACACACACCGGCGAAAAACCUUAUAAAUGUCCCGAGUGUGGAAAAUCCUUCUCUAGAAAUGACGCUCUCACCGAGCACCAAA
GAACACACACCGGCGAAAAGCCUUACAAAUGCCCCGAAUGUGGAAAGUCCUUCUCCACCUCCGGAGAGCUGGUGAGACACCAG
AGAACCCACACCGGCGAAAAACCCUACAAGUGCCCCGAGUGCGGAAAAAGCUUCUCUAGAAGCGAUAAUCUGGUGAGACACCA
AAGGACACACACCGGCGAGAAGCCCUAUAAGUGUCCCGAAUGCGGCAAGUCCUUUUCCAGAAGCGACGAACUGGUGAGACACC
AGAGAACCCACACCGGAGAGAAGCCUUAUAAGUGUCCCGAGUGCGGAAAGAGCUUUUCUAGAUCCGACAAGCUCGUGAGACAC
CAAAGGACCCACACCGGCGAGAAACCCUAUAAAUGUCCCGAGUGUGGCAAAUCCUUUUCCCAGAGCAGCAACCUCGUGAGGCA
CCAGAGGACCCACACCGGCGAGAAACCCACCGGCAAAAAGACCAGC
>ZF5.1-VPR mRNA (ZF5-VPR ATUM Opt_1)
SEQ ID NO.: 160
AGGAAAUAAGAGAGAAAAGAAGAGUAAGAAGAAAUAUAAGAGCCACCAUGGCCCCGAAGAAAAAGCGCAAAGUCGGAAUCCAU
GGUGUCCCUGCGGCUGGAAGUUCCGGCUCCUUGGAACCGGGAGAGAAGCCUUAUAAGUGUCCGGAGUGUGGGAAGUCGUUCUC
CACCUCGGGCAACCUCACCGAACAUCAGCGCACACAUACGGGGGAGAAACCUUACAAAUGCCCGGAAUGUGGAAAGAGCUUCU
CCGAUUCGGGAAAUCUCAGAGUGCACCAACGCACCCACACAGGAGAAAAACCGUAUAAGUGCCCCGAAUGCGGGAAAUCGUUC
UCCCACAAGAAUGCGCUGCAGAACCACCAGAGGACACAUACUGGGGAGAAGCCCUACAAGUGUCCUGAAUGCGGAAAGUCCUU
CUCGCGCAACGAUACUUUGACCGAGCACCAGCGCACUCACACCGGCGAAAAGCCGUACAAGUGCCCAGAGUGCGGUAAAAGCU
UCUCGCAACGGGCCCAUCUGGAACGGCACCAGCGGACUCACACUGGAGAAAAGCCCUACAAGUGUCCCGAGUGCGGGAAGUCC
UUUUCCCGGUCCGAUAAGCUCGUGCGCCACCAGAGAACCCAUACUGGAGAGAAACCGUACAAAUGUCCAGAAUGCGGCAAAUC
CUUCUCGGACCCGGGACACCUCGUGCGGCAUCAACGGACCCAUACCGGGGAAAAGCCCACCGGAAAGAAAACUAGCGCGUCAG
GCUCUGGUGGAGGAUCGGGGGGAGAUGCUCUGGACGACUUUGACCUUGACAUGCUUGGCUCCGACGCCCUUGACGACUUCGAC
CUCGAUAUGCUGGGAUCGGACGCCCUGGAUGACUUCGAUCUGGACAUGUUGGGCUCGGACGCGCUAGACGAUUUUGACCUGGA
UAUGCUGUCCGGAGGUCCCAAGAAGAAGCGGAAGGUCGGCAGCCAGUAUCUGCCGGAUACUGAUGACCGGCACAGAAUCGAGG
AGAAGCGAAAGCGGACCUACGAAACUUUCAAGAGCAUUAUGAAGAAGUCCCCGUUCUCGGGUCCAACCGACCCCAGACCUCCU
CCGCGGAGAAUUGCCGUGCCAAGCCGCUCAAGCGCCAGCGUGCCCAAGCCAGCACCACAGCCCUACCCGUUCACCUCCUCCCU
UUCGACCAUCAACUACGACGAAUUCCCAACCAUGGUGUUCCCUAGCGGACAAAUCAGCCAGGCUUCCGCUCUGGCACCAGCCC
CACCUCAAGUGCUCCCGCAAGCGCCUGCUCCAGCACCGGCUCCUGCCAUGGUUUCAGCGCUGGCCCAAGCACCCGCUCCUGUG
CCUGUGCUGGCCCCUGGACCACCACAAGCAGUAGCCCCGCCUGCACCUAAGCCAACUCAGGCCGGCGAAGGAACCCUGAGCGA
AGCGUUGCUGCAGCUUCAGUUCGACGACGAGGACCUGGGUGCCCUGUUGGGCAACUCAACUGACCCUGCCGUGUUCACCGACC
UGGCAUCCGUCGAUAACUCCGAGUUCCAGCAGUUGCUGAACCAGGGAAUCCCAGUCGCCCCCCAUACCACCGAACCGAUGCUC
AUGGAGUACCCCGAAGCCAUCACCAGACUGGUCACCGGCGCACAAAGGCCCCCUGAUCCUGCUCCCGCACCUCUCGGUGCCCC
UGGACUGCCAAACGGCCUUCUGUCCGGCGACGAGGACUUCUCGUCCAUCGCCGAUAUGGAUUUCUCCGCCCUGCUCGGAUCCG
GCAGCGGAUCACGCGACUCGCGCGAAGGGAUGUUCCUGCCGAAGCCUGAGGCUGGUUCCGCCAUUAGCGACGUGUUCGAGGGG
CGCGAAGUCUGCCAACCCAAGAGACUGCGCCCGUUUCAUCCCCCGGGAAGCCCUUGGGCCAACAGACCUCUGCCAGCCUCCCU
GGCACCCACUCCGACUGGGCCUGUGCACGAACCCGUGGGCUCCCUGACUCCGGCACCAGUGCCACAGCCCCUGGAUCCAGCCC
CUGCUGUGACCCCGGAGGCCUCACACCUUCUGGAAGAUCCGGACGAGGAAACGUCCCAGGCCGUGAAGGCCCUGCGGGAGAUG
GCGGACACUGUGAUCCCUCAGAAAGAAGAGGCGGCCAUUUGCGGCCAGAUGGACCUCUCCCAUCCGCCUCCGAGAGGACACCU
GGAUGAACUCACGACCACCCUCGAGUCCAUGACCGAGGACCUGAACCUGGACUCCCCCCUGACACCCGAACUCAACGAGAUCC
UGGACACCUUCCUGAACGACGAGUGCCUGCUCCACGCCAUGCACAUCUCAACCGGGCUGUCGAUCUUCGACACUAGCUUGUUC
UCUGGAGGAAAGAGGCCGGCCGCUACUAAGAAGGCCGGACAAGCGAAGAAGAAGAAGGGAUCGUACCCUUACGACGUGCCCGA
CUACGCAUGAGCGGCCGCUUAAUUAAGCUGCCUUCUGCGGGGCUUGCCUUCUGGCCAUGCCCUUCUUCUCUCCCUUGCACCUG
UACCUCUUGGUCUUUGAAUAAAGCCUGAGUAGGAAGUCUAGAAAAAAAAAAAAAAAAAAAAAAAAAAAAAAAAAAAAAAAAAA
AAAAAAAAAAAAAAAAAAAAAAAAAAAAAAAAAAAAAAAAAAAAAAAAAAAAAAAAAAAAAAAAAAAAAAAA
>ZF5.1 mRNA sequence
SEQ ID NO.: 226
UUGGAACCGGGAGAGAAGCCUUAUAAGUGUCCGGAGUGUGGGAAGUCGUUCUCCACCUCGGGCAACCUCACCGAACAUCAGCG
CACACAUACGGGGGAGAAACCUUACAAAUGCCCGGAAUGUGGAAAGAGCUUCUCCGAUUCGGGAAAUCUCAGAGUGCACCAAC
GCACCCACACAGGAGAAAAACCGUAUAAGUGCCCCGAAUGCGGGAAAUCGUUCUCCCACAAGAAUGCGCUGCAGAACCACCAG
AGGACACAUACUGGGGAGAAGCCCUACAAGUGUCCUGAAUGCGGAAAGUCCUUCUCGCGCAACGAUACUUUGACCGAGCACCA
GCGCACUCACACCGGCGAAAAGCCGUACAAGUGCCCAGAGUGCGGUAAAAGCUUCUCGCAACGGGCCCAUCUGGAACGGCACC
AGCGGACUCACACUGGAGAAAAGCCCUACAAGUGUCCCGAGUGCGGGAAGUCCUUUUCCCGGUCCGAUAAGCUCGUGCGCCAC
CAGAGAACCCAUACUGGAGAGAAACCGUACAAAUGUCCAGAAUGCGGCAAAUCCUUCUCGGACCCGGGACACCUCGUGCGGCA
UCAACGGACCCAUACCGGGGAAAAGCCCACCGGAAAGAAAACUAGC
>ZF5.2-VPR mRNA (ZF5-VPR ATUM Opt_2)
SEQ ID NO. 161
AGGAAAUAAGAGAGAAAAGAAGAGUAAGAAGAAAUAUAAGAGCCACCAUGGCCCCGAAGAAGAAGCGGAAGGUCGGCAUCCAC
GGAGUGCCGGCAGCAGGGUCAUCAGGCUCCCUCGAACCCGGGGAAAAGCCGUACAAGUGUCCGGAGUGUGGGAAGUCAUUCUC
CACUUCCGGGAAUCUGACCGAGCAUCAACGCACCCACACUGGCGAGAAGCCCUACAAAUGCCCGGAGUGCGGAAAAUCGUUCU
CGGACUCCGGGAACCUUCGGGUCCACCAAAGGACUCAUACCGGGGAGAAACCGUACAAAUGUCCCGAAUGCGGGAAGUCGUUC
AGCCAUAAGAACGCGCUGCAGAACCAUCAGAGGACCCAUACUGGAGAAAAGCCCUAUAAGUGUCCGGAAUGCGGAAAGUCGUU
CUCACGCAACGACACCCUCACCGAACACCAGCGCACUCACACCGGAGAGAAGCCUUACAAGUGCCCGGAAUGUGGAAAGAGCU
UCAGCCAGCGGGCACAUCUGGAAAGACACCAGCGAACCCACACCGGGGAAAAACCGUAUAAGUGCCCCGAGUGUGGAAAGUCC
UUUUCACGGUCCGAUAAGCUCGUGCGCCACCAGAGAACUCACACUGGGGAGAAGCCGUACAAGUGUCCCGAGUGCGGCAAGAG
CUUCUCAGAUCCGGGACACCUUGUGCGACAUCAACGGACCCAUACCGGAGAAAAACCGACCGGGAAAAAGACCUCAGCAUCAG
GCUCAGGAGGCGGAUCAGGAGGCGACGCGCUCGAUGACUUCGAUCUGGACAUGUUGGGGUCCGACGCGCUUGACGACUUCGAC
CUUGAUAUGCUCGGAUCCGACGCCCUCGACGAUUUUGAUCUCGACAUGCUUGGGUCAGACGCCCUGGACGAUUUCGACCUGGA
CAUGCUGUCCGGUGGACCGAAAAAGAAGAGGAAGGUCGGGUCCCAGUACCUCCCGGACACCGAUGACCGACACCGGAUUGAAG
AGAAGCGCAAGAGAACCUACGAAACCUUCAAGUCGAUUAUGAAGAAGUCGCCGUUCUCGGGACCGACUGAUCCCAGACCGCCG
CCCAGAAGGAUUGCCGUGCCGUCGAGGUCAAGCGCCUCAGUGCCGAAACCCGCUCCGCAACCGUACCCCUUCACCUCAUCACU
UUCCACCAUCAACUACGAUGAGUUCCCCACCAUGGUGUUCCCGUCCGGCCAGAUCUCACAGGCCUCAGCCCUUGCACCGGCAC
CGCCCCAAGUCCUUCCGCAAGCACCCGCACCCGCUCCCGCUCCGGCAAUGGUGUCCGCGCUCGCACAAGCACCGGCUCCGGUG
CCGGUCUUGGCUCCGGGACCGCCGCAAGCAGUGGCACCACCCGCUCCGAAACCGACUCAGGCUGGGGAGGGAACCCUGUCCGA
AGCCCUGCUGCAACUUCAAUUCGACGAUGAAGAUCUGGGCGCACUGUUGGGAAACUCCACUGAUCCGGCAGUGUUCACCGAUC
UGGCCUCGGUGGACAACUCCGAGUUCCAGCAGCUGCUCAACCAAGGGAUUCCGGUCGCCCCGCAUACUACCGAGCCCAUGCUG
AUGGAAUACCCGGAAGCAAUCACCCGGCUGGUCACUGGUGCACAAAGACCCCCCGAUCCUGCUCCGGCACCGUUGGGAGCACC
GGGGUUGCCCAAUGGGCUGCUUUCGGGGGACGAGGAUUUCUCGUCAAUUGCCGACAUGGACUUCUCGGCCCUGUUGGGAUCCG
GAAGCGGAAGCAGGGACUCACGAGAGGGAAUGUUCCUACCGAAGCCCGAAGCGGGAUCAGCAAUCUCAGACGUGUUUGAAGGC
CGCGAAGUCUGCCAGCCGAAGCGCCUUCGCCCGUUCCAUCCGCCGGGAUCACCCUGGGCCAACAGACCCCUGCCGGCAUCACU
GGCCCCGACUCCGACUGGUCCGGUGCACGAACCGGUCGGGAGCCUGACUCCGGCACCCGUGCCCCAACCGUUGGAUCCGGCAC
CGGCAGUGACUCCGGAAGCUUCCCACCUCCUGGAGGAUCCGGACGAAGAGACUUCGCAGGCAGUGAAGGCCCUGCGCGAAAUG
GCGGACACCGUGAUUCCCCAGAAGGAAGAGGCAGCGAUCUGCGGGCAGAUGGACCUGUCACAUCCGCCCCCGAGAGGACACCU
GGACGAGCUGACCACUACCCUGGAAUCGAUGACUGAAGAUCUGAACCUGGACUCACCGCUGACUCCCGAGCUGAACGAAAUCC
UGGACACCUUCCUGAACGACGAGUGCCUUCUCCACGCCAUGCAUAUCUCCACCGGGCUGAGCAUCUUCGACACCUCGCUGUUC
UCGGGAGGAAAACGCCCGGCCGCAACUAAGAAGGCCGGACAGGCCAAGAAGAAGAAGGGGUCAUACCCGUACGACGUGCCCGA
CUAUGCGUGAGCGGCCGCUUAAUUAAGCUGCCUUCUGCGGGGCUUGCCUUCUGGCCAUGCCCUUCUUCUCUCCCUUGCACCUG
UACCUCUUGGUCUUUGAAUAAAGCCUGAGUAGGAAGUCUAGAAAAAAAAAAAAAAAAAAAAAAAAAAAAAAAAAAAAAAAAAA
AAAAAAAAAAAAAAAAAAAAAAAAAAAAAAAAAAAAAAAAAAAAAAAAAAAAAAAAAAAAAAAAAAAAAAAA
>ZF5.2 mRNA sequence
SEQ ID NO.: 227
CUCGAACCCGGGGAAAAGCCGUACAAGUGUCCGGAGUGUGGGAAGUCAUUCUCCACUUCCGGGAAUCUGACCGAGCAUCAACG
CACCCACACUGGCGAGAAGCCCUACAAAUGCCCGGAGUGCGGAAAAUCGUUCUCGGACUCCGGGAACCUUCGGGUCCACCAAA
GGACUCAUACCGGGGAGAAACCGUACAAAUGUCCCGAAUGCGGGAAGUCGUUCAGCCAUAAGAACGCGCUGCAGAACCAUCAG
AGGACCCAUACUGGAGAAAAGCCCUAUAAGUGUCCGGAAUGCGGAAAGUCGUUCUCACGCAACGACACCCUCACCGAACACCA
GCGCACUCACACCGGAGAGAAGCCUUACAAGUGCCCGGAAUGUGGAAAGAGCUUCAGCCAGCGGGCACAUCUGGAAAGACACC
AGCGAACCCACACCGGGGAAAAACCGUAUAAGUGCCCCGAGUGUGGAAAGUCCUUUUCACGGUCCGAUAAGCUCGUGCGCCAC
CAGAGAACUCACACUGGGGAGAAGCCGUACAAGUGUCCCGAGUGCGGCAAGAGCUUCUCAGAUCCGGGACACCUUGUGCGACA
UCAACGGACCCAUACCGGAGAAAAACCGACCGGGAAAAAGACCUCA
>ZF5.3-VPR mRNA (ZF5-VPR ATUM Opt_3)
SEQ ID NO.: 162
AGGAAAUAAGAGAGAAAAGAAGAGUAAGAAGAAAUAUAAGAGCCACCAUGGCCCCCAAGAAGAAGCGCAAGGUCGGGAUCCAC
GGAGUCCCGGCAGCAGGAUCCUCAGGCUCACUGGAACCGGGGGAAAAACCCUACAAGUGCCCGGAAUGCGGCAAGAGCUUCUC
GACCUCCGGGAACCUGACCGAGCACCAGCGCACCCACACCGGAGAGAAACCGUACAAGUGCCCCGAAUGCGGGAAAUCGUUCU
CAGACUCGGGAAACCUCAGGGUGCACCAGCGGACCCACACGGGGGAAAAGCCGUACAAAUGCCCGGAGUGCGGGAAGUCAUUC
UCCCACAAGAACGCGCUGCAGAACCACCAAAGAACCCACACCGGCGAAAAACCGUACAAGUGCCCCGAGUGCGGAAAGUCCUU
CUCCCGCAACGACACCCUCACCGAACACCAACGCACCCACACCGGAGAAAAGCCCUACAAGUGCCCGGAAUGCGGAAAGAGCU
UCAGCCAGAGGGCCCACCUGGAAAGACACCAGAGAACCCACACCGGCGAAAAGCCGUACAAAUGCCCGGAGUGCGGGAAGUCC
UUCAGCCGGUCAGACAAGCUGGUCCGCCACCAAAGGACCCACACAGGAGAAAAGCCCUACAAGUGCCCGGAAUGCGGAAAAUC
GUUCAGCGACCCCGGACACCUGGUCCGGCACCAGAGGACCCACACCGGGGAGAAGCCGACCGGCAAAAAGACCUCAGCGAGCG
GAUCCGGAGGAGGAUCAGGGGGGGACGCACUGGACGACUUCGACCUGGACAUGCUGGGAUCCGACGCACUGGACGACUUCGAC
CUAGACAUGCUCGGAUCGGACGCACUCGACGACUUCGACCUCGACAUGCUAGGAUCAGACGCACUAGACGACUUCGACCUCGA
CAUGCUGUCGGGAGGACCGAAGAAAAAGCGGAAGGUCGGAUCACAGUACCUCCCGGACACCGACGACAGGCACAGAAUCGAAG
AAAAACGCAAGCGCACCUACGAAACCUUCAAGAGCAUCAUGAAAAAGUCGCCGUUCUCAGGACCGACCGACCCCAGACCGCCA
CCGAGGAGAAUAGCCGUCCCGAGCCGAUCCUCCGCAUCCGUGCCGAAACCGGCACCGCAACCCUACCCGUUCACCUCGUCCCU
GUCGACCAUCAACUACGACGAGUUCCCCACCAUGGUGUUCCCCUCCGGGCAGAUCUCACAGGCCUCGGCACUGGCACCCGCAC
CACCGCAAGUGCUGCCCCAAGCACCGGCACCCGCACCGGCGCCCGCAAUGGUGUCAGCGCUGGCACAGGCACCAGCACCGGUG
CCAGUCCUCGCACCGGGACCGCCGCAAGCAGUGGCACCGCCGGCACCGAAACCGACCCAGGCCGGAGAAGGGACCCUGUCCGA
GGCGCUGCUGCAACUCCAGUUCGACGACGAGGACCUGGGAGCACUCCUGGGAAACUCCACCGACCCGGCAGUGUUCACCGACC
UCGCAUCGGUGGACAACUCCGAGUUCCAACAGCUCCUGAACCAGGGGAUACCGGUGGCACCGCACACCACCGAACCGAUGCUG
AUGGAAUACCCGGAAGCCAUCACCCGGCUCGUGACCGGAGCGCAAAGACCGCCCGACCCCGCGCCCGCACCGCUGGGAGCACC
GGGACUACCGAACGGGCUGCUCUCAGGGGACGAGGACUUCUCCAGCAUCGCAGACAUGGACUUCUCCGCCCUGCUGGGAUCAG
GAUCCGGAUCACGCGACUCCCGGGAAGGAAUGUUCCUGCCGAAGCCGGAAGCAGGCAGCGCAAUCUCCGACGUGUUCGAAGGC
CGCGAGGUCUGCCAGCCCAAGCGCCUGCGACCGUUCCACCCGCCGGGAUCACCGUGGGCAAACCGCCCGCUACCGGCAUCACU
GGCACCGACACCCACCGGACCGGUGCACGAACCGGUCGGGUCACUGACCCCCGCACCGGUCCCGCAACCGCUAGACCCGGCAC
CGGCAGUGACCCCGGAAGCAUCGCACCUCCUGGAGGACCCGGACGAGGAAACCUCACAGGCAGUGAAGGCCCUGCGGGAGAUG
GCCGACACCGUGAUACCGCAGAAGGAGGAGGCCGCCAUCUGCGGACAAAUGGACCUGUCACACCCGCCCCCGAGAGGACACCU
GGACGAACUCACCACCACCCUGGAGAGCAUGACCGAGGACCUGAACCUGGACUCACCGCUGACCCCGGAGCUGAACGAAAUCC
UGGACACCUUCCUGAACGACGAGUGCCUGCUGCACGCAAUGCACAUCAGCACCGGGCUGUCGAUCUUCGACACCAGCCUGUUC
UCCGGAGGGAAAAGACCCGCCGCCACCAAGAAAGCGGGCCAAGCAAAGAAAAAGAAGGGAUCGUACCCCUACGACGUGCCGGA
CUACGCAUGAGCGGCCGCUUAAUUAAGCUGCCUUCUGCGGGGCUUGCCUUCUGGCCAUGCCCUUCUUCUCUCCCUUGCACCUG
UACCUCUUGGUCUUUGAAUAAAGCCUGAGUAGGAAGUCUAGAAAAAAAAAAAAAAAAAAAAAAAAAAAAAAAAAAAAAAAAAA
AAAAAAAAAAAAAAAAAAAAAAAAAAAAAAAAAAAAAAAAAAAAAAAAAAAAAAAAAAAAAAAAAAAAAAAA
>ZF5.3 mRNA
SEQ ID NO.: 228
CUGGAACCGGGGGAAAAACCCUACAAGUGCCCGGAAUGCGGCAAGAGCUUCUCGACCUCCGGGAACCUGACCGAGCACCAGCG
CACCCACACCGGAGAGAAACCGUACAAGUGCCCCGAAUGCGGGAAAUCGUUCUCAGACUCGGGAAACCUCAGGGUGCACCAGC
GGACCCACACGGGGGAAAAGCCGUACAAAUGCCCGGAGUGCGGGAAGUCAUUCUCCCACAAGAACGCGCUGCAGAACCACCAA
AGAACCCACACCGGCGAAAAACCGUACAAGUGCCCCGAGUGCGGAAAGUCCUUCUCCCGCAACGACACCCUCACCGAACACCA
ACGCACCCACACCGGAGAAAAGCCCUACAAGUGCCCGGAAUGCGGAAAGAGCUUCAGCCAGAGGGCCCACCUGGAAAGACACC
AGAGAACCCACACCGGCGAAAAGCCGUACAAAUGCCCGGAGUGCGGGAAGUCCUUCAGCCGGUCAGACAAGCUGGUCCGCCAC
CAAAGGACCCACACAGGAGAAAAGCCCUACAAGUGCCCGGAAUGCGGAAAAUCGUUCAGCGACCCCGGACACCUGGUCCGGCA
CCAGAGGACCCACACCGGGGAGAAGCCGACCGGCAAAAAGACCUCA
>ZF5.4-VPR mRNA (ZF5-VPR ATUM Opt_4)
SEQ ID NO.: 163
AGGAAAUAAGAGAGAAAAGAAGAGUAAGAAGAAAUAUAAGAGCCACCAUGGCCCCGAAGAAAAAGAGGAAGGUCGGGAUCCAC
GGAGUCCCAGCCGCAGGAAGCAGCGGAAGCCUGGAACCCGGAGAAAAACCCUACAAGUGCCCAGAAUGCGGCAAGAGCUUCAG
CACCAGCGGAAACCUGACCGAACACCAGCGGACGCACACAGGGGAGAAACCGUACAAAUGCCCGGAGUGCGGAAAGAGCUUCA
GCGACAGCGGCAACCUCCGCGUGCACCAGAGAACCCACACGGGAGAGAAGCCGUACAAGUGCCCGGAAUGCGGAAAAAGCUUC
AGCCACAAGAACGCGCUGCAGAACCACCAGAGGACACACACGGGCGAGAAGCCCUACAAAUGCCCCGAAUGCGGGAAAAGCUU
CAGCCGGAACGACACCCUCACCGAGCACCAGCGAACCCACACCGGAGAAAAGCCGUACAAGUGCCCGGAAUGCGGAAAAAGCU
UCAGCCAACGGGCCCACCUGGAACGCCACCAAAGGACCCACACAGGAGAAAAGCCCUACAAGUGCCCAGAGUGCGGCAAAAGC
UUCAGCCGGAGCGACAAGCUGGUCCGGCACCAGCGCACACACACCGGCGAAAAGCCAUACAAGUGCCCCGAGUGCGGAAAGAG
CUUCAGCGACCCAGGACACCUCGUGCGGCACCAACGCACGCACACCGGGGAAAAACCGACCGGAAAAAAGACCAGCGCGAGCG
GAAGCGGAGGAGGAAGCGGAGGCGACGCCCUGGACGACUUCGACCUGGACAUGCUGGGGAGCGACGCACUGGACGACUUCGAC
CUGGACAUGCUGGGAAGCGACGCGCUGGACGACUUCGACCUGGACAUGCUGGGCAGCGACGCCCUCGACGACUUCGACCUCGA
CAUGCUGAGCGGCGGACCCAAGAAGAAGAGAAAGGUCGGAAGCCAGUACCUCCCGGACACCGACGACAGGCACCGCAUCGAAG
AGAAGCGGAAAAGAACCUACGAAACCUUCAAGAGCAUCAUGAAAAAGAGCCCGUUCAGCGGACCAACCGACCCCAGACCACCA
CCGAGAAGAAUCGCGGUCCCAAGCAGGAGCAGCGCCAGCGUCCCGAAGCCAGCCCCACAGCCGUACCCCUUCACCAGCAGCCU
GAGCACCAUCAACUACGACGAGUUCCCCACCAUGGUGUUCCCGAGCGGCCAGAUAAGCCAGGCCAGCGCACUGGCACCAGCCC
CACCGCAAGUGCUGCCCCAAGCACCCGCACCAGCACCCGCCCCCGCGAUGGUCAGCGCCCUGGCACAAGCCCCAGCCCCAGUC
CCGGUGCUCGCACCAGGACCACCCCAAGCAGUCGCACCGCCAGCCCCAAAGCCGACCCAAGCCGGAGAAGGCACCCUCAGCGA
GGCGCUCCUGCAACUCCAAUUCGACGACGAGGACCUGGGAGCCCUGCUGGGCAACAGCACCGACCCGGCAGUGUUCACCGACC
UGGCCAGCGUGGACAACAGCGAAUUCCAGCAGCUCCUGAACCAAGGAAUCCCAGUCGCGCCACACACCACCGAGCCGAUGCUG
AUGGAAUACCCAGAAGCGAUCACGAGACUGGUCACCGGGGCCCAAAGACCGCCGGACCCAGCGCCAGCACCACUGGGAGCCCC
AGGACUGCCCAACGGACUGCUCAGCGGCGACGAGGACUUCAGCAGCAUCGCGGACAUGGACUUCAGCGCACUCCUCGGAAGCG
GAAGCGGCAGCAGAGACAGCCGGGAAGGAAUGUUCCUCCCCAAGCCAGAAGCCGGAAGCGCAAUCAGCGACGUGUUCGAAGGA
CGGGAAGUCUGCCAGCCGAAGCGCCUCAGACCGUUCCACCCACCGGGAAGCCCAUGGGCCAACAGACCGCUGCCAGCCAGCCU
GGCACCGACCCCAACCGGACCAGUCCACGAACCAGUCGGCAGCCUGACACCAGCACCAGUGCCCCAGCCACUGGACCCAGCAC
CGGCAGUGACCCCAGAAGCCAGCCACCUCCUGGAGGACCCCGACGAAGAAACCAGCCAGGCCGUGAAGGCCCUGAGGGAGAUG
GCCGACACGGUGAUCCCACAGAAGGAAGAAGCAGCGAUCUGCGGCCAAAUGGACCUCAGCCACCCACCGCCAAGAGGCCACCU
GGACGAGCUCACCACCACCCUGGAAAGCAUGACCGAGGACCUCAACCUCGACAGCCCCCUGACACCGGAGCUCAACGAGAUCC
UGGACACCUUCCUCAACGACGAAUGCCUGCUCCACGCCAUGCACAUCAGCACCGGACUGAGCAUCUUCGACACCAGCCUGUUC
AGCGGGGGAAAACGACCGGCAGCCACCAAAAAGGCCGGACAGGCGAAGAAGAAGAAGGGGAGCUACCCGUACGACGUGCCCGA
CUACGCCUGAGCGGCCGCUUAAUUAAGCUGCCUUCUGCGGGGCUUGCCUUCUGGCCAUGCCCUUCUUCUCUCCCUUGCACCUG
UACCUCUUGGUCUUUGAAUAAAGCCUGAGUAGGAAGUCUAGAAAAAAAAAAAAAAAAAAAAAAAAAAAAAAAAAAAAAAAAAA
AAAAAAAAAAAAAAAAAAAAAAAAAAAAAAAAAAAAAAAAAAAAAAAAAAAAAAAAAAAAAAAAAAAAAAAA
>ZF5.4 mRNA sequence
SEQ ID NO.: 229
CUGGAACCCGGAGAAAAACCCUACAAGUGCCCAGAAUGCGGCAAGAGCUUCAGCACCAGCGGAAACCUGACCGAACACCAGCG
GACGCACACAGGGGAGAAACCGUACAAAUGCCCGGAGUGCGGAAAGAGCUUCAGCGACAGCGGCAACCUCCGCGUGCACCAGA
GAACCCACACGGGAGAGAAGCCGUACAAGUGCCCGGAAUGCGGAAAAAGCUUCAGCCACAAGAACGCGCUGCAGAACCACCAG
AGGACACACACGGGCGAGAAGCCCUACAAAUGCCCCGAAUGCGGGAAAAGCUUCAGCCGGAACGACACCCUCACCGAGCACCA
GCGAACCCACACCGGAGAAAAGCCGUACAAGUGCCCGGAAUGCGGAAAAAGCUUCAGCCAACGGGCCCACCUGGAACGCCACC
AAAGGACCCACACAGGAGAAAAGCCCUACAAGUGCCCAGAGUGCGGCAAAAGCUUCAGCCGGAGCGACAAGCUGGUCCGGCAC
CAGCGCACACACACCGGCGAAAAGCCAUACAAGUGCCCCGAGUGCGGAAAGAGCUUCAGCGACCCAGGACACCUCGUGCGGCA
CCAACGCACGCACACCGGGGAAAAACCGACCGGAAAAAAGACCAGC
>ZF5.5-VPR (ZF5-VPR ATUM Opt_5)
SEQ ID NO.: 164
AGGAAAUAAGAGAGAAAAGAAGAGUAAGAAGAAAUAUAAGAGCCACCAUGGCCCCGAAGAAGAAGCGCAAGGUCGGCAUACAC
GGAGUCCCAGCCGCUGGAUCCUCCGGAUCCCUGGAACCUGGGGAGAAACCCUAUAAGUGCCCGGAGUGCGGAAAGUCAUUCUC
AACUAGCGGAAACCUGACAGAGCACCAGAGGACCCAUACUGGCGAAAAGCCAUACAAAUGCCCCGAAUGCGGGAAAAGCUUCA
GCGACAGCGGGAACCUGAGAGUGCACCAGCGGACUCAUACCGGGGAGAAGCCUUACAAGUGCCCCGAGUGUGGAAAGUCCUUC
UCCCAUAAGAACGCGCUCCAGAACCACCAGAGAACCCACACCGGAGAAAAGCCGUACAAGUGCCCGGAAUGCGGCAAAUCCUU
UUCACGGAACGACACUCUCACCGAGCACCAACGGACGCACACCGGAGAGAAGCCGUACAAGUGCCCUGAAUGCGGAAAGAGCU
UUAGCCAGAGGGCCCACCUGGAACGGCAUCAGCGCACUCACACCGGGGAAAAGCCCUACAAGUGCCCAGAGUGCGGCAAGAGC
UUCUCCCGGUCUGACAAGCUUGUGCGCCAUCAGCGGACCCACACUGGAGAAAAACCGUACAAGUGUCCGGAGUGUGGCAAAUC
GUUCUCAGACCCGGGACACCUGGUCCGACACCAACGCACACACACCGGCGAAAAGCCGACCGGCAAAAAGACCUCGGCCUCGG
GAUCUGGAGGAGGAAGCGGCGGAGAUGCCCUGGACGACUUCGACCUGGACAUGUUGGGCAGCGACGCACUGGAUGACUUCGAC
CUGGAUAUGCUGGGAUCCGACGCCCUCGACGAUUUCGACCUCGAUAUGCUUGGCUCCGAUGCGCUCGAUGAUUUCGAUUUGGA
CAUGCUGUCCGGCGGACCUAAGAAGAAGAGAAAGGUCGGCAGCCAAUACCUCCCGGACACUGAUGACCGGCACCGGAUCGAAG
AGAAGCGGAAGCGCACUUACGAGACUUUCAAGUCGAUCAUGAAGAAGUCACCCUUCUCGGGACCUACUGAUCCUCGGCCGCCA
CCUAGACGGAUCGCGGUGCCAUCCAGGUCAUCCGCUUCCGUCCCCAAGCCUGCGCCUCAACCGUACCCUUUCACUUCCUCCCU
GUCGACCAUCAACUACGACGAGUUCCCCACCAUGGUGUUCCCCUCCGGACAGAUUUCCCAAGCCUCGGCGCUAGCACCAGCCC
CUCCACAAGUGCUUCCGCAAGCUCCAGCUCCGGCACCAGCACCAGCCAUGGUGUCCGCUCUGGCCCAAGCUCCUGCUCCGGUG
CCUGUGCUGGCUCCUGGACCGCCUCAGGCAGUGGCACCACCCGCACCAAAGCCGACCCAAGCGGGAGAGGGAACUCUGUCCGA
AGCGCUGCUGCAGCUCCAGUUCGACGACGAGGACCUGGGUGCCCUGCUCGGAAAUUCGACCGAUCCGGCCGUGUUUACCGACU
UGGCCAGUGUGGACAACUCCGAGUUCCAACAGCUGCUGAACCAGGGGAUUCCAGUGGCCCCCCACACUACUGAACCGAUGCUG
AUGGAAUACCCCGAGGCCAUUACCAGACUGGUCACUGGAGCCCAGAGGCCUCCAGACCCUGCCCCUGCUCCACUGGGUGCCCC
AGGACUGCCCAAUGGGCUUCUGUCGGGCGAUGAGGAUUUCAGCUCAAUCGCGGAUAUGGACUUCUCCGCCCUUCUGGGUUCCG
GAUCCGGUUCACGGGAUUCCAGAGAGGGCAUGUUCCUACCCAAGCCCGAAGCCGGAAGCGCGAUCAGCGACGUGUUCGAGGGU
CGCGAAGUCUGUCAGCCAAAGAGACUCCGGCCGUUUCAUCCACCCGGAUCACCCUGGGCCAAUCGCCCACUCCCUGCCUCAUU
GGCCCCGACCCCUACUGGUCCGGUGCACGAGCCUGUCGGGUCGCUCACUCCGGCACCUGUGCCACAACCGCUGGACCCUGCAC
CAGCCGUGACCCCAGAGGCGUCCCACCUCCUCGAAGAUCCCGAUGAAGAAACAAGCCAGGCCGUGAAGGCCCUGCGCGAAAUG
GCCGACACCGUGAUCCCGCAGAAAGAGGAAGCCGCCAUCUGCGGUCAGAUGGACCUGAGCCAUCCCCCUCCGAGAGGACACCU
GGACGAACUGACCACUACACUGGAGAGCAUGACCGAGGACCUGAACCUGGACUCCCCCCUUACCCCGGAACUGAACGAGAUUC
UCGACACUUUCCUGAACGACGAGUGUCUGCUCCACGCGAUGCACAUCUCGACCGGACUGUCGAUCUUUGACACCUCGCUGUUC
UCCGGUGGCAAAAGGCCUGCCGCCACCAAGAAGGCCGGACAGGCCAAGAAAAAGAAGGGCUCCUACCCGUACGAUGUGCCCGA
CUACGCUUGAGCGGCCGCUUAAUUAAGCUGCCUUCUGCGGGGCUUGCCUUCUGGCCAUGCCCUUCUUCUCUCCCUUGCACCUG
UACCUCUUGGUCUUUGAAUAAAGCCUGAGUAGGAAGUCUAGAAAAAAAAAAAAAAAAAAAAAAAAAAAAAAAAAAAAAAAAAA
AAAAAAAAAAAAAAAAAAAAAAAAAAAAAAAAAAAAAAAAAAAAAAAAAAAAAAAAAAAAAAAAAAAAAAAA
>ZF5.5 mRNA
SEQ ID NO.: 230
CUGGAACCUGGGGAGAAACCCUAUAAGUGCCCGGAGUGCGGAAAGUCAUUCUCAACUAGCGGAAACCUGACAGAGCACCAGAG
GACCCAUACUGGCGAAAAGCCAUACAAAUGCCCCGAAUGCGGGAAAAGCUUCAGCGACAGCGGGAACCUGAGAGUGCACCAGC
GGACUCAUACCGGGGAGAAGCCUUACAAGUGCCCCGAGUGUGGAAAGUCCUUCUCCCAUAAGAACGCGCUCCAGAACCACCAG
AGAACCCACACCGGAGAAAAGCCGUACAAGUGCCCGGAAUGCGGCAAAUCCUUUUCACGGAACGACACUCUCACCGAGCACCA
ACGGACGCACACCGGAGAGAAGCCGUACAAGUGCCCUGAAUGCGGAAAGAGCUUUAGCCAGAGGGCCCACCUGGAACGGCAUC
AGCGCACUCACACCGGGGAAAAGCCCUACAAGUGCCCAGAGUGCGGCAAGAGCUUCUCCCGGUCUGACAAGCUUGUGCGCCAU
CAGCGGACCCACACUGGAGAAAAACCGUACAAGUGUCCGGAGUGUGGCAAAUCGUUCUCAGACCCGGGACACCUGGUCCGACA
CCAACGCACACACACCGGCGAAAAGCCGACCGGCAAAAAGACCUCG
>ZF5.6-VPR mRNA (ZF5-VPR ATUM Opt_6)
SEQ ID NO.: 165
AGGAAAUAAGAGAGAAAAGAAGAGUAAGAAGAAAUAUAAGAGCCACCAUGGCCCCCAAGAAAAAGCGCAAAGUGGGCAUCCAC
GGCGUGCCAGCAGCAGGAAGCAGCGGAAGCCUGGAACCCGGGGAGAAGCCGUACAAGUGCCCAGAAUGCGGAAAGAGCUUCAG
CACCAGCGGCAACCUCACCGAGCACCAGAGAACCCACACCGGGGAGAAACCGUACAAAUGCCCGGAAUGCGGCAAGAGCUUCA
GCGACAGCGGAAACCUGAGAGUGCACCAACGCACCCACACGGGAGAAAAACCCUACAAAUGCCCCGAGUGCGGGAAAAGCUUC
AGCCACAAGAACGCGCUGCAGAACCACCAAAGAACGCACACCGGAGAAAAGCCGUACAAGUGCCCAGAAUGCGGAAAGAGCUU
CAGCAGAAACGACACCCUGACCGAACACCAGCGGACGCACACAGGCGAAAAACCAUACAAGUGCCCGGAGUGCGGCAAAAGCU
UCAGCCAGAGAGCGCACCUGGAAAGGCACCAGCGCACACACACCGGCGAAAAGCCAUACAAAUGCCCAGAGUGCGGAAAAAGC
UUCAGCCGGAGCGACAAGCUGGUCCGCCACCAACGGACCCACACAGGGGAAAAGCCCUACAAGUGCCCCGAAUGCGGCAAGAG
CUUCAGCGACCCGGGACACCUCGUGCGGCACCAGAGGACCCACACCGGAGAAAAGCCGACCGGGAAAAAGACCAGCGCAAGCG
GGAGCGGAGGAGGAAGCGGAGGCGACGCACUCGACGACUUCGACCUGGACAUGCUGGGGAGCGACGCACUGGACGACUUCGAC
CUCGACAUGCUCGGAAGCGACGCCCUCGACGACUUCGACCUGGACAUGCUGGGCAGCGACGCGCUGGACGACUUCGACCUCGA
CAUGCUCAGCGGGGGACCAAAAAAGAAAAGGAAGGUCGGAAGCCAGUACCUCCCGGACACCGACGACAGGCACCGGAUCGAGG
AAAAGCGGAAGCGCACCUACGAAACCUUCAAGAGCAUCAUGAAAAAGAGCCCCUUCAGCGGACCGACAGACCCGAGGCCACCA
CCACGGAGAAUCGCCGUGCCAAGCAGGAGCAGCGCCAGCGUGCCCAAACCGGCCCCACAACCCUACCCGUUCACCAGCAGCCU
CAGCACCAUCAACUACGACGAGUUCCCAACCAUGGUGUUCCCCAGCGGACAGAUCAGCCAAGCCAGCGCACUGGCACCAGCCC
CCCCGCAAGUGCUGCCACAAGCGCCGGCACCAGCGCCAGCACCAGCCAUGGUCAGCGCGCUGGCACAAGCCCCCGCACCAGUG
CCAGUGCUCGCACCAGGACCACCCCAGGCAGUAGCACCGCCAGCCCCGAAGCCAACCCAGGCAGGAGAAGGCACCCUCAGCGA
GGCGCUGCUGCAGCUCCAGUUCGACGACGAGGACCUCGGAGCCCUGCUGGGAAACAGCACCGACCCAGCCGUGUUCACCGACC
UGGCCAGCGUGGACAACAGCGAAUUCCAGCAGCUGCUCAACCAAGGAAUCCCGGUGGCCCCACACACCACCGAACCCAUGCUG
AUGGAGUACCCGGAGGCCAUCACCAGACUCGUGACAGGAGCCCAGAGGCCACCAGACCCAGCCCCAGCACCACUGGGAGCCCC
AGGACUCCCCAACGGACUGCUGAGCGGCGACGAGGACUUCAGCAGCAUCGCCGACAUGGACUUCAGCGCACUCCUCGGGAGCG
GAAGCGGAAGCAGAGACAGCAGGGAAGGAAUGUUCCUGCCCAAGCCGGAAGCGGGAAGCGCAAUCAGCGACGUGUUCGAAGGA
AGAGAAGUCUGCCAGCCCAAGAGGCUGCGCCCGUUCCACCCACCAGGAAGCCCGUGGGCCAACAGACCACUGCCAGCAAGCCU
CGCCCCGACACCAACCGGACCGGUGCACGAACCCGUGGGCAGCCUGACCCCAGCACCGGUCCCACAGCCACUGGACCCAGCAC
CCGCAGUGACCCCAGAAGCCAGCCACCUCCUGGAGGACCCGGACGAAGAAACCAGCCAGGCCGUCAAGGCCCUGCGCGAGAUG
GCCGACACCGUCAUCCCCCAAAAGGAAGAGGCGGCCAUCUGCGGACAGAUGGACCUGAGCCACCCACCGCCAAGAGGCCACCU
CGACGAGCUGACCACCACCCUGGAAAGCAUGACGGAGGACCUGAACCUCGACAGCCCGCUAACGCCCGAGCUGAACGAAAUCC
UGGACACCUUCCUCAACGACGAAUGCCUGCUGCACGCCAUGCACAUCAGCACCGGACUGAGCAUCUUCGACACGAGCCUGUUC
AGCGGAGGAAAACGGCCAGCCGCAACCAAGAAGGCCGGACAAGCCAAGAAGAAGAAGGGGAGCUACCCGUACGACGUGCCAGA
CUACGCAUGAGCGGCCGCUUAAUUAAGCUGCCUUCUGCGGGGCUUGCCUUCUGGCCAUGCCCUUCUUCUCUCCCUUGCACCUG
UACCUCUUGGUCUUUGAAUAAAGCCUGAGUAGGAAGUCUAGAAAAAAAAAAAAAAAAAAAAAAAAAAAAAAAAAAAAAAAAAA
AAAAAAAAAAAAAAAAAAAAAAAAAAAAAAAAAAAAAAAAAAAAAAAAAAAAAAAAAAAAAAAAAAAAAAAA
>ZF5.6 mRNA
SEQ ID NO.: 231
CUGGAACCCGGGGAGAAGCCGUACAAGUGCCCAGAAUGCGGAAAGAGCUUCAGCACCAGCGGCAACCUCACCGAGCACCAGAG
AACCCACACCGGGGAGAAACCGUACAAAUGCCCGGAAUGCGGCAAGAGCUUCAGCGACAGCGGAAACCUGAGAGUGCACCAAC
GCACCCACACGGGAGAAAAACCCUACAAAUGCCCCGAGUGCGGGAAAAGCUUCAGCCACAAGAACGCGCUGCAGAACCACCAA
AGAACGCACACCGGAGAAAAGCCGUACAAGUGCCCAGAAUGCGGAAAGAGCUUCAGCAGAAACGACACCCUGACCGAACACCA
GCGGACGCACACAGGCGAAAAACCAUACAAGUGCCCGGAGUGCGGCAAAAGCUUCAGCCAGAGAGCGCACCUGGAAAGGCACC
AGCGCACACACACCGGCGAAAAGCCAUACAAAUGCCCAGAGUGCGGAAAAAGCUUCAGCCGGAGCGACAAGCUGGUCCGCCAC
CAACGGACCCACACAGGGGAAAAGCCCUACAAGUGCCCCGAAUGCGGCAAGAGCUUCAGCGACCCGGGACACCUCGUGCGGCA
CCAGAGGACCCACACCGGAGAAAAGCCGACCGGGAAAAAGACCAGC
>ZF5-P300 protein
SEQ ID NO.: 166
MAPKKKRKVGIHGVPAAGSSGSLEPGEKPYKCPECGKSFSQRAHLERHQRTHTGEKPYKCPECGKSFSQLAHLRAHQRTHTGE
KPYKCPECGKSFSSKKHLAEHQRTHTGEKPYKCPECGKSFSTTGALTEHQRTHTGEKPYKCPECGKSFSTSGNLVRHQRTHTG
EKPYKCPECGKSFSQSGDLRRHQRTHTGEKPYKCPECGKSFSTSHSLTEHQRTHTGEKPTGKKTSASGSGGGSGGIFKPEELR
QALMPTLEALYRQDPESLPFRQPVDPQLLGIPDYFDIVKSPMDLSTIKRKLDTGQYQEPWQYVDDIWLMFNNAWLYNRKTSRV
YKYCSKLSEVFEQEIDPVMQSLGYCCGRKLEFSPQTLCCYGKQLCTIPRDATYYSYQNRYHFCEKCFNEIQGESVSLGDDPSQ
PQTTINKEQFSKRKNDTLDPELFVECTECGRKMHQICVLHHEIIWPAGFVCDGCLKKSARTRKENKFSAKRLPSTRLGTFLEN
RVNDFLRRQNHPESGEVTVRVVHASDKTVEVKPGMKARFVDSGEMAESFPYRTKALFAFEEIDGVDLCFFGMHVQEYGSDCPP
PNQRRVYISYLDSVHFFRPKCLRTAVYHEILIGYLEYVKKLGYTTGHIWACPPSEGDDYIFHCHPPDQKIPKPKRLQEWYKKM
LDKAVSERIVHDYKDIFKQATEDRLTSAKELPYFEGDFWPNVLEESIKELEQEEEERKREENTSNESTDVTKGDSKNAKKKNN
KKTSKNKSSLSRGNKKKPGMPNVSNDLSQKLYATMEKHKEVFFVIRLIAGPAANSLPPIVDPDPLIPCDLMDGRDAFLTLARD
KHLEFSSLRRAQWSTMCMLVELHTQSQDSGGKRPAATKKAGQAKKKKGSYPYDVPDYA*
>ZF5-P300 mRNA
SEQ ID NO.: 167
AGGAAAUAAGAGAGAAAAGAAGAGUAAGAAGAAAUAUAAGAGCCACCAUGGCCCCCAAGAAGAAGCGGAAGGUGGGCAUCCAC
GGCGUGCCCGCCGCCGGCAGCAGCGGAUCCCUCGAACCGGGCGAAAAGCCGUAUAAGUGCCCGGAAUGCGGCAAGAGUUUUAG
CCAGCGCGCCCAUCUGGAACGUCACCAGCGUACCCAUACCGGUGAAAAGCCAUAUAAAUGCCCAGAAUGUGGUAAAAGCUUUA
GUCAGCUGGCCCAUCUGCGCGCCCACCAACGUACGCACACGGGCGAGAAGCCGUACAAAUGCCCAGAAUGCGGUAAAAGCUUC
AGCAGCAAAAAGCAUCUGGCGGAACAUCAACGUACCCACACCGGCGAGAAACCAUACAAGUGCCCGGAAUGCGGUAAAAGCUU
CAGCACCACCGGUGCGCUGACGGAGCAUCAGCGCACCCACACGGGCGAAAAACCGUAUAAGUGUCCGGAGUGUGGCAAAAGUU
UUAGUACCAGCGGCAAUCUGGUGCGCCAUCAACGUACGCAUACCGGCGAGAAGCCAUAUAAAUGUCCAGAGUGUGGCAAGAGC
UUUAGCCAAAGCGGUGAUCUGCGUCGCCACCAACGCACGCACACCGGCGAAAAACCAUACAAAUGUCCGGAAUGCGGUAAGAG
UUUCAGCACGAGCCAUAGUCUGACCGAACAUCAACGUACCCAUACGGGUGAGAAACCAACCGGCAAGAAAACCAGCGCUAGCG
GCAGCGGCGGCGGCAGCGGCGGCAUCUUCAAGCCCGAGGAGCUGCGGCAGGCCCUGAUGCCCACCCUGGAGGCCCUGUACCGG
CAGGACCCCGAGAGCCUGCCCUUCCGGCAGCCCGUGGACCCCCAGCUGCUGGGCAUCCCCGACUACUUCGACAUCGUGAAAUC
CCCCAUGGACCUGAGCACCAUCAAGCGGAAGCUGGACACCGGCCAGUACCAGGAGCCCUGGCAGUACGUGGACGACAUCUGGC
UGAUGUUCAACAACGCCUGGCUGUACAACCGGAAAACCAGCCGGGUGUACAAGUACUGCAGCAAGCUGAGCGAGGUGUUCGAG
CAGGAGAUCGACCCCGUGAUGCAGAGCCUGGGCUACUGCUGCGGCCGGAAGCUGGAGUUCAGCCCCCAGACCCUGUGCUGCUA
CGGCAAGCAGCUGUGCACCAUCCCCCGGGACGCCACCUACUACAGCUACCAGAACCGGUACCACUUCUGCGAGAAGUGCUUCA
ACGAGAUCCAGGGCGAGAGCGUGAGCCUGGGCGACGACCCCAGCCAGCCCCAGACCACCAUCAACAAGGAGCAGUUCAGCAAG
CGGAAGAACGACACCCUGGACCCCGAGCUGUUCGUGGAGUGCACCGAGUGCGGCCGGAAGAUGCACCAGAUCUGCGUGCUGCA
CCACGAGAUCAUCUGGCCCGCCGGCUUCGUGUGCGACGGCUGCCUGAAGAAAUCCGCCCGGACCCGGAAGGAGAACAAGUUCA
GCGCCAAGCGGCUGCCCAGCACCCGGCUGGGCACCUUCCUGGAGAACCGGGUGAACGACUUCCUGCGGCGGCAGAACCACCCC
GAGAGCGGCGAGGUGACCGUGCGGGUGGUGCACGCCAGCGACAAGACCGUGGAGGUGAAGCCCGGCAUGAAGGCCCGGUUCGU
GGACAGCGGCGAGAUGGCCGAGAGCUUCCCCUACCGGACCAAGGCCCUGUUCGCCUUCGAGGAGAUCGACGGCGUGGACCUGU
GCUUCUUCGGCAUGCACGUGCAGGAGUACGGCAGCGACUGCCCCCCCCCCAACCAGCGGCGGGUGUACAUCAGCUACCUGGAC
AGCGUGCACUUCUUCCGGCCCAAGUGCCUGCGGACCGCCGUGUACCACGAGAUCCUGAUCGGCUACCUGGAGUACGUGAAGAA
GCUGGGCUACACCACCGGCCACAUCUGGGCCUGCCCCCCCAGCGAGGGCGACGACUACAUCUUCCACUGCCACCCCCCCGACC
AGAAGAUCCCCAAGCCCAAGCGGCUGCAGGAGUGGUACAAGAAGAUGCUGGACAAGGCCGUGAGCGAGCGGAUCGUGCACGAC
UACAAGGACAUCUUCAAGCAGGCCACCGAGGACCGGCUGACCAGCGCCAAGGAGCUGCCCUACUUCGAGGGCGACUUCUGGCC
CAACGUGCUGGAGGAGAGCAUCAAGGAGCUGGAGCAGGAGGAGGAGGAGCGGAAGCGGGAGGAGAACACCAGCAACGAGAGCA
CCGACGUGACCAAGGGCGACAGCAAGAACGCCAAGAAGAAGAACAACAAGAAAACCAGCAAGAACAAGAGCAGCCUGAGCCGG
GGCAACAAGAAGAAGCCCGGCAUGCCCAACGUGAGCAACGACCUGAGCCAGAAGCUGUACGCCACCAUGGAGAAGCACAAGGA
GGUGUUCUUCGUGAUCCGGCUGAUCGCCGGCCCCGCCGCCAACAGCCUGCCCCCCAUCGUGGACCCCGACCCCCUGAUCCCCU
GCGACCUGAUGGACGGCCGGGACGCCUUCCUGACCCUGGCCCGGGACAAGCACCUGGAGUUCAGCAGCCUGCGGCGGGCCCAG
UGGAGCACCAUGUGCAUGCUGGUGGAGCUGCACACCCAGAGCCAGGACAGCGGCGGCAAGCGGCCCGCCGCCACCAAGAAGGC
CGGCCAGGCCAAGAAGAAGAAGGGCAGCUACCCCUACGACGUGCCCGACUACGCCUGAGCGGCCGCUUAAUUAAGCUGCCUUC
UGCGGGGCUUGCCUUCUGGCCAUGCCCUUCUUCUCUCCCUUGCACCUGUACCUCUUGGUCUUUGAAUAAAGCCUGAGUAGGAA
GUCUAGAAAAAAAAAAAAAAAAAAAAAAAAAAAAAAAAAAAAAAAAAAAAAAAAAAAAAAAAAAAAAAAAAAAAAAAAAAAAA
AAA
>Nucleotide Seqeunce of DNA binding domain of ZF5-P300
SEQ ID NO.: 232
CUCGAACCGGGCGAAAAGCCGUAUAAGUGCCCGGAAUGCGGCAAGAGUUUUAGCCAGCGCGCCCAUCUGGAACGUCACCAGCG
UACCCAUACCGGUGAAAAGCCAUAUAAAUGCCCAGAAUGUGGUAAAAGCUUUAGUCAGCUGGCCCAUCUGCGCGCCCACCAAC
GUACGCACACGGGCGAGAAGCCGUACAAAUGCCCAGAAUGCGGUAAAAGCUUCAGCAGCAAAAAGCAUCUGGCGGAACAUCAA
CGUACCCACACCGGCGAGAAACCAUACAAGUGCCCGGAAUGCGGUAAAAGCUUCAGCACCACCGGUGCGCUGACGGAGCAUCA
GCGCACCCACACGGGCGAAAAACCGUAUAAGUGUCCGGAGUGUGGCAAAAGUUUUAGUACCAGCGGCAAUCUGGUGCGCCAUC
AACGUACGCAUACCGGCGAGAAGCCAUAUAAAUGUCCAGAGUGUGGCAAGAGCUUUAGCCAAAGCGGUGAUCUGCGUCGCCAC
CAACGCACGCACACCGGCGAAAAACCAUACAAAUGUCCGGAAUGCGGUAAGAGUUUCAGCACGAGCCAUAGUCUGACCGAACA
UCAACGUACCCAUACGGGUGAGAAACCAACCGGCAAGAAAACCAGC
>ZF7-p300 protein
SEQ ID NO.: 168
MAPKKKRKVGIHGVPAAGSSGSLEPGEKPYKCPECGKSFSRSDHLTNHQRTHTGEKPYKCPECGKSFSTSGSLVRHQRTHTGE
KPYKCPECGKSFSQAGHLASHQRTHTGEKPYKCPECGKSFSRSDKLTEHQRTHTGEKPYKCPECGKSFSTSGNLTEHQRTHTG
EKPYKCPECGKSFSQSSNLVRHQRTHTGEKPYKCPECGKSFSTHLDLIRHQRTHTGEKPTGKKTSASGSGGGSGGIFKPEELR
QALMPTLEALYRQDPESLPFRQPVDPQLLGIPDYFDIVKSPMDLSTIKRKLDTGQYQEPWQYVDDIWLMFNNAWLYNRKTSRV
YKYCSKLSEVFEQEIDPVMQSLGYCCGRKLEFSPQTLCCYGKQLCTIPRDATYYSYQNRYHFCEKCFNEIQGESVSLGDDPSQ
PQTTINKEQFSKRKNDTLDPELFVECTECGRKMHQICVLHHEIIWPAGFVCDGCLKKSARTRKENKFSAKRLPSTRLGTFLEN
RVNDFLRRQNHPESGEVTVRVVHASDKTVEVKPGMKARFVDSGEMAESFPYRTKALFAFEEIDGVDLCFFGMHVQEYGSDCPP
PNQRRVYISYLDSVHFFRPKCLRTAVYHEILIGYLEYVKKLGYTTGHIWACPPSEGDDYIFHCHPPDQKIPKPKRLQEWYKKM
LDKAVSERIVHDYKDIFKQATEDRLTSAKELPYFEGDFWPNVLEESIKELEQEEEERKREENTSNESTDVTKGDSKNAKKKNN
KKTSKNKSSLSRGNKKKPGMPNVSNDLSQKLYATMEKHKEVFFVIRLIAGPAANSLPPIVDPDPLIPCDLMDGRDAFLTLARD
KHLEFSSLRRAQWSTMCMLVELHTQSQDSGGKRPAATKKAGQAKKKKGSYPYDVPDYA*
>ZF7-p300 mRNA
SEQ ID NO.: 169
AGGAAAUAAGAGAGAAAAGAAGAGUAAGAAGAAAUAUAAGAGCCACCAUGGCCCCCAAGAAGAAGCGGAAGGUGGGCAUCCAC
GGCGUGCCCGCCGCCGGCAGCAGCGGAUCCCUGGAACCGGGCGAGAAGCCAUACAAGUGCCCAGAGUGCGGCAAAAGCUUCAG
CCGCAGCGACCAUCUGACCAAUCACCAACGCACCCAUACCGGUGAGAAGCCGUACAAAUGCCCAGAGUGCGGUAAGAGCUUUA
GUACCAGUGGCAGUCUGGUUCGUCAUCAGCGCACGCACACGGGCGAAAAACCAUACAAAUGCCCGGAGUGCGGCAAAAGCUUU
AGCCAAGCCGGUCAUCUGGCGAGCCAUCAACGUACGCACACCGGCGAGAAGCCGUAUAAAUGUCCGGAGUGCGGUAAGAGCUU
UAGCCGUAGCGAUAAACUGACCGAACACCAACGUACGCAUACGGGCGAGAAACCAUAUAAAUGUCCAGAGUGUGGCAAGAGUU
UCAGCACCAGCGGCAAUCUGACCGAGCAUCAACGUACCCAUACCGGUGAAAAGCCAUAUAAAUGUCCAGAAUGCGGUAAGAGU
UUUAGUCAGAGCAGUAAUCUGGUGCGCCAUCAGCGUACCCACACGGGUGAGAAACCAUAUAAGUGUCCGGAAUGCGGCAAGAG
UUUUAGCACCCAUCUGGAUCUGAUCCGUCAUCAGCGCACCCACACCGGUGAAAAACCAACCGGCAAGAAAACCAGUGCUAGCG
GCAGCGGCGGCGGCAGCGGCGGCAUCUUCAAGCCCGAGGAGCUGCGGCAGGCCCUGAUGCCCACCCUGGAGGCCCUGUACCGG
CAGGACCCCGAGAGCCUGCCCUUCCGGCAGCCCGUGGACCCCCAGCUGCUGGGCAUCCCCGACUACUUCGACAUCGUGAAAUC
CCCCAUGGACCUGAGCACCAUCAAGCGGAAGCUGGACACCGGCCAGUACCAGGAGCCCUGGCAGUACGUGGACGACAUCUGGC
UGAUGUUCAACAACGCCUGGCUGUACAACCGGAAAACCAGCCGGGUGUACAAGUACUGCAGCAAGCUGAGCGAGGUGUUCGAG
CAGGAGAUCGACCCCGUGAUGCAGAGCCUGGGCUACUGCUGCGGCCGGAAGCUGGAGUUCAGCCCCCAGACCCUGUGCUGCUA
CGGCAAGCAGCUGUGCACCAUCCCCCGGGACGCCACCUACUACAGCUACCAGAACCGGUACCACUUCUGCGAGAAGUGCUUCA
ACGAGAUCCAGGGCGAGAGCGUGAGCCUGGGCGACGACCCCAGCCAGCCCCAGACCACCAUCAACAAGGAGCAGUUCAGCAAG
CGGAAGAACGACACCCUGGACCCCGAGCUGUUCGUGGAGUGCACCGAGUGCGGCCGGAAGAUGCACCAGAUCUGCGUGCUGCA
CCACGAGAUCAUCUGGCCCGCCGGCUUCGUGUGCGACGGCUGCCUGAAGAAAUCCGCCCGGACCCGGAAGGAGAACAAGUUCA
GCGCCAAGCGGCUGCCCAGCACCCGGCUGGGCACCUUCCUGGAGAACCGGGUGAACGACUUCCUGCGGCGGCAGAACCACCCC
GAGAGCGGCGAGGUGACCGUGCGGGUGGUGCACGCCAGCGACAAGACCGUGGAGGUGAAGCCCGGCAUGAAGGCCCGGUUCGU
GGACAGCGGCGAGAUGGCCGAGAGCUUCCCCUACCGGACCAAGGCCCUGUUCGCCUUCGAGGAGAUCGACGGCGUGGACCUGU
GCUUCUUCGGCAUGCACGUGCAGGAGUACGGCAGCGACUGCCCCCCCCCCAACCAGCGGCGGGUGUACAUCAGCUACCUGGAC
AGCGUGCACUUCUUCCGGCCCAAGUGCCUGCGGACCGCCGUGUACCACGAGAUCCUGAUCGGCUACCUGGAGUACGUGAAGAA
GCUGGGCUACACCACCGGCCACAUCUGGGCCUGCCCCCCCAGCGAGGGCGACGACUACAUCUUCCACUGCCACCCCCCCGACC
AGAAGAUCCCCAAGCCCAAGCGGCUGCAGGAGUGGUACAAGAAGAUGCUGGACAAGGCCGUGAGCGAGCGGAUCGUGCACGAC
UACAAGGACAUCUUCAAGCAGGCCACCGAGGACCGGCUGACCAGCGCCAAGGAGCUGCCCUACUUCGAGGGCGACUUCUGGCC
CAACGUGCUGGAGGAGAGCAUCAAGGAGCUGGAGCAGGAGGAGGAGGAGCGGAAGCGGGAGGAGAACACCAGCAACGAGAGCA
CCGACGUGACCAAGGGCGACAGCAAGAACGCCAAGAAGAAGAACAACAAGAAAACCAGCAAGAACAAGAGCAGCCUGAGCCGG
GGCAACAAGAAGAAGCCCGGCAUGCCCAACGUGAGCAACGACCUGAGCCAGAAGCUGUACGCCACCAUGGAGAAGCACAAGGA
GGUGUUCUUCGUGAUCCGGCUGAUCGCCGGCCCCGCCGCCAACAGCCUGCCCCCCAUCGUGGACCCCGACCCCCUGAUCCCCU
GCGACCUGAUGGACGGCCGGGACGCCUUCCUGACCCUGGCCCGGGACAAGCACCUGGAGUUCAGCAGCCUGCGGCGGGCCCAG
UGGAGCACCAUGUGCAUGCUGGUGGAGCUGCACACCCAGAGCCAGGACAGCGGCGGCAAGCGGCCCGCCGCCACCAAGAAGGC
CGGCCAGGCCAAGAAGAAGAAGGGCAGCUACCCCUACGACGUGCCCGACUACGCCUGAGCGGCCGCUUAAUUAAGCUGCCUUC
UGCGGGGCUUGCCUUCUGGCCAUGCCCUUCUUCUCUCCCUUGCACCUGUACCUCUUGGUCUUUGAAUAAAGCCUGAGUAGGAA
GUCUAGAAAAAAAAAAAAAAAAAAAAAAAAAAAAAAAAAAAAAAAAAAAAAAAAAAAAAAAAAAAAAAAAAAAAAAAAAAAAA
AAA
>Nucleotide Seqeunce of DNA binding domain of ZF7-P300
SEQ ID NO.: 233
CUGGAACCGGGCGAGAAGCCAUACAAGUGCCCAGAGUGCGGCAAAAGCUUCAGCCGCAGCGACCAUCUGACCAAUCACCAACG
CACCCAUACCGGUGAGAAGCCGUACAAAUGCCCAGAGUGCGGUAAGAGCUUUAGUACCAGUGGCAGUCUGGUUCGUCAUCAGC
GCACGCACACGGGCGAAAAACCAUACAAAUGCCCGGAGUGCGGCAAAAGCUUUAGCCAAGCCGGUCAUCUGGCGAGCCAUCAA
CGUACGCACACCGGCGAGAAGCCGUAUAAAUGUCCGGAGUGCGGUAAGAGCUUUAGCCGUAGCGAUAAACUGACCGAACACCA
ACGUACGCAUACGGGCGAGAAACCAUAUAAAUGUCCAGAGUGUGGCAAGAGUUUCAGCACCAGCGGCAAUCUGACCGAGCAUC
AACGUACCCAUACCGGUGAAAAGCCAUAUAAAUGUCCAGAAUGCGGUAAGAGUUUUAGUCAGAGCAGUAAUCUGGUGCGCCAU
CAGCGUACCCACACGGGUGAGAAACCAUAUAAGUGUCCGGAAUGCGGCAAGAGUUUUAGCACCCAUCUGGAUCUGAUCCGUCA
UCAGCGCACCCACACCGGUGAAAAACCAACCGGCAAGAAAACCAGU
>ZF5.3-VPR3 protein
SEQ ID NO.: 170
MAPKKKRKVGIHGVPAAGSSGSLEPGEKPYKCPECGKSFSRSDHLTNHQRTHTGEKPYKCPECGKSFSTSGSLVRHQRTHTGE
KPYKCPECGKSFSQAGHLASHQRTHTGEKPYKCPECGKSFSRSDKLTEHQRTHTGEKPYKCPECGKSFSTSGNLTEHQRTHTG
EKPYKCPECGKSFSQSSNLVRHQRTHTGEKPYKCPECGKSFSTHLDLIRHQRTHTGEKPTGKKTSASGSGGGSGGDALDDFDL
DMLGSDALDDFDLDMLGSDALDDFDLDMLGSDALDDFDLDMLGSGSGSQYLPDTDDRHRIEEKRKRTYETFKSIMKKSPFSGP
TDPRPPPRRIAVPSRSSASVPKPAPQPYPFTSSLSTINYDEFPTMVFPSGQISQASALAPAPPQVLPQAPAPAPAPAMVSALA
QAPAPVPVLAPGPPQAVAPPAPKPTQAGEGTLSEALLQLQFDDEDLGALLGNSTDPAVFTDLASVDNSEFQQLLNQGIPVAPH
TTEPMLMEYPEAITRLVTGAQRPPDPAPAPLGAPGLPNGLLSGDEDFSSIADMDFSALLGSGSGSRDSREGMFLPKPEAGSAI
SDVFEGREVCQPKRIRPFHPPGSPWANRPLPASLAPTPTGPVHEPVGSLTPAPVPQPLDPAPAVTPEASHLLEDPDEETSQAV
KALREMADTVIPQKEEAAICGQMDLSHPPPRGHLDELTTTLESMTEDLNLDSPLTPELNEILDTFLNDECLLHAMHISTGLSI
FDTSLFGSGSGSDALDDFDLDMLGSDALDDFDLDMLGSDALDDFDLDMLGSDALDDFDLDMLGSGSGSQYLPDTDDRHRIEEK
RKRTYETFKSIMKKSPFSGPTDPRPPPRRIAVPSRSSASVPKPAPQPYPFTSSLSTINYDEFPTMVFPSGQISQASALAPAPP
QVLPQAPAPAPAPAMVSALAQAPAPVPVLAPGPPQAVAPPAPKPTQAGEGTLSEALLQLQFDDEDLGALLGNSTDPAVFTDLA
SVDNSEFQQLLNQGIPVAPHTTEPMLMEYPEAITRLVTGAQRPPDPAPAPLGAPGLPNGLLSGDEDFSSIADMDFSALLGSGS
GSRDSREGMFLPKPEAGSAISDVFEGREVCQPKRIRPFHPPGSPWANRPLPASLAPTPTGPVHEPVGSLTPAPVPQPLDPAPA
VTPEASHLLEDPDEETSQAVKALREMADTVIPQKEEAAICGQMDLSHPPPRGHLDELTTTLESMTEDLNLDSPLTPELNEILD
TFLNDECLLHAMHISTGLSIFDTSLFGSGSGSDALDDFDLDMLGSDALDDFDLDMLGSDALDDFDLDMLGSDALDDFDLDMLG
SGSGSQYLPDTDDRHRIEEKRKRTYETFKSIMKKSPFSGPTDPRPPPRRIAVPSRSSASVPKPAPQPYPFTSSLSTINYDEFP
TMVFPSGQISQASALAPAPPQVLPQAPAPAPAPAMVSALAQAPAPVPVLAPGPPQAVAPPAPKPTQAGEGTLSEALLQLQFDD
EDLGALLGNSTDPAVFTDLASVDNSEFQQLLNQGIPVAPHTTEPMLMEYPEAITRLVTGAQRPPDPAPAPLGAPGLPNGLLSG
DEDFSSIADMDFSALLGSGSGSRDSREGMFLPKPEAGSAISDVFEGREVCQPKRIRPFHPPGSPWANRPLPASLAPTPTGPVH
EPVGSLTPAPVPQPLDPAPAVTPEASHLLEDPDEETSQAVKALREMADTVIPQKEEAAICGQMDLSHPPPRGHLDELTTTLES
MTEDLNLDSPLTPELNEILDTFLNDECLLHAMHISTGLSIFDTSLFGSGSGSGGGGSGKRPAATKKAGQAKKKKGSYPYDVPD
YA*
>ZF5.3-VPR3 mRNA
SEQ ID NO.: 171
AGGAAAUAAGAGAGAAAAGAAGAGUAAGAAGAAAUAUAAGAGCCACCAUGGCCCCCAAGAAGAAGCGCAAGGUCGGGAUCCAC
GGAGUCCCGGCAGCAGGAUCCUCAGGCUCACUGGAACCGGGGGAAAAACCCUACAAGUGCCCGGAAUGCGGCAAGAGCUUCUC
GCGGUCCGACCACCUGACCAACCACCAGAGAACACACACCGGCGAGAAGCCGUACAAGUGCCCCGAGUGCGGGAAGUCGUUCA
GCACCUCAGGAUCGCUGGUCCGCCACCAACGGACCCACACAGGAGAAAAGCCCUACAAGUGCCCGGAAUGCGGAAAGAGCUUC
AGCCAAGCCGGGCACCUGGCAUCACACCAGCGAACCCACACCGGAGAAAAACCGUACAAAUGCCCGGAGUGCGGCAAAUCCUU
CUCGCGCUCCGACAAGCUGACCGAACACCAAAGGACACACACCGGAGAGAAGCCCUACAAGUGCCCGGAAUGCGGAAAAUCGU
UCUCGACCUCGGGGAACCUGACCGAGCACCAACGCACCCACACCGGCGAAAAACCGUACAAAUGCCCGGAGUGCGGAAAGUCG
UUCUCACAAUCCUCCAACCUGGUCCGGCACCAAAGAACGCACACAGGGGAAAAGCCGUACAAGUGCCCCGAAUGCGGGAAAUC
CUUCAGCACCCACCUGGACCUCAUCCGGCACCAGAGGACCCACACCGGGGAGAAGCCGACCGGCAAAAAGACCUCAGCGAGCG
GAUCCGGAGGAGGAUCAGGGGGGGACGCCCUCGACGACUUCGAUCUGGACAUGCUGGGUAGCGACGCCCUGGAUGACUUCGAC
CUCGAUAUGCUGGGAUCCGACGCACUUGACGAUUUUGACUUGGACAUGCUCGGCUCCGACGCUCUGGACGAUUUCGACCUUGA
CAUGCUUGGCUCCGGCUCAGGAUCCCAGUACCUCCCCGAUACCGACGACAGACACCGGAUCGAAGAAAAGCGCAAGCGCACCU
ACGAAACCUUCAAGUCGAUUAUGAAGAAGUCGCCUUUCUCCGGGCCGACUGAUCCUAGACCUCCACCAAGAAGAAUCGCGGUG
CCGUCCAGAUCGUCCGCGUCAGUGCCGAAACCAGCACCGCAGCCGUAUCCGUUCACUUCCUCCCUUUCCACCAUUAACUACGA
CGAAUUCCCCACGAUGGUGUUCCCUAGCGGACAGAUUUCGCAAGCCAGCGCUCUUGCUCCUGCGCCUCCUCAAGUGCUGCCUC
AGGCCCCUGCUCCUGCUCCUGCACCCGCCAUGGUGUCCGCCCUGGCUCAAGCUCCAGCCCCUGUGCCUGUCCUGGCCCCUGGA
CCACCUCAGGCAGUAGCACCUCCCGCUCCCAAGCCCACCCAAGCGGGAGAGGGCACUCUUUCCGAGGCCCUGCUGCAACUGCA
GUUCGACGACGAGGACCUGGGGGCACUUCUGGGAAAUAGCACCGAUCCGGCCGUGUUCACCGACCUGGCCAGCGUCGACAACU
CAGAGUUCCAGCAGCUCCUCAACCAAGGGAUUCCGGUGGCCCCUCACACGACCGAGCCGAUGUUGAUGGAAUACCCGGAAGCC
AUCACCCGCCUAGUGACCGGAGCGCAAAGACCGCCUGACCCAGCUCCUGCCCCUUUGGGAGCCCCUGGAUUGCCCAACGGACU
CCUGUCCGGCGACGAGGAUUUCUCGUCCAUCGCCGAUAUGGACUUCUCGGCCCUGUUGGGUAGCGGUUCGGGUAGUCGCGAUA
GCCGGGAAGGAAUGUUCCUGCCGAAGCCUGAGGCCGGGUCUGCCAUUAGCGAUGUGUUUGAAGGACGGGAAGUCUGUCAGCCC
AAGCGGAUUCGCCCAUUCCACCCCCCUGGAUCGCCUUGGGCCAACAGGCCACUCCCCGCUUCGCUUGCGCCGACUCCUACCGG
GCCAGUGCACGAACCUGUGGGAUCCCUGACUCCGGCUCCUGUGCCACAGCCUCUGGAUCCGGCUCCCGCUGUCACCCCUGAGG
CCUCACACCUUCUCGAGGACCCCGACGAAGAGACUUCCCAGGCCGUGAAAGCGCUCCGGGAGAUGGCGGACACUGUGAUCCCG
CAAAAGGAAGAAGCCGCGAUUUGCGGCCAGAUGGACCUGUCGCAUCCUCCACCACGCGGUCACCUCGAUGAACUGACAACUAC
CCUGGAGUCGAUGACCGAGGACCUGAACCUGGACUCCCCGCUGACUCCUGAGCUCAACGAAAUCCUGGACACUUUCCUGAACG
AUGAGUGCCUGCUGCACGCCAUGCACAUCUCCACUGGGCUGUCAAUCUUCGACACCAGCCUGUUCGGCUCCGGAUCCGGUUCC
GACGCACUGGACGAUUUUGACCUGGAUAUGUUGGGGAGCGACGCACUGGACGAUUUUGAUCUGGAUAUGCUGGGAUCCGACGC
GCUCGACGAUUUCGACCUGGACAUGCUCGGAUCGGACGCCCUGGACGACUUCGACCUCGAUAUGCUUGGAUCAGGGUCCGGCU
CACAAUAUCUGCCGGACACUGAUGACCGGCAUAGAAUCGAAGAAAAGCGCAAGCGGACCUACGAAACUUUCAAGAGCAUCAUG
AAGAAAUCGCCGUUCUCUGGGCCGACUGAUCCUAGGCCGCCUCCGAGAAGGAUCGCCGUGCCCUCAAGAUCCUCCGCCUCUGU
GCCCAAGCCGGCUCCACAGCCUUACCCCUUCACUUCGUCGCUGAGCACCAUCAACUACGACGAAUUCCCGACCAUGGUCUUUC
CGAGCGGCCAGAUUUCCCAGGCGUCCGCCUUGGCUCCUGCACCACCCCAAGUGCUGCCUCAGGCGCCUGCACCAGCUCCAGCC
CCUGCCAUGGUGUCCGCGCUGGCACAAGCCCCUGCACCUGUGCCAGUGCUCGCACCUGGUCCUCCGCAAGCUGUGGCACCUCC
UGCGCCUAAGCCGACUCAGGCCGGAGAAGGGACCCUGUCAGAGGCCCUGCUGCAACUGCAGUUUGACGAUGAGGAUCUGGGAG
CCCUUCUGGGCAACUCGACUGACCCCGCCGUGUUCACCGACCUGGCGUCCGUGGAUAACUCCGAGUUCCAGCAGCUCCUCAAC
CAAGGGAUUCCUGUCGCCCCGCACACUACCGAGCCGAUGCUGAUGGAGUACCCGGAGGCCAUCACCCGGCUUGUGACGGGUGC
UCAGAGGCCUCCAGAUCCGGCUCCAGCACCGUUAGGAGCCCCCGGACUUCCUAACGGACUGCUGUCCGGCGACGAGGACUUCU
CCAGCAUCGCCGACAUGGAUUUUUCCGCGCUGUUGGGAUCGGGUUCCGGCUCAAGAGACAGCCGCGAGGGAAUGUUCCUCCCG
AAACCAGAGGCCGGCUCAGCCAUCAGCGACGUGUUCGAAGGGCGCGAAGUCUGCCAGCCCAAGCGGAUCCGCCCGUUUCAUCC
GCCUGGAUCACCGUGGGCCAACAGACCCCUACCCGCAAGCUUAGCCCCUACCCCCACUGGCCCUGUCCACGAACCUGUGGGCU
CCCUGACACCCGCUCCUGUGCCACAACCUCUGGACCCCGCACCAGCAGUCACACCCGAAGCCAGCCACCUCCUUGAGGAUCCG
GACGAGGAGACUAGCCAGGCCGUGAAGGCGCUCCGCGAAAUGGCCGACACUGUGAUCCCUCAAAAGGAAGAGGCGGCCAUUUG
UGGACAGAUGGACUUGUCCCACCCGCCUCCAAGAGGUCACCUGGACGAACUUACCACCACGCUCGAAUCCAUGACUGAGGAUC
UGAACCUGGAUUCCCCGCUCACUCCCGAGCUCAACGAAAUCCUUGAUACCUUCCUUAACGACGAGUGUCUCCUGCAUGCCAUG
CACAUCUCCACCGGACUGAGCAUUUUCGACACCUCGCUGUUCGGUUCCGGAAGCGGCUCAGACGCGCUGGAUGACUUCGAUUU
GGACAUGCUUGGCAGCGAUGCCCUGGAUGAUUUCGACCUGGACAUGCUCGGGUCGGAUGCGCUGGACGACUUCGAUCUCGAUA
UGUUGGGCUCCGAUGCCCUCGACGACUUUGACCUCGACAUGCUGGGCUCGGGCUCAGGAUCCCAAUACCUCCCGGAUACCGAC
GACAGGCAUCGCAUUGAGGAAAAGCGGAAGCGCACCUAUGAAACCUUCAAGUCCAUUAUGAAGAAGUCGCCCUUUUCCGGACC
GACUGACCCUCGGCCUCCUCCUCGACGAAUUGCCGUCCCAUCUCGGUCAUCCGCCUCGGUCCCCAAGCCAGCACCGCAGCCUU
AUCCGUUCACCUCCUCUCUGUCCACCAUUAACUACGAUGAAUUCCCCACCAUGGUGUUCCCGUCGGGACAGAUCUCCCAAGCC
UCAGCCCUUGCUCCUGCCCCUCCACAAGUCCUGCCCCAAGCACCAGCGCCUGCUCCUGCACCCGCGAUGGUGUCCGCACUGGC
GCAAGCUCCUGCCCCUGUGCCUGUGCUGGCUCCUGGACCACCCCAGGCAGUAGCACCUCCAGCCCCGAAGCCCACUCAGGCUG
GAGAGGGAACCCUGAGCGAAGCGCUGCUGCAGCUCCAGUUCGACGACGAAGAUCUGGGUGCCCUGCUGGGAAAUUCCACCGAU
CCGGCGGUGUUCACAGACCUGGCCUCCGUGGACAACUCCGAAUUCCAGCAGUUGUUGAACCAGGGCAUUCCUGUGGCCCCCCA
CACCACUGAGCCAAUGCUCAUGGAAUACCCCGAGGCCAUUACCAGACUCGUGACCGGAGCCCAAAGGCCUCCGGAUCCAGCGC
CAGCUCCGUUGGGAGCUCCGGGAUUGCCGAACGGGCUGCUGUCGGGAGAUGAAGAUUUCUCCUCAAUCGCCGAUAUGGACUUC
UCCGCGCUGCUGGGUUCGGGUUCGGGAUCGCGCGAUAGCCGGGAGGGCAUGUUCCUACCGAAGCCUGAGGCCGGAAGCGCCAU
CUCCGAUGUGUUCGAGGGCAGAGAAGUCUGUCAGCCUAAGCGCAUUCGCCCGUUCCACCCUCCUGGAUCGCCCUGGGCCAAUC
GGCCACUGCCUGCGUCCCUCGCUCCAACGCCGACCGGACCUGUGCACGAACCGGUCGGCUCACUGACUCCAGCUCCCGUCCCA
CAACCGCUCGACCCUGCUCCCGCUGUUACCCCCGAAGCCUCCCAUUUGCUGGAAGAUCCCGAUGAGGAAACUUCCCAGGCCGU
CAAGGCCCUGCGGGAGAUGGCAGACACCGUGAUACCCCAGAAGGAAGAAGCUGCCAUCUGCGGGCAGAUGGACCUGUCCCAUC
CUCCUCCACGCGGACACUUGGACGAGCUGACCACUACUCUGGAGUCCAUGACCGAGGACCUGAACCUUGACUCGCCUUUGACC
CCUGAACUGAACGAAAUUCUGGACACCUUCCUGAAUGACGAGUGCCUCCUGCACGCGAUGCACAUCAGCACCGGACUGUCCAU
CUUCGACACUUCCCUCUUUGGGAGCGGGUCCGGAUCAGGCGGUGGUGGUAGCGGGAAACGGCCAGCAGCGACCAAGAAGGCCG
GACAGGCCAAGAAGAAGAAAGGCUCAUACCCCUACGACGUGCCGGACUACGCAUGAGCGGCCGCUUAAUUAAGCUGCCUUCUG
CGGGGCUUGCCUUCUGGCCAUGCCCUUCUUCUCUCCCUUGCACCUGUACCUCUUGGUCUUUGAAUAAAGCCUGAGUAGGAAGU
CUAGAAAAAAAAAAAAAAAAAAAAAAAAAAAAAAAAAAAAAAAAAAAAAAAAAAAAAAAAAAAAAAAAAAAAAAAAAAAAAAA
AAAAAAAAAAAAAAAAAAAAAAAAAAAAAAAAAAA
>Nucleotide Seqeunce of DNA binding domain of ZF5.3-VPR3
SEQ ID NO.: 234
CUGGAACCGGGGGAAAAACCCUACAAGUGCCCGGAAUGCGGCAAGAGCUUCUCGCGGUCCGACCACCUGACCAACCACCAGAG
AACACACACCGGCGAGAAGCCGUACAAGUGCCCCGAGUGCGGGAAGUCGUUCAGCACCUCAGGAUCGCUGGUCCGCCACCAAC
GGACCCACACAGGAGAAAAGCCCUACAAGUGCCCGGAAUGCGGAAAGAGCUUCAGCCAAGCCGGGCACCUGGCAUCACACCAG
CGAACCCACACCGGAGAAAAACCGUACAAAUGCCCGGAGUGCGGCAAAUCCUUCUCGCGCUCCGACAAGCUGACCGAACACCA
AAGGACACACACCGGAGAGAAGCCCUACAAGUGCCCGGAAUGCGGAAAAUCGUUCUCGACCUCGGGGAACCUGACCGAGCACC
AACGCACCCACACCGGCGAAAAACCGUACAAAUGCCCGGAGUGCGGAAAGUCGUUCUCACAAUCCUCCAACCUGGUCCGGCAC
CAAAGAACGCACACAGGGGAAAAGCCGUACAAGUGCCCCGAAUGCGGGAAAUCCUUCAGCACCCACCUGGACCUCAUCCGGCA
CCAGAGGACCCACACCGGGGAGAAGCCGACCGGCAAAAAGACCUCA
>dCas9-VPR3 protein
SEQ ID NO.: 172
MAPKKKRKVGIHGVPAADKKYSIGLAIGTNSVGWAVITDEYKVPSKKFKVLGNTDRHSIKKNLIGALLFDSGETAEATRLKRT
ARRRYTRRKNRICYLQEIFSNEMAKVDDSFFHRLEESFLVEEDKKHERHPIFGNIVDEVAYHEKYPTIYHLRKKLVDSTDKAD
LRLIYLALAHMIKFRGHFLIEGDLNPDNSDVDKLFIQLVQTYNQLFEENPINASGVDAKAILSARLSKSRRLENLIAQLPGEK
KNGLFGNLIALSLGLTPNFKSNFDLAEDAKLQLSKDTYDDDLDNLLAQIGDQYADLFLAAKNLSDAILLSDILRVNTEITKAP
LSASMIKRYDEHHQDLTLLKALVRQQLPEKYKEIFFDQSKNGYAGYIDGGASQEEFYKFIKPILEKMDGTEELLVKLNREDLL
RKQRTFDNGSIPHQIHLGELHAILRRQEDFYPFLKDNREKIEKILTFRIPYYVGPLARGNSRFAWMTRKSEETITPWNFEEVV
DKGASAQSFIERMTNFDKNLPNEKVLPKHSLLYEYFTVYNELTKVKYVTEGMRKPAFLSGEQKKAIVDLLFKTNRKVTVKQLK
EDYFKKIECFDSVEISGVEDRFNASLGTYHDLLKIIKDKDFLDNEENEDILEDIVLTLTLFEDREMIEERLKTYAHLFDDKVM
KQLKRRRYTGWGRLSRKLINGIRDKQSGKTILDFLKSDGFANRNFMQLIHDDSLTFKEDIQKAQVSGQGDSLHEHIANLAGSP
AIKKGILQTVKVVDELVKVMGRHKPENIVIEMARENQTTQKGQKNSRERMKRIEEGIKELGSQILKEHPVENTQLQNEKLYLY
YLQNGRDMYVDQELDINRLSDYDVAAIVPQSFLKDDSIDNKVLTRSDKARGKSDNVPSEEVVKKMKNYWRQLLNAKLITQRKF
DNLTKAERGGLSELDKAGFIKRQLVETRQITKHVAQILDSRMNTKYDENDKLIREVKVITLKSKLVSDFRKDFQFYKVREINN
YHHAHDAYLNAVVGTALIKKYPKLESEFVYGDYKVYDVRKMIAKSEQEIGKATAKYFFYSNIMNFFKTEITLANGEIRKRPLI
ETNGETGEIVWDKGRDFATVRKVLSMPQVNIVKKTEVQTGGFSKESILPKRNSDKLIARKKDWDPKKYGGFDSPTVAYSVLVV
AKVEKGKSKKLKSVKELLGITIMERSSFEKNPIDFLEAKGYKEVKKDLIIKLPKYSLFELENGRKRMLASAGELQKGNELALP
SKYVNFLYLASHYEKLKGSPEDNEQKQLFVEQHKHYLDEIIEQISEFSKRVILADANLDKVLSAYNKHRDKPIREQAENIIHL
FTLTNLGAPAAFKYFDTTIDRKRYTSTKEVLDATLIHQSITGLYETRIDLSQLGGDSGGKRPAATKKAGQAKKKKSGGGGSDA
LDDFDLDMLGSDALDDFDLDMLGSDALDDFDLDMLGSDALDDFDLDMLGSGSGSQYLPDTDDRHRIEEKRKRTYETFKSIMKK
SPFSGPTDPRPPPRRIAVPSRSSASVPKPAPQPYPFTSSLSTINYDEFPTMVFPSGQISQASALAPAPPQVLPQAPAPAPAPA
MVSALAQAPAPVPVLAPGPPQAVAPPAPKPTQAGEGTLSEALLQLQFDDEDLGALLGNSTDPAVFTDLASVDNSEFQQLLNQG
IPVAPHTTEPMLMEYPEAITRLVTGAQRPPDPAPAPLGAPGLPNGLLSGDEDFSSIADMDFSALLGSGSGSRDSREGMFLPKP
EAGSAISDVFEGREVCQPKRIRPFHPPGSPWANRPLPASLAPTPTGPVHEPVGSLTPAPVPQPLDPAPAVTPEASHLLEDPDE
ETSQAVKALREMADTVIPQKEEAAICGQMDLSHPPPRGHLDELTTTLESMTEDLNLDSPLTPELNEILDTFLNDECLLHAMHI
STGLSIFDTSLFGSGSGSDALDDFDLDMLGSDALDDFDLDMLGSDALDDFDLDMLGSDALDDFDLDMLGSGSGSQYLPDTDDR
HRIEEKRKRTYETFKSIMKKSPFSGPTDPRPPPRRIAVPSRSSASVPKPAPQPYPFTSSLSTINYDEFPTMVFPSGQISQASA
LAPAPPQVLPQAPAPAPAPAMVSALAQAPAPVPVLAPGPPQAVAPPAPKPTQAGEGTLSEALLQLQFDDEDLGALLGNSTDPA
VFTDLASVDNSEFQQLLNQGIPVAPHTTEPMLMEYPEAITRLVTGAQRPPDPAPAPLGAPGLPNGLLSGDEDFSSIADMDFSA
LLGSGSGSRDSREGMFLPKPEAGSAISDVFEGREVCQPKRIRPFHPPGSPWANRPLPASLAPTPTGPVHEPVGSLTPAPVPQP
LDPAPAVTPEASHLLEDPDEETSQAVKALREMADTVIPQKEEAAICGQMDLSHPPPRGHLDELTTTLESMTEDLNLDSPLTPE
LNEILDTFLNDECLLHAMHISTGLSIFDTSLFGSGSGSDALDDFDLDMLGSDALDDFDLDMLGSDALDDFDLDMLGSDALDDF
DLDMLGSGSGSQYLPDTDDRHRIEEKRKRTYETFKSIMKKSPFSGPTDPRPPPRRIAVPSRSSASVPKPAPQPYPFTSSLSTI
NYDEFPTMVFPSGQISQASALAPAPPQVLPQAPAPAPAPAMVSALAQAPAPVPVLAPGPPQAVAPPAPKPTQAGEGTLSEALL
QLQFDDEDLGALLGNSTDPAVFTDLASVDNSEFQQLLNQGIPVAPHTTEPMLMEYPEAITRLVTGAQRPPDPAPAPLGAPGLP
NGLLSGDEDFSSIADMDFSALLGSGSGSRDSREGMFLPKPEAGSAISDVFEGREVCQPKRIRPFHPPGSPWANRPLPASLAPT
PTGPVHEPVGSLTPAPVPQPLDPAPAVTPEASHLLEDPDEETSQAVKALREMADTVIPQKEEAAICGQMDLSHPPPRGHLDEL
TTTLESMTEDLNLDSPLTPELNEILDTFLNDECLLHAMHISTGLSIFDTSLFGSGSGSGGGGSGKRPAATKKAGQAKKKKGSY
PYDVPDYA*
>dCas9-VPR3 mRNA
SEQ ID NO. 173
AGGAAAUAAGAGAGAAAAGAAGAGUAAGAAGAAAUAUAAGAGCCACCAUGGCCCCCAAGAAGAAGAGGAAAGUCGGAAUUCAC
GGAGUGCCUGCAGCGGAUAAGAAGUACUCCAUCGGACUCGCAAUCGGCACCAACUCCGUGGGAUGGGCCGUGAUCACCGACGA
GUACAAAGUGCCGUCUAAAAAGUUCAAGGUGCUCGGAAACACCGAUAGGCACUCCAUCAAGAAGAACCUGAUUGGGGCCCUGC
UGUUUGAUUCCGGGGAAACGGCAGAGGCCACUCGCCUCAAGAGAACUGCACGCCGGCGGUACACUCGUCGGAAGAACCGCAUC
UGCUAUCUGCAAGAGAUUUUCUCCAACGAGAUGGCCAAAGUGGACGACUCAUUCUUCCACCGCCUCGAAGAAUCUUUCCUGGU
CGAAGAGGACAAGAAGCACGAACGCCACCCCAUUUUCGGGAACAUUGUCGACGAAGUGGCGUACCACGAGAAGUACCCCACCA
UCUACCAUCUCCGCAAGAAGCUCGUGGAUUCCACUGACAAGGCCGAUCUCAGACUGAUCUACCUGGCGCUUGCUCACAUGAUU
AAGUUCAGGGGUCACUUCCUGAUUGAGGGAGAUCUGAACCCCGACAACAGCGAUGUCGAUAAGCUGUUCAUUCAGCUGGUGCA
GACCUACAAUCAGCUGUUCGAAGAGAACCCCAUUAAUGCCUCCGGUGUCGAUGCCAAGGCCAUCCUGUCCGCACGGCUGAGCA
AAUCGCGCAGGCUGGAAAACCUGAUCGCCCAGCUGCCUGGAGAGAAAAAGAACGGACUGUUCGGCAACCUUAUCGCGCUGUCC
UUGGGACUGACCCCGAACUUCAAGAGCAACUUCGACUUGGCCGAGGAUGCCAAGCUGCAACUGUCGAAGGACACCUACGACGA
UGACCUCGAUAAUCUGCUGGCCCAAAUUGGCGAUCAAUAUGCAGACCUGUUCCUUGCCGCAAAGAACCUGAGCGACGCGAUUC
UCCUGUCGGACAUCCUGCGGGUCAACACCGAGAUCACCAAGGCACCGUUGUCCGCCUCCAUGAUUAAGCGAUACGACGAACAC
CAUCAGGACCUGACUCUGCUGAAGGCCCUGGUCCGCCAACAGCUGCCCGAGAAGUACAAGGAGAUCUUCUUCGACCAAUCCAA
GAAUGGAUACGCUGGAUACAUCGAUGGCGGUGCCAGCCAAGAGGAAUUCUACAAGUUCAUCAAACCGAUACUGGAGAAGAUGG
ACGGCACAGAGGAACUCCUGGUCAAGCUGAACCGGGAGGAUCUGCUGCGGAAGCAGAGGACCUUCGACAACGGGUCCAUCCCG
CACCAGAUUCACCUGGGCGAACUGCAUGCGAUCCUGCGACGGCAGGAGGACUUCUACCCAUUCCUGAAGGAUAACAGAGAGAA
AAUCGAGAAGAUCCUCACCUUCCGGAUCCCGUAUUACGUGGGACCCCUGGCUAGGGGCAACAGCCGCUUCGCCUGGAUGACCC
GCAAGUCCGAGGAAACUAUUACUCCCUGGAACUUCGAGGAAGUAGUGGACAAAGGCGCCAGCGCGCAAUCCUUCAUCGAACGG
AUGACCAACUUCGACAAGAACUUGCCGAACGAAAAGGUGUUGCCGAAGCAUUCUCUGCUGUAUGAGUACUUCACUGUGUACAA
CGAACUGACCAAAGUGAAAUACGUCACAGAAGGAAUGAGAAAGCCAGCCUUCCUUAGCGGGGAGCAGAAGAAGGCCAUUGUGG
ACCUCCUGUUCAAAACCAACCGAAAGGUCACCGUGAAGCAACUGAAGGAGGAUUACUUCAAGAAGAUCGAAUGUUUCGACUCG
GUGGAGAUCUCCGGGGUGGAGGAUCGCUUCAAUGCCUCCCUGGGCACCUACCAUGAUCUGCUCAAGAUCAUCAAGGAUAAGGA
CUUCCUCGACAACGAAGAGAACGAAGAUAUCCUGGAGGAUAUCGUGCUCACCCUCACCCUGUUCGAGGAUAGAGAGAUGAUCG
AAGAGAGACUUAAGACCUACGCCCACCUGUUCGACGACAAAGUCAUGAAGCAGCUGAAGCGGAGGAGGUACACUGGAUGGGGC
AGACUGUCCCGCAAGCUCAUCAACGGGAUUCGAGAUAAGCAGUCCGGAAAGACAAUCCUCGACUUCCUGAAAUCCGACGGAUU
UGCCAACAGAAACUUCAUGCAGCUGAUCCAUGAUGACUCGCUGACCUUCAAGGAGGAUAUUCAGAAGGCUCAAGUGUCGGGAC
AGGGCGAUUCCCUCCACGAGCACAUCGCCAACCUCGCGGGAUCCCCUGCAAUCAAGAAGGGUAUCCUGCAGACCGUGAAGGUC
GUGGACGAAUUAGUGAAAGUCAUGGGCCGGCAUAAGCCUGAAAACAUCGUGAUCGAGAUGGCCCGGGAAAACCAGACCACCCA
AAAGGGACAGAAGAACUCCCGCGAGCGCAUGAAGCGGAUCGAGGAAGGGAUCAAGGAGCUGGGGUCGCAGAUCUUAAAGGAGC
ACCCCGUGGAAAAUACUCAGCUGCAAAACGAAAAGCUGUACCUGUAUUACUUGCAAAACGGAAGAGAUAUGUACGUGGAUCAA
GAAUUGGACAUCAACAGACUCUCCGACUACGACGUCGCUGCGAUUGUGCCACAAAGCUUUCUUAAGGACGACUCCAUCGACAA
CAAGGUCCUCACCCGGUCCGAUAAGGCCCGCGGAAAGUCCGACAACGUGCCAAGCGAAGAGGUGGUCAAGAAGAUGAAGAAUU
ACUGGCGGCAGCUGCUGAACGCCAAGCUGAUAACUCAGCGGAAGUUCGACAACCUGACUAAGGCUGAGCGGGGAGGACUCUCG
GAACUGGACAAGGCUGGGUUCAUCAAGAGACAGUUGGUGGAAACCCGCCAAAUUACCAAACACGUGGCGCAGAUCCUGGACUC
ACGCAUGAACACUAAGUACGACGAGAACGAUAAGCUGAUUCGGGAAGUCAAAGUGAUCACCCUGAAGUCCAAGCUCGUCAGCG
ACUUCCGGAAGGAUUUCCAGUUUUACAAGGUCCGCGAAAUUAACAACUACCAUCAUGCUCACGACGCCUACUUGAACGCCGUG
GUCGGUACCGCCCUGAUCAAGAAGUAUCCAAAGCUCGAGUCCGAGUUUGUGUACGGCGACUACAAGGUCUACGACGUGCGCAA
GAUGAUCGCGAAAUCCGAGCAGGAAAUCGGAAAGGCCACCGCCAAGUACUUCUUCUACUCAAACAUUAUGAACUUCUUCAAGA
CCGAAAUCACUCUGGCGAACGGCGAAAUCCGGAAAAGACCGCUGAUCGAGACUAACGGCGAAACCGGCGAAAUCGUGUGGGAC
AAGGGACGGGACUUCGCCACCGUGCGCAAGGUGCUGUCGAUGCCCCAAGUGAACAUUGUGAAGAAAACCGAAGUCCAGACUGG
CGGCUUCAGCAAAGAAUCGAUCCUGCCCAAGAGAAACAGCGACAAGCUGAUCGCCCGCAAGAAGGACUGGGACCCCAAGAAAU
ACGGCGGUUUCGACUCACCCACUGUGGCCUACUCGGUCCUCGUGGUCGCCAAGGUCGAGAAGGGCAAAAGCAAAAAGCUUAAA
UCGGUGAAGGAACUUCUGGGUAUCACGAUCAUGGAACGCUCCUCCUUCGAAAAGAACCCCAUCGACUUUUUGGAAGCAAAGGG
AUACAAGGAAGUCAAGAAGGACCUCAUCAUCAAGCUGCCGAAGUAUAGCCUCUUCGAACUGGAGAACGGUCGGAAGAGAAUGC
UGGCUUCAGCGGGAGAGCUGCAAAAGGGAAACGAGCUGGCCCUUCCGAGCAAAUACGUCAACUUUCUGUACCUGGCCUCGCAC
UACGAAAAGCUCAAGGGAUCACCCGAGGACAACGAACAGAAGCAACUGUUCGUGGAACAGCAUAAGCAUUACCUGGAUGAGAU
UAUCGAACAGAUUUCCGAAUUCUCCAAGCGCGUGAUUCUGGCCGACGCCAACCUGGACAAGGUCCUUUCAGCCUACAACAAGC
ACCGGGAUAAGCCGAUCCGGGAACAGGCGGAAAACAUCAUCCAUCUGUUCACGUUGACUAAUCUUGGAGCACCAGCCGCGUUU
AAGUACUUUGACACCACCAUUGACAGGAAACGGUACACAUCCACGAAGGAAGUGUUGGAUGCGACGCUGAUUCAUCAGAGUAU
CACCGGACUCUACGAAACGCGGAUUGACCUCAGCCAGUUGGGAGGGGACUCCGGAGGAAAGAGGCCAGCCGCCACUAAGAAGG
CUGGGCAGGCCAAGAAGAAAAAGUCCGGUGGAGGAGGCUCAGACGCCCUCGACGACUUCGAUCUGGACAUGCUGGGUAGCGAC
GCCCUGGAUGACUUCGACCUCGAUAUGCUGGGAUCCGACGCACUUGACGAUUUUGACUUGGACAUGCUCGGCUCCGACGCUCU
GGACGAUUUCGACCUUGACAUGCUUGGCUCCGGCUCAGGAUCCCAGUACCUCCCCGAUACCGACGACAGACACCGGAUCGAAG
AAAAGCGCAAGCGCACCUACGAAACCUUCAAGUCGAUUAUGAAGAAGUCGCCUUUCUCCGGGCCGACUGAUCCUAGACCUCCA
CCAAGAAGAAUCGCGGUGCCGUCCAGAUCGUCCGCGUCAGUGCCGAAACCAGCACCGCAGCCGUAUCCGUUCACUUCCUCCCU
UUCCACCAUUAACUACGACGAAUUCCCCACGAUGGUGUUCCCUAGCGGACAGAUUUCGCAAGCCAGCGCUCUUGCUCCUGCGC
CUCCUCAAGUGCUGCCUCAGGCCCCUGCUCCUGCUCCUGCACCCGCCAUGGUGUCCGCCCUGGCUCAAGCUCCAGCCCCUGUG
CCUGUCCUGGCCCCUGGACCACCUCAGGCAGUAGCACCUCCCGCUCCCAAGCCCACCCAAGCGGGAGAGGGCACUCUUUCCGA
GGCCCUGCUGCAACUGCAGUUCGACGACGAGGACCUGGGGGCACUUCUGGGAAAUAGCACCGAUCCGGCCGUGUUCACCGACC
UGGCCAGCGUCGACAACUCAGAGUUCCAGCAGCUCCUCAACCAAGGGAUUCCGGUGGCCCCUCACACGACCGAGCCGAUGUUG
AUGGAAUACCCGGAAGCCAUCACCCGCCUAGUGACCGGAGCGCAAAGACCGCCUGACCCAGCUCCUGCCCCUUUGGGAGCCCC
UGGAUUGCCCAACGGACUCCUGUCCGGCGACGAGGAUUUCUCGUCCAUCGCCGAUAUGGACUUCUCGGCCCUGUUGGGUAGCG
GUUCGGGUAGUCGCGAUAGCCGGGAAGGAAUGUUCCUGCCGAAGCCUGAGGCCGGGUCUGCCAUUAGCGAUGUGUUUGAAGGA
CGGGAAGUCUGUCAGCCCAAGCGGAUUCGCCCAUUCCACCCCCCUGGAUCGCCUUGGGCCAACAGGCCACUCCCCGCUUCGCU
UGCGCCGACUCCUACCGGGCCAGUGCACGAACCUGUGGGAUCCCUGACUCCGGCUCCUGUGCCACAGCCUCUGGAUCCGGCUC
CCGCUGUCACCCCUGAGGCCUCACACCUUCUCGAGGACCCCGACGAAGAGACUUCCCAGGCCGUGAAAGCGCUCCGGGAGAUG
GCGGACACUGUGAUCCCGCAAAAGGAAGAAGCCGCGAUUUGCGGCCAGAUGGACCUGUCGCAUCCUCCACCACGCGGUCACCU
CGAUGAACUGACAACUACCCUGGAGUCGAUGACCGAGGACCUGAACCUGGACUCCCCGCUGACUCCUGAGCUCAACGAAAUCC
UGGACACUUUCCUGAACGAUGAGUGCCUGCUGCACGCCAUGCACAUCUCCACUGGGCUGUCAAUCUUCGACACCAGCCUGUUC
GGCUCCGGAUCCGGUUCCGACGCACUGGACGAUUUUGACCUGGAUAUGUUGGGGAGCGACGCACUGGACGAUUUUGAUCUGGA
UAUGCUGGGAUCCGACGCGCUCGACGAUUUCGACCUGGACAUGCUCGGAUCGGACGCCCUGGACGACUUCGACCUCGAUAUGC
UUGGAUCAGGGUCCGGCUCACAAUAUCUGCCGGACACUGAUGACCGGCAUAGAAUCGAAGAAAAGCGCAAGCGGACCUACGAA
ACUUUCAAGAGCAUCAUGAAGAAAUCGCCGUUCUCUGGGCCGACUGAUCCUAGGCCGCCUCCGAGAAGGAUCGCCGUGCCCUC
AAGAUCCUCCGCCUCUGUGCCCAAGCCGGCUCCACAGCCUUACCCCUUCACUUCGUCGCUGAGCACCAUCAACUACGACGAAU
UCCCGACCAUGGUCUUUCCGAGCGGCCAGAUUUCCCAGGCGUCCGCCUUGGCUCCUGCACCACCCCAAGUGCUGCCUCAGGCG
CCUGCACCAGCUCCAGCCCCUGCCAUGGUGUCCGCGCUGGCACAAGCCCCUGCACCUGUGCCAGUGCUCGCACCUGGUCCUCC
GCAAGCUGUGGCACCUCCUGCGCCUAAGCCGACUCAGGCCGGAGAAGGGACCCUGUCAGAGGCCCUGCUGCAACUGCAGUUUG
ACGAUGAGGAUCUGGGAGCCCUUCUGGGCAACUCGACUGACCCCGCCGUGUUCACCGACCUGGCGUCCGUGGAUAACUCCGAG
UUCCAGCAGCUCCUCAACCAAGGGAUUCCUGUCGCCCCGCACACUACCGAGCCGAUGCUGAUGGAGUACCCGGAGGCCAUCAC
CCGGCUUGUGACGGGUGCUCAGAGGCCUCCAGAUCCGGCUCCAGCACCGUUAGGAGCCCCCGGACUUCCUAACGGACUGCUGU
CCGGCGACGAGGACUUCUCCAGCAUCGCCGACAUGGAUUUUUCCGCGCUGUUGGGAUCGGGUUCCGGCUCAAGAGACAGCCGC
GAGGGAAUGUUCCUCCCGAAACCAGAGGCCGGCUCAGCCAUCAGCGACGUGUUCGAAGGGCGCGAAGUCUGCCAGCCCAAGCG
GAUCCGCCCGUUUCAUCCGCCUGGAUCACCGUGGGCCAACAGACCCCUACCCGCAAGCUUAGCCCCUACCCCCACUGGCCCUG
UCCACGAACCUGUGGGCUCCCUGACACCCGCUCCUGUGCCACAACCUCUGGACCCCGCACCAGCAGUCACACCCGAAGCCAGC
CACCUCCUUGAGGAUCCGGACGAGGAGACUAGCCAGGCCGUGAAGGCGCUCCGCGAAAUGGCCGACACUGUGAUCCCUCAAAA
GGAAGAGGCGGCCAUUUGUGGACAGAUGGACUUGUCCCACCCGCCUCCAAGAGGUCACCUGGACGAACUUACCACCACGCUCG
AAUCCAUGACUGAGGAUCUGAACCUGGAUUCCCCGCUCACUCCCGAGCUCAACGAAAUCCUUGAUACCUUCCUUAACGACGAG
UGUCUCCUGCAUGCCAUGCACAUCUCCACCGGACUGAGCAUUUUCGACACCUCGCUGUUCGGUUCCGGAAGCGGCUCAGACGC
GCUGGAUGACUUCGAUUUGGACAUGCUUGGCAGCGAUGCCCUGGAUGAUUUCGACCUGGACAUGCUCGGGUCGGAUGCGCUGG
ACGACUUCGAUCUCGAUAUGUUGGGCUCCGAUGCCCUCGACGACUUUGACCUCGACAUGCUGGGCUCGGGCUCAGGAUCCCAA
UACCUCCCGGAUACCGACGACAGGCAUCGCAUUGAGGAAAAGCGGAAGCGCACCUAUGAAACCUUCAAGUCCAUUAUGAAGAA
GUCGCCCUUUUCCGGACCGACUGACCCUCGGCCUCCUCCUCGACGAAUUGCCGUCCCAUCUCGGUCAUCCGCCUCGGUCCCCA
AGCCAGCACCGCAGCCUUAUCCGUUCACCUCCUCUCUGUCCACCAUUAACUACGAUGAAUUCCCCACCAUGGUGUUCCCGUCG
GGACAGAUCUCCCAAGCCUCAGCCCUUGCUCCUGCCCCUCCACAAGUCCUGCCCCAAGCACCAGCGCCUGCUCCUGCACCCGC
GAUGGUGUCCGCACUGGCGCAAGCUCCUGCCCCUGUGCCUGUGCUGGCUCCUGGACCACCCCAGGCAGUAGCACCUCCAGCCC
CGAAGCCCACUCAGGCUGGAGAGGGAACCCUGAGCGAAGCGCUGCUGCAGCUCCAGUUCGACGACGAAGAUCUGGGUGCCCUG
CUGGGAAAUUCCACCGAUCCGGCGGUGUUCACAGACCUGGCCUCCGUGGACAACUCCGAAUUCCAGCAGUUGUUGAACCAGGG
CAUUCCUGUGGCCCCCCACACCACUGAGCCAAUGCUCAUGGAAUACCCCGAGGCCAUUACCAGACUCGUGACCGGAGCCCAAA
GGCCUCCGGAUCCAGCGCCAGCUCCGUUGGGAGCUCCGGGAUUGCCGAACGGGCUGCUGUCGGGAGAUGAAGAUUUCUCCUCA
AUCGCCGAUAUGGACUUCUCCGCGCUGCUGGGUUCGGGUUCGGGAUCGCGCGAUAGCCGGGAGGGCAUGUUCCUACCGAAGCC
UGAGGCCGGAAGCGCCAUCUCCGAUGUGUUCGAGGGCAGAGAAGUCUGUCAGCCUAAGCGCAUUCGCCCGUUCCACCCUCCUG
GAUCGCCCUGGGCCAAUCGGCCACUGCCUGCGUCCCUCGCUCCAACGCCGACCGGACCUGUGCACGAACCGGUCGGCUCACUG
ACUCCAGCUCCCGUCCCACAACCGCUCGACCCUGCUCCCGCUGUUACCCCCGAAGCCUCCCAUUUGCUGGAAGAUCCCGAUGA
GGAAACUUCCCAGGCCGUCAAGGCCCUGCGGGAGAUGGCAGACACCGUGAUACCCCAGAAGGAAGAAGCUGCCAUCUGCGGGC
AGAUGGACCUGUCCCAUCCUCCUCCACGCGGACACUUGGACGAGCUGACCACUACUCUGGAGUCCAUGACCGAGGACCUGAAC
CUUGACUCGCCUUUGACCCCUGAACUGAACGAAAUUCUGGACACCUUCCUGAAUGACGAGUGCCUCCUGCACGCGAUGCACAU
CAGCACCGGACUGUCCAUCUUCGACACUUCCCUCUUUGGGAGCGGGUCCGGAUCAGGCGGUGGUGGUAGCGGGAAACGGCCAG
CAGCGACCAAGAAGGCCGGACAGGCCAAGAAGAAGAAAGGCUCAUACCCCUACGACGUGCCGGACUACGCAUGAGCGGCCGCU
UAAUUAAGCUGCCUUCUGCGGGGCUUGCCUUCUGGCCAUGCCCUUCUUCUCUCCCUUGCACCUGUACCUCUUGGUCUUUGAAU
AAAGCCUGAGUAGGAAGUCUAGAAAAAAAAAAAAAAAAAAAAAAAAAAAAAAAAAAAAAAAAAAAAAAAAAAAAAAAAAAAAA
AAAAAAAAAAAAAAAAAAAAAAAAAAAAAAAAAAAAAAAAAAAAAAAAAAAAA
>ZF5 protein-no effector
SEQ ID NO.: 174
MAPKKKRKVGIHGVPAAGSSGSLEPGEKPYKCPECGKSFSTSGNLTEHQRTHTGEKPYKCPECGKSFSDSGNLRVHQRTHTGE
KPYKCPECGKSFSHKNALQNHQRTHTGEKPYKCPECGKSFSRNDTLTEHQRTHTGEKPYKCPECGKSFSQRAHLERHQRTHTG
EKPYKCPECGKSFSRSDKLVRHQRTHTGEKPYKCPECGKSFSDPGHLVRHQRTHTGEKPTGKKTSASSGGKRPAATKKAGQAK
KKKGSYPYDVPDYA
>Nucleotide Seqeunce of DNA binding domain of ZF5 protein-no effector
SEQ ID NO.: 235
CUCGAACCGGGCGAGAAACCAUAUAAGUGUCCAGAGUGUGGUAAGAGCUUUAGCACCAGUGGCAAUCUGACCGAGCAUCAACG
CACGCAUACGGGUGAGAAACCGUACAAGUGCCCGGAAUGCGGCAAAAGUUUCAGCGAUAGCGGCAAUCUGCGUGUGCACCAGC
GUACGCAUACGGGCGAAAAGCCGUAUAAGUGCCCAGAAUGCGGUAAGAGUUUUAGCCACAAAAACGCGCUGCAGAACCACCAG
CGCACCCACACGGGUGAGAAGCCAUACAAAUGUCCGGAAUGCGGCAAAAGCUUCAGCCGCAACGAUACGCUGACGGAACACCA
ACGUACGCAUACCGGCGAAAAGCCAUACAAGUGCCCGGAGUGCGGUAAAAGCUUUAGCCAGCGCGCGCAUCUCGAACGUCAUC
AACGUACCCAUACCGGUGAAAAACCAUAUAAAUGCCCGGAAUGUGGUAAAAGUUUUAGCCGCAGCGACAAACUGGUGCGUCAU
CAACGCACCCAUACCGGUGAAAAGCCAUAUAAGUGCCCGGAGUGUGGUAAAAGCUUCAGCGAUCCGGGUCAUCUGGUUCGCCA
UCAACGUACGCACACCGGCGAGAAGCCAACCGGCAAGAAAACCAGC
>ZF5 mRNA-no effector
SEQ ID NO.: 175
AGGAAAUAAGAGAGAAAAGAAGAGUAAGAAGAAAUAUAAGAGCCACCAUGGCCCCCAAGAAGAAGCGGAAGGUGGGCAUCCAC
GGCGUGCCCGCCGCCGGCAGCAGCGGAUCCCUCGAACCGGGCGAGAAACCAUAUAAGUGUCCAGAGUGUGGUAAGAGCUUUAG
CACCAGUGGCAAUCUGACCGAGCAUCAACGCACGCAUACGGGUGAGAAACCGUACAAGUGCCCGGAAUGCGGCAAAAGUUUCA
GCGAUAGCGGCAAUCUGCGUGUGCACCAGCGUACGCAUACGGGCGAAAAGCCGUAUAAGUGCCCAGAAUGCGGUAAGAGUUUU
AGCCACAAAAACGCGCUGCAGAACCACCAGCGCACCCACACGGGUGAGAAGCCAUACAAAUGUCCGGAAUGCGGCAAAAGCUU
CAGCCGCAACGAUACGCUGACGGAACACCAACGUACGCAUACCGGCGAAAAGCCAUACAAGUGCCCGGAGUGCGGUAAAAGCU
UUAGCCAGCGCGCGCAUCUCGAACGUCAUCAACGUACCCAUACCGGUGAAAAACCAUAUAAAUGCCCGGAAUGUGGUAAAAGU
UUUAGCCGCAGCGACAAACUGGUGCGUCAUCAACGCACCCAUACCGGUGAAAAGCCAUAUAAGUGCCCGGAGUGUGGUAAAAG
CUUCAGCGAUCCGGGUCAUCUGGUUCGCCAUCAACGUACGCACACCGGCGAGAAGCCAACCGGCAAGAAAACCAGCGCUAGCA
GCGGCGGCAAGCGGCCCGCCGCCACCAAGAAGGCCGGCCAGGCCAAGAAGAAGAAGGGCAGCUACCCCUACGACGUGCCCGAC
UACGCCUGAGCGGCCGCUUAAUUAAGCUGCCUUCUGCGGGGCUUGCCUUCUGGCCAUGCCCUUCUUCUCUCCCUUGCACCUGU
ACCUCUUGGUCUUUGAAUAAAGCCUGAGUAGGAAGUCUAGAAAAAAAAAAAAAAAAAAAAAAAAAAAAAAAAAAAAAAAAAAA
AAAAAAAAAAAAAAAAAAAAAAAAAAAAAAAAAAAAA
>ZF5.3-VPR-tPT2a-ZF7-VPR protein
SEQ ID NO.: 176
MAPKKKRKVGIHGVPAAGSSGSSGSLEPGEKPYKCPECGKSFSTSGNLTEHQRTHTGEKPYKCPECGKSFSDSGNLRVHQRTH
TGEKPYKCPECGKSFSHKNALQNHQRTHTGEKPYKCPECGKSFSRNDTLTEHQRTHTGEKPYKCPECGKSFSQRAHLERHQRT
HTGEKPYKCPECGKSFSRSDKLVRHQRTHTGEKPYKCPECGKSFSDPGHLVRHQRTHTGEKPTGKKTSASGSGGGSGGDALDD
FDLDMLGSDALDDFDLDMLGSDALDDFDLDMLGSDALDDFDLDMLSGGPKKKRKVGSQYLPDTDDRHRIEEKRKRTYETFKSI
MKKSPFSGPTDPRPPPRRIAVPSRSSASVPKPAPQPYPFTSSLSTINYDEFPTMVFPSGQISQASALAPAPPQVLPQAPAPAP
APAMVSALAQAPAPVPVLAPGPPQAVAPPAPKPTQAGEGTLSEALLQLQFDDEDLGALLGNSTDPAVFTDLASVDNSEFQQLL
NQGIPVAPHTTEPMLMEYPEAITRLVTGAQRPPDPAPAPLGAPGLPNGLLSGDEDFSSIADMDFSALLGSGSGSRDSREGMFL
PKPEAGSAISDVFEGREVCQPKRLRPFHPPGSPWANRPLPASLAPTPTGPVHEPVGSLTPAPVPQPLDPAPAVTPEASHLLED
PDEETSQAVKALREMADTVIPQKEEAAICGQMDLSHPPPRGHLDELTTTLESMTEDLNLDSPLTPELNEILDTFLNDECLLHA
MHISTGLSIFDTSLFSGGKRPAATKKAGQAKKKKGSYPYDVPDYAATNFSLLKQAGDVEENPGPTSAGKLGSGEGRGSLLTCG
DVEENPGPLEGSSGSGSLEPGEKPYKCPECGKSFSRSDHLTNHQRTHTGEKPYKCPECGKSFSTSGSLVRHQRTHTGEKPYKC
PECGKSFSQAGHLASHQRTHTGEKPYKCPECGKSFSRSDKLTEHQRTHTGEKPYKCPECGKSFSTSGNLTEHQRTHTGEKPYK
CPECGKSFSQSSNLVRHQRTHTGEKPYKCPECGKSFSTHLDLIRHQRTHTGEKPTGKKTSASGSGGGSGGDALDDFDLDMLGS
DALDDFDLDMLGSDALDDFDLDMLGSDALDDFDLDMLSGGPKKKRKVGSQYLPDTDDRHRIEEKRKRTYETFKSIMKKSPFSG
PTDPRPPPRRIAVPSRSSASVPKPAPQPYPFTSSLSTINYDEFPTMVFPSGQISQASALAPAPPQVLPQAPAPAPAPAMVSAL
AQAPAPVPVLAPGPPQAVAPPAPKPTQAGEGTLSEALLQLQFDDEDLGALLGNSTDPAVFTDLASVDNSEFQQLLNQGIPVAP
HTTEPMLMEYPEAITRLVTGAQRPPDPAPAPLGAPGLPNGLLSGDEDFSSIADMDFSALLGSGSGSRDSREGMFLPKPEAGSA
ISDVFEGREVCQPKRLRPFHPPGSPWANRPLPASLAPTPTGPVHEPVGSLTPAPVPQPLDPAPAVTPEASHLLEDPDEETSQA
VKALREMADTVIPQKEEAAICGQMDLSHPPPRGHLDELTTTLESMTEDLNLDSPLTPELNEILDTFLNDECLLHAMHISTGLS
IFDTSLFSGGKRPAATKKAGQAKKKKGSYPYDVPDYA*
>ZF5.3-VPR-tPT2a-ZF7-VPR mRNA
SEQ ID NO.: 177
AGGAAAUAAGAGAGAAAAGAAGAGUAAGAAGAAAUAUAAGAGCCACCAUGGCCCCCAAGAAGAAGCGGAAGGUGGGCAUCCAC
GGCGUGCCCGCCGCCGGCAGCAGCGGAUCAUCAGGCUCACUGGAACCGGGGGAAAAACCCUACAAGUGCCCGGAAUGCGGCAA
GAGCUUCUCGACCUCCGGGAACCUGACCGAGCACCAGCGCACCCACACCGGAGAGAAACCGUACAAGUGCCCCGAAUGCGGGA
AAUCGUUCUCAGACUCGGGAAACCUCAGGGUGCACCAGCGGACCCACACGGGGGAAAAGCCGUACAAAUGCCCGGAGUGCGGG
AAGUCAUUCUCCCACAAGAACGCGCUGCAGAACCACCAAAGAACCCACACCGGCGAAAAACCGUACAAGUGCCCCGAGUGCGG
AAAGUCCUUCUCCCGCAACGACACCCUCACCGAACACCAACGCACCCACACCGGAGAAAAGCCCUACAAGUGCCCGGAAUGCG
GAAAGAGCUUCAGCCAGAGGGCCCACCUGGAAAGACACCAGAGAACCCACACCGGCGAAAAGCCGUACAAAUGCCCGGAGUGC
GGGAAGUCCUUCAGCCGGUCAGACAAGCUGGUCCGCCACCAAAGGACCCACACAGGAGAAAAGCCCUACAAGUGCCCGGAAUG
CGGAAAAUCGUUCAGCGACCCCGGACACCUGGUCCGGCACCAGAGGACCCACACCGGGGAGAAGCCGACCGGCAAAAAGACCU
CAGCGAGCGGAUCAGGAGGAGGAUCAGGGGGGGACGCACUGGACGACUUCGACCUGGACAUGCUGGGAUCAGACGCACUGGAC
GACUUCGACCUAGACAUGCUCGGAUCGGACGCACUCGACGACUUCGACCUCGACAUGCUAGGAUCAGACGCACUAGACGACUU
CGACCUCGACAUGCUGUCGGGAGGACCGAAGAAAAAGCGGAAGGUCGGAUCACAGUACCUCCCGGACACCGACGACAGGCACA
GAAUCGAAGAAAAACGCAAGCGCACCUACGAAACCUUCAAGAGCAUCAUGAAAAAGUCGCCGUUCUCAGGACCGACCGACCCC
AGACCGCCACCGAGGAGAAUAGCCGUCCCGAGCCGAUCCUCCGCAUCCGUGCCGAAACCGGCACCGCAACCCUACCCGUUCAC
CUCGUCCCUGUCGACCAUCAACUACGACGAGUUCCCCACCAUGGUGUUCCCCUCCGGGCAGAUCUCACAGGCCUCGGCACUGG
CACCCGCACCACCGCAAGUGCUGCCCCAAGCACCGGCACCCGCACCGGCGCCCGCAAUGGUGUCAGCGCUGGCACAGGCACCA
GCACCGGUGCCAGUCCUCGCACCGGGACCGCCGCAAGCAGUGGCACCGCCGGCACCGAAACCGACCCAGGCCGGAGAAGGGAC
CCUGUCCGAGGCGCUGCUGCAACUCCAGUUCGACGACGAGGACCUGGGAGCACUCCUGGGAAACUCCACCGACCCGGCAGUGU
UCACCGACCUCGCAUCGGUGGACAACUCCGAGUUCCAACAGCUCCUGAACCAGGGGAUACCGGUGGCACCGCACACCACCGAA
CCGAUGCUGAUGGAAUACCCGGAAGCCAUCACCCGGCUCGUGACCGGAGCGCAAAGACCGCCCGACCCCGCGCCCGCACCGCU
GGGAGCACCGGGACUACCGAACGGGCUGCUCUCAGGGGACGAGGACUUCUCCAGCAUCGCAGACAUGGACUUCUCCGCCCUGC
UGGGAUCAGGAUCAGGAUCACGCGACUCCCGGGAAGGAAUGUUCCUGCCGAAGCCGGAAGCAGGCAGCGCAAUCUCCGACGUG
UUCGAAGGCCGCGAGGUCUGCCAGCCCAAGCGCCUGCGACCGUUCCACCCGCCGGGAUCACCGUGGGCAAACCGCCCGCUACC
GGCAUCACUGGCACCGACACCCACCGGACCGGUGCACGAACCGGUCGGGUCACUGACCCCCGCACCGGUCCCGCAACCGCUAG
ACCCGGCACCGGCAGUGACCCCGGAAGCAUCGCACCUCCUGGAGGACCCGGACGAGGAAACCUCACAGGCAGUGAAGGCCCUG
CGGGAGAUGGCCGACACCGUGAUACCGCAGAAGGAGGAGGCCGCCAUCUGCGGACAAAUGGACCUGUCACACCCGCCCCCGAG
AGGACACCUGGACGAACUCACCACCACCCUGGAGAGCAUGACCGAGGACCUGAACCUGGACUCACCGCUGACCCCGGAGCUGA
ACGAAAUCCUGGACACCUUCCUGAACGACGAGUGCCUGCUGCACGCAAUGCACAUCAGCACCGGGCUGUCGAUCUUCGACACC
AGCCUGUUCUCCGGAGGGAAAAGACCCGCCGCCACCAAGAAAGCGGGCCAAGCAAAGAAAAAGAAGGGAUCGUACCCCUACGA
CGUGCCGGACUACGCAGCCACCAACUUUUCUCUGCUGAAGCAAGCCGGAGAUGUGGAGGAGAAUCCCGGCCCUACCUCCGCCG
GAAAACUGGGCUCCGGCGAAGGCAGAGGAAGCCUCCUCACAUGCGGCGACGUGGAGGAGAACCCCGGCCCUCUGGAGGGAUCC
UCAGGCUCAGGAUCCCUGGAACCGGGCGAGAAGCCAUACAAGUGCCCAGAGUGCGGCAAAAGCUUCAGCCGCAGCGACCAUCU
GACCAAUCACCAACGCACCCAUACCGGUGAGAAGCCGUACAAAUGCCCAGAGUGCGGUAAGAGCUUUAGUACCAGUGGCAGUC
UGGUUCGUCAUCAGCGCACGCACACGGGCGAAAAACCAUACAAAUGCCCGGAGUGCGGCAAAAGCUUUAGCCAAGCCGGUCAU
CUGGCGAGCCAUCAACGUACGCACACCGGCGAGAAGCCGUAUAAAUGUCCGGAGUGCGGUAAGAGCUUUAGCCGUAGCGAUAA
ACUGACCGAACACCAACGUACGCAUACGGGCGAGAAACCAUAUAAAUGUCCAGAGUGUGGCAAGAGUUUCAGCACCAGCGGCA
AUCUGACCGAGCAUCAACGUACCCAUACCGGUGAAAAGCCAUAUAAAUGUCCAGAAUGCGGUAAGAGUUUUAGUCAGAGCAGU
AAUCUGGUGCGCCAUCAGCGUACCCACACGGGUGAGAAACCAUAUAAGUGUCCGGAAUGCGGCAAGAGUUUUAGCACCCAUCU
GGAUCUGAUCCGUCAUCAGCGCACCCACACCGGUGAAAAACCAACCGGCAAGAAAACCAGUGCUAGCGGCAGCGGCGGCGGCA
GCGGCGGCGACGCCCUGGACGACUUCGACCUGGACAUGCUGGGCAGCGACGCCCUGGACGACUUCGACCUGGACAUGCUGGGC
AGCGACGCCCUGGACGACUUCGACCUGGACAUGCUGGGCAGCGACGCCCUGGACGACUUCGACCUGGACAUGCUGAGCGGCGG
CCCCAAGAAGAAGCGGAAGGUGGGCAGCCAGUACCUGCCCGACACCGACGACCGGCACCGGAUCGAGGAGAAGCGGAAGCGGA
CCUACGAGACCUUCAAGAGCAUCAUGAAGAAAUCCCCCUUCAGCGGCCCCACCGACCCCCGGCCCCCCCCCCGGCGGAUCGCC
GUGCCCAGCCGGAGCAGCGCCAGCGUGCCCAAGCCCGCCCCCCAGCCCUACCCCUUCACCAGCAGCCUGAGCACCAUCAACUA
CGACGAGUUCCCCACCAUGGUGUUCCCCAGCGGCCAGAUCAGCCAGGCCAGCGCCCUGGCCCCCGCCCCCCCCCAGGUGCUGC
CCCAGGCCCCCGCCCCCGCCCCCGCCCCCGCCAUGGUGAGCGCCCUGGCCCAGGCCCCCGCCCCCGUGCCCGUGCUGGCCCCC
GGCCCCCCCCAGGCCGUGGCCCCCCCCGCCCCCAAGCCCACCCAGGCCGGCGAGGGCACCCUGAGCGAGGCCCUGCUGCAGCU
GCAGUUCGACGACGAGGACCUGGGCGCCCUGCUGGGCAACAGCACCGACCCCGCCGUGUUCACCGACCUGGCCAGCGUGGACA
ACAGCGAGUUCCAGCAGCUGCUGAACCAGGGCAUCCCCGUGGCCCCCCACACCACCGAGCCCAUGCUGAUGGAGUACCCCGAG
GCCAUCACCCGGCUGGUGACCGGCGCCCAGCGGCCCCCCGACCCCGCCCCCGCCCCCCUGGGCGCCCCCGGCCUGCCCAACGG
CCUGCUGAGCGGCGACGAGGACUUCAGCAGCAUCGCCGACAUGGACUUCAGCGCCCUGCUGGGCAGCGGCAGCGGCAGCCGGG
ACAGCCGGGAGGGCAUGUUCCUGCCCAAGCCCGAGGCCGGCAGCGCCAUCAGCGACGUGUUCGAGGGCCGGGAGGUGUGCCAG
CCCAAGCGGCUCCGGCCCUUCCACCCCCCCGGCAGCCCCUGGGCCAACCGGCCCCUGCCCGCCAGCCUGGCCCCCACCCCCAC
CGGCCCCGUGCACGAGCCCGUGGGCAGCCUGACCCCCGCCCCCGUGCCCCAGCCCCUGGACCCCGCCCCCGCCGUGACCCCCG
AGGCCAGCCACCUGCUGGAGGACCCCGACGAGGAGACCAGCCAGGCCGUGAAGGCCCUGCGGGAGAUGGCCGACACCGUGAUC
CCCCAGAAGGAGGAGGCCGCCAUCUGCGGCCAGAUGGACCUGAGCCACCCCCCCCCCCGGGGCCACCUGGACGAGCUGACCAC
CACCCUGGAGAGCAUGACCGAGGACCUGAACCUGGACAGCCCCCUGACCCCCGAGCUGAACGAGAUCCUGGACACCUUCCUGA
ACGACGAGUGCCUGCUGCACGCCAUGCACAUCAGCACCGGCCUGAGCAUCUUCGACACCAGCCUGUUCAGCGGCGGCAAGCGG
CCCGCCGCCACCAAGAAGGCCGGCCAGGCCAAGAAGAAGAAGGGCAGCUACCCCUACGACGUGCCCGACUACGCCUGAGCGGC
CGCUUAAUUAAGCUGCCUUCUGCGGGGCUUGCCUUCUGGCCAUGCCCUUCUUCUCUCCCUUGCACCUGUACCUCUUGGUCUUU
GAAUAAAGCCUGAGUAGGAAGUCUAGAAAAAAAAAAAAAAAAAAAAAAAAAAAAAAAAAAAAAAAAAAAAAAAAAAAAAAAAA
AAAAAAAAAAAAAAAAAAAAAAA
>Nucleotide Seqeunce of DNA binding domain of ZF5.3-VPR-tPT2a-ZF7-VPR; 1
SEQ ID NO.: 236
CUGGAACCGGGGGAAAAACCCUACAAGUGCCCGGAAUGCGGCAAGAGCUUCUCGACCUCCGGGAACCUGACCGAGCACCAGCG
CACCCACACCGGAGAGAAACCGUACAAGUGCCCCGAAUGCGGGAAAUCGUUCUCAGACUCGGGAAACCUCAGGGUGCACCAGC
GGACCCACACGGGGGAAAAGCCGUACAAAUGCCCGGAGUGCGGGAAGUCAUUCUCCCACAAGAACGCGCUGCAGAACCACCAA
AGAACCCACACCGGCGAAAAACCGUACAAGUGCCCCGAGUGCGGAAAGUCCUUCUCCCGCAACGACACCCUCACCGAACACCA
ACGCACCCACACCGGAGAAAAGCCCUACAAGUGCCCGGAAUGCGGAAAGAGCUUCAGCCAGAGGGCCCACCUGGAAAGACACC
AGAGAACCCACACCGGCGAAAAGCCGUACAAAUGCCCGGAGUGCGGGAAGUCCUUCAGCCGGUCAGACAAGCUGGUCCGCCAC
CAAAGGACCCACACAGGAGAAAAGCCCUACAAGUGCCCGGAAUGCGGAAAAUCGUUCAGCGACCCCGGACACCUGGUCCGGCA
CCAGAGGACCCACACCGGGGAGAAGCCGACCGGCAAAAAGACCUCA
>Nucleotide Seqeunce of DNA binding domain of ZF5.3-VPR-tPT2a-ZF7-VPR; 2
SEQ ID NO.: 237
CTGGAACCGGGCGAGAAGCCATACAAGTGCCCAGAGTGCGGCAAAAGCTTCAGCCGCAGCGACCATCTGACCAATCACCAACG
CACCCATACCGGTGAGAAGCCGTACAAATGCCCAGAGTGCGGTAAGAGCTTTAGTACCAGTGGCAGTCTGGTTCGTCATCAGC
GCACGCACACGGGCGAAAAACCATACAAATGCCCGGAGTGCGGCAAAAGCTTTAGCCAAGCCGGTCATCTGGCGAGCCATCAA
CGTACGCACACCGGCGAGAAGCCGTATAAATGTCCGGAGTGCGGTAAGAGCTTTAGCCGTAGCGATAAACTGACCGAACACCA
ACGTACGCATACGGGCGAGAAACCATATAAATGTCCAGAGTGTGGCAAGAGTTTCAGCACCAGCGGCAATCTGACCGAGCATC
AACGTACCCATACCGGTGAAAAGCCATATAAATGTCCAGAATGCGGTAAGAGTTTTAGTCAGAGCAGTAATCTGGTGCGCCAT
CAGCGTACCCACACGGGTGAGAAACCATATAAGTGTCCGGAATGCGGCAAGAGTTTTAGCACCCATCTGGATCTGATCCGTCA
TCAGCGCACCCACACCGGTGAAAAACCAACCGGCAAGAAAACCAGT
>ZF7-VPR-tPT2a-ZF5.3-VPR protein
SEQ ID NO.: 178
MAPKKKRKVGIHGVPAAGSSGSLEPGEKPYKCPECGKSFSRSDHLTNHQRTHTGEKPYKCPECGKSFSTSGSLVRHQRTHTGE
KPYKCPECGKSFSQAGHLASHQRTHTGEKPYKCPECGKSFSRSDKLTEHQRTHTGEKPYKCPECGKSFSTSGNLTEHQRTHTG
EKPYKCPECGKSFSQSSNLVRHQRTHTGEKPYKCPECGKSFSTHLDLIRHQRTHTGEKPTGKKTSASGSGGGSGGDALDDFDL
DMLGSDALDDFDLDMLGSDALDDFDLDMLGSDALDDFDLDMLSGGPKKKRKVGSQYLPDTDDRHRIEEKRKRTYETFKSIMKK
SPFSGPTDPRPPPRRIAVPSRSSASVPKPAPQPYPFTSSLSTINYDEFPTMVFPSGQISQASALAPAPPQVLPQAPAPAPAPA
MVSALAQAPAPVPVLAPGPPQAVAPPAPKPTQAGEGTLSEALLQLQFDDEDLGALLGNSTDPAVFTDLASVDNSEFQQLLNQG
IPVAPHTTEPMLMEYPEAITRLVTGAQRPPDPAPAPLGAPGLPNGLLSGDEDFSSIADMDFSALLGSGSGSRDSREGMFLPKP
EAGSAISDVFEGREVCQPKRLRPFHPPGSPWANRPLPASLAPTPTGPVHEPVGSLTPAPVPQPLDPAPAVTPEASHLLEDPDE
ETSQAVKALREMADTVIPQKEEAAICGQMDLSHPPPRGHLDELTTTLESMTEDLNLDSPLTPELNEILDTFLNDECLLHAMHI
STGLSIFDTSLFSGGKRPAATKKAGQAKKKKGSYPYDVPDYAATNFSLLKQAGDVEENPGPTSAGKLGSGEGRGSLLTCGDVE
ENPGPLEGSSGSLEPGEKPYKCPECGKSFSTSGNLTEHQRTHTGEKPYKCPECGKSFSDSGNLRVHQRTHTGEKPYKCPECGK
SFSHKNALQNHQRTHTGEKPYKCPECGKSFSRNDTLTEHQRTHTGEKPYKCPECGKSFSQRAHLERHQRTHTGEKPYKCPECG
KSFSRSDKLVRHQRTHTGEKPYKCPECGKSFSDPGHLVRHQRTHTGEKPTGKKTSASGSGGGSGGDALDDFDLDMLGSDALDD
FDLDMLGSDALDDFDLDMLGSDALDDFDLDMLSGGPKKKRKVGSQYLPDTDDRHRIEEKRKRTYETFKSIMKKSPFSGPTDPR
PPPRRIAVPSRSSASVPKPAPQPYPFTSSLSTINYDEFPTMVFPSGQISQASALAPAPPQVLPQAPAPAPAPAMVSALAQAPA
PVPVLAPGPPQAVAPPAPKPTQAGEGTLSEALLQLQFDDEDLGALLGNSTDPAVFTDLASVDNSEFQQLLNQGIPVAPHTTEP
MLMEYPEAITRLVTGAQRPPDPAPAPLGAPGLPNGLLSGDEDFSSIADMDFSALLGSGSGSRDSREGMFLPKPEAGSAISDVF
EGREVCQPKRLRPFHPPGSPWANRPLPASLAPTPTGPVHEPVGSLTPAPVPQPLDPAPAVTPEASHLLEDPDEETSQAVKALR
EMADTVIPQKEEAAICGQMDLSHPPPRGHLDELTTTLESMTEDLNLDSPLTPELNEILDTFLNDECLLHAMHISTGLSIFDTS
LFSGGKRPAATKKAGQAKKKKGSYPYDVPDYA
>ZF7-VPR-tPT2a-ZF5.3-VPR mRNA
SEQ ID NO.: 179
AGGAAAUAAGAGAGAAAAGAAGAGUAAGAAGAAAUAUAAGAGCCACCAUGGCCCCCAAGAAGAAGCGGAAGGUGGGCAUCCAC
GGCGUGCCCGCCGCCGGCAGCAGCGGAUCCCUGGAACCGGGCGAGAAGCCAUACAAGUGCCCAGAGUGCGGCAAAAGCUUCAG
CCGCAGCGACCAUCUGACCAAUCACCAACGCACCCAUACCGGUGAGAAGCCGUACAAAUGCCCAGAGUGCGGUAAGAGCUUUA
GUACCAGUGGCAGUCUGGUUCGUCAUCAGCGCACGCACACGGGCGAAAAACCAUACAAAUGCCCGGAGUGCGGCAAAAGCUUU
AGCCAAGCCGGUCAUCUGGCGAGCCAUCAACGUACGCACACCGGCGAGAAGCCGUAUAAAUGUCCGGAGUGCGGUAAGAGCUU
UAGCCGUAGCGAUAAACUGACCGAACACCAACGUACGCAUACGGGCGAGAAACCAUAUAAAUGUCCAGAGUGUGGCAAGAGUU
UCAGCACCAGCGGCAAUCUGACCGAGCAUCAACGUACCCAUACCGGUGAAAAGCCAUAUAAAUGUCCAGAAUGCGGUAAGAGU
UUUAGUCAGAGCAGUAAUCUGGUGCGCCAUCAGCGUACCCACACGGGUGAGAAACCAUAUAAGUGUCCGGAAUGCGGCAAGAG
UUUUAGCACCCAUCUGGAUCUGAUCCGUCAUCAGCGCACCCACACCGGUGAAAAACCAACCGGCAAGAAAACCAGUGCUAGCG
GCAGCGGCGGCGGCAGCGGCGGCGACGCCCUGGACGACUUCGACCUGGACAUGCUGGGCAGCGACGCCCUGGACGACUUCGAC
CUGGACAUGCUGGGCAGCGACGCCCUGGACGACUUCGACCUGGACAUGCUGGGCAGCGACGCCCUGGACGACUUCGACCUGGA
CAUGCUGAGCGGCGGCCCCAAGAAGAAGCGGAAGGUGGGCAGCCAGUACCUGCCCGACACCGACGACCGGCACCGGAUCGAGG
AGAAGCGGAAGCGGACCUACGAGACCUUCAAGAGCAUCAUGAAGAAAUCCCCCUUCAGCGGCCCCACCGACCCCCGGCCCCCC
CCCCGGCGGAUCGCCGUGCCCAGCCGGAGCAGCGCCAGCGUGCCCAAGCCCGCCCCCCAGCCCUACCCCUUCACCAGCAGCCU
GAGCACCAUCAACUACGACGAGUUCCCCACCAUGGUGUUCCCCAGCGGCCAGAUCAGCCAGGCCAGCGCCCUGGCCCCCGCCC
CCCCCCAGGUGCUGCCCCAGGCCCCCGCCCCCGCCCCCGCCCCCGCCAUGGUGAGCGCCCUGGCCCAGGCCCCCGCCCCCGUG
CCCGUGCUGGCCCCCGGCCCCCCCCAGGCCGUGGCCCCCCCCGCCCCCAAGCCCACCCAGGCCGGCGAGGGCACCCUGAGCGA
GGCCCUGCUGCAGCUGCAGUUCGACGACGAGGACCUGGGCGCCCUGCUGGGCAACAGCACCGACCCCGCCGUGUUCACCGACC
UGGCCAGCGUGGACAACAGCGAGUUCCAGCAGCUGCUGAACCAGGGCAUCCCCGUGGCCCCCCACACCACCGAGCCCAUGCUG
AUGGAGUACCCCGAGGCCAUCACCCGGCUGGUGACCGGCGCCCAGCGGCCCCCCGACCCCGCCCCCGCCCCCCUGGGCGCCCC
CGGCCUGCCCAACGGCCUGCUGAGCGGCGACGAGGACUUCAGCAGCAUCGCCGACAUGGACUUCAGCGCCCUGCUGGGCAGCG
GCAGCGGCAGCCGGGACAGCCGGGAGGGCAUGUUCCUGCCCAAGCCCGAGGCCGGCAGCGCCAUCAGCGACGUGUUCGAGGGC
CGGGAGGUGUGCCAGCCCAAGCGGCUCCGGCCCUUCCACCCCCCCGGCAGCCCCUGGGCCAACCGGCCCCUGCCCGCCAGCCU
GGCCCCCACCCCCACCGGCCCCGUGCACGAGCCCGUGGGCAGCCUGACCCCCGCCCCCGUGCCCCAGCCCCUGGACCCCGCCC
CCGCCGUGACCCCCGAGGCCAGCCACCUGCUGGAGGACCCCGACGAGGAGACCAGCCAGGCCGUGAAGGCCCUGCGGGAGAUG
GCCGACACCGUGAUCCCCCAGAAGGAGGAGGCCGCCAUCUGCGGCCAGAUGGACCUGAGCCACCCCCCCCCCCGGGGCCACCU
GGACGAGCUGACCACCACCCUGGAGAGCAUGACCGAGGACCUGAACCUGGACAGCCCCCUGACCCCCGAGCUGAACGAGAUCC
UGGACACCUUCCUGAACGACGAGUGCCUGCUGCACGCCAUGCACAUCAGCACCGGCCUGAGCAUCUUCGACACCAGCCUGUUC
AGCGGCGGCAAGCGGCCCGCCGCCACCAAGAAGGCCGGCCAGGCCAAGAAGAAGAAGGGCAGCUACCCCUACGACGUGCCCGA
CUACGCCGCCACCAACUUUUCUCUGCUGAAGCAAGCCGGAGAUGUGGAGGAGAAUCCCGGCCCUACCUCCGCCGGAAAACUGG
GCUCCGGCGAAGGCAGAGGAAGCCUCCUCACAUGCGGCGACGUGGAGGAGAACCCCGGCCCUCUGGAGGGAUCCUCAGGCUCA
CUGGAACCGGGGGAAAAACCCUACAAGUGCCCGGAAUGCGGCAAGAGCUUCUCGACCUCCGGGAACCUGACCGAGCACCAGCG
CACCCACACCGGAGAGAAACCGUACAAGUGCCCCGAAUGCGGGAAAUCGUUCUCAGACUCGGGAAACCUCAGGGUGCACCAGC
GGACCCACACGGGGGAAAAGCCGUACAAAUGCCCGGAGUGCGGGAAGUCAUUCUCCCACAAGAACGCGCUGCAGAACCACCAA
AGAACCCACACCGGCGAAAAACCGUACAAGUGCCCCGAGUGCGGAAAGUCCUUCUCCCGCAACGACACCCUCACCGAACACCA
ACGCACCCACACCGGAGAAAAGCCCUACAAGUGCCCGGAAUGCGGAAAGAGCUUCAGCCAGAGGGCCCACCUGGAAAGACACC
AGAGAACCCACACCGGCGAAAAGCCGUACAAAUGCCCGGAGUGCGGGAAGUCCUUCAGCCGGUCAGACAAGCUGGUCCGCCAC
CAAAGGACCCACACAGGAGAAAAGCCCUACAAGUGCCCGGAAUGCGGAAAAUCGUUCAGCGACCCCGGACACCUGGUCCGGCA
CCAGAGGACCCACACCGGGGAGAAGCCGACCGGCAAAAAGACCUCAGCGAGCGGAUCAGGAGGAGGAUCAGGGGGGGACGCAC
UGGACGACUUCGACCUGGACAUGCUGGGAUCAGACGCACUGGACGACUUCGACCUAGACAUGCUCGGAUCGGACGCACUCGAC
GACUUCGACCUCGACAUGCUAGGAUCAGACGCACUAGACGACUUCGACCUCGACAUGCUGUCGGGAGGACCGAAGAAAAAGCG
GAAGGUCGGAUCACAGUACCUCCCGGACACCGACGACAGGCACAGAAUCGAAGAAAAACGCAAGCGCACCUACGAAACCUUCA
AGAGCAUCAUGAAAAAGUCGCCGUUCUCAGGACCGACCGACCCCAGACCGCCACCGAGGAGAAUAGCCGUCCCGAGCCGAUCC
UCCGCAUCCGUGCCGAAACCGGCACCGCAACCCUACCCGUUCACCUCGUCCCUGUCGACCAUCAACUACGACGAGUUCCCCAC
CAUGGUGUUCCCCUCCGGGCAGAUCUCACAGGCCUCGGCACUGGCACCCGCACCACCGCAAGUGCUGCCCCAAGCACCGGCAC
CCGCACCGGCGCCCGCAAUGGUGUCAGCGCUGGCACAGGCACCAGCACCGGUGCCAGUCCUCGCACCGGGACCGCCGCAAGCA
GUGGCACCGCCGGCACCGAAACCGACCCAGGCCGGAGAAGGGACCCUGUCCGAGGCGCUGCUGCAACUCCAGUUCGACGACGA
GGACCUGGGAGCACUCCUGGGAAACUCCACCGACCCGGCAGUGUUCACCGACCUCGCAUCGGUGGACAACUCCGAGUUCCAAC
AGCUCCUGAACCAGGGGAUACCGGUGGCACCGCACACCACCGAACCGAUGCUGAUGGAAUACCCGGAAGCCAUCACCCGGCUC
GUGACCGGAGCGCAAAGACCGCCCGACCCCGCGCCCGCACCGCUGGGAGCACCGGGACUACCGAACGGGCUGCUCUCAGGGGA
CGAGGACUUCUCCAGCAUCGCAGACAUGGACUUCUCCGCCCUGCUGGGAUCAGGAUCAGGAUCACGCGACUCCCGGGAAGGAA
UGUUCCUGCCGAAGCCGGAAGCAGGCAGCGCAAUCUCCGACGUGUUCGAAGGCCGCGAGGUCUGCCAGCCCAAGCGCCUGCGA
CCGUUCCACCCGCCGGGAUCACCGUGGGCAAACCGCCCGCUACCGGCAUCACUGGCACCGACACCCACCGGACCGGUGCACGA
ACCGGUCGGGUCACUGACCCCCGCACCGGUCCCGCAACCGCUAGACCCGGCACCGGCAGUGACCCCGGAAGCAUCGCACCUCC
UGGAGGACCCGGACGAGGAAACCUCACAGGCAGUGAAGGCCCUGCGGGAGAUGGCCGACACCGUGAUACCGCAGAAGGAGGAG
GCCGCCAUCUGCGGACAAAUGGACCUGUCACACCCGCCCCCGAGAGGACACCUGGACGAACUCACCACCACCCUGGAGAGCAU
GACCGAGGACCUGAACCUGGACUCACCGCUGACCCCGGAGCUGAACGAAAUCCUGGACACCUUCCUGAACGACGAGUGCCUGC
UGCACGCAAUGCACAUCAGCACCGGGCUGUCGAUCUUCGACACCAGCCUGUUCUCCGGAGGGAAAAGACCCGCCGCCACCAAG
AAAGCGGGCCAAGCAAAGAAAAAGAAGGGAUCGUACCCCUACGACGUGCCGGACUACGCAUGAGCGGCCGCUUAAUUAAGCUG
CCUUCUGCGGGGCUUGCCUUCUGGCCAUGCCCUUCUUCUCUCCCUUGCACCUGUACCUCUUGGUCUUUGAAUAAAGCCUGAGU
AGGAAGUCUAGAAAAAAAAAAAAAAAAAAAAAAAAAAAAAAAAAAAAAAAAAAAAAAAAAAAAAAAAAAAAAAAAAAAAAAAA
AAAAAAAA
>Nucleotide Seqeunce of DNA binding domain of ZF7-VPR-tPT2a-ZF5.3-VPR; 1
SEQ ID NO.: 238
CUGGAACCGGGCGAGAAGCCAUACAAGUGCCCAGAGUGCGGCAAAAGCUUCAGCCGCAGCGACCAUCUGACCAAUCACCAACG
CACCCAUACCGGUGAGAAGCCGUACAAAUGCCCAGAGUGCGGUAAGAGCUUUAGUACCAGUGGCAGUCUGGUUCGUCAUCAGC
GCACGCACACGGGCGAAAAACCAUACAAAUGCCCGGAGUGCGGCAAAAGCUUUAGCCAAGCCGGUCAUCUGGCGAGCCAUCAA
CGUACGCACACCGGCGAGAAGCCGUAUAAAUGUCCGGAGUGCGGUAAGAGCUUUAGCCGUAGCGAUAAACUGACCGAACACCA
ACGUACGCAUACGGGCGAGAAACCAUAUAAAUGUCCAGAGUGUGGCAAGAGUUUCAGCACCAGCGGCAAUCUGACCGAGCAUC
AACGUACCCAUACCGGUGAAAAGCCAUAUAAAUGUCCAGAAUGCGGUAAGAGUUUUAGUCAGAGCAGUAAUCUGGUGCGCCAU
CAGCGUACCCACACGGGUGAGAAACCAUAUAAGUGUCCGGAAUGCGGCAAGAGUUUUAGCACCCAUCUGGAUCUGAUCCGUCA
UCAGCGCACCCACACCGGUGAAAAACCAACCGGCAAGAAAACCAGU
>Nucleotide Seqeunce of DNA binding domain of ZF7-VPR-tPT2a-ZF5.3-VPR; 2
SEQ ID NO.: 239
CTGGAACCGGGGGAAAAACCCTACAAGTGCCCGGAATGCGGCAAGAGCTTCTCGACCTCCGGGAACCTGACCGAGCACCAGCG
CACCCACACCGGAGAGAAACCGTACAAGTGCCCCGAATGCGGGAAATCGTTCTCAGACTCGGGAAACCTCAGGGTGCACCAGC
GGACCCACACGGGGGAAAAGCCGTACAAATGCCCGGAGTGCGGGAAGTCATTCTCCCACAAGAACGCGCTGCAGAACCACCAA
AGAACCCACACCGGCGAAAAACCGTACAAGTGCCCCGAGTGCGGAAAGTCCTTCTCCCGCAACGACACCCTCACCGAACACCA
ACGCACCCACACCGGAGAAAAGCCCTACAAGTGCCCGGAATGCGGAAAGAGCTTCAGCCAGAGGGCCCACCTGGAAAGACACC
AGAGAACCCACACCGGCGAAAAGCCGTACAAATGCCCGGAGTGCGGGAAGTCCTTCAGCCGGTCAGACAAGCTGGTCCGCCAC
CAAAGGACCCACACAGGAGAAAAGCCCTACAAGTGCCCGGAATGCGGAAAATCGTTCAGCGACCCCGGACACCTGGTCCGGCA
CCAGAGGACCCACACCGGGGAGAAGCCGACCGGCAAAAAGACCTCA
>ZF5.3-VPR-tPT2a-ZF7-p300 protein
SEQ ID NO.: 180
MAPKKKRKVGIHGVPAAGSSGSSGSLEPGEKPYKCPECGKSFSTSGNLTEHQRTHTGEKPYKCPECGKSFSDSGNLRVHQRTH
TGEKPYKCPECGKSFSHKNALQNHQRTHTGEKPYKCPECGKSFSRNDTLTEHQRTHTGEKPYKCPECGKSFSQRAHLERHQRT
HTGEKPYKCPECGKSFSRSDKLVRHQRTHTGEKPYKCPECGKSFSDPGHLVRHQRTHTGEKPTGKKTSASGSGGGSGGDALDD
FDLDMLGSDALDDFDLDMLGSDALDDFDLDMLGSDALDDFDLDMLSGGPKKKRKVGSQYLPDTDDRHRIEEKRKRTYETFKSI
MKKSPFSGPTDPRPPPRRIAVPSRSSASVPKPAPQPYPFTSSLSTINYDEFPTMVFPSGQISQASALAPAPPQVLPQAPAPAP
APAMVSALAQAPAPVPVLAPGPPQAVAPPAPKPTQAGEGTLSEALLQLQFDDEDLGALLGNSTDPAVFTDLASVDNSEFQQLL
NQGIPVAPHTTEPMLMEYPEAITRLVTGAQRPPDPAPAPLGAPGLPNGLLSGDEDFSSIADMDFSALLGSGSGSRDSREGMFL
PKPEAGSAISDVFEGREVCQPKRLRPFHPPGSPWANRPLPASLAPTPTGPVHEPVGSLTPAPVPQPLDPAPAVTPEASHLLED
PDEETSQAVKALREMADTVIPQKEEAAICGQMDLSHPPPRGHLDELTTTLESMTEDLNLDSPLTPELNEILDTFLNDECLLHA
MHISTGLSIFDTSLFSGGKRPAATKKAGQAKKKKGSYPYDVPDYAATNFSLLKQAGDVEENPGPTSAGKLGSGEGRGSLLTCG
DVEENPGPLEGSSGSGSLEPGEKPYKCPECGKSFSRSDHLTNHQRTHTGEKPYKCPECGKSFSTSGSLVRHQRTHTGEKPYKC
PECGKSFSQAGHLASHQRTHTGEKPYKCPECGKSFSRSDKLTEHQRTHTGEKPYKCPECGKSFSTSGNLTEHQRTHTGEKPYK
CPECGKSFSQSSNLVRHQRTHTGEKPYKCPECGKSFSTHLDLIRHQRTHTGEKPTGKKTSASGSGGGSGGIFKPEELRQALMP
TLEALYRQDPESLPFRQPVDPQLLGIPDYFDIVKSPMDLSTIKRKLDTGQYQEPWQYVDDIWLMFNNAWLYNRKTSRVYKYCS
KLSEVFEQEIDPVMQSLGYCCGRKLEFSPQTLCCYGKQLCTIPRDATYYSYQNRYHFCEKCFNEIQGESVSLGDDPSQPQTTI
NKEQFSKRKNDTLDPELFVECTECGRKMHQICVLHHEIIWPAGFVCDGCLKKSARTRKENKFSAKRLPSTRLGTFLENRVNDF
LRRQNHPESGEVTVRVVHASDKTVEVKPGMKARFVDSGEMAESFPYRTKALFAFEEIDGVDLCFFGMHVQEYGSDCPPPNQRR
VYISYLDSVHFFRPKCLRTAVYHEILIGYLEYVKKLGYTTGHIWACPPSEGDDYIFHCHPPDQKIPKPKRLQEWYKKMLDKAV
SERIVHDYKDIFKQATEDRLTSAKELPYFEGDFWPNVLEESIKELEQEEEERKREENTSNESTDVTKGDSKNAKKKNNKKTSK
NKSSLSRGNKKKPGMPNVSNDLSQKLYATMEKHKEVFFVIRLIAGPAANSLPPIVDPDPLIPCDLMDGRDAFLTLARDKHLEF
SSLRRAQWSTMCMLVELHTQSQDSGGKRPAATKKAGQAKKKKGSYPYDVPDYA*
>ZE5.3-VPR-tPT2a-ZE7-p300 mRNA
SEQ ID NO.: 181
AGGAAAUAAGAGAGAAAAGAAGAGUAAGAAGAAAUAUAAGAGCCACCAUGGCCCCCAAGAAGAAGCGGAAGGUGGGCAUCCAC
GGCGUGCCCGCCGCCGGCAGCAGCGGAUCAUCAGGCUCACUGGAACCGGGGGAAAAACCCUACAAGUGCCCGGAAUGCGGCAA
GAGCUUCUCGACCUCCGGGAACCUGACCGAGCACCAGCGCACCCACACCGGAGAGAAACCGUACAAGUGCCCCGAAUGCGGGA
AAUCGUUCUCAGACUCGGGAAACCUCAGGGUGCACCAGCGGACCCACACGGGGGAAAAGCCGUACAAAUGCCCGGAGUGCGGG
AAGUCAUUCUCCCACAAGAACGCGCUGCAGAACCACCAAAGAACCCACACCGGCGAAAAACCGUACAAGUGCCCCGAGUGCGG
AAAGUCCUUCUCCCGCAACGACACCCUCACCGAACACCAACGCACCCACACCGGAGAAAAGCCCUACAAGUGCCCGGAAUGCG
GAAAGAGCUUCAGCCAGAGGGCCCACCUGGAAAGACACCAGAGAACCCACACCGGCGAAAAGCCGUACAAAUGCCCGGAGUGC
GGGAAGUCCUUCAGCCGGUCAGACAAGCUGGUCCGCCACCAAAGGACCCACACAGGAGAAAAGCCCUACAAGUGCCCGGAAUG
CGGAAAAUCGUUCAGCGACCCCGGACACCUGGUCCGGCACCAGAGGACCCACACCGGGGAGAAGCCGACCGGCAAAAAGACCU
CAGCGAGCGGAUCAGGAGGAGGAUCAGGGGGGGACGCACUGGACGACUUCGACCUGGACAUGCUGGGAUCAGACGCACUGGAC
GACUUCGACCUAGACAUGCUCGGAUCGGACGCACUCGACGACUUCGACCUCGACAUGCUAGGAUCAGACGCACUAGACGACUU
CGACCUCGACAUGCUGUCGGGAGGACCGAAGAAAAAGCGGAAGGUCGGAUCACAGUACCUCCCGGACACCGACGACAGGCACA
GAAUCGAAGAAAAACGCAAGCGCACCUACGAAACCUUCAAGAGCAUCAUGAAAAAGUCGCCGUUCUCAGGACCGACCGACCCC
AGACCGCCACCGAGGAGAAUAGCCGUCCCGAGCCGAUCCUCCGCAUCCGUGCCGAAACCGGCACCGCAACCCUACCCGUUCAC
CUCGUCCCUGUCGACCAUCAACUACGACGAGUUCCCCACCAUGGUGUUCCCCUCCGGGCAGAUCUCACAGGCCUCGGCACUGG
CACCCGCACCACCGCAAGUGCUGCCCCAAGCACCGGCACCCGCACCGGCGCCCGCAAUGGUGUCAGCGCUGGCACAGGCACCA
GCACCGGUGCCAGUCCUCGCACCGGGACCGCCGCAAGCAGUGGCACCGCCGGCACCGAAACCGACCCAGGCCGGAGAAGGGAC
CCUGUCCGAGGCGCUGCUGCAACUCCAGUUCGACGACGAGGACCUGGGAGCACUCCUGGGAAACUCCACCGACCCGGCAGUGU
UCACCGACCUCGCAUCGGUGGACAACUCCGAGUUCCAACAGCUCCUGAACCAGGGGAUACCGGUGGCACCGCACACCACCGAA
CCGAUGCUGAUGGAAUACCCGGAAGCCAUCACCCGGCUCGUGACCGGAGCGCAAAGACCGCCCGACCCCGCGCCCGCACCGCU
GGGAGCACCGGGACUACCGAACGGGCUGCUCUCAGGGGACGAGGACUUCUCCAGCAUCGCAGACAUGGACUUCUCCGCCCUGC
UGGGAUCAGGAUCAGGAUCACGCGACUCCCGGGAAGGAAUGUUCCUGCCGAAGCCGGAAGCAGGCAGCGCAAUCUCCGACGUG
UUCGAAGGCCGCGAGGUCUGCCAGCCCAAGCGCCUGCGACCGUUCCACCCGCCGGGAUCACCGUGGGCAAACCGCCCGCUACC
GGCAUCACUGGCACCGACACCCACCGGACCGGUGCACGAACCGGUCGGGUCACUGACCCCCGCACCGGUCCCGCAACCGCUAG
ACCCGGCACCGGCAGUGACCCCGGAAGCAUCGCACCUCCUGGAGGACCCGGACGAGGAAACCUCACAGGCAGUGAAGGCCCUG
CGGGAGAUGGCCGACACCGUGAUACCGCAGAAGGAGGAGGCCGCCAUCUGCGGACAAAUGGACCUGUCACACCCGCCCCCGAG
AGGACACCUGGACGAACUCACCACCACCCUGGAGAGCAUGACCGAGGACCUGAACCUGGACUCACCGCUGACCCCGGAGCUGA
ACGAAAUCCUGGACACCUUCCUGAACGACGAGUGCCUGCUGCACGCAAUGCACAUCAGCACCGGGCUGUCGAUCUUCGACACC
AGCCUGUUCUCCGGAGGGAAAAGACCCGCCGCCACCAAGAAAGCGGGCCAAGCAAAGAAAAAGAAGGGAUCGUACCCCUACGA
CGUGCCGGACUACGCAGCCACCAACUUUUCUCUGCUGAAGCAAGCCGGAGAUGUGGAGGAGAAUCCCGGCCCUACCUCCGCCG
GAAAACUGGGCUCCGGCGAAGGCAGAGGAAGCCUCCUCACAUGCGGCGACGUGGAGGAGAACCCCGGCCCUCUGGAGGGAUCC
UCAGGCUCAGGAUCCCUGGAACCGGGCGAGAAGCCAUACAAGUGCCCAGAGUGCGGCAAAAGCUUCAGCCGCAGCGACCAUCU
GACCAAUCACCAACGCACCCAUACCGGUGAGAAGCCGUACAAAUGCCCAGAGUGCGGUAAGAGCUUUAGUACCAGUGGCAGUC
UGGUUCGUCAUCAGCGCACGCACACGGGCGAAAAACCAUACAAAUGCCCGGAGUGCGGCAAAAGCUUUAGCCAAGCCGGUCAU
CUGGCGAGCCAUCAACGUACGCACACCGGCGAGAAGCCGUAUAAAUGUCCGGAGUGCGGUAAGAGCUUUAGCCGUAGCGAUAA
ACUGACCGAACACCAACGUACGCAUACGGGCGAGAAACCAUAUAAAUGUCCAGAGUGUGGCAAGAGUUUCAGCACCAGCGGCA
AUCUGACCGAGCAUCAACGUACCCAUACCGGUGAAAAGCCAUAUAAAUGUCCAGAAUGCGGUAAGAGUUUUAGUCAGAGCAGU
AAUCUGGUGCGCCAUCAGCGUACCCACACGGGUGAGAAACCAUAUAAGUGUCCGGAAUGCGGCAAGAGUUUUAGCACCCAUCU
GGAUCUGAUCCGUCAUCAGCGCACCCACACCGGUGAAAAACCAACCGGCAAGAAAACCAGUGCUAGCGGCAGCGGCGGCGGCA
GCGGCGGCAUCUUCAAGCCCGAGGAGCUGCGGCAGGCCCUGAUGCCCACCCUGGAGGCCCUGUACCGGCAGGACCCCGAGAGC
CUGCCCUUCCGGCAGCCCGUGGACCCCCAGCUGCUGGGCAUCCCCGACUACUUCGACAUCGUGAAAUCCCCCAUGGACCUGAG
CACCAUCAAGCGGAAGCUGGACACCGGCCAGUACCAGGAGCCCUGGCAGUACGUGGACGACAUCUGGCUGAUGUUCAACAACG
CCUGGCUGUACAACCGGAAAACCAGCCGGGUGUACAAGUACUGCAGCAAGCUGAGCGAGGUGUUCGAGCAGGAGAUCGACCCC
GUGAUGCAGAGCCUGGGCUACUGCUGCGGCCGGAAGCUGGAGUUCAGCCCCCAGACCCUGUGCUGCUACGGCAAGCAGCUGUG
CACCAUCCCCCGGGACGCCACCUACUACAGCUACCAGAACCGGUACCACUUCUGCGAGAAGUGCUUCAACGAGAUCCAGGGCG
AGAGCGUGAGCCUGGGCGACGACCCCAGCCAGCCCCAGACCACCAUCAACAAGGAGCAGUUCAGCAAGCGGAAGAACGACACC
CUGGACCCCGAGCUGUUCGUGGAGUGCACCGAGUGCGGCCGGAAGAUGCACCAGAUCUGCGUGCUGCACCACGAGAUCAUCUG
GCCCGCCGGCUUCGUGUGCGACGGCUGCCUGAAGAAAUCCGCCCGGACCCGGAAGGAGAACAAGUUCAGCGCCAAGCGGCUGC
CCAGCACCCGGCUGGGCACCUUCCUGGAGAACCGGGUGAACGACUUCCUGCGGCGGCAGAACCACCCCGAGAGCGGCGAGGUG
ACCGUGCGGGUGGUGCACGCCAGCGACAAGACCGUGGAGGUGAAGCCCGGCAUGAAGGCCCGGUUCGUGGACAGCGGCGAGAU
GGCCGAGAGCUUCCCCUACCGGACCAAGGCCCUGUUCGCCUUCGAGGAGAUCGACGGCGUGGACCUGUGCUUCUUCGGCAUGC
ACGUGCAGGAGUACGGCAGCGACUGCCCCCCCCCCAACCAGCGGCGGGUGUACAUCAGCUACCUGGACAGCGUGCACUUCUUC
CGGCCCAAGUGCCUGCGGACCGCCGUGUACCACGAGAUCCUGAUCGGCUACCUGGAGUACGUGAAGAAGCUGGGCUACACCAC
CGGCCACAUCUGGGCCUGCCCCCCCAGCGAGGGCGACGACUACAUCUUCCACUGCCACCCCCCCGACCAGAAGAUCCCCAAGC
CCAAGCGGCUGCAGGAGUGGUACAAGAAGAUGCUGGACAAGGCCGUGAGCGAGCGGAUCGUGCACGACUACAAGGACAUCUUC
AAGCAGGCCACCGAGGACCGGCUGACCAGCGCCAAGGAGCUGCCCUACUUCGAGGGCGACUUCUGGCCCAACGUGCUGGAGGA
GAGCAUCAAGGAGCUGGAGCAGGAGGAGGAGGAGCGGAAGCGGGAGGAGAACACCAGCAACGAGAGCACCGACGUGACCAAGG
GCGACAGCAAGAACGCCAAGAAGAAGAACAACAAGAAAACCAGCAAGAACAAGAGCAGCCUGAGCCGGGGCAACAAGAAGAAG
CCCGGCAUGCCCAACGUGAGCAACGACCUGAGCCAGAAGCUGUACGCCACCAUGGAGAAGCACAAGGAGGUGUUCUUCGUGAU
CCGGCUGAUCGCCGGCCCCGCCGCCAACAGCCUGCCCCCCAUCGUGGACCCCGACCCCCUGAUCCCCUGCGACCUGAUGGACG
GCCGGGACGCCUUCCUGACCCUGGCCCGGGACAAGCACCUGGAGUUCAGCAGCCUGCGGCGGGCCCAGUGGAGCACCAUGUGC
AUGCUGGUGGAGCUGCACACCCAGAGCCAGGACAGCGGCGGCAAGCGGCCCGCCGCCACCAAGAAGGCCGGCCAGGCCAAGAA
GAAGAAGGGCAGCUACCCCUACGACGUGCCCGACUACGCCUGAGCGGCCGCUUAAUUAAGCUGCCUUCUGCGGGGCUUGCCUU
CUGGCCAUGCCCUUCUUCUCUCCCUUGCACCUGUACCUCUUGGUCUUUGAAUAAAGCCUGAGUAGGAAGUCUAGAAAAAAAAA
AAAAAAAAAAAAAAAAAAAAAAAAAAAAAAAAAAAAAAAAAAAAAAAAAAAAAAAAAAAAAAAAAAAAAAA
>Nucleotide Seqeunce of DNA binding domain of ZF5.3-VPR-tPT2a-ZF7-p300; 1
SEQ ID NO.: 240
CUGGAACCGGGGGAAAAACCCUACAAGUGCCCGGAAUGCGGCAAGAGCUUCUCGACCUCCGGGAACCUGACCGAGCACCAGCG
CACCCACACCGGAGAGAAACCGUACAAGUGCCCCGAAUGCGGGAAAUCGUUCUCAGACUCGGGAAACCUCAGGGUGCACCAGC
GGACCCACACGGGGGAAAAGCCGUACAAAUGCCCGGAGUGCGGGAAGUCAUUCUCCCACAAGAACGCGCUGCAGAACCACCAA
AGAACCCACACCGGCGAAAAACCGUACAAGUGCCCCGAGUGCGGAAAGUCCUUCUCCCGCAACGACACCCUCACCGAACACCA
ACGCACCCACACCGGAGAAAAGCCCUACAAGUGCCCGGAAUGCGGAAAGAGCUUCAGCCAGAGGGCCCACCUGGAAAGACACC
AGAGAACCCACACCGGCGAAAAGCCGUACAAAUGCCCGGAGUGCGGGAAGUCCUUCAGCCGGUCAGACAAGCUGGUCCGCCAC
CAAAGGACCCACACAGGAGAAAAGCCCUACAAGUGCCCGGAAUGCGGAAAAUCGUUCAGCGACCCCGGACACCUGGUCCGGCA
CCAGAGGACCCACACCGGGGAGAAGCCGACCGGCAAAAAGACCUCA
>Nucleotide Seqeunce of DNA binding domain of ZF5.3-VPR-tPT2a-ZF7-p300; 2
SEQ ID NO.: 241
CTGGAACCGGGCGAGAAGCCATACAAGTGCCCAGAGTGCGGCAAAAGCTTCAGCCGCAGCGACCATCTGACCAATCACCAACG
CACCCATACCGGTGAGAAGCCGTACAAATGCCCAGAGTGCGGTAAGAGCTTTAGTACCAGTGGCAGTCTGGTTCGTCATCAGC
GCACGCACACGGGCGAAAAACCATACAAATGCCCGGAGTGCGGCAAAAGCTTTAGCCAAGCCGGTCATCTGGCGAGCCATCAA
CGTACGCACACCGGCGAGAAGCCGTATAAATGTCCGGAGTGCGGTAAGAGCTTTAGCCGTAGCGATAAACTGACCGAACACCA
ACGTACGCATACGGGCGAGAAACCATATAAATGTCCAGAGTGTGGCAAGAGTTTCAGCACCAGCGGCAATCTGACCGAGCATC
AACGTACCCATACCGGTGAAAAGCCATATAAATGTCCAGAATGCGGTAAGAGTTTTAGTCAGAGCAGTAATCTGGTGCGCCAT
CAGCGTACCCACACGGGTGAGAAACCATATAAGTGTCCGGAATGCGGCAAGAGTTTTAGCACCCATCTGGATCTGATCCGTCA
TCAGCGCACCCACACCGGTGAAAAACCAACCGGCAAGAAAACCAGT
>ZF7-p300-tPT2a-ZF5.3-VPR protein
SEQ ID NO.: 182
MAPKKKRKVGIHGVPAAGSSGSLEPGEKPYKCPECGKSFSRSDHLTNHQRTHTGEKPYKCPECGKSFSTSGSLVRHQRTHTGE
KPYKCPECGKSFSQAGHLASHQRTHTGEKPYKCPECGKSFSRSDKLTEHQRTHTGEKPYKCPECGKSFSTSGNLTEHQRTHTG
EKPYKCPECGKSFSQSSNLVRHQRTHTGEKPYKCPECGKSFSTHLDLIRHQRTHTGEKPTGKKTSASGSGGGSGGIFKPEELR
QALMPTLEALYRQDPESLPFRQPVDPQLLGIPDYFDIVKSPMDLSTIKRKLDTGQYQEPWQYVDDIWLMFNNAWLYNRKTSRV
YKYCSKLSEVFEQEIDPVMQSLGYCCGRKLEFSPQTLCCYGKQLCTIPRDATYYSYQNRYHFCEKCFNEIQGESVSLGDDPSQ
PQTTINKEQFSKRKNDTLDPELFVECTECGRKMHQICVLHHEIIWPAGFVCDGCLKKSARTRKENKFSAKRLPSTRLGTFLEN
RVNDFLRRQNHPESGEVTVRVVHASDKTVEVKPGMKARFVDSGEMAESFPYRTKALFAFEEIDGVDLCFFGMHVQEYGSDCPP
PNQRRVYISYLDSVHFFRPKCLRTAVYHEILIGYLEYVKKLGYTTGHIWACPPSEGDDYIFHCHPPDQKIPKPKRLQEWYKKM
LDKAVSERIVHDYKDIFKQATEDRLTSAKELPYFEGDFWPNVLEESIKELEQEEEERKREENTSNESTDVTKGDSKNAKKKNN
KKTSKNKSSLSRGNKKKPGMPNVSNDLSQKLYATMEKHKEVFFVIRLIAGPAANSLPPIVDPDPLIPCDLMDGRDAFLTLARD
KHLEFSSLRRAQWSTMCMLVELHTQSQDSGGKRPAATKKAGQAKKKKGSYPYDVPDYAATNFSLLKQAGDVEENPGPTSAGKL
GSGEGRGSLLTCGDVEENPGPLEGSSGSLEPGEKPYKCPECGKSFSTSGNLTEHQRTHTGEKPYKCPECGKSFSDSGNLRVHQ
RTHTGEKPYKCPECGKSFSHKNALQNHQRTHTGEKPYKCPECGKSFSRNDTLTEHQRTHTGEKPYKCPECGKSFSQRAHLERH
QRTHTGEKPYKCPECGKSFSRSDKLVRHQRTHTGEKPYKCPECGKSFSDPGHLVRHQRTHTGEKPTGKKTSASGSGGGSGGDA
LDDFDLDMLGSDALDDFDLDMLGSDALDDFDLDMLGSDALDDFDLDMLSGGPKKKRKVGSQYLPDTDDRHRIEEKRKRTYETF
KSIMKKSPFSGPTDPRPPPRRIAVPSRSSASVPKPAPQPYPFTSSLSTINYDEFPTMVFPSGQISQASALAPAPPQVLPQAPA
PAPAPAMVSALAQAPAPVPVLAPGPPQAVAPPAPKPTQAGEGTLSEALLQLQFDDEDLGALLGNSTDPAVFTDLASVDNSEFQ
QLLNQGIPVAPHTTEPMLMEYPEAITRLVTGAQRPPDPAPAPLGAPGLPNGLLSGDEDFSSIADMDFSALLGSGSGSRDSREG
MFLPKPEAGSAISDVFEGREVCQPKRLRPFHPPGSPWANRPLPASLAPTPTGPVHEPVGSLTPAPVPQPLDPAPAVTPEASHL
LEDPDEETSQAVKALREMADTVIPQKEEAAICGQMDLSHPPPRGHLDELTTTLESMTEDLNLDSPLTPELNEILDTFLNDECL
LHAMHISTGLSIFDTSLFSGGKRPAATKKAGQAKKKKGSYPYDVPDYA*
>>ZF7-p300-tPT2a-ZF5.3-VPR mRNA
SEQ ID NO.: 183
AGGAAAUAAGAGAGAAAAGAAGAGUAAGAAGAAAUAUAAGAGCCACCAUGGCCCCCAAGAAGAAGCGGAAGGUGGGCAUCCAC
GGCGUGCCCGCCGCCGGCAGCAGCGGAUCCCUGGAACCGGGCGAGAAGCCAUACAAGUGCCCAGAGUGCGGCAAAAGCUUCAG
CCGCAGCGACCAUCUGACCAAUCACCAACGCACCCAUACCGGUGAGAAGCCGUACAAAUGCCCAGAGUGCGGUAAGAGCUUUA
GUACCAGUGGCAGUCUGGUUCGUCAUCAGCGCACGCACACGGGCGAAAAACCAUACAAAUGCCCGGAGUGCGGCAAAAGCUUU
AGCCAAGCCGGUCAUCUGGCGAGCCAUCAACGUACGCACACCGGCGAGAAGCCGUAUAAAUGUCCGGAGUGCGGUAAGAGCUU
UAGCCGUAGCGAUAAACUGACCGAACACCAACGUACGCAUACGGGCGAGAAACCAUAUAAAUGUCCAGAGUGUGGCAAGAGUU
UCAGCACCAGCGGCAAUCUGACCGAGCAUCAACGUACCCAUACCGGUGAAAAGCCAUAUAAAUGUCCAGAAUGCGGUAAGAGU
UUUAGUCAGAGCAGUAAUCUGGUGCGCCAUCAGCGUACCCACACGGGUGAGAAACCAUAUAAGUGUCCGGAAUGCGGCAAGAG
UUUUAGCACCCAUCUGGAUCUGAUCCGUCAUCAGCGCACCCACACCGGUGAAAAACCAACCGGCAAGAAAACCAGUGCUAGCG
GCAGCGGCGGCGGCAGCGGCGGCAUCUUCAAGCCCGAGGAGCUGCGGCAGGCCCUGAUGCCCACCCUGGAGGCCCUGUACCGG
CAGGACCCCGAGAGCCUGCCCUUCCGGCAGCCCGUGGACCCCCAGCUGCUGGGCAUCCCCGACUACUUCGACAUCGUGAAAUC
CCCCAUGGACCUGAGCACCAUCAAGCGGAAGCUGGACACCGGCCAGUACCAGGAGCCCUGGCAGUACGUGGACGACAUCUGGC
UGAUGUUCAACAACGCCUGGCUGUACAACCGGAAAACCAGCCGGGUGUACAAGUACUGCAGCAAGCUGAGCGAGGUGUUCGAG
CAGGAGAUCGACCCCGUGAUGCAGAGCCUGGGCUACUGCUGCGGCCGGAAGCUGGAGUUCAGCCCCCAGACCCUGUGCUGCUA
CGGCAAGCAGCUGUGCACCAUCCCCCGGGACGCCACCUACUACAGCUACCAGAACCGGUACCACUUCUGCGAGAAGUGCUUCA
ACGAGAUCCAGGGCGAGAGCGUGAGCCUGGGCGACGACCCCAGCCAGCCCCAGACCACCAUCAACAAGGAGCAGUUCAGCAAG
CGGAAGAACGACACCCUGGACCCCGAGCUGUUCGUGGAGUGCACCGAGUGCGGCCGGAAGAUGCACCAGAUCUGCGUGCUGCA
CCACGAGAUCAUCUGGCCCGCCGGCUUCGUGUGCGACGGCUGCCUGAAGAAAUCCGCCCGGACCCGGAAGGAGAACAAGUUCA
GCGCCAAGCGGCUGCCCAGCACCCGGCUGGGCACCUUCCUGGAGAACCGGGUGAACGACUUCCUGCGGCGGCAGAACCACCCC
GAGAGCGGCGAGGUGACCGUGCGGGUGGUGCACGCCAGCGACAAGACCGUGGAGGUGAAGCCCGGCAUGAAGGCCCGGUUCGU
GGACAGCGGCGAGAUGGCCGAGAGCUUCCCCUACCGGACCAAGGCCCUGUUCGCCUUCGAGGAGAUCGACGGCGUGGACCUGU
GCUUCUUCGGCAUGCACGUGCAGGAGUACGGCAGCGACUGCCCCCCCCCCAACCAGCGGCGGGUGUACAUCAGCUACCUGGAC
AGCGUGCACUUCUUCCGGCCCAAGUGCCUGCGGACCGCCGUGUACCACGAGAUCCUGAUCGGCUACCUGGAGUACGUGAAGAA
GCUGGGCUACACCACCGGCCACAUCUGGGCCUGCCCCCCCAGCGAGGGCGACGACUACAUCUUCCACUGCCACCCCCCCGACC
AGAAGAUCCCCAAGCCCAAGCGGCUGCAGGAGUGGUACAAGAAGAUGCUGGACAAGGCCGUGAGCGAGCGGAUCGUGCACGAC
UACAAGGACAUCUUCAAGCAGGCCACCGAGGACCGGCUGACCAGCGCCAAGGAGCUGCCCUACUUCGAGGGCGACUUCUGGCC
CAACGUGCUGGAGGAGAGCAUCAAGGAGCUGGAGCAGGAGGAGGAGGAGCGGAAGCGGGAGGAGAACACCAGCAACGAGAGCA
CCGACGUGACCAAGGGCGACAGCAAGAACGCCAAGAAGAAGAACAACAAGAAAACCAGCAAGAACAAGAGCAGCCUGAGCCGG
GGCAACAAGAAGAAGCCCGGCAUGCCCAACGUGAGCAACGACCUGAGCCAGAAGCUGUACGCCACCAUGGAGAAGCACAAGGA
GGUGUUCUUCGUGAUCCGGCUGAUCGCCGGCCCCGCCGCCAACAGCCUGCCCCCCAUCGUGGACCCCGACCCCCUGAUCCCCU
GCGACCUGAUGGACGGCCGGGACGCCUUCCUGACCCUGGCCCGGGACAAGCACCUGGAGUUCAGCAGCCUGCGGCGGGCCCAG
UGGAGCACCAUGUGCAUGCUGGUGGAGCUGCACACCCAGAGCCAGGACAGCGGCGGCAAGCGGCCCGCCGCCACCAAGAAGGC
CGGCCAGGCCAAGAAGAAGAAGGGCAGCUACCCCUACGACGUGCCCGACUACGCCGCCACCAACUUUUCUCUGCUGAAGCAAG
CCGGAGAUGUGGAGGAGAAUCCCGGCCCUACCUCCGCCGGAAAACUGGGCUCCGGCGAAGGCAGAGGAAGCCUCCUCACAUGC
GGCGACGUGGAGGAGAACCCCGGCCCUCUGGAGGGAUCCUCAGGCUCACUGGAACCGGGGGAAAAACCCUACAAGUGCCCGGA
AUGCGGCAAGAGCUUCUCGACCUCCGGGAACCUGACCGAGCACCAGCGCACCCACACCGGAGAGAAACCGUACAAGUGCCCCG
AAUGCGGGAAAUCGUUCUCAGACUCGGGAAACCUCAGGGUGCACCAGCGGACCCACACGGGGGAAAAGCCGUACAAAUGCCCG
GAGUGCGGGAAGUCAUUCUCCCACAAGAACGCGCUGCAGAACCACCAAAGAACCCACACCGGCGAAAAACCGUACAAGUGCCC
CGAGUGCGGAAAGUCCUUCUCCCGCAACGACACCCUCACCGAACACCAACGCACCCACACCGGAGAAAAGCCCUACAAGUGCC
CGGAAUGCGGAAAGAGCUUCAGCCAGAGGGCCCACCUGGAAAGACACCAGAGAACCCACACCGGCGAAAAGCCGUACAAAUGC
CCGGAGUGCGGGAAGUCCUUCAGCCGGUCAGACAAGCUGGUCCGCCACCAAAGGACCCACACAGGAGAAAAGCCCUACAAGUG
CCCGGAAUGCGGAAAAUCGUUCAGCGACCCCGGACACCUGGUCCGGCACCAGAGGACCCACACCGGGGAGAAGCCGACCGGCA
AAAAGACCUCAGCGAGCGGAUCAGGAGGAGGAUCAGGGGGGGACGCACUGGACGACUUCGACCUGGACAUGCUGGGAUCAGAC
GCACUGGACGACUUCGACCUAGACAUGCUCGGAUCGGACGCACUCGACGACUUCGACCUCGACAUGCUAGGAUCAGACGCACU
AGACGACUUCGACCUCGACAUGCUGUCGGGAGGACCGAAGAAAAAGCGGAAGGUCGGAUCACAGUACCUCCCGGACACCGACG
ACAGGCACAGAAUCGAAGAAAAACGCAAGCGCACCUACGAAACCUUCAAGAGCAUCAUGAAAAAGUCGCCGUUCUCAGGACCG
ACCGACCCCAGACCGCCACCGAGGAGAAUAGCCGUCCCGAGCCGAUCCUCCGCAUCCGUGCCGAAACCGGCACCGCAACCCUA
CCCGUUCACCUCGUCCCUGUCGACCAUCAACUACGACGAGUUCCCCACCAUGGUGUUCCCCUCCGGGCAGAUCUCACAGGCCU
CGGCACUGGCACCCGCACCACCGCAAGUGCUGCCCCAAGCACCGGCACCCGCACCGGCGCCCGCAAUGGUGUCAGCGCUGGCA
CAGGCACCAGCACCGGUGCCAGUCCUCGCACCGGGACCGCCGCAAGCAGUGGCACCGCCGGCACCGAAACCGACCCAGGCCGG
AGAAGGGACCCUGUCCGAGGCGCUGCUGCAACUCCAGUUCGACGACGAGGACCUGGGAGCACUCCUGGGAAACUCCACCGACC
CGGCAGUGUUCACCGACCUCGCAUCGGUGGACAACUCCGAGUUCCAACAGCUCCUGAACCAGGGGAUACCGGUGGCACCGCAC
ACCACCGAACCGAUGCUGAUGGAAUACCCGGAAGCCAUCACCCGGCUCGUGACCGGAGCGCAAAGACCGCCCGACCCCGCGCC
CGCACCGCUGGGAGCACCGGGACUACCGAACGGGCUGCUCUCAGGGGACGAGGACUUCUCCAGCAUCGCAGACAUGGACUUCU
CCGCCCUGCUGGGAUCAGGAUCAGGAUCACGCGACUCCCGGGAAGGAAUGUUCCUGCCGAAGCCGGAAGCAGGCAGCGCAAUC
UCCGACGUGUUCGAAGGCCGCGAGGUCUGCCAGCCCAAGCGCCUGCGACCGUUCCACCCGCCGGGAUCACCGUGGGCAAACCG
CCCGCUACCGGCAUCACUGGCACCGACACCCACCGGACCGGUGCACGAACCGGUCGGGUCACUGACCCCCGCACCGGUCCCGC
AACCGCUAGACCCGGCACCGGCAGUGACCCCGGAAGCAUCGCACCUCCUGGAGGACCCGGACGAGGAAACCUCACAGGCAGUG
AAGGCCCUGCGGGAGAUGGCCGACACCGUGAUACCGCAGAAGGAGGAGGCCGCCAUCUGCGGACAAAUGGACCUGUCACACCC
GCCCCCGAGAGGACACCUGGACGAACUCACCACCACCCUGGAGAGCAUGACCGAGGACCUGAACCUGGACUCACCGCUGACCC
CGGAGCUGAACGAAAUCCUGGACACCUUCCUGAACGACGAGUGCCUGCUGCACGCAAUGCACAUCAGCACCGGGCUGUCGAUC
UUCGACACCAGCCUGUUCUCCGGAGGGAAAAGACCCGCCGCCACCAAGAAAGCGGGCCAAGCAAAGAAAAAGAAGGGAUCGUA
CCCCUACGACGUGCCGGACUACGCAUGAGCGGCCGCUUAAUUAAGCUGCCUUCUGCGGGGCUUGCCUUCUGGCCAUGCCCUUC
UUCUCUCCCUUGCACCUGUACCUCUUGGUCUUUGAAUAAAGCCUGAGUAGGAAGUCUAGAAAAAAAAAAAAAAAAAAAAAAAA
AAAAAAAAAAAAAAAAAAAAAAAAAAAAAAAAAAAAAAAAAAAAAAAAAAAAAAAA
>Nucleotide Seqeunce of DNA binding domain of ZF7-p300-tPT2a-ZF5.3-VPR
SEQ ID NO.: 242
CUGGAACCGGGCGAGAAGCCAUACAAGUGCCCAGAGUGCGGCAAAAGCUUCAGCCGCAGCGACCAUCUGACCAAUCACCAACG
CACCCAUACCGGUGAGAAGCCGUACAAAUGCCCAGAGUGCGGUAAGAGCUUUAGUACCAGUGGCAGUCUGGUUCGUCAUCAGC
GCACGCACACGGGCGAAAAACCAUACAAAUGCCCGGAGUGCGGCAAAAGCUUUAGCCAAGCCGGUCAUCUGGCGAGCCAUCAA
CGUACGCACACCGGCGAGAAGCCGUAUAAAUGUCCGGAGUGCGGUAAGAGCUUUAGCCGUAGCGAUAAACUGACCGAACACCA
ACGUACGCAUACGGGCGAGAAACCAUAUAAAUGUCCAGAGUGUGGCAAGAGUUUCAGCACCAGCGGCAAUCUGACCGAGCAUC
AACGUACCCAUACCGGUGAAAAGCCAUAUAAAUGUCCAGAAUGCGGUAAGAGUUUUAGUCAGAGCAGUAAUCUGGUGCGCCAU
CAGCGUACCCACACGGGUGAGAAACCAUAUAAGUGUCCGGAAUGCGGCAAGAGUUUUAGCACCCAUCUGGAUCUGAUCCGUCA
UCAGCGCACCCACACCGGUGAAAAACCAACCGGCAAGAAAACCAGU
>Nucleotide Seqeunce of DNA binding domain of ZF7-p300-tPT2a-ZF5.3-VPR
SEQ ID NO.: 243
CTGGAACCGGGGGAAAAACCCTACAAGTGCCCGGAATGCGGCAAGAGCTTCTCGACCTCCGGGAACCTGACCGAGCACCAGCG
CACCCACACCGGAGAGAAACCGTACAAGTGCCCCGAATGCGGGAAATCGTTCTCAGACTCGGGAAACCTCAGGGTGCACCAGC
GGACCCACACGGGGGAAAAGCCGTACAAATGCCCGGAGTGCGGGAAGTCATTCTCCCACAAGAACGCGCTGCAGAACCACCAA
AGAACCCACACCGGCGAAAAACCGTACAAGTGCCCCGAGTGCGGAAAGTCCTTCTCCCGCAACGACACCCTCACCGAACACCA
ACGCACCCACACCGGAGAAAAGCCCTACAAGTGCCCGGAATGCGGAAAGAGCTTCAGCCAGAGGGCCCACCTGGAAAGACACC
AGAGAACCCACACCGGCGAAAAGCCGTACAAATGCCCGGAGTGCGGGAAGTCCTTCAGCCGGTCAGACAAGCTGGTCCGCCAC
CAAAGGACCCACACAGGAGAAAAGCCCTACAAGTGCCCGGAATGCGGAAAATCGTTCAGCGACCCCGGACACCTGGTCCGGCA
CCAGAGGACCCACACCGGGGAGAAGCCGACCGGCAAAAAGACCTCA
>TAL1-VPR protein
SEQ ID NO.: 184
MAPKKKRKVGIHGVPAAGSSGSHMVDLRTLGYSQQQQEKIKPKVRSTVAQHHEALVGHGFTHAHIVALSQHPAALGTVAVKYQ
DMIAALPEATHEAIVGVGKRGAGARALEALLTVAGELRGPPLQLDTGQLLKIAKRGGVTAVEAVHAWRNALTGAPLNLTPEQV
VAIASHDGGKQALETVQRLLPVLCQAHGLTPEQVVAIASNNGGKQALETVQRLLPVLCQAHGLTPEQVVAIASNNGGKQALET
VQRLLPVLCQAHGLTPEQVVAIASHDGGKQALETVQRLLPVLCQAHGLTPEQVVAIASNNGGKQALETVQRLLPVLCQAHGLT
PEQVVAIASNGGGKQALETVQRLLPVLCQAHGLTPEQVVAIASNNGGKQALETVQRLLPVLCQAHGLTPEQVVAIASNNGGKQ
ALETVQRLLPVLCQAHGLTPEQVVAIASNIGGKQALETVQRLLPVLCQAHGLTPEQVVAIASNNGGKQALETVQRLLPVLCQA
HGLTPEQVVAIASNNGGKQALETVQRLLPVLCQAHGLTPEQVVAIASHDGGKQALETVQRLLPVLCQAHGLTPEQVVAIASNI
GGKQALETVQRLLPVLCQAHGLTPEQVVAIASNNGGKQALETVQRLLPVLCQAHGLTPEQVVAIASNNGGKQALETVQRLLPV
LCQAHGLTPEQVVAIASNNGGKQALETVQRLLPVLCQAHGLTPEQVVAIASNIGGKQALETVQRLLPVLCQAHGLTPEQVVAI
ASNNGGRPALESIVAQLSRPDPALAALTNDHLVALACLGGRPALDAVKKGLPHAPALIKRTNRRIPERTSHRVASGSGGGSGG
DALDDFDLDMLGSDALDDFDLDMLGSDALDDFDLDMLGSDALDDFDLDMLSGGPKKKRKVGSQYLPDTDDRHRIEEKRKRTYE
TFKSIMKKSPFSGPTDPRPPPRRIAVPSRSSASVPKPAPQPYPFTSSLSTINYDEFPTMVFPSGQISQASALAPAPPQVLPQA
PAPAPAPAMVSALAQAPAPVPVLAPGPPQAVAPPAPKPTQAGEGTLSEALLQLQFDDEDLGALLGNSTDPAVFTDLASVDNSE
FQQLLNQGIPVAPHTTEPMLMEYPEAITRLVTGAQRPPDPAPAPLGAPGLPNGLLSGDEDFSSIADMDFSALLGSGSGSRDSR
EGMFLPKPEAGSAISDVFEGREVCQPKRLRPFHPPGSPWANRPLPASLAPTPTGPVHEPVGSLTPAPVPQPLDPAPAVTPEAS
HLLEDPDEETSQAVKALREMADTVIPQKEEAAICGQMDLSHPPPRGHLDELTTTLESMTEDLNLDSPLTPELNEILDTFLNDE
CLLHAMHISTGLSIFDTSLFSGGKRPAATKKAGQAKKKKGSYPYDVPDYA*
>TAL1-VPR mRNA
SEQ ID NO.: 185
AGGAAATAAGAGAGAAAAGAAGAGTAAGAAGAAATATAAGAGCCACCATGGCCCCCAAGAAGAAGCGGAAGGTGGGCATCCAC
GGCGTGCCCGCCGCCGGCAGCAGCGGATCCCATATGGTTGATCTGCGTACCCTGGGTTATAGCCAGCAGCAGCAAGAAAAAAT
CAAACCGAAAGTTCGTAGCACCGTTGCACAGCATCATGAAGCACTGGTTGGTCATGGTTTTACCCATGCACATATTGTTGCAC
TGAGCCAGCATCCGGCAGCACTGGGCACCGTTGCAGTTAAATATCAGGATATGATTGCAGCACTGCCGGAAGCAACCCATGAA
GCAATTGTTGGTGTTGGTAAACGCGGAGCTGGTGCACGTGCCCTGGAAGCACTGCTGACCGTTGCCGGTGAACTGCGTGGTCC
GCCTCTGCAGCTGGATACCGGTCAGCTGCTGAAAATTGCAAAACGTGGTGGTGTTACCGCAGTTGAAGCAGTTCATGCATGGC
GTAATGCACTGACCGGTGCACCGCTGAATCTGACACCGGAACAGGTTGTTGCAATTGCCAGCCATGATGGTGGCAAACAGGCA
CTGGAAACCGTTCAGCGTCTGCTGCCGGTTCTGTGTCAGGCACATGGTCTGACCCCTGAACAGGTGGTGGCCATTGCAAGCAA
TAATGGCGGTAAACAAGCCCTGGAAACAGTGCAGCGCCTGTTACCGGTGCTGTGCCAGGCCCATGGCTTAACTCCGGAACAGG
TGGTAGCGATCGCATCAAACAATGGAGGTAAACAGGCCTTAGAAACCGTACAGCGCTTACTGCCGGTGTTATGCCAGGCGCAC
GGCCTGACGCCAGAACAGGTAGTGGCAATCGCCTCACATGACGGTGGAAAACAGGCGTTAGAGACAGTCCAGCGCCTGCTGCC
TGTATTATGTCAAGCCCATGGCCTGACCCCAGAGCAAGTTGTTGCGATTGCAAGTAATAATGGGGGTAAACAGGCACTTGAGA
CAGTTCAACGTTTACTGCCTGTACTGTGCCAAGCTCACGGTCTGACTCCGGAACAAGTCGTCGCGATTGCGAGTAATGGTGGT
GGCAAACAAGCATTAGAAACGGTGCAACGCCTGCTGCCAGTTCTTTGCCAGGCTCACGGTTTAACCCCTGAGCAGGTTGTAGC
TATTGCGAGTAACAATGGTGGTAAGCAGGCGTTGGAAACTGTGCAAAGACTGCTGCCCGTGTTGTGCCAAGCACATGGTTTAA
CCCCAGAACAAGTCGTAGCAATCGCAAGCAATAATGGTGGCAAGCAAGCGCTTGAAACAGTACAGCGTTTATTACCGGTACTT
TGTCAGGCCCACGGTCTTACACCAGAACAAGTTGTGGCCATAGCCAGTAACATTGGCGGAAAGCAGGCTCTGGAAACGGTACA
ACGTCTGTTACCTGTTCTGTGTCAAGCGCACGGATTAACACCTGAACAAGTAGTTGCCATTGCGTCAAATAATGGAGGCAAGC
AGGCCTTGGAGACAGTGCAGAGATTACTGCCAGTGTTGTGTCAGGCTCATGGCCTTACACCCGAGCAGGTCGTGGCAATTGCA
TCTAACAATGGCGGTAAGCAAGCTTTAGAGACTGTTCAGAGACTGCTTCCTGTCCTGTGCCAGGCACACGGACTTACGCCTGA
GCAAGTGGTTGCAATCGCCTCTCATGATGGTGGTAAGCAAGCACTGGAAACTGTCCAACGCTTACTTCCGGTGCTTTGTCAAG
CACACGGCTTAACGCCAGAGCAGGTCGTCGCCATAGCCAGCAATATAGGTGGTAAACAGGCCCTTGAAACGGTCCAAAGACTT
CTGCCGGTCCTTTGCCAAGCGCATGGGCTGACACCTGAGCAGGTAGTCGCGATTGCCTCAAATAATGGTGGGAAGCAGGCATT
AGAAACAGTTCAAAGATTATTACCAGTCCTGTGTCAGGCGCATGGGTTAACCCCAGAGCAGGTAGTTGCAATAGCATCCAACA
ATGGCGGAAAACAAGCGTTGGAAACGGTTCAGCGGTTATTGCCTGTTTTGTGCCAGGCGCATGGTTTGACACCCGAGCAAGTG
GTAGCCATAGCCTCAAATAATGGGGGTAAACAAGCTTTGGAGACAGTACAACGGCTGCTTCCAGTTTTATGTCAGGCCCATGG
ATTGACGCCTGAACAAGTTGTCGCTATCGCAAGTAATATCGGTGGTAAACAAGCGCTTGAAACCGTTCAACGCCTTCTGCCTG
TGCTTTGTCAGGCACATGGATTAACACCCGAACAGGTTGTCGCGATAGCTTCAAACAATGGTGGTCGTCCGGCACTGGAAAGC
ATTGTTGCACAGCTGAGCCGTCCTGATCCGGCACTGGCAGCACTGACCAATGATCATCTGGTTGCACTGGCATGTCTGGGTGG
TCGCCCTGCCCTGGATGCAGTTAAAAAAGGTCTGCCGCATGCACCGGCACTGATTAAACGTACCAATCGTCGTATTCCGGAAC
GTACCAGCCATCGTGTTGCTAGCGGCAGCGGCGGCGGCAGCGGCGGCGACGCCCTGGACGACTTCGACCTGGACATGCTGGGC
AGCGACGCCCTGGACGACTTCGACCTGGACATGCTGGGCAGCGACGCCCTGGACGACTTCGACCTGGACATGCTGGGCAGCGA
CGCCCTGGACGACTTCGACCTGGACATGCTGAGCGGCGGCCCCAAGAAGAAGCGGAAGGTGGGCAGCCAGTACCTGCCCGACA
CCGACGACCGGCACCGGATCGAGGAGAAGCGGAAGCGGACCTACGAGACCTTCAAGAGCATCATGAAGAAATCCCCCTTCAGC
GGCCCCACCGACCCCCGGCCCCCCCCCCGGCGGATCGCCGTGCCCAGCCGGAGCAGCGCCAGCGTGCCCAAGCCCGCCCCCCA
GCCCTACCCCTTCACCAGCAGCCTGAGCACCATCAACTACGACGAGTTCCCCACCATGGTGTTCCCCAGCGGCCAGATCAGCC
AGGCCAGCGCCCTGGCCCCCGCCCCCCCCCAGGTGCTGCCCCAGGCCCCCGCCCCCGCCCCCGCCCCCGCCATGGTGAGCGCC
CTGGCCCAGGCCCCCGCCCCCGTGCCCGTGCTGGCCCCCGGCCCCCCCCAGGCCGTGGCCCCCCCCGCCCCCAAGCCCACCCA
GGCCGGCGAGGGCACCCTGAGCGAGGCCCTGCTGCAGCTGCAGTTCGACGACGAGGACCTGGGCGCCCTGCTGGGCAACAGCA
CCGACCCCGCCGTGTTCACCGACCTGGCCAGCGTGGACAACAGCGAGTTCCAGCAGCTGCTGAACCAGGGCATCCCCGTGGCC
CCCCACACCACCGAGCCCATGCTGATGGAGTACCCCGAGGCCATCACCCGGCTGGTGACCGGCGCCCAGCGGCCCCCCGACCC
CGCCCCCGCCCCCCTGGGCGCCCCCGGCCTGCCCAACGGCCTGCTGAGCGGCGACGAGGACTTCAGCAGCATCGCCGACATGG
ACTTCAGCGCCCTGCTGGGCAGCGGCAGCGGCAGCCGGGACAGCCGGGAGGGCATGTTCCTGCCCAAGCCCGAGGCCGGCAGC
GCCATCAGCGACGTGTTCGAGGGCCGGGAGGTGTGCCAGCCCAAGCGGCTCCGGCCCTTCCACCCCCCCGGCAGCCCCTGGGC
CAACCGGCCCCTGCCCGCCAGCCTGGCCCCCACCCCCACCGGCCCCGTGCACGAGCCCGTGGGCAGCCTGACCCCCGCCCCCG
TGCCCCAGCCCCTGGACCCCGCCCCCGCCGTGACCCCCGAGGCCAGCCACCTGCTGGAGGACCCCGACGAGGAGACCAGCCAG
GCCGTGAAGGCCCTGCGGGAGATGGCCGACACCGTGATCCCCCAGAAGGAGGAGGCCGCCATCTGCGGCCAGATGGACCTGAG
CCACCCCCCCCCCCGGGGCCACCTGGACGAGCTGACCACCACCCTGGAGAGCATGACCGAGGACCTGAACCTGGACAGCCCCC
TGACCCCCGAGCTGAACGAGATCCTGGACACCTTCCTGAACGACGAGTGCCTGCTGCACGCCATGCACATCAGCACCGGCCTG
AGCATCTTCGACACCAGCCTGTTCAGCGGCGGCAAGCGGCCCGCCGCCACCAAGAAGGCCGGCCAGGCCAAGAAGAAGAAGGG
CAGCTACCCCTACGACGTGCCCGACTACGCCTGAGCGGCCGCTTAATTAAGCTGCCTTCTGCGGGGCTTGCCTTCTGGCCATG
CCCTTCTTCTCTCCCTTGCACCTGTACCTCTTGGTCTTTGAATAAAGCCTGAGTAGGAAGTCTAGAAAAAAAAAAAAAAAAAA
AAAAAAAAAAAAAAAAAAAAAAAAAAAAAAAAAAAAAAAAAAAAAAAAAAAAAAAAAAAAAA
>TAL1 amino acid sequence
SEQ ID NO.: 186
GSHMVDLRTLGYSQQQQEKIKPKVRSTVAQHHEALVGHGFTHAHIVALSQHPAALGTVAVKYQDMIAALPEATHEAIVGVGKR
GAGARALEALLTVAGELRGPPLQLDTGQLLKIAKRGGVTAVEAVHAWRNALTGAPLULTPEQVVAIASHDGGKQALETVQRLL
PVLCQAHGLTPEQVVAIASUNGGKQALETVQRLLPVLCQAHGLTPEQVVAIASUNGGKQALETVQRLLPVLCQAHGLTPEQVV
AIASHDGGKQALETVQRLLPVLCQAHGLTPEQVVAIASUNGGKQALETVQRLLPVLCQAHGLTPEQVVAIASUGGGKQALETV
QRLLPVLCQAHGLTPEQVVAIASUNGGKQALETVQRLLPVLCQAHGLTPEQVVAIASUNGGKQALETVQRLLPVLCQAHGLTP
EQVVAIASNIGGKQALETVQRLLPVLCQAHGLTPEQVVAIASUNGGKQALETVQRLLPVLCQAHGLTPEQVVAIASUNGGKQA
LETVQRLLPVLCQAHGLTPEQVVAIASHDGGKQALETVQRLLPVLCQAHGLTPEQVVAIASNIGGKQALETVQRLLPVLCQAH
GLTPEQVVAIASUNGGKQALETVQRLLPVLCQAHGLTPEQVVAIASUNGGKQALETVQRLLPVLCQAHGLTPEQVVAIASNNG
GKQALETVQRLLPVLCQAHGLTPEQVVAIASNIGGKQALETVQRLLPVLCQAHGLTPEQVVAIASUNGGRPALESIVAQLSRP
DPALAALTNDHLVALACLGGRPALDAVKKGLPHAPALIKRTURRIPERTSHRVAS
>TAL1 mRNA
SEQ ID NO.: 244
GGAUCCCAUAUGGUUGAUCUGCGUACCCUGGGUUAUAGCCAGCAGCAGCAAGAAAAAAUCAAACCGAAAGUUCGUAGCACCGU
UGCACAGCAUCAUGAAGCACUGGUUGGUCAUGGUUUUACCCAUGCACAUAUUGUUGCACUGAGCCAGCAUCCGGCAGCACUGG
GCACCGUUGCAGUUAAAUAUCAGGAUAUGAUUGCAGCACUGCCGGAAGCAACCCAUGAAGCAAUUGUUGGUGUUGGUAAACGC
GGAGCUGGUGCACGUGCCCUGGAAGCACUGCUGACCGUUGCCGGUGAACUGCGUGGUCCGCCUCUGCAGCUGGAUACCGGUCA
GCUGCUGAAAAUUGCAAAACGUGGUGGUGUUACCGCAGUUGAAGCAGUUCAUGCAUGGCGUAAUGCACUGACCGGUGCACCGC
UGAAUCUGACACCGGAACAGGUUGUUGCAAUUGCCAGCCAUGAUGGUGGCAAACAGGCACUGGAAACCGUUCAGCGUCUGCUG
CCGGUUCUGUGUCAGGCACAUGGUCUGACCCCUGAACAGGUGGUGGCCAUUGCAAGCAAUAAUGGCGGUAAACAAGCCCUGGA
AACAGUGCAGCGCCUGUUACCGGUGCUGUGCCAGGCCCAUGGCUUAACUCCGGAACAGGUGGUAGCGAUCGCAUCAAACAAUG
GAGGUAAACAGGCCUUAGAAACCGUACAGCGCUUACUGCCGGUGUUAUGCCAGGCGCACGGCCUGACGCCAGAACAGGUAGUG
GCAAUCGCCUCACAUGACGGUGGAAAACAGGCGUUAGAGACAGUCCAGCGCCUGCUGCCUGUAUUAUGUCAAGCCCAUGGCCU
GACCCCAGAGCAAGUUGUUGCGAUUGCAAGUAAUAAUGGGGGUAAACAGGCACUUGAGACAGUUCAACGUUUACUGCCUGUAC
UGUGCCAAGCUCACGGUCUGACUCCGGAACAAGUCGUCGCGAUUGCGAGUAAUGGUGGUGGCAAACAAGCAUUAGAAACGGUG
CAACGCCUGCUGCCAGUUCUUUGCCAGGCUCACGGUUUAACCCCUGAGCAGGUUGUAGCUAUUGCGAGUAACAAUGGUGGUAA
GCAGGCGUUGGAAACUGUGCAAAGACUGCUGCCCGUGUUGUGCCAAGCACAUGGUUUAACCCCAGAACAAGUCGUAGCAAUCG
CAAGCAAUAAUGGUGGCAAGCAAGCGCUUGAAACAGUACAGCGUUUAUUACCGGUACUUUGUCAGGCCCACGGUCUUACACCA
GAACAAGUUGUGGCCAUAGCCAGUAACAUUGGCGGAAAGCAGGCUCUGGAAACGGUACAACGUCUGUUACCUGUUCUGUGUCA
AGCGCACGGAUUAACACCUGAACAAGUAGUUGCCAUUGCGUCAAAUAAUGGAGGCAAGCAGGCCUUGGAGACAGUGCAGAGAU
UACUGCCAGUGUUGUGUCAGGCUCAUGGCCUUACACCCGAGCAGGUCGUGGCAAUUGCAUCUAACAAUGGCGGUAAGCAAGCU
UUAGAGACUGUUCAGAGACUGCUUCCUGUCCUGUGCCAGGCACACGGACUUACGCCUGAGCAAGUGGUUGCAAUCGCCUCUCA
UGAUGGUGGUAAGCAAGCACUGGAAACUGUCCAACGCUUACUUCCGGUGCUUUGUCAAGCACACGGCUUAACGCCAGAGCAGG
UCGUCGCCAUAGCCAGCAAUAUAGGUGGUAAACAGGCCCUUGAAACGGUCCAAAGACUUCUGCCGGUCCUUUGCCAAGCGCAU
GGGCUGACACCUGAGCAGGUAGUCGCGAUUGCCUCAAAUAAUGGUGGGAAGCAGGCAUUAGAAACAGUUCAAAGAUUAUUACC
AGUCCUGUGUCAGGCGCAUGGGUUAACCCCAGAGCAGGUAGUUGCAAUAGCAUCCAACAAUGGCGGAAAACAAGCGUUGGAAA
CGGUUCAGCGGUUAUUGCCUGUUUUGUGCCAGGCGCAUGGUUUGACACCCGAGCAAGUGGUAGCCAUAGCCUCAAAUAAUGGG
GGUAAACAAGCUUUGGAGACAGUACAACGGCUGCUUCCAGUUUUAUGUCAGGCCCAUGGAUUGACGCCUGAACAAGUUGUCGC
UAUCGCAAGUAAUAUCGGUGGUAAACAAGCGCUUGAAACCGUUCAACGCCUUCUGCCUGUGCUUUGUCAGGCACAUGGAUUAA
CACCCGAACAGGUUGUCGCGAUAGCUUCAAACAAUGGUGGUCGUCCGGCACUGGAAAGCAUUGUUGCACAGCUGAGCCGUCCU
GAUCCGGCACUGGCAGCACUGACCAAUGAUCAUCUGGUUGCACUGGCAUGUCUGGGUGGUCGCCCUGCCCUGGAUGCAGUUAA
AAAAGGUCUGCCGCAUGCACCGGCACUGAUUAAACGUACCAAUCGUCGUAUUCCGGAACGUACCAGCCAUCGUGUUGCUAGC
>TAL2-VPR protein
SEQ ID NO.: 187
MAPKKKRKVGIHGVPAAGSSGSHMVDLRTLGYSQQQQEKIKPKVRSTVAQHHEALVGHGFTHAHIVALSQHPAALGTVAVKYQ
DMIAALPEATHEAIVGVGKRGAGARALEALLTVAGELRGPPLQLDTGQLLKIAKRGGVTAVEAVHAWRNALTGAPLULTPEQV
VAIASUGGGKQALETVQRLLPVLCQAHGLTPEQVVAIASUGGGKQALETVQRLLPVLCQAHGLTPEQVVAIASHDGGKQALET
VQRLLPVLCQAHGLTPEQVVAIASUNGGKQALETVQRLLPVLCQAHGLTPEQVVAIASUNGGKQALETVQRLLPVLCQAHGLT
PEQVVAIASUNGGKQALETVQRLLPVLCQAHGLTPEQVVAIASUNGGKQALETVQRLLPVLCQAHGLTPEQVVAIASNGGGKQ
ALETVQRLLPVLCQAHGLTPEQVVAIASUNGGKQALETVQRLLPVLCQAHGLTPEQVVAIASUNGGKQALETVQRLLPVLCQA
HGLTPEQVVAIASUNGGKQALETVQRLLPVLCQAHGLTPEQVVAIASHDGGKQALETVQRLLPVLCQAHGLTPEQVVAIASNN
GGKQALETVQRLLPVLCQAHGLTPEQVVAIASHDGGKQALETVQRLLPVLCQAHGLTPEQVVAIASHDGGKQALETVQRLLPV
LCQAHGLTPEQVVAIASHDGGKQALETVQRLLPVLCQAHGLTPEQVVAIASNIGGKQALETVQRLLPVLCQAHGLTPEQVVAI
ASUNGGRPALESIVAQLSRPDPALAALTNDHLVALACLGGRPALDAVKKGLPHAPALIKRTNRRIPERTSHRVASGSGGGSGG
DALDDFDLDMLGSDALDDFDLDMLGSDALDDFDLDMLGSDALDDFDLDMLSGGPKKKRKVGSQYLPDTDDRHRIEEKRKRTYE
TFKSIMKKSPFSGPTDPRPPPRRIAVPSRSSASVPKPAPQPYPFTSSLSTINYDEFPTMVFPSGQISQASALAPAPPQVLPQA
PAPAPAPAMVSALAQAPAPVPVLAPGPPQAVAPPAPKPTQAGEGTLSEALLQLQFDDEDLGALLGNSTDPAVFTDLASVDNSE
FQQLLNQGIPVAPHTTEPMLMEYPEAITRLVTGAQRPPDPAPAPLGAPGLPNGLLSGDEDFSSIADMDFSALLGSGSGSRDSR
EGMFLPKPEAGSAISDVFEGREVCQPKRLRPFHPPGSPWANRPLPASLAPTPTGPVHEPVGSLTPAPVPQPLDPAPAVTPEAS
HLLEDPDEETSQAVKALREMADTVIPQKEEAAICGQMDLSHPPPRGHLDELTTTLESMTEDLNLDSPLTPELNEILDTFLNDE
CLLHAMHISTGLSIFDTSLFSGGKRPAATKKAGQAKKKKGSYPYDVPDYA*
>TAL2-VPR mRNA
SEQ ID NO.: 188
AGGAAATAAGAGAGAAAAGAAGAGTAAGAAGAAATATAAGAGCCACCATGGCCCCCAAGAAGAAGCGGAAGGTGGGCATCCAC
GGCGTGCCCGCCGCCGGCAGCAGCGGATCCCATATGGTTGATCTGCGTACCCTGGGTTATAGCCAGCAGCAGCAAGAAAAAAT
CAAACCGAAAGTTCGTAGCACCGTTGCACAGCATCATGAAGCACTGGTTGGTCATGGTTTTACCCATGCACATATTGTTGCAC
TGAGCCAGCATCCGGCAGCACTGGGCACCGTTGCAGTTAAATATCAGGATATGATTGCAGCACTGCCGGAAGCAACCCATGAA
GCAATTGTTGGTGTTGGTAAACGCGGAGCTGGTGCACGTGCCCTGGAAGCACTGCTGACCGTTGCCGGTGAACTGCGTGGTCC
GCCTCTGCAGCTGGATACCGGTCAGCTGCTGAAAATTGCAAAACGTGGTGGTGTTACCGCAGTTGAAGCAGTTCATGCATGGC
GTAATGCACTGACCGGTGCACCGCTGAATCTGACACCGGAACAGGTTGTTGCAATTGCCAGCAATGGTGGTGGCAAACAGGCA
CTGGAAACCGTTCAGCGTCTGCTGCCGGTTCTGTGTCAGGCACATGGTCTGACCCCTGAACAGGTGGTGGCCATTGCAAGCAA
TGGCGGCGGTAAACAAGCCCTGGAAACAGTGCAGCGCCTGTTACCGGTGCTGTGCCAGGCCCATGGCTTAACTCCGGAACAGG
TGGTAGCGATCGCATCACATGATGGAGGTAAACAGGCCTTAGAAACCGTACAGCGCTTACTGCCGGTGTTATGCCAGGCGCAC
GGCCTGACGCCAGAACAGGTAGTGGCAATCGCCTCAAATAATGGTGGAAAACAGGCGTTAGAGACAGTCCAGCGCCTGCTGCC
TGTATTATGTCAAGCCCATGGCCTGACCCCAGAGCAAGTTGTTGCGATTGCAAGTAACAATGGGGGTAAACAGGCACTTGAGA
CAGTTCAACGTTTACTGCCTGTACTGTGCCAAGCTCACGGTCTGACTCCGGAACAAGTCGTCGCGATTGCGAGTAATAATGGT
GGCAAACAAGCATTAGAAACGGTGCAACGCCTGCTGCCAGTTCTTTGCCAGGCTCACGGTTTAACCCCTGAGCAGGTTGTAGC
TATTGCGAGTAACAATGGTGGTAAGCAGGCGTTGGAAACTGTGCAAAGACTGCTGCCCGTGTTGTGCCAAGCACATGGTTTAA
CCCCAGAACAAGTCGTAGCAATCGCAAGCAATGGGGGTGGCAAGCAAGCGCTTGAAACAGTACAGCGTTTATTACCGGTACTT
TGTCAGGCCCACGGTCTTACACCAGAACAAGTTGTGGCCATAGCCAGTAATAATGGCGGAAAGCAGGCTCTGGAAACGGTACA
ACGTCTGTTACCTGTTCTGTGTCAAGCGCACGGATTAACACCTGAACAAGTAGTTGCCATTGCGTCAAACAATGGAGGCAAGC
AGGCCTTGGAGACAGTGCAGAGATTACTGCCAGTGTTGTGTCAGGCTCATGGCCTTACACCCGAGCAGGTCGTGGCAATTGCA
TCTAATAATGGCGGTAAGCAAGCTTTAGAGACTGTTCAGAGACTGCTTCCTGTCCTGTGCCAGGCACACGGACTTACGCCTGA
GCAAGTGGTTGCAATCGCCTCTCATGATGGTGGTAAGCAAGCACTGGAAACTGTCCAACGCTTACTTCCGGTGCTTTGTCAAG
CACACGGCTTAACGCCAGAGCAGGTCGTCGCCATAGCCAGCAACAATGGTGGTAAACAGGCCCTTGAAACGGTCCAAAGACTT
CTGCCGGTCCTTTGCCAAGCGCATGGGCTGACACCTGAGCAGGTAGTCGCGATTGCCTCACATGACGGTGGGAAGCAGGCATT
AGAAACAGTTCAAAGATTATTACCAGTCCTGTGTCAGGCGCATGGGTTAACCCCAGAGCAGGTAGTTGCAATAGCATCCCATG
ATGGCGGAAAACAAGCGTTGGAAACGGTTCAGCGGTTATTGCCTGTTTTGTGCCAGGCGCATGGTTTGACACCCGAGCAAGTG
GTAGCCATAGCCTCACATGACGGGGGTAAACAAGCTTTGGAGACAGTACAACGGCTGCTTCCAGTTTTATGTCAGGCCCATGG
ATTGACGCCTGAACAAGTTGTCGCTATCGCAAGTAACATTGGTGGTAAACAAGCGCTTGAAACCGTTCAACGCCTTCTGCCTG
TGCTTTGTCAGGCACATGGATTAACACCCGAACAGGTTGTCGCGATAGCTTCAAACAATGGTGGTCGTCCGGCACTGGAAAGC
ATTGTTGCACAGCTGAGCCGTCCTGATCCGGCACTGGCAGCACTGACCAATGATCATCTGGTTGCACTGGCATGTCTGGGTGG
TCGCCCTGCCCTGGATGCAGTTAAAAAAGGTCTGCCGCATGCACCGGCACTGATTAAACGTACCAATCGTCGTATTCCGGAAC
GTACCAGCCATCGTGTTGCTAGCGGCAGCGGCGGCGGCAGCGGCGGCGACGCCCTGGACGACTTCGACCTGGACATGCTGGGC
AGCGACGCCCTGGACGACTTCGACCTGGACATGCTGGGCAGCGACGCCCTGGACGACTTCGACCTGGACATGCTGGGCAGCGA
CGCCCTGGACGACTTCGACCTGGACATGCTGAGCGGCGGCCCCAAGAAGAAGCGGAAGGTGGGCAGCCAGTACCTGCCCGACA
CCGACGACCGGCACCGGATCGAGGAGAAGCGGAAGCGGACCTACGAGACCTTCAAGAGCATCATGAAGAAATCCCCCTTCAGC
GGCCCCACCGACCCCCGGCCCCCCCCCCGGCGGATCGCCGTGCCCAGCCGGAGCAGCGCCAGCGTGCCCAAGCCCGCCCCCCA
GCCCTACCCCTTCACCAGCAGCCTGAGCACCATCAACTACGACGAGTTCCCCACCATGGTGTTCCCCAGCGGCCAGATCAGCC
AGGCCAGCGCCCTGGCCCCCGCCCCCCCCCAGGTGCTGCCCCAGGCCCCCGCCCCCGCCCCCGCCCCCGCCATGGTGAGCGCC
CTGGCCCAGGCCCCCGCCCCCGTGCCCGTGCTGGCCCCCGGCCCCCCCCAGGCCGTGGCCCCCCCCGCCCCCAAGCCCACCCA
GGCCGGCGAGGGCACCCTGAGCGAGGCCCTGCTGCAGCTGCAGTTCGACGACGAGGACCTGGGCGCCCTGCTGGGCAACAGCA
CCGACCCCGCCGTGTTCACCGACCTGGCCAGCGTGGACAACAGCGAGTTCCAGCAGCTGCTGAACCAGGGCATCCCCGTGGCC
CCCCACACCACCGAGCCCATGCTGATGGAGTACCCCGAGGCCATCACCCGGCTGGTGACCGGCGCCCAGCGGCCCCCCGACCC
CGCCCCCGCCCCCCTGGGCGCCCCCGGCCTGCCCAACGGCCTGCTGAGCGGCGACGAGGACTTCAGCAGCATCGCCGACATGG
ACTTCAGCGCCCTGCTGGGCAGCGGCAGCGGCAGCCGGGACAGCCGGGAGGGCATGTTCCTGCCCAAGCCCGAGGCCGGCAGC
GCCATCAGCGACGTGTTCGAGGGCCGGGAGGTGTGCCAGCCCAAGCGGCTCCGGCCCTTCCACCCCCCCGGCAGCCCCTGGGC
CAACCGGCCCCTGCCCGCCAGCCTGGCCCCCACCCCCACCGGCCCCGTGCACGAGCCCGTGGGCAGCCTGACCCCCGCCCCCG
TGCCCCAGCCCCTGGACCCCGCCCCCGCCGTGACCCCCGAGGCCAGCCACCTGCTGGAGGACCCCGACGAGGAGACCAGCCAG
GCCGTGAAGGCCCTGCGGGAGATGGCCGACACCGTGATCCCCCAGAAGGAGGAGGCCGCCATCTGCGGCCAGATGGACCTGAG
CCACCCCCCCCCCCGGGGCCACCTGGACGAGCTGACCACCACCCTGGAGAGCATGACCGAGGACCTGAACCTGGACAGCCCCC
TGACCCCCGAGCTGAACGAGATCCTGGACACCTTCCTGAACGACGAGTGCCTGCTGCACGCCATGCACATCAGCACCGGCCTG
AGCATCTTCGACACCAGCCTGTTCAGCGGCGGCAAGCGGCCCGCCGCCACCAAGAAGGCCGGCCAGGCCAAGAAGAAGAAGGG
CAGCTACCCCTACGACGTGCCCGACTACGCCTGAGCGGCCGCTTAATTAAGCTGCCTTCTGCGGGGCTTGCCTTCTGGCCATG
CCCTTCTTCTCTCCCTTGCACCTGTACCTCTTGGTCTTTGAATAAAGCCTGAGTAGGAAGTCTAGAAAAAAAAAAAAAAAAAA
AAAAAAAAAAAAAAAAAAAAAAAAAAAAAAAAAAAAAAAAAAAAAAAAAAAAAAAAAAAAAA
>TAL2 amino acid sequence
SEQ ID NO.: 189
GSHMVDLRTLGYSQQQQEKIKPKVRSTVAQHHEALVGHGFTHAHIVALSQHPAALGTVAVKYQDMIAALPEATHEAIVGVGKR
GAGARALEALLTVAGELRGPPLQLDTGQLLKIAKRGGVTAVEAVHAWRNALTGAPLNLTPEQVVAIASNGGGKQALETVQRLL
PVLCQAHGLTPEQVVAIASNGGGKQALETVQRLLPVLCQAHGLTPEQVVAIASHDGGKQALETVQRLLPVLCQAHGLTPEQVV
AIASNNGGKQALETVQRLLPVLCQAHGLTPEQVVAIASNNGGKQALETVQRLLPVLCQAHGLTPEQVVAIASNNGGKQALETV
QRLLPVLCQAHGLTPEQVVAIASNNGGKQALETVQRLLPVLCQAHGLTPEQVVAIASNGGGKQALETVQRLLPVLCQAHGLTP
EQVVAIASUNGGKQALETVQRLLPVLCQAHGLTPEQVVAIASUNGGKQALETVQRLLPVLCQAHGLTPEQVVAIASNNGGKQA
LETVQRLLPVLCQAHGLTPEQVVAIASHDGGKQALETVQRLLPVLCQAHGLTPEQVVAIASUNGGKQALETVQRLLPVLCQAH
GLTPEQVVAIASHDGGKQALETVQRLLPVLCQAHGLTPEQVVAIASHDGGKQALETVQRLLPVLCQAHGLTPEQVVAIASHDG
GKQALETVQRLLPVLCQAHGLTPEQVVAIASNIGGKQALETVQRLLPVLCQAHGLTPEQVVAIASUNGGRPALESIVAQLSRP
DPALAALTNDHLVALACLGGRPALDAVKKGLPHAPALIKRTURRIPERTSHRVAS
>TAL2 mRNA sequence
SEQ ID NO.: 245
GGAUCCCAUAUGGUUGAUCUGCGUACCCUGGGUUAUAGCCAGCAGCAGCAAGAAAAAAUCAAACCGAAAGUUCGUAGCACCGU
UGCACAGCAUCAUGAAGCACUGGUUGGUCAUGGUUUUACCCAUGCACAUAUUGUUGCACUGAGCCAGCAUCCGGCAGCACUGG
GCACCGUUGCAGUUAAAUAUCAGGAUAUGAUUGCAGCACUGCCGGAAGCAACCCAUGAAGCAAUUGUUGGUGUUGGUAAACGC
GGAGCUGGUGCACGUGCCCUGGAAGCACUGCUGACCGUUGCCGGUGAACUGCGUGGUCCGCCUCUGCAGCUGGAUACCGGUCA
GCUGCUGAAAAUUGCAAAACGUGGUGGUGUUACCGCAGUUGAAGCAGUUCAUGCAUGGCGUAAUGCACUGACCGGUGCACCGC
UGAAUCUGACACCGGAACAGGUUGUUGCAAUUGCCAGCAAUGGUGGUGGCAAACAGGCACUGGAAACCGUUCAGCGUCUGCUG
CCGGUUCUGUGUCAGGCACAUGGUCUGACCCCUGAACAGGUGGUGGCCAUUGCAAGCAAUGGCGGCGGUAAACAAGCCCUGGA
AACAGUGCAGCGCCUGUUACCGGUGCUGUGCCAGGCCCAUGGCUUAACUCCGGAACAGGUGGUAGCGAUCGCAUCACAUGAUG
GAGGUAAACAGGCCUUAGAAACCGUACAGCGCUUACUGCCGGUGUUAUGCCAGGCGCACGGCCUGACGCCAGAACAGGUAGUG
GCAAUCGCCUCAAAUAAUGGUGGAAAACAGGCGUUAGAGACAGUCCAGCGCCUGCUGCCUGUAUUAUGUCAAGCCCAUGGCCU
GACCCCAGAGCAAGUUGUUGCGAUUGCAAGUAACAAUGGGGGUAAACAGGCACUUGAGACAGUUCAACGUUUACUGCCUGUAC
UGUGCCAAGCUCACGGUCUGACUCCGGAACAAGUCGUCGCGAUUGCGAGUAAUAAUGGUGGCAAACAAGCAUUAGAAACGGUG
CAACGCCUGCUGCCAGUUCUUUGCCAGGCUCACGGUUUAACCCCUGAGCAGGUUGUAGCUAUUGCGAGUAACAAUGGUGGUAA
GCAGGCGUUGGAAACUGUGCAAAGACUGCUGCCCGUGUUGUGCCAAGCACAUGGUUUAACCCCAGAACAAGUCGUAGCAAUCG
CAAGCAAUGGGGGUGGCAAGCAAGCGCUUGAAACAGUACAGCGUUUAUUACCGGUACUUUGUCAGGCCCACGGUCUUACACCA
GAACAAGUUGUGGCCAUAGCCAGUAAUAAUGGCGGAAAGCAGGCUCUGGAAACGGUACAACGUCUGUUACCUGUUCUGUGUCA
AGCGCACGGAUUAACACCUGAACAAGUAGUUGCCAUUGCGUCAAACAAUGGAGGCAAGCAGGCCUUGGAGACAGUGCAGAGAU
UACUGCCAGUGUUGUGUCAGGCUCAUGGCCUUACACCCGAGCAGGUCGUGGCAAUUGCAUCUAAUAAUGGCGGUAAGCAAGCU
UUAGAGACUGUUCAGAGACUGCUUCCUGUCCUGUGCCAGGCACACGGACUUACGCCUGAGCAAGUGGUUGCAAUCGCCUCUCA
UGAUGGUGGUAAGCAAGCACUGGAAACUGUCCAACGCUUACUUCCGGUGCUUUGUCAAGCACACGGCUUAACGCCAGAGCAGG
UCGUCGCCAUAGCCAGCAACAAUGGUGGUAAACAGGCCCUUGAAACGGUCCAAAGACUUCUGCCGGUCCUUUGCCAAGCGCAU
GGGCUGACACCUGAGCAGGUAGUCGCGAUUGCCUCACAUGACGGUGGGAAGCAGGCAUUAGAAACAGUUCAAAGAUUAUUACC
AGUCCUGUGUCAGGCGCAUGGGUUAACCCCAGAGCAGGUAGUUGCAAUAGCAUCCCAUGAUGGCGGAAAACAAGCGUUGGAAA
CGGUUCAGCGGUUAUUGCCUGUUUUGUGCCAGGCGCAUGGUUUGACACCCGAGCAAGUGGUAGCCAUAGCCUCACAUGACGGG
GGUAAACAAGCUUUGGAGACAGUACAACGGCUGCUUCCAGUUUUAUGUCAGGCCCAUGGAUUGACGCCUGAACAAGUUGUCGC
UAUCGCAAGUAACAUUGGUGGUAAACAAGCGCUUGAAACCGUUCAACGCCUUCUGCCUGUGCUUUGUCAGGCACAUGGAUUAA
CACCCGAACAGGUUGUCGCGAUAGCUUCAAACAAUGGUGGUCGUCCGGCACUGGAAAGCAUUGUUGCACAGCUGAGCCGUCCU
GAUCCGGCACUGGCAGCACUGACCAAUGAUCAUCUGGUUGCACUGGCAUGUCUGGGUGGUCGCCCUGCCCUGGAUGCAGUUAA
AAAAGGUCUGCCGCAUGCACCGGCACUGAUUAAACGUACCAAUCGUCGUAUUCCGGAACGUACCAGCCAUCGUGUUGCUAGC
>TAL3-VPR protein
SEQ ID NO.: 190
MAPKKKRKVGIHGVPAAGSSGSHMVDLRTLGYSQQQQEKIKPKVRSTVAQHHEALVGHGFTHAHIVALSQHPAALGTVAVKYQ
DMIAALPEATHEAIVGVGKRGAGARALEALLTVAGELRGPPLQLDTGQLLKIAKRGGVTAVEAVHAWRNALTGAPLULTPEQV
VAIASUNGGKQALETVQRLLPVLCQAHGLTPEQVVAIASUGGGKQALETVQRLLPVLCQAHGLTPEQVVAIASNGGGKQALET
VQRLLPVLCQAHGLTPEQVVAIASUGGGKQALETVQRLLPVLCQAHGLTPEQVVAIASUNGGKQALETVQRLLPVLCQAHGLT
PEQVVAIASNIGGKQALETVQRLLPVLCQAHGLTPEQVVAIASNIGGKQALETVQRLLPVLCQAHGLTPEQVVAIASNIGGKQ
ALETVQRLLPVLCQAHGLTPEQVVAIASUNGGKQALETVQRLLPVLCQAHGLTPEQVVAIASUNGGKQALETVQRLLPVLCQA
HGLTPEQVVAIASNIGGKQALETVQRLLPVLCQAHGLTPEQVVAIASNIGGKQALETVQRLLPVLCQAHGLTPEQVVAIASNN
GGKQALETVQRLLPVLCQAHGLTPEQVVAIASUNGGKQALETVQRLLPVLCQAHGLTPEQVVAIASHDGGKQALETVQRLLPV
LCQAHGLTPEQVVAIASNIGGKQALETVQRLLPVLCQAHGLTPEQVVAIASUNGGKQALETVQRLLPVLCQAHGLTPEQVVAI
ASNIGGRPALESIVAQLSRPDPALAALTNDHLVALACLGGRPALDAVKKGLPHAPALIKRTURRIPERTSHRVASGSGGGSGG
DALDDFDLDMLGSDALDDFDLDMLGSDALDDFDLDMLGSDALDDFDLDMLSGGPKKKRKVGSQYLPDTDDRHRIEEKRKRTYE
TFKSIMKKSPFSGPTDPRPPPRRIAVPSRSSASVPKPAPQPYPFTSSLSTINYDEFPTMVFPSGQISQASALAPAPPQVLPQA
PAPAPAPAMVSALAQAPAPVPVLAPGPPQAVAPPAPKPTQAGEGTLSEALLQLQFDDEDLGALLGNSTDPAVFTDLASVDNSE
FQQLLNQGIPVAPHTTEPMLMEYPEAITRLVTGAQRPPDPAPAPLGAPGLPNGLLSGDEDFSSIADMDFSALLGSGSGSRDSR
EGMFLPKPEAGSAISDVFEGREVCQPKRLRPFHPPGSPWANRPLPASLAPTPTGPVHEPVGSLTPAPVPQPLDPAPAVTPEAS
HLLEDPDEETSQAVKALREMADTVIPQKEEAAICGQMDLSHPPPRGHLDELTTTLESMTEDLNLDSPLTPELNEILDTFLNDE
CLLHAMHISTGLSIFDTSLFSGGKRPAATKKAGQAKKKKGSYPYDVPDYA
>TAL3-VPR mRNA
SEQ ID NO.: 191
AGGAAATAAGAGAGAAAAGAAGAGTAAGAAGAAATATAAGAGCCACCATGGCCCCCAAGAAGAAGCGGAAGGTGGGCATCCAC
GGCGTGCCCGCCGCCGGCAGCAGCGGATCCCATATGGTTGATCTGCGTACCCTGGGTTATAGCCAGCAGCAGCAAGAAAAAAT
CAAACCGAAAGTTCGTAGCACCGTTGCACAGCATCATGAAGCACTGGTTGGTCATGGTTTTACCCATGCACATATTGTTGCAC
TGAGCCAGCATCCGGCAGCACTGGGCACCGTTGCAGTTAAATATCAGGATATGATTGCAGCACTGCCGGAAGCAACCCATGAA
GCAATTGTTGGTGTTGGTAAACGCGGAGCTGGTGCACGTGCCCTGGAAGCACTGCTGACCGTTGCCGGTGAACTGCGTGGTCC
GCCTCTGCAGCTGGATACCGGTCAGCTGCTGAAAATTGCAAAACGTGGTGGTGTTACCGCAGTTGAAGCAGTTCATGCATGGC
GTAATGCACTGACCGGTGCACCGCTGAATCTGACACCGGAACAGGTTGTTGCAATTGCCAGCAATAATGGTGGCAAACAGGCA
CTGGAAACCGTTCAGCGTCTGCTGCCGGTTCTGTGTCAGGCACATGGTCTGACCCCTGAACAGGTGGTGGCCATTGCAAGCAA
TGGTGGCGGTAAACAAGCCCTGGAAACAGTGCAGCGCCTGTTACCGGTGCTGTGCCAGGCCCATGGCTTAACTCCGGAACAGG
TGGTAGCGATCGCATCAAATGGCGGAGGTAAACAGGCCTTAGAAACCGTACAGCGCTTACTGCCGGTGTTATGCCAGGCGCAC
GGCCTGACGCCAGAACAGGTAGTGGCAATCGCCTCAAATGGGGGTGGAAAACAGGCGTTAGAGACAGTCCAGCGCCTGCTGCC
TGTATTATGTCAAGCCCATGGCCTGACCCCAGAGCAAGTTGTTGCGATTGCAAGTAACAATGGGGGTAAACAGGCACTTGAGA
CAGTTCAACGTTTACTGCCTGTACTGTGCCAAGCTCACGGTCTGACTCCGGAACAAGTCGTCGCGATTGCGAGTAACATTGGT
GGCAAACAAGCATTAGAAACGGTGCAACGCCTGCTGCCAGTTCTTTGCCAGGCTCACGGTTTAACCCCTGAGCAGGTTGTAGC
TATTGCGAGTAATATCGGTGGTAAGCAGGCGTTGGAAACTGTGCAAAGACTGCTGCCCGTGTTGTGCCAAGCACATGGTTTAA
CCCCAGAACAAGTCGTAGCAATCGCAAGCAATATAGGTGGCAAGCAAGCGCTTGAAACAGTACAGCGTTTATTACCGGTACTT
TGTCAGGCCCACGGTCTTACACCAGAACAAGTTGTGGCCATAGCCAGTAATAATGGCGGAAAGCAGGCTCTGGAAACGGTACA
ACGTCTGTTACCTGTTCTGTGTCAAGCGCACGGATTAACACCTGAACAAGTAGTTGCCATTGCGTCAAACAATGGAGGCAAGC
AGGCCTTGGAGACAGTGCAGAGATTACTGCCAGTGTTGTGTCAGGCTCATGGCCTTACACCCGAGCAGGTCGTGGCAATTGCA
TCTAACATTGGCGGTAAGCAAGCTTTAGAGACTGTTCAGAGACTGCTTCCTGTCCTGTGCCAGGCACACGGACTTACGCCTGA
GCAAGTGGTTGCAATCGCCTCTAATATCGGTGGTAAGCAAGCACTGGAAACTGTCCAACGCTTACTTCCGGTGCTTTGTCAAG
CACACGGCTTAACGCCAGAGCAGGTCGTCGCCATAGCCAGCAATAATGGTGGTAAACAGGCCCTTGAAACGGTCCAAAGACTT
CTGCCGGTCCTTTGCCAAGCGCATGGGCTGACACCTGAGCAGGTAGTCGCGATTGCCTCAAACAATGGTGGGAAGCAGGCATT
AGAAACAGTTCAAAGATTATTACCAGTCCTGTGTCAGGCGCATGGGTTAACCCCAGAGCAGGTAGTTGCAATAGCATCCCATG
ATGGCGGAAAACAAGCGTTGGAAACGGTTCAGCGGTTATTGCCTGTTTTGTGCCAGGCGCATGGTTTGACACCCGAGCAAGTG
GTAGCCATAGCCTCAAATATAGGGGGTAAACAAGCTTTGGAGACAGTACAACGGCTGCTTCCAGTTTTATGTCAGGCCCATGG
ATTGACGCCTGAACAAGTTGTCGCTATCGCAAGTAATAATGGTGGTAAACAAGCGCTTGAAACCGTTCAACGCCTTCTGCCTG
TGCTTTGTCAGGCACATGGATTAACACCCGAACAGGTTGTCGCGATAGCTTCAAACATTGGTGGTCGTCCGGCACTGGAAAGC
ATTGTTGCACAGCTGAGCCGTCCTGATCCGGCACTGGCAGCACTGACCAATGATCATCTGGTTGCACTGGCATGTCTGGGTGG
TCGCCCTGCCCTGGATGCAGTTAAAAAAGGTCTGCCGCATGCACCGGCACTGATTAAACGTACCAATCGTCGTATTCCGGAAC
GTACCAGCCATCGTGTTGCTAGCGGCAGCGGCGGCGGCAGCGGCGGCGACGCCCTGGACGACTTCGACCTGGACATGCTGGGC
AGCGACGCCCTGGACGACTTCGACCTGGACATGCTGGGCAGCGACGCCCTGGACGACTTCGACCTGGACATGCTGGGCAGCGA
CGCCCTGGACGACTTCGACCTGGACATGCTGAGCGGCGGCCCCAAGAAGAAGCGGAAGGTGGGCAGCCAGTACCTGCCCGACA
CCGACGACCGGCACCGGATCGAGGAGAAGCGGAAGCGGACCTACGAGACCTTCAAGAGCATCATGAAGAAATCCCCCTTCAGC
GGCCCCACCGACCCCCGGCCCCCCCCCCGGCGGATCGCCGTGCCCAGCCGGAGCAGCGCCAGCGTGCCCAAGCCCGCCCCCCA
GCCCTACCCCTTCACCAGCAGCCTGAGCACCATCAACTACGACGAGTTCCCCACCATGGTGTTCCCCAGCGGCCAGATCAGCC
AGGCCAGCGCCCTGGCCCCCGCCCCCCCCCAGGTGCTGCCCCAGGCCCCCGCCCCCGCCCCCGCCCCCGCCATGGTGAGCGCC
CTGGCCCAGGCCCCCGCCCCCGTGCCCGTGCTGGCCCCCGGCCCCCCCCAGGCCGTGGCCCCCCCCGCCCCCAAGCCCACCCA
GGCCGGCGAGGGCACCCTGAGCGAGGCCCTGCTGCAGCTGCAGTTCGACGACGAGGACCTGGGCGCCCTGCTGGGCAACAGCA
CCGACCCCGCCGTGTTCACCGACCTGGCCAGCGTGGACAACAGCGAGTTCCAGCAGCTGCTGAACCAGGGCATCCCCGTGGCC
CCCCACACCACCGAGCCCATGCTGATGGAGTACCCCGAGGCCATCACCCGGCTGGTGACCGGCGCCCAGCGGCCCCCCGACCC
CGCCCCCGCCCCCCTGGGCGCCCCCGGCCTGCCCAACGGCCTGCTGAGCGGCGACGAGGACTTCAGCAGCATCGCCGACATGG
ACTTCAGCGCCCTGCTGGGCAGCGGCAGCGGCAGCCGGGACAGCCGGGAGGGCATGTTCCTGCCCAAGCCCGAGGCCGGCAGC
GCCATCAGCGACGTGTTCGAGGGCCGGGAGGTGTGCCAGCCCAAGCGGCTCCGGCCCTTCCACCCCCCCGGCAGCCCCTGGGC
CAACCGGCCCCTGCCCGCCAGCCTGGCCCCCACCCCCACCGGCCCCGTGCACGAGCCCGTGGGCAGCCTGACCCCCGCCCCCG
TGCCCCAGCCCCTGGACCCCGCCCCCGCCGTGACCCCCGAGGCCAGCCACCTGCTGGAGGACCCCGACGAGGAGACCAGCCAG
GCCGTGAAGGCCCTGCGGGAGATGGCCGACACCGTGATCCCCCAGAAGGAGGAGGCCGCCATCTGCGGCCAGATGGACCTGAG
CCACCCCCCCCCCCGGGGCCACCTGGACGAGCTGACCACCACCCTGGAGAGCATGACCGAGGACCTGAACCTGGACAGCCCCC
TGACCCCCGAGCTGAACGAGATCCTGGACACCTTCCTGAACGACGAGTGCCTGCTGCACGCCATGCACATCAGCACCGGCCTG
AGCATCTTCGACACCAGCCTGTTCAGCGGCGGCAAGCGGCCCGCCGCCACCAAGAAGGCCGGCCAGGCCAAGAAGAAGAAGGG
CAGCTACCCCTACGACGTGCCCGACTACGCCTGAGCGGCCGCTTAATTAAGCTGCCTTCTGCGGGGCTTGCCTTCTGGCCATG
CCCTTCTTCTCTCCCTTGCACCTGTACCTCTTGGTCTTTGAATAAAGCCTGAGTAGGAAGTCTAGAAAAAAAAAAAAAAAAAA
AAAAAAAAAAAAAAAAAAAAAAAAAAAAAAAAAAAAAAAAAAAAAAAAAAAAAAAAAAAAAA
>TAL3 amino acid sequence
SEQ ID NO.: 192
GSHMVDLRTLGYSQQQQEKIKPKVRSTVAQHHEALVGHGFTHAHIVALSQHPAALGTVAVKYQDMIAALPEATHEAIVGVGKR
GAGARALEALLTVAGELRGPPLQLDTGQLLKIAKRGGVTAVEAVHAWRNALTGAPLULTPEQVVAIASUNGGKQALETVQRLL
PVLCQAHGLTPEQVVAIASUGGGKQALETVQRLLPVLCQAHGLTPEQVVAIASUGGGKQALETVQRLLPVLCQAHGLTPEQVV
AIASUGGGKQALETVQRLLPVLCQAHGLTPEQVVAIASUNGGKQALETVQRLLPVLCQAHGLTPEQVVAIASNIGGKQALETV
QRLLPVLCQAHGLTPEQVVAIASNIGGKQALETVQRLLPVLCQAHGLTPEQVVAIASNIGGKQALETVQRLLPVLCQAHGLTP
EQVVAIASUNGGKQALETVQRLLPVLCQAHGLTPEQVVAIASUNGGKQALETVQRLLPVLCQAHGLTPEQVVAIASNIGGKQA
LETVQRLLPVLCQAHGLTPEQVVAIASNIGGKQALETVQRLLPVLCQAHGLTPEQVVAIASUNGGKQALETVQRLLPVLCQAH
GLTPEQVVAIASUNGGKQALETVQRLLPVLCQAHGLTPEQVVAIASHDGGKQALETVQRLLPVLCQAHGLTPEQVVAIASNIG
GKQALETVQRLLPVLCQAHGLTPEQVVAIASUNGGKQALETVQRLLPVLCQAHGLTPEQVVAIASNIGGRPALESIVAQLSRP
DPALAALTNDHLVALACLGGRPALDAVKKGLPHAPALIKRTURRIPERTSHRVAS
>TAL3 mRNA sequence
SEQ ID NO.: 246
GGAUCCCAUAUGGUUGAUCUGCGUACCCUGGGUUAUAGCCAGCAGCAGCAAGAAAAAAUCAAACCGAAAGUUCGUAGCACCGU
UGCACAGCAUCAUGAAGCACUGGUUGGUCAUGGUUUUACCCAUGCACAUAUUGUUGCACUGAGCCAGCAUCCGGCAGCACUGG
GCACCGUUGCAGUUAAAUAUCAGGAUAUGAUUGCAGCACUGCCGGAAGCAACCCAUGAAGCAAUUGUUGGUGUUGGUAAACGC
GGAGCUGGUGCACGUGCCCUGGAAGCACUGCUGACCGUUGCCGGUGAACUGCGUGGUCCGCCUCUGCAGCUGGAUACCGGUCA
GCUGCUGAAAAUUGCAAAACGUGGUGGUGUUACCGCAGUUGAAGCAGUUCAUGCAUGGCGUAAUGCACUGACCGGUGCACCGC
UGAAUCUGACACCGGAACAGGUUGUUGCAAUUGCCAGCAAUAAUGGUGGCAAACAGGCACUGGAAACCGUUCAGCGUCUGCUG
CCGGUUCUGUGUCAGGCACAUGGUCUGACCCCUGAACAGGUGGUGGCCAUUGCAAGCAAUGGUGGCGGUAAACAAGCCCUGGA
AACAGUGCAGCGCCUGUUACCGGUGCUGUGCCAGGCCCAUGGCUUAACUCCGGAACAGGUGGUAGCGAUCGCAUCAAAUGGCG
GAGGUAAACAGGCCUUAGAAACCGUACAGCGCUUACUGCCGGUGUUAUGCCAGGCGCACGGCCUGACGCCAGAACAGGUAGUG
GCAAUCGCCUCAAAUGGGGGUGGAAAACAGGCGUUAGAGACAGUCCAGCGCCUGCUGCCUGUAUUAUGUCAAGCCCAUGGCCU
GACCCCAGAGCAAGUUGUUGCGAUUGCAAGUAACAAUGGGGGUAAACAGGCACUUGAGACAGUUCAACGUUUACUGCCUGUAC
UGUGCCAAGCUCACGGUCUGACUCCGGAACAAGUCGUCGCGAUUGCGAGUAACAUUGGUGGCAAACAAGCAUUAGAAACGGUG
CAACGCCUGCUGCCAGUUCUUUGCCAGGCUCACGGUUUAACCCCUGAGCAGGUUGUAGCUAUUGCGAGUAAUAUCGGUGGUAA
GCAGGCGUUGGAAACUGUGCAAAGACUGCUGCCCGUGUUGUGCCAAGCACAUGGUUUAACCCCAGAACAAGUCGUAGCAAUCG
CAAGCAAUAUAGGUGGCAAGCAAGCGCUUGAAACAGUACAGCGUUUAUUACCGGUACUUUGUCAGGCCCACGGUCUUACACCA
GAACAAGUUGUGGCCAUAGCCAGUAAUAAUGGCGGAAAGCAGGCUCUGGAAACGGUACAACGUCUGUUACCUGUUCUGUGUCA
AGCGCACGGAUUAACACCUGAACAAGUAGUUGCCAUUGCGUCAAACAAUGGAGGCAAGCAGGCCUUGGAGACAGUGCAGAGAU
UACUGCCAGUGUUGUGUCAGGCUCAUGGCCUUACACCCGAGCAGGUCGUGGCAAUUGCAUCUAACAUUGGCGGUAAGCAAGCU
UUAGAGACUGUUCAGAGACUGCUUCCUGUCCUGUGCCAGGCACACGGACUUACGCCUGAGCAAGUGGUUGCAAUCGCCUCUAA
UAUCGGUGGUAAGCAAGCACUGGAAACUGUCCAACGCUUACUUCCGGUGCUUUGUCAAGCACACGGCUUAACGCCAGAGCAGG
UCGUCGCCAUAGCCAGCAAUAAUGGUGGUAAACAGGCCCUUGAAACGGUCCAAAGACUUCUGCCGGUCCUUUGCCAAGCGCAU
GGGCUGACACCUGAGCAGGUAGUCGCGAUUGCCUCAAACAAUGGUGGGAAGCAGGCAUUAGAAACAGUUCAAAGAUUAUUACC
AGUCCUGUGUCAGGCGCAUGGGUUAACCCCAGAGCAGGUAGUUGCAAUAGCAUCCCAUGAUGGCGGAAAACAAGCGUUGGAAA
CGGUUCAGCGGUUAUUGCCUGUUUUGUGCCAGGCGCAUGGUUUGACACCCGAGCAAGUGGUAGCCAUAGCCUCAAAUAUAGGG
GGUAAACAAGCUUUGGAGACAGUACAACGGCUGCUUCCAGUUUUAUGUCAGGCCCAUGGAUUGACGCCUGAACAAGUUGUCGC
UAUCGCAAGUAAUAAUGGUGGUAAACAAGCGCUUGAAACCGUUCAACGCCUUCUGCCUGUGCUUUGUCAGGCACAUGGAUUAA
CACCCGAACAGGUUGUCGCGAUAGCUUCAAACAUUGGUGGUCGUCCGGCACUGGAAAGCAUUGUUGCACAGCUGAGCCGUCCU
GAUCCGGCACUGGCAGCACUGACCAAUGAUCAUCUGGUUGCACUGGCAUGUCUGGGUGGUCGCCCUGCCCUGGAUGCAGUUAA
AAAAGGUCUGCCGCAUGCACCGGCACUGAUUAAACGUACCAAUCGUCGUAUUCCGGAACGUACCAGCCAUCGUGUUGCUAGC
>TAL4-VPR protein
SEQ ID NO.: 193
MAPKKKRKVGIHGVPAAGSSGSHMVDLRTLGYSQQQQEKIKPKVRSTVAQHHEALVGHGFTHAHIVALSQHPAALGTVAVKYQ
DMIAALPEATHEAIVGVGKRGAGARALEALLTVAGELRGPPLQLDTGQLLKIAKRGGVTAVEAVHAWRNALTGAPLNLTPEQV
VAIASHDGGKQALETVQRLLPVLCQAHGLTPEQVVAIASHDGGKQALETVQRLLPVLCQAHGLTPEQVVAIASNIGGKQALET
VQRLLPVLCQAHGLTPEQVVAIASNNGGKQALETVQRLLPVLCQAHGLTPEQVVAIASHDGGKQALETVQRLLPVLCQAHGLT
PEQVVAIASNIGGKQALETVQRLLPVLCQAHGLTPEQVVAIASNNGGKQALETVQRLLPVLCQAHGLTPEQVVAIASNIGGKQ
ALETVQRLLPVLCQAHGLTPEQVVAIASNGGGKQALETVQRLLPVLCQAHGLTPEQVVAIASHDGGKQALETVQRLLPVLCQA
HGLTPEQVVAIASNGGGKQALETVQRLLPVLCQAHGLTPEQVVAIASNGGGKQALETVQRLLPVLCQAHGLTPEQVVAIASHD
GGKQALETVQRLLPVLCQAHGLTPEQVVAIASHDGGKQALETVQRLLPVLCQAHGLTPEQVVAIASHDGGKQALETVQRLLPV
LCQAHGLTPEQVVAIASNIGGKQALETVQRLLPVLCQAHGLTPEQVVAIASNNGGKQALETVQRLLPVLCQAHGLTPEQVVAI
ASNIGGRPALESIVAQLSRPDPALAALTNDHLVALACLGGRPALDAVKKGLPHAPALIKRTNRRIPERTSHRVASGSGGGSGG
DALDDFDLDMLGSDALDDFDLDMLGSDALDDFDLDMLGSDALDDFDLDMLSGGPKKKRKVGSQYLPDTDDRHRIEEKRKRTYE
TFKSIMKKSPFSGPTDPRPPPRRIAVPSRSSASVPKPAPQPYPFTSSLSTINYDEFPTMVFPSGQISQASALAPAPPQVLPQA
PAPAPAPAMVSALAQAPAPVPVLAPGPPQAVAPPAPKPTQAGEGTLSEALLQLQFDDEDLGALLGNSTDPAVFTDLASVDNSE
FQQLLNQGIPVAPHTTEPMLMEYPEAITRLVTGAQRPPDPAPAPLGAPGLPNGLLSGDEDFSSIADMDFSALLGSGSGSRDSR
EGMFLPKPEAGSAISDVFEGREVCQPKRLRPFHPPGSPWANRPLPASLAPTPTGPVHEPVGSLTPAPVPQPLDPAPAVTPEAS
HLLEDPDEETSQAVKALREMADTVIPQKEEAAICGQMDLSHPPPRGHLDELTTTLESMTEDLNLDSPLTPELNEILDTFLNDE
CLLHAMHISTGLSIFDTSLFSGGKRPAATKKAGQAKKKKGSYPYDVPDY*
>TAL4-VPR mRNA
SEQ ID NO.: 194
AGGAAATAAGAGAGAAAAGAAGAGTAAGAAGAAATATAAGAGCCACCATGGCCCCCAAGAAGAAGCGGAAGGTGGGCATCCAC
GGCGTGCCCGCCGCCGGCAGCAGCGGATCCCATATGGTTGATCTGCGTACCCTGGGTTATAGCCAGCAGCAGCAAGAAAAAAT
CAAACCGAAAGTTCGTAGCACCGTTGCACAGCATCATGAAGCACTGGTTGGTCATGGTTTTACCCATGCACATATTGTTGCAC
TGAGCCAGCATCCGGCAGCACTGGGCACCGTTGCAGTTAAATATCAGGATATGATTGCAGCACTGCCGGAAGCAACCCATGAA
GCAATTGTTGGTGTTGGTAAACGCGGAGCTGGTGCACGTGCCCTGGAAGCACTGCTGACCGTTGCCGGTGAACTGCGTGGTCC
GCCTCTGCAGCTGGATACCGGTCAGCTGCTGAAAATTGCAAAACGTGGTGGTGTTACCGCAGTTGAAGCAGTTCATGCATGGC
GTAATGCACTGACCGGTGCACCGCTGAATCTGACACCGGAACAGGTTGTTGCAATTGCCAGCCATGATGGTGGCAAACAGGCA
CTGGAAACCGTTCAGCGTCTGCTGCCGGTTCTGTGTCAGGCACATGGTCTGACCCCTGAACAGGTGGTGGCCATTGCAAGCCA
TGACGGCGGTAAACAAGCCCTGGAAACAGTGCAGCGCCTGTTACCGGTGCTGTGCCAGGCCCATGGCTTAACTCCGGAACAGG
TGGTAGCGATCGCATCAAACATTGGAGGTAAACAGGCCTTAGAAACCGTACAGCGCTTACTGCCGGTGTTATGCCAGGCGCAC
GGCCTGACGCCAGAACAGGTAGTGGCAATCGCCTCAAATAATGGTGGAAAACAGGCGTTAGAGACAGTCCAGCGCCTGCTGCC
TGTATTATGTCAAGCCCATGGCCTGACCCCAGAGCAAGTTGTTGCGATTGCAAGTCATGATGGGGGTAAACAGGCACTTGAGA
CAGTTCAACGTTTACTGCCTGTACTGTGCCAAGCTCACGGTCTGACTCCGGAACAAGTCGTCGCGATTGCGAGTAATATCGGT
GGCAAACAAGCATTAGAAACGGTGCAACGCCTGCTGCCAGTTCTTTGCCAGGCTCACGGTTTAACCCCTGAGCAGGTTGTAGC
TATTGCGAGTAACAATGGTGGTAAGCAGGCGTTGGAAACTGTGCAAAGACTGCTGCCCGTGTTGTGCCAAGCACATGGTTTAA
CCCCAGAACAAGTCGTAGCAATCGCAAGCAATATAGGTGGCAAGCAAGCGCTTGAAACAGTACAGCGTTTATTACCGGTACTT
TGTCAGGCCCACGGTCTTACACCAGAACAAGTTGTGGCCATAGCCAGTAATGGTGGCGGAAAGCAGGCTCTGGAAACGGTACA
ACGTCTGTTACCTGTTCTGTGTCAAGCGCACGGATTAACACCTGAACAAGTAGTTGCCATTGCGTCACATGACGGAGGCAAGC
AGGCCTTGGAGACAGTGCAGAGATTACTGCCAGTGTTGTGTCAGGCTCATGGCCTTACACCCGAGCAGGTCGTGGCAATTGCA
TCTAATGGCGGCGGTAAGCAAGCTTTAGAGACTGTTCAGAGACTGCTTCCTGTCCTGTGCCAGGCACACGGACTTACGCCTGA
GCAAGTGGTTGCAATCGCCTCTAATGGGGGTGGTAAGCAAGCACTGGAAACTGTCCAACGCTTACTTCCGGTGCTTTGTCAAG
CACACGGCTTAACGCCAGAGCAGGTCGTCGCCATAGCCAGCCATGATGGTGGTAAACAGGCCCTTGAAACGGTCCAAAGACTT
CTGCCGGTCCTTTGCCAAGCGCATGGGCTGACACCTGAGCAGGTAGTCGCGATTGCCTCACATGACGGTGGGAAGCAGGCATT
AGAAACAGTTCAAAGATTATTACCAGTCCTGTGTCAGGCGCATGGGTTAACCCCAGAGCAGGTAGTTGCAATAGCATCCCATG
ATGGCGGAAAACAAGCGTTGGAAACGGTTCAGCGGTTATTGCCTGTTTTGTGCCAGGCGCATGGTTTGACACCCGAGCAAGTG
GTAGCCATAGCCTCAAACATTGGGGGTAAACAAGCTTTGGAGACAGTACAACGGCTGCTTCCAGTTTTATGTCAGGCCCATGG
ATTGACGCCTGAACAAGTTGTCGCTATCGCAAGTAATAATGGTGGTAAACAAGCGCTTGAAACCGTTCAACGCCTTCTGCCTG
TGCTTTGTCAGGCACATGGATTAACACCCGAACAGGTTGTCGCGATAGCTTCAAATATCGGTGGTCGTCCGGCACTGGAAAGC
ATTGTTGCACAGCTGAGCCGTCCTGATCCGGCACTGGCAGCACTGACCAATGATCATCTGGTTGCACTGGCATGTCTGGGTGG
TCGCCCTGCCCTGGATGCAGTTAAAAAAGGTCTGCCGCATGCACCGGCACTGATTAAACGTACCAATCGTCGTATTCCGGAAC
GTACCAGCCATCGTGTTGCTAGCGGCAGCGGCGGCGGCAGCGGCGGCGACGCCCTGGACGACTTCGACCTGGACATGCTGGGC
AGCGACGCCCTGGACGACTTCGACCTGGACATGCTGGGCAGCGACGCCCTGGACGACTTCGACCTGGACATGCTGGGCAGCGA
CGCCCTGGACGACTTCGACCTGGACATGCTGAGCGGCGGCCCCAAGAAGAAGCGGAAGGTGGGCAGCCAGTACCTGCCCGACA
CCGACGACCGGCACCGGATCGAGGAGAAGCGGAAGCGGACCTACGAGACCTTCAAGAGCATCATGAAGAAATCCCCCTTCAGC
GGCCCCACCGACCCCCGGCCCCCCCCCCGGCGGATCGCCGTGCCCAGCCGGAGCAGCGCCAGCGTGCCCAAGCCCGCCCCCCA
GCCCTACCCCTTCACCAGCAGCCTGAGCACCATCAACTACGACGAGTTCCCCACCATGGTGTTCCCCAGCGGCCAGATCAGCC
AGGCCAGCGCCCTGGCCCCCGCCCCCCCCCAGGTGCTGCCCCAGGCCCCCGCCCCCGCCCCCGCCCCCGCCATGGTGAGCGCC
CTGGCCCAGGCCCCCGCCCCCGTGCCCGTGCTGGCCCCCGGCCCCCCCCAGGCCGTGGCCCCCCCCGCCCCCAAGCCCACCCA
GGCCGGCGAGGGCACCCTGAGCGAGGCCCTGCTGCAGCTGCAGTTCGACGACGAGGACCTGGGCGCCCTGCTGGGCAACAGCA
CCGACCCCGCCGTGTTCACCGACCTGGCCAGCGTGGACAACAGCGAGTTCCAGCAGCTGCTGAACCAGGGCATCCCCGTGGCC
CCCCACACCACCGAGCCCATGCTGATGGAGTACCCCGAGGCCATCACCCGGCTGGTGACCGGCGCCCAGCGGCCCCCCGACCC
CGCCCCCGCCCCCCTGGGCGCCCCCGGCCTGCCCAACGGCCTGCTGAGCGGCGACGAGGACTTCAGCAGCATCGCCGACATGG
ACTTCAGCGCCCTGCTGGGCAGCGGCAGCGGCAGCCGGGACAGCCGGGAGGGCATGTTCCTGCCCAAGCCCGAGGCCGGCAGC
GCCATCAGCGACGTGTTCGAGGGCCGGGAGGTGTGCCAGCCCAAGCGGCTCCGGCCCTTCCACCCCCCCGGCAGCCCCTGGGC
CAACCGGCCCCTGCCCGCCAGCCTGGCCCCCACCCCCACCGGCCCCGTGCACGAGCCCGTGGGCAGCCTGACCCCCGCCCCCG
TGCCCCAGCCCCTGGACCCCGCCCCCGCCGTGACCCCCGAGGCCAGCCACCTGCTGGAGGACCCCGACGAGGAGACCAGCCAG
GCCGTGAAGGCCCTGCGGGAGATGGCCGACACCGTGATCCCCCAGAAGGAGGAGGCCGCCATCTGCGGCCAGATGGACCTGAG
CCACCCCCCCCCCCGGGGCCACCTGGACGAGCTGACCACCACCCTGGAGAGCATGACCGAGGACCTGAACCTGGACAGCCCCC
TGACCCCCGAGCTGAACGAGATCCTGGACACCTTCCTGAACGACGAGTGCCTGCTGCACGCCATGCACATCAGCACCGGCCTG
AGCATCTTCGACACCAGCCTGTTCAGCGGCGGCAAGCGGCCCGCCGCCACCAAGAAGGCCGGCCAGGCCAAGAAGAAGAAGGG
CAGCTACCCCTACGACGTGCCCGACTACGCCTGAGCGGCCGCTTAATTAAGCTGCCTTCTGCGGGGCTTGCCTTCTGGCCATG
CCCTTCTTCTCTCCCTTGCACCTGTACCTCTTGGTCTTTGAATAAAGCCTGAGTAGGAAGTCTAGAAAAAAAAAAAAAAAAAA
AAAAAAAAAAAAAAAAAAAAAAAAAAAAAAAAAAAAAAAAAAAAAAAAAAAAAAAAAAAAAA
>TAL4 amino acid sequence
SEQ ID NO.: 195
GSHMVDLRTLGYSQQQQEKIKPKVRSTVAQHHEALVGHGFTHAHIVALSQHPAALGTVAVKYQDMIAALPEATHEAIVGVGKR
GAGARALEALLTVAGELRGPPLQLDTGQLLKIAKRGGVTAVEAVHAWRNALTGAPLULTPEQVVAIASHDGGKQALETVQRLL
PVLCQAHGLTPEQVVAIASHDGGKQALETVQRLLPVLCQAHGLTPEQVVAIASNIGGKQALETVQRLLPVLCQAHGLTPEQVV
AIASUNGGKQALETVQRLLPVLCQAHGLTPEQVVAIASHDGGKQALETVQRLLPVLCQAHGLTPEQVVAIASNIGGKQALETV
QRLLPVLCQAHGLTPEQVVAIASUNGGKQALETVQRLLPVLCQAHGLTPEQVVAIASNIGGKQALETVQRLLPVLCQAHGLTP
EQVVAIASUGGGKQALETVQRLLPVLCQAHGLTPEQVVAIASHDGGKQALETVQRLLPVLCQAHGLTPEQVVAIASUGGGKQA
LETVQRLLPVLCQAHGLTPEQVVAIASUGGGKQALETVQRLLPVLCQAHGLTPEQVVAIASHDGGKQALETVQRLLPVLCQAH
GLTPEQVVAIASHDGGKQALETVQRLLPVLCQAHGLTPEQVVAIASHDGGKQALETVQRLLPVLCQAHGLTPEQVVAIASNIG
GKQALETVQRLLPVLCQAHGLTPEQVVAIASUNGGKQALETVQRLLPVLCQAHGLTPEQVVAIASNIGGRPALESIVAQLSRP
DPALAALTNDHLVALACLGGRPALDAVKKGLPHAPALIKRTURRIPERTSHRVAS
>TAL4 mRNA sequence
SEQ ID NO.: 247
GGAUCCCAUAUGGUUGAUCUGCGUACCCUGGGUUAUAGCCAGCAGCAGCAAGAAAAAAUCAAACCGAAAGUUCGUAGCACCGU
UGCACAGCAUCAUGAAGCACUGGUUGGUCAUGGUUUUACCCAUGCACAUAUUGUUGCACUGAGCCAGCAUCCGGCAGCACUGG
GCACCGUUGCAGUUAAAUAUCAGGAUAUGAUUGCAGCACUGCCGGAAGCAACCCAUGAAGCAAUUGUUGGUGUUGGUAAACGC
GGAGCUGGUGCACGUGCCCUGGAAGCACUGCUGACCGUUGCCGGUGAACUGCGUGGUCCGCCUCUGCAGCUGGAUACCGGUCA
GCUGCUGAAAAUUGCAAAACGUGGUGGUGUUACCGCAGUUGAAGCAGUUCAUGCAUGGCGUAAUGCACUGACCGGUGCACCGC
UGAAUCUGACACCGGAACAGGUUGUUGCAAUUGCCAGCCAUGAUGGUGGCAAACAGGCACUGGAAACCGUUCAGCGUCUGCUG
CCGGUUCUGUGUCAGGCACAUGGUCUGACCCCUGAACAGGUGGUGGCCAUUGCAAGCCAUGACGGCGGUAAACAAGCCCUGGA
AACAGUGCAGCGCCUGUUACCGGUGCUGUGCCAGGCCCAUGGCUUAACUCCGGAACAGGUGGUAGCGAUCGCAUCAAACAUUG
GAGGUAAACAGGCCUUAGAAACCGUACAGCGCUUACUGCCGGUGUUAUGCCAGGCGCACGGCCUGACGCCAGAACAGGUAGUG
GCAAUCGCCUCAAAUAAUGGUGGAAAACAGGCGUUAGAGACAGUCCAGCGCCUGCUGCCUGUAUUAUGUCAAGCCCAUGGCCU
GACCCCAGAGCAAGUUGUUGCGAUUGCAAGUCAUGAUGGGGGUAAACAGGCACUUGAGACAGUUCAACGUUUACUGCCUGUAC
UGUGCCAAGCUCACGGUCUGACUCCGGAACAAGUCGUCGCGAUUGCGAGUAAUAUCGGUGGCAAACAAGCAUUAGAAACGGUG
CAACGCCUGCUGCCAGUUCUUUGCCAGGCUCACGGUUUAACCCCUGAGCAGGUUGUAGCUAUUGCGAGUAACAAUGGUGGUAA
GCAGGCGUUGGAAACUGUGCAAAGACUGCUGCCCGUGUUGUGCCAAGCACAUGGUUUAACCCCAGAACAAGUCGUAGCAAUCG
CAAGCAAUAUAGGUGGCAAGCAAGCGCUUGAAACAGUACAGCGUUUAUUACCGGUACUUUGUCAGGCCCACGGUCUUACACCA
GAACAAGUUGUGGCCAUAGCCAGUAAUGGUGGCGGAAAGCAGGCUCUGGAAACGGUACAACGUCUGUUACCUGUUCUGUGUCA
AGCGCACGGAUUAACACCUGAACAAGUAGUUGCCAUUGCGUCACAUGACGGAGGCAAGCAGGCCUUGGAGACAGUGCAGAGAU
UACUGCCAGUGUUGUGUCAGGCUCAUGGCCUUACACCCGAGCAGGUCGUGGCAAUUGCAUCUAAUGGCGGCGGUAAGCAAGCU
UUAGAGACUGUUCAGAGACUGCUUCCUGUCCUGUGCCAGGCACACGGACUUACGCCUGAGCAAGUGGUUGCAAUCGCCUCUAA
UGGGGGUGGUAAGCAAGCACUGGAAACUGUCCAACGCUUACUUCCGGUGCUUUGUCAAGCACACGGCUUAACGCCAGAGCAGG
UCGUCGCCAUAGCCAGCCAUGAUGGUGGUAAACAGGCCCUUGAAACGGUCCAAAGACUUCUGCCGGUCCUUUGCCAAGCGCAU
GGGCUGACACCUGAGCAGGUAGUCGCGAUUGCCUCACAUGACGGUGGGAAGCAGGCAUUAGAAACAGUUCAAAGAUUAUUACC
AGUCCUGUGUCAGGCGCAUGGGUUAACCCCAGAGCAGGUAGUUGCAAUAGCAUCCCAUGAUGGCGGAAAACAAGCGUUGGAAA
CGGUUCAGCGGUUAUUGCCUGUUUUGUGCCAGGCGCAUGGUUUGACACCCGAGCAAGUGGUAGCCAUAGCCUCAAACAUUGGG
GGUAAACAAGCUUUGGAGACAGUACAACGGCUGCUUCCAGUUUUAUGUCAGGCCCAUGGAUUGACGCCUGAACAAGUUGUCGC
UAUCGCAAGUAAUAAUGGUGGUAAACAAGCGCUUGAAACCGUUCAACGCCUUCUGCCUGUGCUUUGUCAGGCACAUGGAUUAA
CACCCGAACAGGUUGUCGCGAUAGCUUCAAAUAUCGGUGGUCGUCCGGCACUGGAAAGCAUUGUUGCACAGCUGAGCCGUCCU
GAUCCGGCACUGGCAGCACUGACCAAUGAUCAUCUGGUUGCACUGGCAUGUCUGGGUGGUCGCCCUGCCCUGGAUGCAGUUAA
AAAAGGUCUGCCGCAUGCACCGGCACUGAUUAAACGUACCAAUCGUCGUAUUCCGGAACGUACCAGCCAUCGUGUUGCUAGC
>TAL5-VPR protein
SEQ ID NO.: 196
MAPKKKRKVGIHGVPAAGSSGSHMVDLRTLGYSQQQQEKIKPKVRSTVAQHHEALVGHGFTHAHIVALSQHPAALGTVAVKYQ
DMIAALPEATHEAIVGVGKRGAGARALEALLTVAGELRGPPLQLDTGQLLKIAKRGGVTAVEAVHAWRNALTGAPLNLTPEQV
VAIASNNGGKQALETVQRLLPVLCQAHGLTPEQVVAIASNNGGKQALETVQRLLPVLCQAHGLTPEQVVAIASNNGGKQALET
VQRLLPVLCQAHGLTPEQVVAIASNNGGKQALETVQRLLPVLCQAHGLTPEQVVAIASNNGGKQALETVQRLLPVLCQAHGLT
PEQVVAIASNIGGKQALETVQRLLPVLCQAHGLTPEQVVAIASHDGGKQALETVQRLLPVLCQAHGLTPEQVVAIASHDGGKQ
ALETVQRLLPVLCQAHGLTPEQVVAIASNNGGKQALETVQRLLPVLCQAHGLTPEQVVAIASNIGGKQALETVQRLLPVLCQA
HGLTPEQVVAIASNGGGKQALETVQRLLPVLCQAHGLTPEQVVAIASNGGGKQALETVQRLLPVLCQAHGLTPEQVVAIASNI
GGKQALETVQRLLPVLCQAHGLTPEQVVAIASNIGGKQALETVQRLLPVLCQAHGLTPEQVVAIASHDGGKQALETVQRLLPV
LCQAHGLTPEQVVAIASHDGGKQALETVQRLLPVLCQAHGLTPEQVVAIASNIGGKQALETVQRLLPVLCQAHGLTPEQVVAI
ASNGGGRPALESIVAQLSRPDPALAALTNDHLVALACLGGRPALDAVKKGLPHAPALIKRTNRRIPERTSHRVASGSGGGSGG
DALDDFDLDMLGSDALDDFDLDMLGSDALDDFDLDMLGSDALDDFDLDMLSGGPKKKRKVGSQYLPDTDDRHRIEEKRKRTYE
TFKSIMKKSPFSGPTDPRPPPRRIAVPSRSSASVPKPAPQPYPFTSSLSTINYDEFPTMVFPSGQISQASALAPAPPQVLPQA
PAPAPAPAMVSALAQAPAPVPVLAPGPPQAVAPPAPKPTQAGEGTLSEALLQLQFDDEDLGALLGNSTDPAVFTDLASVDNSE
FQQLLNQGIPVAPHTTEPMLMEYPEAITRLVTGAQRPPDPAPAPLGAPGLPNGLLSGDEDFSSIADMDFSALLGSGSGSRDSR
EGMFLPKPEAGSAISDVFEGREVCQPKRLRPFHPPGSPWANRPLPASLAPTPTGPVHEPVGSLTPAPVPQPLDPAPAVTPEAS
HLLEDPDEETSQAVKALREMADTVIPQKEEAAICGQMDLSHPPPRGHLDELTTTLESMTEDLNLDSPLTPELNEILDTFLNDE
CLLHAMHISTGLSIFDTSLFSGGKRPAATKKAGQAKKKKGSYPYDVPDYA
>TAL5-VPR mRNA
SEQ ID NO.: 197
AGGAAATAAGAGAGAAAAGAAGAGTAAGAAGAAATATAAGAGCCACCATGGCCCCCAAGAAGAAGCGGAAGGTGGGCATCCAC
GGCGTGCCCGCCGCCGGCAGCAGCGGATCCCATATGGTTGATCTGCGTACCCTGGGTTATAGCCAGCAGCAGCAAGAAAAAAT
CAAACCGAAAGTTCGTAGCACCGTTGCACAGCATCATGAAGCACTGGTTGGTCATGGTTTTACCCATGCACATATTGTTGCAC
TGAGCCAGCATCCGGCAGCACTGGGCACCGTTGCAGTTAAATATCAGGATATGATTGCAGCACTGCCGGAAGCAACCCATGAA
GCAATTGTTGGTGTTGGTAAACGCGGAGCTGGTGCACGTGCCCTGGAAGCACTGCTGACCGTTGCCGGTGAACTGCGTGGTCC
GCCTCTGCAGCTGGATACCGGTCAGCTGCTGAAAATTGCAAAACGTGGTGGTGTTACCGCAGTTGAAGCAGTTCATGCATGGC
GTAATGCACTGACCGGTGCACCGCTGAATCTGACACCGGAACAGGTTGTTGCAATTGCCAGCAATAATGGTGGCAAACAGGCA
CTGGAAACCGTTCAGCGTCTGCTGCCGGTTCTGTGTCAGGCACATGGTCTGACCCCTGAACAGGTGGTGGCCATTGCAAGCAA
CAATGGCGGTAAACAAGCCCTGGAAACAGTGCAGCGCCTGTTACCGGTGCTGTGCCAGGCCCATGGCTTAACTCCGGAACAGG
TGGTAGCGATCGCATCAAATAATGGAGGTAAACAGGCCTTAGAAACCGTACAGCGCTTACTGCCGGTGTTATGCCAGGCGCAC
GGCCTGACGCCAGAACAGGTAGTGGCAATCGCCTCAAACAATGGTGGAAAACAGGCGTTAGAGACAGTCCAGCGCCTGCTGCC
TGTATTATGTCAAGCCCATGGCCTGACCCCAGAGCAAGTTGTTGCGATTGCAAGTAATAATGGGGGTAAACAGGCACTTGAGA
CAGTTCAACGTTTACTGCCTGTACTGTGCCAAGCTCACGGTCTGACTCCGGAACAAGTCGTCGCGATTGCGAGTAACATTGGT
GGCAAACAAGCATTAGAAACGGTGCAACGCCTGCTGCCAGTTCTTTGCCAGGCTCACGGTTTAACCCCTGAGCAGGTTGTAGC
TATTGCGAGTCATGATGGTGGTAAGCAGGCGTTGGAAACTGTGCAAAGACTGCTGCCCGTGTTGTGCCAAGCACATGGTTTAA
CCCCAGAACAAGTCGTAGCAATCGCAAGCCATGACGGTGGCAAGCAAGCGCTTGAAACAGTACAGCGTTTATTACCGGTACTT
TGTCAGGCCCACGGTCTTACACCAGAACAAGTTGTGGCCATAGCCAGTAACAATGGCGGAAAGCAGGCTCTGGAAACGGTACA
ACGTCTGTTACCTGTTCTGTGTCAAGCGCACGGATTAACACCTGAACAAGTAGTTGCCATTGCGTCAAATATCGGAGGCAAGC
AGGCCTTGGAGACAGTGCAGAGATTACTGCCAGTGTTGTGTCAGGCTCATGGCCTTACACCCGAGCAGGTCGTGGCAATTGCA
TCTAATGGTGGCGGTAAGCAAGCTTTAGAGACTGTTCAGAGACTGCTTCCTGTCCTGTGCCAGGCACACGGACTTACGCCTGA
GCAAGTGGTTGCAATCGCCTCTAATGGCGGTGGTAAGCAAGCACTGGAAACTGTCCAACGCTTACTTCCGGTGCTTTGTCAAG
CACACGGCTTAACGCCAGAGCAGGTCGTCGCCATAGCCAGCAATATAGGTGGTAAACAGGCCCTTGAAACGGTCCAAAGACTT
CTGCCGGTCCTTTGCCAAGCGCATGGGCTGACACCTGAGCAGGTAGTCGCGATTGCCTCAAACATTGGTGGGAAGCAGGCATT
AGAAACAGTTCAAAGATTATTACCAGTCCTGTGTCAGGCGCATGGGTTAACCCCAGAGCAGGTAGTTGCAATAGCATCCCATG
ATGGCGGAAAACAAGCGTTGGAAACGGTTCAGCGGTTATTGCCTGTTTTGTGCCAGGCGCATGGTTTGACACCCGAGCAAGTG
GTAGCCATAGCCTCACATGACGGGGGTAAACAAGCTTTGGAGACAGTACAACGGCTGCTTCCAGTTTTATGTCAGGCCCATGG
ATTGACGCCTGAACAAGTTGTCGCTATCGCAAGTAATATCGGTGGTAAACAAGCGCTTGAAACCGTTCAACGCCTTCTGCCTG
TGCTTTGTCAGGCACATGGATTAACACCCGAACAGGTTGTCGCGATAGCTTCAAATGGGGGTGGTCGTCCGGCACTGGAAAGC
ATTGTTGCACAGCTGAGCCGTCCTGATCCGGCACTGGCAGCACTGACCAATGATCATCTGGTTGCACTGGCATGTCTGGGTGG
TCGCCCTGCCCTGGATGCAGTTAAAAAAGGTCTGCCGCATGCACCGGCACTGATTAAACGTACCAATCGTCGTATTCCGGAAC
GTACCAGCCATCGTGTTGCTAGCGGCAGCGGCGGCGGCAGCGGCGGCGACGCCCTGGACGACTTCGACCTGGACATGCTGGGC
AGCGACGCCCTGGACGACTTCGACCTGGACATGCTGGGCAGCGACGCCCTGGACGACTTCGACCTGGACATGCTGGGCAGCGA
CGCCCTGGACGACTTCGACCTGGACATGCTGAGCGGCGGCCCCAAGAAGAAGCGGAAGGTGGGCAGCCAGTACCTGCCCGACA
CCGACGACCGGCACCGGATCGAGGAGAAGCGGAAGCGGACCTACGAGACCTTCAAGAGCATCATGAAGAAATCCCCCTTCAGC
GGCCCCACCGACCCCCGGCCCCCCCCCCGGCGGATCGCCGTGCCCAGCCGGAGCAGCGCCAGCGTGCCCAAGCCCGCCCCCCA
GCCCTACCCCTTCACCAGCAGCCTGAGCACCATCAACTACGACGAGTTCCCCACCATGGTGTTCCCCAGCGGCCAGATCAGCC
AGGCCAGCGCCCTGGCCCCCGCCCCCCCCCAGGTGCTGCCCCAGGCCCCCGCCCCCGCCCCCGCCCCCGCCATGGTGAGCGCC
CTGGCCCAGGCCCCCGCCCCCGTGCCCGTGCTGGCCCCCGGCCCCCCCCAGGCCGTGGCCCCCCCCGCCCCCAAGCCCACCCA
GGCCGGCGAGGGCACCCTGAGCGAGGCCCTGCTGCAGCTGCAGTTCGACGACGAGGACCTGGGCGCCCTGCTGGGCAACAGCA
CCGACCCCGCCGTGTTCACCGACCTGGCCAGCGTGGACAACAGCGAGTTCCAGCAGCTGCTGAACCAGGGCATCCCCGTGGCC
CCCCACACCACCGAGCCCATGCTGATGGAGTACCCCGAGGCCATCACCCGGCTGGTGACCGGCGCCCAGCGGCCCCCCGACCC
CGCCCCCGCCCCCCTGGGCGCCCCCGGCCTGCCCAACGGCCTGCTGAGCGGCGACGAGGACTTCAGCAGCATCGCCGACATGG
ACTTCAGCGCCCTGCTGGGCAGCGGCAGCGGCAGCCGGGACAGCCGGGAGGGCATGTTCCTGCCCAAGCCCGAGGCCGGCAGC
GCCATCAGCGACGTGTTCGAGGGCCGGGAGGTGTGCCAGCCCAAGCGGCTCCGGCCCTTCCACCCCCCCGGCAGCCCCTGGGC
CAACCGGCCCCTGCCCGCCAGCCTGGCCCCCACCCCCACCGGCCCCGTGCACGAGCCCGTGGGCAGCCTGACCCCCGCCCCCG
TGCCCCAGCCCCTGGACCCCGCCCCCGCCGTGACCCCCGAGGCCAGCCACCTGCTGGAGGACCCCGACGAGGAGACCAGCCAG
GCCGTGAAGGCCCTGCGGGAGATGGCCGACACCGTGATCCCCCAGAAGGAGGAGGCCGCCATCTGCGGCCAGATGGACCTGAG
CCACCCCCCCCCCCGGGGCCACCTGGACGAGCTGACCACCACCCTGGAGAGCATGACCGAGGACCTGAACCTGGACAGCCCCC
TGACCCCCGAGCTGAACGAGATCCTGGACACCTTCCTGAACGACGAGTGCCTGCTGCACGCCATGCACATCAGCACCGGCCTG
AGCATCTTCGACACCAGCCTGTTCAGCGGCGGCAAGCGGCCCGCCGCCACCAAGAAGGCCGGCCAGGCCAAGAAGAAGAAGGG
CAGCTACCCCTACGACGTGCCCGACTACGCCTGAGCGGCCGCTTAATTAAGCTGCCTTCTGCGGGGCTTGCCTTCTGGCCATG
CCCTTCTTCTCTCCCTTGCACCTGTACCTCTTGGTCTTTGAATAAAGCCTGAGTAGGAAGTCTAGAAAAAAAAAAAAAAAAAA
AAAAAAAAAAAAAAAAAAAAAAAAAAAAAAAAAAAAAAAAAAAAAAAAAAAAAAAAAAAAAA
>TAL5 amino acid
SEQ ID NO.: 198
GSHMVDLRTLGYSQQQQEKIKPKVRSTVAQHHEALVGHGFTHAHIVALSQHPAALGTVAVKYQDMIAALPEATHEAIVGVGKR
GAGARALEALLTVAGELRGPPLQLDTGQLLKIAKRGGVTAVEAVHAWRNALTGAPLULTPEQVVAIASUNGGKQALETVQRLL
PVLCQAHGLTPEQVVAIASUNGGKQALETVQRLLPVLCQAHGLTPEQVVAIASUNGGKQALETVQRLLPVLCQAHGLTPEQVV
AIASUNGGKQALETVQRLLPVLCQAHGLTPEQVVAIASUNGGKQALETVQRLLPVLCQAHGLTPEQVVAIASNIGGKQALETV
QRLLPVLCQAHGLTPEQVVAIASHDGGKQALETVQRLLPVLCQAHGLTPEQVVAIASHDGGKQALETVQRLLPVLCQAHGLTP
EQVVAIASUNGGKQALETVQRLLPVLCQAHGLTPEQVVAIASNIGGKQALETVQRLLPVLCQAHGLTPEQVVAIASUGGGKQA
LETVQRLLPVLCQAHGLTPEQVVAIASUGGGKQALETVQRLLPVLCQAHGLTPEQVVAIASNIGGKQALETVQRLLPVLCQAH
GLTPEQVVAIASNIGGKQALETVQRLLPVLCQAHGLTPEQVVAIASHDGGKQALETVQRLLPVLCQAHGLTPEQVVAIASHDG
GKQALETVQRLLPVLCQAHGLTPEQVVAIASNIGGKQALETVQRLLPVLCQAHGLTPEQVVAIASUGGGRPALESIVAQLSRP
DPALAALTNDHLVALACLGGRPALDAVKKGLPHAPALIKRTURRIPERTSHRVAS
>TAL5 mRNA
SEQ ID NO.: 248
GGAUCCCAUAUGGUUGAUCUGCGUACCCUGGGUUAUAGCCAGCAGCAGCAAGAAAAAAUCAAACCGAAAGUUCGUAGCACCGU
UGCACAGCAUCAUGAAGCACUGGUUGGUCAUGGUUUUACCCAUGCACAUAUUGUUGCACUGAGCCAGCAUCCGGCAGCACUGG
GCACCGUUGCAGUUAAAUAUCAGGAUAUGAUUGCAGCACUGCCGGAAGCAACCCAUGAAGCAAUUGUUGGUGUUGGUAAACGC
GGAGCUGGUGCACGUGCCCUGGAAGCACUGCUGACCGUUGCCGGUGAACUGCGUGGUCCGCCUCUGCAGCUGGAUACCGGUCA
GCUGCUGAAAAUUGCAAAACGUGGUGGUGUUACCGCAGUUGAAGCAGUUCAUGCAUGGCGUAAUGCACUGACCGGUGCACCGC
UGAAUCUGACACCGGAACAGGUUGUUGCAAUUGCCAGCAAUAAUGGUGGCAAACAGGCACUGGAAACCGUUCAGCGUCUGCUG
CCGGUUCUGUGUCAGGCACAUGGUCUGACCCCUGAACAGGUGGUGGCCAUUGCAAGCAACAAUGGCGGUAAACAAGCCCUGGA
AACAGUGCAGCGCCUGUUACCGGUGCUGUGCCAGGCCCAUGGCUUAACUCCGGAACAGGUGGUAGCGAUCGCAUCAAAUAAUG
GAGGUAAACAGGCCUUAGAAACCGUACAGCGCUUACUGCCGGUGUUAUGCCAGGCGCACGGCCUGACGCCAGAACAGGUAGUG
GCAAUCGCCUCAAACAAUGGUGGAAAACAGGCGUUAGAGACAGUCCAGCGCCUGCUGCCUGUAUUAUGUCAAGCCCAUGGCCU
GACCCCAGAGCAAGUUGUUGCGAUUGCAAGUAAUAAUGGGGGUAAACAGGCACUUGAGACAGUUCAACGUUUACUGCCUGUAC
UGUGCCAAGCUCACGGUCUGACUCCGGAACAAGUCGUCGCGAUUGCGAGUAACAUUGGUGGCAAACAAGCAUUAGAAACGGUG
CAACGCCUGCUGCCAGUUCUUUGCCAGGCUCACGGUUUAACCCCUGAGCAGGUUGUAGCUAUUGCGAGUCAUGAUGGUGGUAA
GCAGGCGUUGGAAACUGUGCAAAGACUGCUGCCCGUGUUGUGCCAAGCACAUGGUUUAACCCCAGAACAAGUCGUAGCAAUCG
CAAGCCAUGACGGUGGCAAGCAAGCGCUUGAAACAGUACAGCGUUUAUUACCGGUACUUUGUCAGGCCCACGGUCUUACACCA
GAACAAGUUGUGGCCAUAGCCAGUAACAAUGGCGGAAAGCAGGCUCUGGAAACGGUACAACGUCUGUUACCUGUUCUGUGUCA
AGCGCACGGAUUAACACCUGAACAAGUAGUUGCCAUUGCGUCAAAUAUCGGAGGCAAGCAGGCCUUGGAGACAGUGCAGAGAU
UACUGCCAGUGUUGUGUCAGGCUCAUGGCCUUACACCCGAGCAGGUCGUGGCAAUUGCAUCUAAUGGUGGCGGUAAGCAAGCU
UUAGAGACUGUUCAGAGACUGCUUCCUGUCCUGUGCCAGGCACACGGACUUACGCCUGAGCAAGUGGUUGCAAUCGCCUCUAA
UGGCGGUGGUAAGCAAGCACUGGAAACUGUCCAACGCUUACUUCCGGUGCUUUGUCAAGCACACGGCUUAACGCCAGAGCAGG
UCGUCGCCAUAGCCAGCAAUAUAGGUGGUAAACAGGCCCUUGAAACGGUCCAAAGACUUCUGCCGGUCCUUUGCCAAGCGCAU
GGGCUGACACCUGAGCAGGUAGUCGCGAUUGCCUCAAACAUUGGUGGGAAGCAGGCAUUAGAAACAGUUCAAAGAUUAUUACC
AGUCCUGUGUCAGGCGCAUGGGUUAACCCCAGAGCAGGUAGUUGCAAUAGCAUCCCAUGAUGGCGGAAAACAAGCGUUGGAAA
CGGUUCAGCGGUUAUUGCCUGUUUUGUGCCAGGCGCAUGGUUUGACACCCGAGCAAGUGGUAGCCAUAGCCUCACAUGACGGG
GGUAAACAAGCUUUGGAGACAGUACAACGGCUGCUUCCAGUUUUAUGUCAGGCCCAUGGAUUGACGCCUGAACAAGUUGUCGC
UAUCGCAAGUAAUAUCGGUGGUAAACAAGCGCUUGAAACCGUUCAACGCCUUCUGCCUGUGCUUUGUCAGGCACAUGGAUUAA
CACCCGAACAGGUUGUCGCGAUAGCUUCAAAUGGGGGUGGUCGUCCGGCACUGGAAAGCAUUGUUGCACAGCUGAGCCGUCCU
GAUCCGGCACUGGCAGCACUGACCAAUGAUCAUCUGGUUGCACUGGCAUGUCUGGGUGGUCGCCCUGCCCUGGAUGCAGUUAA
AAAAGGUCUGCCGCAUGCACCGGCACUGAUUAAACGUACCAAUCGUCGUAUUCCGGAACGUACCAGCCAUCGUGUUGCUAGC
>TAL6-VPR protein
SEQ ID NO.: 199
MAPKKKRKVGIHGVPAAGSSGSHMVDLRTLGYSQQQQEKIKPKVRSTVAQHHEALVGHGFTHAHIVALSQHPAALGTVAVKYQ
DMIAALPEATHEAIVGVGKRGAGARALEALLTVAGELRGPPLQLDTGQLLKIAKRGGVTAVEAVHAWRNALTGAPLULTPEQV
VAIASUNGGKQALETVQRLLPVLCQAHGLTPEQVVAIASUNGGKQALETVQRLLPVLCQAHGLTPEQVVAIASNGGGKQALET
VQRLLPVLCQAHGLTPEQVVAIASUNGGKQALETVQRLLPVLCQAHGLTPEQVVAIASUGGGKQALETVQRLLPVLCQAHGLT
PEQVVAIASHDGGKQALETVQRLLPVLCQAHGLTPEQVVAIASNIGGKQALETVQRLLPVLCQAHGLTPEQVVAIASUNGGKQ
ALETVQRLLPVLCQAHGLTPEQVVAIASHDGGKQALETVQRLLPVLCQAHGLTPEQVVAIASHDGGKQALETVQRLLPVLCQA
HGLTPEQVVAIASNIGGKQALETVQRLLPVLCQAHGLTPEQVVAIASNNGGKQALETVQRLLPVLCQAHGLTPEQVVAIASNI
GGKQALETVQRLLPVLCQAHGLTPEQVVAIASNIGGKQALETVQRLLPVLCQAHGLTPEQVVAIASNIGGKQALETVQRLLPV
LCQAHGLTPEQVVAIASHDGGKQALETVQRLLPVLCQAHGLTPEQVVAIASHDGGKQALETVQRLLPVLCQAHGLTPEQVVAI
ASNIGGRPALESIVAQLSRPDPALAALTNDHLVALACLGGRPALDAVKKGLPHAPALIKRTNRRIPERTSHRVASGSGGGSGG
DALDDFDLDMLGSDALDDFDLDMLGSDALDDFDLDMLGSDALDDFDLDMLSGGPKKKRKVGSQYLPDTDDRHRIEEKRKRTYE
TFKSIMKKSPFSGPTDPRPPPRRIAVPSRSSASVPKPAPQPYPFTSSLSTINYDEFPTMVFPSGQISQASALAPAPPQVLPQA
PAPAPAPAMVSALAQAPAPVPVLAPGPPQAVAPPAPKPTQAGEGTLSEALLQLQFDDEDLGALLGNSTDPAVFTDLASVDNSE
FQQLLNQGIPVAPHTTEPMLMEYPEAITRLVTGAQRPPDPAPAPLGAPGLPNGLLSGDEDFSSIADMDFSALLGSGSGSRDSR
EGMFLPKPEAGSAISDVFEGREVCQPKRLRPFHPPGSPWANRPLPASLAPTPTGPVHEPVGSLTPAPVPQPLDPAPAVTPEAS
HLLEDPDEETSQAVKALREMADTVIPQKEEAAICGQMDLSHPPPRGHLDELTTTLESMTEDLNLDSPLTPELNEILDTFLNDE
CLLHAMHISTGLSIFDTSLFSGGKRPAATKKAGQAKKKKGSYPYDVPDY*
>TAL6-VPR mRNA
SEQ ID NO.: 200
AGGAAATAAGAGAGAAAAGAAGAGTAAGAAGAAATATAAGAGCCACCATGGCCCCCAAGAAGAAGCGGAAGGTGGGCATCCAC
GGCGTGCCCGCCGCCGGCAGCAGCGGATCCCATATGGTTGATCTGCGTACCCTGGGTTATAGCCAGCAGCAGCAAGAAAAAAT
CAAACCGAAAGTTCGTAGCACCGTTGCACAGCATCATGAAGCACTGGTTGGTCATGGTTTTACCCATGCACATATTGTTGCAC
TGAGCCAGCATCCGGCAGCACTGGGCACCGTTGCAGTTAAATATCAGGATATGATTGCAGCACTGCCGGAAGCAACCCATGAA
GCAATTGTTGGTGTTGGTAAACGCGGAGCTGGTGCACGTGCCCTGGAAGCACTGCTGACCGTTGCCGGTGAACTGCGTGGTCC
GCCTCTGCAGCTGGATACCGGTCAGCTGCTGAAAATTGCAAAACGTGGTGGTGTTACCGCAGTTGAAGCAGTTCATGCATGGC
GTAATGCACTGACCGGTGCACCGCTGAATCTGACACCGGAACAGGTTGTTGCAATTGCCAGCAATAATGGTGGCAAACAGGCA
CTGGAAACCGTTCAGCGTCTGCTGCCGGTTCTGTGTCAGGCACATGGTCTGACCCCTGAACAGGTGGTGGCCATTGCAAGCAA
CAATGGCGGTAAACAAGCCCTGGAAACAGTGCAGCGCCTGTTACCGGTGCTGTGCCAGGCCCATGGCTTAACTCCGGAACAGG
TGGTAGCGATCGCATCAAATGGTGGAGGTAAACAGGCCTTAGAAACCGTACAGCGCTTACTGCCGGTGTTATGCCAGGCGCAC
GGCCTGACGCCAGAACAGGTAGTGGCAATCGCCTCAAATAATGGTGGAAAACAGGCGTTAGAGACAGTCCAGCGCCTGCTGCC
TGTATTATGTCAAGCCCATGGCCTGACCCCAGAGCAAGTTGTTGCGATTGCAAGTAATGGCGGGGGTAAACAGGCACTTGAGA
CAGTTCAACGTTTACTGCCTGTACTGTGCCAAGCTCACGGTCTGACTCCGGAACAAGTCGTCGCGATTGCGAGTCATGATGGT
GGCAAACAAGCATTAGAAACGGTGCAACGCCTGCTGCCAGTTCTTTGCCAGGCTCACGGTTTAACCCCTGAGCAGGTTGTAGC
TATTGCGAGTAACATTGGTGGTAAGCAGGCGTTGGAAACTGTGCAAAGACTGCTGCCCGTGTTGTGCCAAGCACATGGTTTAA
CCCCAGAACAAGTCGTAGCAATCGCAAGCAACAATGGTGGCAAGCAAGCGCTTGAAACAGTACAGCGTTTATTACCGGTACTT
TGTCAGGCCCACGGTCTTACACCAGAACAAGTTGTGGCCATAGCCAGTCATGACGGCGGAAAGCAGGCTCTGGAAACGGTACA
ACGTCTGTTACCTGTTCTGTGTCAAGCGCACGGATTAACACCTGAACAAGTAGTTGCCATTGCGTCACATGATGGAGGCAAGC
AGGCCTTGGAGACAGTGCAGAGATTACTGCCAGTGTTGTGTCAGGCTCATGGCCTTACACCCGAGCAGGTCGTGGCAATTGCA
TCTAATATCGGCGGTAAGCAAGCTTTAGAGACTGTTCAGAGACTGCTTCCTGTCCTGTGCCAGGCACACGGACTTACGCCTGA
GCAAGTGGTTGCAATCGCCTCTAATAATGGTGGTAAGCAAGCACTGGAAACTGTCCAACGCTTACTTCCGGTGCTTTGTCAAG
CACACGGCTTAACGCCAGAGCAGGTCGTCGCCATAGCCAGCAATATAGGTGGTAAACAGGCCCTTGAAACGGTCCAAAGACTT
CTGCCGGTCCTTTGCCAAGCGCATGGGCTGACACCTGAGCAGGTAGTCGCGATTGCCTCAAACATTGGTGGGAAGCAGGCATT
AGAAACAGTTCAAAGATTATTACCAGTCCTGTGTCAGGCGCATGGGTTAACCCCAGAGCAGGTAGTTGCAATAGCATCCAATA
TCGGCGGAAAACAAGCGTTGGAAACGGTTCAGCGGTTATTGCCTGTTTTGTGCCAGGCGCATGGTTTGACACCCGAGCAAGTG
GTAGCCATAGCCTCACATGATGGGGGTAAACAAGCTTTGGAGACAGTACAACGGCTGCTTCCAGTTTTATGTCAGGCCCATGG
ATTGACGCCTGAACAAGTTGTCGCTATCGCAAGTCATGACGGTGGTAAACAAGCGCTTGAAACCGTTCAACGCCTTCTGCCTG
TGCTTTGTCAGGCACATGGATTAACACCCGAACAGGTTGTCGCGATAGCTTCAAATATAGGTGGTCGTCCGGCACTGGAAAGC
ATTGTTGCACAGCTGAGCCGTCCTGATCCGGCACTGGCAGCACTGACCAATGATCATCTGGTTGCACTGGCATGTCTGGGTGG
TCGCCCTGCCCTGGATGCAGTTAAAAAAGGTCTGCCGCATGCACCGGCACTGATTAAACGTACCAATCGTCGTATTCCGGAAC
GTACCAGCCATCGTGTTGCTAGCGGCAGCGGCGGCGGCAGCGGCGGCGACGCCCTGGACGACTTCGACCTGGACATGCTGGGC
AGCGACGCCCTGGACGACTTCGACCTGGACATGCTGGGCAGCGACGCCCTGGACGACTTCGACCTGGACATGCTGGGCAGCGA
CGCCCTGGACGACTTCGACCTGGACATGCTGAGCGGCGGCCCCAAGAAGAAGCGGAAGGTGGGCAGCCAGTACCTGCCCGACA
CCGACGACCGGCACCGGATCGAGGAGAAGCGGAAGCGGACCTACGAGACCTTCAAGAGCATCATGAAGAAATCCCCCTTCAGC
GGCCCCACCGACCCCCGGCCCCCCCCCCGGCGGATCGCCGTGCCCAGCCGGAGCAGCGCCAGCGTGCCCAAGCCCGCCCCCCA
GCCCTACCCCTTCACCAGCAGCCTGAGCACCATCAACTACGACGAGTTCCCCACCATGGTGTTCCCCAGCGGCCAGATCAGCC
AGGCCAGCGCCCTGGCCCCCGCCCCCCCCCAGGTGCTGCCCCAGGCCCCCGCCCCCGCCCCCGCCCCCGCCATGGTGAGCGCC
CTGGCCCAGGCCCCCGCCCCCGTGCCCGTGCTGGCCCCCGGCCCCCCCCAGGCCGTGGCCCCCCCCGCCCCCAAGCCCACCCA
GGCCGGCGAGGGCACCCTGAGCGAGGCCCTGCTGCAGCTGCAGTTCGACGACGAGGACCTGGGCGCCCTGCTGGGCAACAGCA
CCGACCCCGCCGTGTTCACCGACCTGGCCAGCGTGGACAACAGCGAGTTCCAGCAGCTGCTGAACCAGGGCATCCCCGTGGCC
CCCCACACCACCGAGCCCATGCTGATGGAGTACCCCGAGGCCATCACCCGGCTGGTGACCGGCGCCCAGCGGCCCCCCGACCC
CGCCCCCGCCCCCCTGGGCGCCCCCGGCCTGCCCAACGGCCTGCTGAGCGGCGACGAGGACTTCAGCAGCATCGCCGACATGG
ACTTCAGCGCCCTGCTGGGCAGCGGCAGCGGCAGCCGGGACAGCCGGGAGGGCATGTTCCTGCCCAAGCCCGAGGCCGGCAGC
GCCATCAGCGACGTGTTCGAGGGCCGGGAGGTGTGCCAGCCCAAGCGGCTCCGGCCCTTCCACCCCCCCGGCAGCCCCTGGGC
CAACCGGCCCCTGCCCGCCAGCCTGGCCCCCACCCCCACCGGCCCCGTGCACGAGCCCGTGGGCAGCCTGACCCCCGCCCCCG
TGCCCCAGCCCCTGGACCCCGCCCCCGCCGTGACCCCCGAGGCCAGCCACCTGCTGGAGGACCCCGACGAGGAGACCAGCCAG
GCCGTGAAGGCCCTGCGGGAGATGGCCGACACCGTGATCCCCCAGAAGGAGGAGGCCGCCATCTGCGGCCAGATGGACCTGAG
CCACCCCCCCCCCCGGGGCCACCTGGACGAGCTGACCACCACCCTGGAGAGCATGACCGAGGACCTGAACCTGGACAGCCCCC
TGACCCCCGAGCTGAACGAGATCCTGGACACCTTCCTGAACGACGAGTGCCTGCTGCACGCCATGCACATCAGCACCGGCCTG
AGCATCTTCGACACCAGCCTGTTCAGCGGCGGCAAGCGGCCCGCCGCCACCAAGAAGGCCGGCCAGGCCAAGAAGAAGAAGGG
CAGCTACCCCTACGACGTGCCCGACTACGCCTGAGCGGCCGCTTAATTAAGCTGCCTTCTGCGGGGCTTGCCTTCTGGCCATG
CCCTTCTTCTCTCCCTTGCACCTGTACCTCTTGGTCTTTGAATAAAGCCTGAGTAGGAAGTCTAGAAAAAAAAAAAAAAAAAA
AAAAAAAAAAAAAAAAAAAAAAAAAAAAAAAAAAAAAAAAAAAAAAAAAAAAAAAAAAAAAA
>TAL6 amino acid sequence
SEQ ID NO.: 201
GSHMVDLRTLGYSQQQQEKIKPKVRSTVAQHHEALVGHGFTHAHIVALSQHPAALGTVAVKYQDMIAALPEATHEAIVGVGKR
GAGARALEALLTVAGELRGPPLQLDTGQLLKIAKRGGVTAVEAVHAWRNALTGAPLULTPEQVVAIASUNGGKQALETVQRLL
PVLCQAHGLTPEQVVAIASUNGGKQALETVQRLLPVLCQAHGLTPEQVVAIASUGGGKQALETVQRLLPVLCQAHGLTPEQVV
AIASUNGGKQALETVQRLLPVLCQAHGLTPEQVVAIASUGGGKQALETVQRLLPVLCQAHGLTPEQVVAIASHDGGKQALETV
QRLLPVLCQAHGLTPEQVVAIASNIGGKQALETVQRLLPVLCQAHGLTPEQVVAIASUNGGKQALETVQRLLPVLCQAHGLTP
EQVVAIASHDGGKQALETVQRLLPVLCQAHGLTPEQVVAIASHDGGKQALETVQRLLPVLCQAHGLTPEQVVAIASNIGGKQA
LETVQRLLPVLCQAHGLTPEQVVAIASUNGGKQALETVQRLLPVLCQAHGLTPEQVVAIASNIGGKQALETVQRLLPVLCQAH
GLTPEQVVAIASNIGGKQALETVQRLLPVLCQAHGLTPEQVVAIASNIGGKQALETVQRLLPVLCQAHGLTPEQVVAIASHDG
GKQALETVQRLLPVLCQAHGLTPEQVVAIASHDGGKQALETVQRLLPVLCQAHGLTPEQVVAIASNIGGRPALESIVAQLSRP
DPALAALTNDHLVALACLGGRPALDAVKKGLPHAPALIKRTURRIPERTSHRVAS
>TAL6 mRNA sequence
SEQ ID NO.: 249
GGAUCCCAUAUGGUUGAUCUGCGUACCCUGGGUUAUAGCCAGCAGCAGCAAGAAAAAAUCAAACCGAAAGUUCGUAGCACCGU
UGCACAGCAUCAUGAAGCACUGGUUGGUCAUGGUUUUACCCAUGCACAUAUUGUUGCACUGAGCCAGCAUCCGGCAGCACUGG
GCACCGUUGCAGUUAAAUAUCAGGAUAUGAUUGCAGCACUGCCGGAAGCAACCCAUGAAGCAAUUGUUGGUGUUGGUAAACGC
GGAGCUGGUGCACGUGCCCUGGAAGCACUGCUGACCGUUGCCGGUGAACUGCGUGGUCCGCCUCUGCAGCUGGAUACCGGUCA
GCUGCUGAAAAUUGCAAAACGUGGUGGUGUUACCGCAGUUGAAGCAGUUCAUGCAUGGCGUAAUGCACUGACCGGUGCACCGC
UGAAUCUGACACCGGAACAGGUUGUUGCAAUUGCCAGCAAUAAUGGUGGCAAACAGGCACUGGAAACCGUUCAGCGUCUGCUG
CCGGUUCUGUGUCAGGCACAUGGUCUGACCCCUGAACAGGUGGUGGCCAUUGCAAGCAACAAUGGCGGUAAACAAGCCCUGGA
AACAGUGCAGCGCCUGUUACCGGUGCUGUGCCAGGCCCAUGGCUUAACUCCGGAACAGGUGGUAGCGAUCGCAUCAAAUGGUG
GAGGUAAACAGGCCUUAGAAACCGUACAGCGCUUACUGCCGGUGUUAUGCCAGGCGCACGGCCUGACGCCAGAACAGGUAGUG
GCAAUCGCCUCAAAUAAUGGUGGAAAACAGGCGUUAGAGACAGUCCAGCGCCUGCUGCCUGUAUUAUGUCAAGCCCAUGGCCU
GACCCCAGAGCAAGUUGUUGCGAUUGCAAGUAAUGGCGGGGGUAAACAGGCACUUGAGACAGUUCAACGUUUACUGCCUGUAC
UGUGCCAAGCUCACGGUCUGACUCCGGAACAAGUCGUCGCGAUUGCGAGUCAUGAUGGUGGCAAACAAGCAUUAGAAACGGUG
CAACGCCUGCUGCCAGUUCUUUGCCAGGCUCACGGUUUAACCCCUGAGCAGGUUGUAGCUAUUGCGAGUAACAUUGGUGGUAA
GCAGGCGUUGGAAACUGUGCAAAGACUGCUGCCCGUGUUGUGCCAAGCACAUGGUUUAACCCCAGAACAAGUCGUAGCAAUCG
CAAGCAACAAUGGUGGCAAGCAAGCGCUUGAAACAGUACAGCGUUUAUUACCGGUACUUUGUCAGGCCCACGGUCUUACACCA
GAACAAGUUGUGGCCAUAGCCAGUCAUGACGGCGGAAAGCAGGCUCUGGAAACGGUACAACGUCUGUUACCUGUUCUGUGUCA
AGCGCACGGAUUAACACCUGAACAAGUAGUUGCCAUUGCGUCACAUGAUGGAGGCAAGCAGGCCUUGGAGACAGUGCAGAGAU
UACUGCCAGUGUUGUGUCAGGCUCAUGGCCUUACACCCGAGCAGGUCGUGGCAAUUGCAUCUAAUAUCGGCGGUAAGCAAGCU
UUAGAGACUGUUCAGAGACUGCUUCCUGUCCUGUGCCAGGCACACGGACUUACGCCUGAGCAAGUGGUUGCAAUCGCCUCUAA
UAAUGGUGGUAAGCAAGCACUGGAAACUGUCCAACGCUUACUUCCGGUGCUUUGUCAAGCACACGGCUUAACGCCAGAGCAGG
UCGUCGCCAUAGCCAGCAAUAUAGGUGGUAAACAGGCCCUUGAAACGGUCCAAAGACUUCUGCCGGUCCUUUGCCAAGCGCAU
GGGCUGACACCUGAGCAGGUAGUCGCGAUUGCCUCAAACAUUGGUGGGAAGCAGGCAUUAGAAACAGUUCAAAGAUUAUUACC
AGUCCUGUGUCAGGCGCAUGGGUUAACCCCAGAGCAGGUAGUUGCAAUAGCAUCCAAUAUCGGCGGAAAACAAGCGUUGGAAA
CGGUUCAGCGGUUAUUGCCUGUUUUGUGCCAGGCGCAUGGUUUGACACCCGAGCAAGUGGUAGCCAUAGCCUCACAUGAUGGG
GGUAAACAAGCUUUGGAGACAGUACAACGGCUGCUUCCAGUUUUAUGUCAGGCCCAUGGAUUGACGCCUGAACAAGUUGUCGC
UAUCGCAAGUCAUGACGGUGGUAAACAAGCGCUUGAAACCGUUCAACGCCUUCUGCCUGUGCUUUGUCAGGCACAUGGAUUAA
CACCCGAACAGGUUGUCGCGAUAGCUUCAAAUAUAGGUGGUCGUCCGGCACUGGAAAGCAUUGUUGCACAGCUGAGCCGUCCU
GAUCCGGCACUGGCAGCACUGACCAAUGAUCAUCUGGUUGCACUGGCAUGUCUGGGUGGUCGCCCUGCCCUGGAUGCAGUUAA
AAAAGGUCUGCCGCAUGCACCGGCACUGAUUAAACGUACCAAUCGUCGUAUUCCGGAACGUACCAGCCAUCGUGUUGCUAGC
>TAL7-VPR protein
SEQ ID NO.: 202
MAPKKKRKVGIHGVPAAGSSGSHMVDLRTLGYSQQQQEKIKPKVRSTVAQHHEALVGHGFTHAHIVALSQHPAALGTVAVKYQ
DMIAALPEATHEAIVGVGKRGAGARALEALLTVAGELRGPPLQLDTGQLLKIAKRGGVTAVEAVHAWRNALTGAPLULTPEQV
VAIASHDGGKQALETVQRLLPVLCQAHGLTPEQVVAIASUGGGKQALETVQRLLPVLCQAHGLTPEQVVAIASUNGGKQALET
VQRLLPVLCQAHGLTPEQVVAIASNIGGKQALETVQRLLPVLCQAHGLTPEQVVAIASNIGGKQALETVQRLLPVLCQAHGLT
PEQVVAIASHDGGKQALETVQRLLPVLCQAHGLTPEQVVAIASNIGGKQALETVQRLLPVLCQAHGLTPEQVVAIASUGGGKQ
ALETVQRLLPVLCQAHGLTPEQVVAIASHDGGKQALETVQRLLPVLCQAHGLTPEQVVAIASUNGGKQALETVQRLLPVLCQA
HGLTPEQVVAIASUNGGKQALETVQRLLPVLCQAHGLTPEQVVAIASUGGGKQALETVQRLLPVLCQAHGLTPEQVVAIASNN
GGKQALETVQRLLPVLCQAHGLTPEQVVAIASNIGGKQALETVQRLLPVLCQAHGLTPEQVVAIASUNGGKQALETVQRLLPV
LCQAHGLTPEQVVAIASUGGGKQALETVQRLLPVLCQAHGLTPEQVVAIASUGGGKQALETVQRLLPVLCQAHGLTPEQVVAI
ASNIGGRPALESIVAQLSRPDPALAALTNDHLVALACLGGRPALDAVKKGLPHAPALIKRTURRIPERTSHRVASGSGGGSGG
DALDDFDLDMLGSDALDDFDLDMLGSDALDDFDLDMLGSDALDDFDLDMLSGGPKKKRKVGSQYLPDTDDRHRIEEKRKRTYE
TFKSIMKKSPFSGPTDPRPPPRRIAVPSRSSASVPKPAPQPYPFTSSLSTINYDEFPTMVFPSGQISQASALAPAPPQVLPQA
PAPAPAPAMVSALAQAPAPVPVLAPGPPQAVAPPAPKPTQAGEGTLSEALLQLQFDDEDLGALLGNSTDPAVFTDLASVDNSE
FQQLLNQGIPVAPHTTEPMLMEYPEAITRLVTGAQRPPDPAPAPLGAPGLPNGLLSGDEDFSSIADMDFSALLGSGSGSRDSR
EGMFLPKPEAGSAISDVFEGREVCQPKRLRPFHPPGSPWANRPLPASLAPTPTGPVHEPVGSLTPAPVPQPLDPAPAVTPEAS
HLLEDPDEETSQAVKALREMADTVIPQKEEAAICGQMDLSHPPPRGHLDELTTTLESMTEDLNLDSPLTPELNEILDTFLNDE
CLLHAMHISTGLSIFDTSLFSGGKRPAATKKAGQAKKKKGSYPYDVPDYA*
>TAL7-VPR mRNA
SEQ ID NO.: 203
AGGAAATAAGAGAGAAAAGAAGAGTAAGAAGAAATATAAGAGCCACCATGGCCCCCAAGAAGAAGCGGAAGGTGGGCATCCAC
GGCGTGCCCGCCGCCGGCAGCAGCGGATCCCATATGGTTGATCTGCGTACCCTGGGTTATAGCCAGCAGCAGCAAGAAAAAAT
CAAACCGAAAGTTCGTAGCACCGTTGCACAGCATCATGAAGCACTGGTTGGTCATGGTTTTACCCATGCACATATTGTTGCAC
TGAGCCAGCATCCGGCAGCACTGGGCACCGTTGCAGTTAAATATCAGGATATGATTGCAGCACTGCCGGAAGCAACCCATGAA
GCAATTGTTGGTGTTGGTAAACGCGGAGCTGGTGCACGTGCCCTGGAAGCACTGCTGACCGTTGCCGGTGAACTGCGTGGTCC
GCCTCTGCAGCTGGATACCGGTCAGCTGCTGAAAATTGCAAAACGTGGTGGTGTTACCGCAGTTGAAGCAGTTCATGCATGGC
GTAATGCACTGACCGGTGCACCGCTGAATCTGACACCGGAACAGGTTGTTGCAATTGCCAGCCATGATGGTGGCAAACAGGCA
CTGGAAACCGTTCAGCGTCTGCTGCCGGTTCTGTGTCAGGCACATGGTCTGACCCCTGAACAGGTGGTGGCCATTGCAAGCAA
TGGTGGCGGTAAACAAGCCCTGGAAACAGTGCAGCGCCTGTTACCGGTGCTGTGCCAGGCCCATGGCTTAACTCCGGAACAGG
TGGTAGCGATCGCATCAAATAATGGAGGTAAACAGGCCTTAGAAACCGTACAGCGCTTACTGCCGGTGTTATGCCAGGCGCAC
GGCCTGACGCCAGAACAGGTAGTGGCAATCGCCTCAAACATTGGTGGAAAACAGGCGTTAGAGACAGTCCAGCGCCTGCTGCC
TGTATTATGTCAAGCCCATGGCCTGACCCCAGAGCAAGTTGTTGCGATTGCAAGTAATATCGGGGGTAAACAGGCACTTGAGA
CAGTTCAACGTTTACTGCCTGTACTGTGCCAAGCTCACGGTCTGACTCCGGAACAAGTCGTCGCGATTGCGAGTCATGACGGT
GGCAAACAAGCATTAGAAACGGTGCAACGCCTGCTGCCAGTTCTTTGCCAGGCTCACGGTTTAACCCCTGAGCAGGTTGTAGC
TATTGCGAGTAATATAGGTGGTAAGCAGGCGTTGGAAACTGTGCAAAGACTGCTGCCCGTGTTGTGCCAAGCACATGGTTTAA
CCCCAGAACAAGTCGTAGCAATCGCAAGCAATGGCGGTGGCAAGCAAGCGCTTGAAACAGTACAGCGTTTATTACCGGTACTT
TGTCAGGCCCACGGTCTTACACCAGAACAAGTTGTGGCCATAGCCAGTCATGATGGCGGAAAGCAGGCTCTGGAAACGGTACA
ACGTCTGTTACCTGTTCTGTGTCAAGCGCACGGATTAACACCTGAACAAGTAGTTGCCATTGCGTCAAATAATGGAGGCAAGC
AGGCCTTGGAGACAGTGCAGAGATTACTGCCAGTGTTGTGTCAGGCTCATGGCCTTACACCCGAGCAGGTCGTGGCAATTGCA
TCTAACAATGGCGGTAAGCAAGCTTTAGAGACTGTTCAGAGACTGCTTCCTGTCCTGTGCCAGGCACACGGACTTACGCCTGA
GCAAGTGGTTGCAATCGCCTCTAATGGGGGTGGTAAGCAAGCACTGGAAACTGTCCAACGCTTACTTCCGGTGCTTTGTCAAG
CACACGGCTTAACGCCAGAGCAGGTCGTCGCCATAGCCAGCAATAATGGTGGTAAACAGGCCCTTGAAACGGTCCAAAGACTT
CTGCCGGTCCTTTGCCAAGCGCATGGGCTGACACCTGAGCAGGTAGTCGCGATTGCCTCAAACATTGGTGGGAAGCAGGCATT
AGAAACAGTTCAAAGATTATTACCAGTCCTGTGTCAGGCGCATGGGTTAACCCCAGAGCAGGTAGTTGCAATAGCATCCAACA
ATGGCGGAAAACAAGCGTTGGAAACGGTTCAGCGGTTATTGCCTGTTTTGTGCCAGGCGCATGGTTTGACACCCGAGCAAGTG
GTAGCCATAGCCTCAAACGGTGGGGGTAAACAAGCTTTGGAGACAGTACAACGGCTGCTTCCAGTTTTATGTCAGGCCCATGG
ATTGACGCCTGAACAAGTTGTCGCTATCGCAAGTAATGGTGGTGGTAAACAAGCGCTTGAAACCGTTCAACGCCTTCTGCCTG
TGCTTTGTCAGGCACATGGATTAACACCCGAACAGGTTGTCGCGATAGCTTCAAATATCGGTGGTCGTCCGGCACTGGAAAGC
ATTGTTGCACAGCTGAGCCGTCCTGATCCGGCACTGGCAGCACTGACCAATGATCATCTGGTTGCACTGGCATGTCTGGGTGG
TCGCCCTGCCCTGGATGCAGTTAAAAAAGGTCTGCCGCATGCACCGGCACTGATTAAACGTACCAATCGTCGTATTCCGGAAC
GTACCAGCCATCGTGTTGCTAGCGGCAGCGGCGGCGGCAGCGGCGGCGACGCCCTGGACGACTTCGACCTGGACATGCTGGGC
AGCGACGCCCTGGACGACTTCGACCTGGACATGCTGGGCAGCGACGCCCTGGACGACTTCGACCTGGACATGCTGGGCAGCGA
CGCCCTGGACGACTTCGACCTGGACATGCTGAGCGGCGGCCCCAAGAAGAAGCGGAAGGTGGGCAGCCAGTACCTGCCCGACA
CCGACGACCGGCACCGGATCGAGGAGAAGCGGAAGCGGACCTACGAGACCTTCAAGAGCATCATGAAGAAATCCCCCTTCAGC
GGCCCCACCGACCCCCGGCCCCCCCCCCGGCGGATCGCCGTGCCCAGCCGGAGCAGCGCCAGCGTGCCCAAGCCCGCCCCCCA
GCCCTACCCCTTCACCAGCAGCCTGAGCACCATCAACTACGACGAGTTCCCCACCATGGTGTTCCCCAGCGGCCAGATCAGCC
AGGCCAGCGCCCTGGCCCCCGCCCCCCCCCAGGTGCTGCCCCAGGCCCCCGCCCCCGCCCCCGCCCCCGCCATGGTGAGCGCC
CTGGCCCAGGCCCCCGCCCCCGTGCCCGTGCTGGCCCCCGGCCCCCCCCAGGCCGTGGCCCCCCCCGCCCCCAAGCCCACCCA
GGCCGGCGAGGGCACCCTGAGCGAGGCCCTGCTGCAGCTGCAGTTCGACGACGAGGACCTGGGCGCCCTGCTGGGCAACAGCA
CCGACCCCGCCGTGTTCACCGACCTGGCCAGCGTGGACAACAGCGAGTTCCAGCAGCTGCTGAACCAGGGCATCCCCGTGGCC
CCCCACACCACCGAGCCCATGCTGATGGAGTACCCCGAGGCCATCACCCGGCTGGTGACCGGCGCCCAGCGGCCCCCCGACCC
CGCCCCCGCCCCCCTGGGCGCCCCCGGCCTGCCCAACGGCCTGCTGAGCGGCGACGAGGACTTCAGCAGCATCGCCGACATGG
ACTTCAGCGCCCTGCTGGGCAGCGGCAGCGGCAGCCGGGACAGCCGGGAGGGCATGTTCCTGCCCAAGCCCGAGGCCGGCAGC
GCCATCAGCGACGTGTTCGAGGGCCGGGAGGTGTGCCAGCCCAAGCGGCTCCGGCCCTTCCACCCCCCCGGCAGCCCCTGGGC
CAACCGGCCCCTGCCCGCCAGCCTGGCCCCCACCCCCACCGGCCCCGTGCACGAGCCCGTGGGCAGCCTGACCCCCGCCCCCG
TGCCCCAGCCCCTGGACCCCGCCCCCGCCGTGACCCCCGAGGCCAGCCACCTGCTGGAGGACCCCGACGAGGAGACCAGCCAG
GCCGTGAAGGCCCTGCGGGAGATGGCCGACACCGTGATCCCCCAGAAGGAGGAGGCCGCCATCTGCGGCCAGATGGACCTGAG
CCACCCCCCCCCCCGGGGCCACCTGGACGAGCTGACCACCACCCTGGAGAGCATGACCGAGGACCTGAACCTGGACAGCCCCC
TGACCCCCGAGCTGAACGAGATCCTGGACACCTTCCTGAACGACGAGTGCCTGCTGCACGCCATGCACATCAGCACCGGCCTG
AGCATCTTCGACACCAGCCTGTTCAGCGGCGGCAAGCGGCCCGCCGCCACCAAGAAGGCCGGCCAGGCCAAGAAGAAGAAGGG
CAGCTACCCCTACGACGTGCCCGACTACGCCTGAGCGGCCGCTTAATTAAGCTGCCTTCTGCGGGGCTTGCCTTCTGGCCATG
CCCTTCTTCTCTCCCTTGCACCTGTACCTCTTGGTCTTTGAATAAAGCCTGAGTAGGAAGTCTAGAAAAAAAAAAAAAAAAAA
AAAAAAAAAAAAAAAAAAAAAAAAAAAAAAAAAAAAAAAAAAAAAAAAAAAAAAAAAAAAAA
>TAL7 amino acid sequence
SEQ ID NO.: 204
GSHMVDLRTLGYSQQQQEKIKPKVRSTVAQHHEALVGHGFTHAHIVALSQHPAALGTVAVKYQDMIAALPEATHEAIVGVGKR
GAGARALEALLTVAGELRGPPLQLDTGQLLKIAKRGGVTAVEAVHAWRNALTGAPLNLTPEQVVAIASHDGGKQALETVQRLL
PVLCQAHGLTPEQVVAIASNGGGKQALETVQRLLPVLCQAHGLTPEQVVAIASNNGGKQALETVQRLLPVLCQAHGLTPEQVV
AIASNIGGKQALETVQRLLPVLCQAHGLTPEQVVAIASNIGGKQALETVQRLLPVLCQAHGLTPEQVVAIASHDGGKQALETV
QRLLPVLCQAHGLTPEQVVAIASNIGGKQALETVQRLLPVLCQAHGLTPEQVVAIASNGGGKQALETVQRLLPVLCQAHGLTP
EQVVAIASHDGGKQALETVQRLLPVLCQAHGLTPEQVVAIASNNGGKQALETVQRLLPVLCQAHGLTPEQVVAIASNNGGKQA
LETVQRLLPVLCQAHGLTPEQVVAIASNGGGKQALETVQRLLPVLCQAHGLTPEQVVAIASNNGGKQALETVQRLLPVLCQAH
GLTPEQVVAIASNIGGKQALETVQRLLPVLCQAHGLTPEQVVAIASNNGGKQALETVQRLLPVLCQAHGLTPEQVVAIASNGG
GKQALETVQRLLPVLCQAHGLTPEQVVAIASNGGGKQALETVQRLLPVLCQAHGLTPEQVVAIASNIGGRPALESIVAQLSRP
DPALAALTNDHLVALACLGGRPALDAVKKGLPHAPALIKRTNRRIPERTSHRVAS
>TAL7 mRNA sequence
SEQ ID NO.: 250
GGAUCCCAUAUGGUUGAUCUGCGUACCCUGGGUUAUAGCCAGCAGCAGCAAGAAAAAAUCAAACCGAAAGUUCGUAGCACCGU
UGCACAGCAUCAUGAAGCACUGGUUGGUCAUGGUUUUACCCAUGCACAUAUUGUUGCACUGAGCCAGCAUCCGGCAGCACUGG
GCACCGUUGCAGUUAAAUAUCAGGAUAUGAUUGCAGCACUGCCGGAAGCAACCCAUGAAGCAAUUGUUGGUGUUGGUAAACGC
GGAGCUGGUGCACGUGCCCUGGAAGCACUGCUGACCGUUGCCGGUGAACUGCGUGGUCCGCCUCUGCAGCUGGAUACCGGUCA
GCUGCUGAAAAUUGCAAAACGUGGUGGUGUUACCGCAGUUGAAGCAGUUCAUGCAUGGCGUAAUGCACUGACCGGUGCACCGC
UGAAUCUGACACCGGAACAGGUUGUUGCAAUUGCCAGCCAUGAUGGUGGCAAACAGGCACUGGAAACCGUUCAGCGUCUGCUG
CCGGUUCUGUGUCAGGCACAUGGUCUGACCCCUGAACAGGUGGUGGCCAUUGCAAGCAAUGGUGGCGGUAAACAAGCCCUGGA
AACAGUGCAGCGCCUGUUACCGGUGCUGUGCCAGGCCCAUGGCUUAACUCCGGAACAGGUGGUAGCGAUCGCAUCAAAUAAUG
GAGGUAAACAGGCCUUAGAAACCGUACAGCGCUUACUGCCGGUGUUAUGCCAGGCGCACGGCCUGACGCCAGAACAGGUAGUG
GCAAUCGCCUCAAACAUUGGUGGAAAACAGGCGUUAGAGACAGUCCAGCGCCUGCUGCCUGUAUUAUGUCAAGCCCAUGGCCU
GACCCCAGAGCAAGUUGUUGCGAUUGCAAGUAAUAUCGGGGGUAAACAGGCACUUGAGACAGUUCAACGUUUACUGCCUGUAC
UGUGCCAAGCUCACGGUCUGACUCCGGAACAAGUCGUCGCGAUUGCGAGUCAUGACGGUGGCAAACAAGCAUUAGAAACGGUG
CAACGCCUGCUGCCAGUUCUUUGCCAGGCUCACGGUUUAACCCCUGAGCAGGUUGUAGCUAUUGCGAGUAAUAUAGGUGGUAA
GCAGGCGUUGGAAACUGUGCAAAGACUGCUGCCCGUGUUGUGCCAAGCACAUGGUUUAACCCCAGAACAAGUCGUAGCAAUCG
CAAGCAAUGGCGGUGGCAAGCAAGCGCUUGAAACAGUACAGCGUUUAUUACCGGUACUUUGUCAGGCCCACGGUCUUACACCA
GAACAAGUUGUGGCCAUAGCCAGUCAUGAUGGCGGAAAGCAGGCUCUGGAAACGGUACAACGUCUGUUACCUGUUCUGUGUCA
AGCGCACGGAUUAACACCUGAACAAGUAGUUGCCAUUGCGUCAAAUAAUGGAGGCAAGCAGGCCUUGGAGACAGUGCAGAGAU
UACUGCCAGUGUUGUGUCAGGCUCAUGGCCUUACACCCGAGCAGGUCGUGGCAAUUGCAUCUAACAAUGGCGGUAAGCAAGCU
UUAGAGACUGUUCAGAGACUGCUUCCUGUCCUGUGCCAGGCACACGGACUUACGCCUGAGCAAGUGGUUGCAAUCGCCUCUAA
UGGGGGUGGUAAGCAAGCACUGGAAACUGUCCAACGCUUACUUCCGGUGCUUUGUCAAGCACACGGCUUAACGCCAGAGCAGG
UCGUCGCCAUAGCCAGCAAUAAUGGUGGUAAACAGGCCCUUGAAACGGUCCAAAGACUUCUGCCGGUCCUUUGCCAAGCGCAU
GGGCUGACACCUGAGCAGGUAGUCGCGAUUGCCUCAAACAUUGGUGGGAAGCAGGCAUUAGAAACAGUUCAAAGAUUAUUACC
AGUCCUGUGUCAGGCGCAUGGGUUAACCCCAGAGCAGGUAGUUGCAAUAGCAUCCAACAAUGGCGGAAAACAAGCGUUGGAAA
CGGUUCAGCGGUUAUUGCCUGUUUUGUGCCAGGCGCAUGGUUUGACACCCGAGCAAGUGGUAGCCAUAGCCUCAAACGGUGGG
GGUAAACAAGCUUUGGAGACAGUACAACGGCUGCUUCCAGUUUUAUGUCAGGCCCAUGGAUUGACGCCUGAACAAGUUGUCGC
UAUCGCAAGUAAUGGUGGUGGUAAACAAGCGCUUGAAACCGUUCAACGCCUUCUGCCUGUGCUUUGUCAGGCACAUGGAUUAA
CACCCGAACAGGUUGUCGCGAUAGCUUCAAAUAUCGGUGGUCGUCCGGCACUGGAAAGCAUUGUUGCACAGCUGAGCCGUCCU
GAUCCGGCACUGGCAGCACUGACCAAUGAUCAUCUGGUUGCACUGGCAUGUCUGGGUGGUCGCCCUGCCCUGGAUGCAGUUAA
AAAAGGUCUGCCGCAUGCACCGGCACUGAUUAAACGUACCAAUCGUCGUAUUCCGGAACGUACCAGCCAUCGUGUUGCUAGC
>TAL8-VPR protein
SEQ ID NO.: 205
MAPKKKRKVGIHGVPAAGSSGSHMVDLRTLGYSQQQQEKIKPKVRSTVAQHHEALVGHGFTHAHIVALSQHPAALGTVAVKYQ
DMIAALPEATHEAIVGVGKRGAGARALEALLTVAGELRGPPLQLDTGQLLKIAKRGGVTAVEAVHAWRNALTGAPLULTPEQV
VAIASHDGGKQALETVQRLLPVLCQAHGLTPEQVVAIASUGGGKQALETVQRLLPVLCQAHGLTPEQVVAIASUGGGKQALET
VQRLLPVLCQAHGLTPEQVVAIASUNGGKQALETVQRLLPVLCQAHGLTPEQVVAIASUNGGKQALETVQRLLPVLCQAHGLT
PEQVVAIASUNGGKQALETVQRLLPVLCQAHGLTPEQVVAIASUNGGKQALETVQRLLPVLCQAHGLTPEQVVAIASNGGGKQ
ALETVQRLLPVLCQAHGLTPEQVVAIASUNGGKQALETVQRLLPVLCQAHGLTPEQVVAIASNIGGKQALETVQRLLPVLCQA
HGLTPEQVVAIASHDGGKQALETVQRLLPVLCQAHGLTPEQVVAIASNIGGKQALETVQRLLPVLCQAHGLTPEQVVAIASNI
GGKQALETVQRLLPVLCQAHGLTPEQVVAIASUGGGKQALETVQRLLPVLCQAHGLTPEQVVAIASUNGGKQALETVQRLLPV
LCQAHGLTPEQVVAIASUNGGKQALETVQRLLPVLCQAHGLTPEQVVAIASHDGGKQALETVQRLLPVLCQAHGLTPEQVVAI
ASUGGGRPALESIVAQLSRPDPALAALTNDHLVALACLGGRPALDAVKKGLPHAPALIKRTURRIPERTSHRVASGSGGGSGG
DALDDFDLDMLGSDALDDFDLDMLGSDALDDFDLDMLGSDALDDFDLDMLSGGPKKKRKVGSQYLPDTDDRHRIEEKRKRTYE
TFKSIMKKSPFSGPTDPRPPPRRIAVPSRSSASVPKPAPQPYPFTSSLSTINYDEFPTMVFPSGQISQASALAPAPPQVLPQA
PAPAPAPAMVSALAQAPAPVPVLAPGPPQAVAPPAPKPTQAGEGTLSEALLQLQFDDEDLGALLGNSTDPAVFTDLASVDNSE
FQQLLNQGIPVAPHTTEPMLMEYPEAITRLVTGAQRPPDPAPAPLGAPGLPNGLLSGDEDFSSIADMDFSALLGSGSGSRDSR
EGMFLPKPEAGSAISDVFEGREVCQPKRLRPFHPPGSPWANRPLPASLAPTPTGPVHEPVGSLTPAPVPQPLDPAPAVTPEAS
HLLEDPDEETSQAVKALREMADTVIPQKEEAAICGQMDLSHPPPRGHLDELTTTLESMTEDLNLDSPLTPELNEILDTFLNDE
CLLHAMHISTGLSIFDTSLFSGGKRPAATKKAGQAKKKKGSYPYDVPDYA*
>TAL8-VPR mRNA
SEQ ID NO.: 206
AGGAAATAAGAGAGAAAAGAAGAGTAAGAAGAAATATAAGAGCCACCATGGCCCCCAAGAAGAAGCGGAAGGTGGGCATCCAC
GGCGTGCCCGCCGCCGGCAGCAGCGGATCCCATATGGTTGATCTGCGTACCCTGGGTTATAGCCAGCAGCAGCAAGAAAAAAT
CAAACCGAAAGTTCGTAGCACCGTTGCACAGCATCATGAAGCACTGGTTGGTCATGGTTTTACCCATGCACATATTGTTGCAC
TGAGCCAGCATCCGGCAGCACTGGGCACCGTTGCAGTTAAATATCAGGATATGATTGCAGCACTGCCGGAAGCAACCCATGAA
GCAATTGTTGGTGTTGGTAAACGCGGAGCTGGTGCACGTGCCCTGGAAGCACTGCTGACCGTTGCCGGTGAACTGCGTGGTCC
GCCTCTGCAGCTGGATACCGGTCAGCTGCTGAAAATTGCAAAACGTGGTGGTGTTACCGCAGTTGAAGCAGTTCATGCATGGC
GTAATGCACTGACCGGTGCACCGCTGAATCTGACACCGGAACAGGTTGTTGCAATTGCCAGCCATGATGGTGGCAAACAGGCA
CTGGAAACCGTTCAGCGTCTGCTGCCGGTTCTGTGTCAGGCACATGGTCTGACCCCTGAACAGGTGGTGGCCATTGCAAGCAA
TGGTGGCGGTAAACAAGCCCTGGAAACAGTGCAGCGCCTGTTACCGGTGCTGTGCCAGGCCCATGGCTTAACTCCGGAACAGG
TGGTAGCGATCGCATCAAATGGCGGAGGTAAACAGGCCTTAGAAACCGTACAGCGCTTACTGCCGGTGTTATGCCAGGCGCAC
GGCCTGACGCCAGAACAGGTAGTGGCAATCGCCTCAAATAATGGTGGAAAACAGGCGTTAGAGACAGTCCAGCGCCTGCTGCC
TGTATTATGTCAAGCCCATGGCCTGACCCCAGAGCAAGTTGTTGCGATTGCAAGTAACAATGGGGGTAAACAGGCACTTGAGA
CAGTTCAACGTTTACTGCCTGTACTGTGCCAAGCTCACGGTCTGACTCCGGAACAAGTCGTCGCGATTGCGAGTAATAATGGT
GGCAAACAAGCATTAGAAACGGTGCAACGCCTGCTGCCAGTTCTTTGCCAGGCTCACGGTTTAACCCCTGAGCAGGTTGTAGC
TATTGCGAGTAACAATGGTGGTAAGCAGGCGTTGGAAACTGTGCAAAGACTGCTGCCCGTGTTGTGCCAAGCACATGGTTTAA
CCCCAGAACAAGTCGTAGCAATCGCAAGCAATGGGGGTGGCAAGCAAGCGCTTGAAACAGTACAGCGTTTATTACCGGTACTT
TGTCAGGCCCACGGTCTTACACCAGAACAAGTTGTGGCCATAGCCAGTAATAATGGCGGAAAGCAGGCTCTGGAAACGGTACA
ACGTCTGTTACCTGTTCTGTGTCAAGCGCACGGATTAACACCTGAACAAGTAGTTGCCATTGCGTCAAACATTGGAGGCAAGC
AGGCCTTGGAGACAGTGCAGAGATTACTGCCAGTGTTGTGTCAGGCTCATGGCCTTACACCCGAGCAGGTCGTGGCAATTGCA
TCTCATGACGGCGGTAAGCAAGCTTTAGAGACTGTTCAGAGACTGCTTCCTGTCCTGTGCCAGGCACACGGACTTACGCCTGA
GCAAGTGGTTGCAATCGCCTCTAATATCGGTGGTAAGCAAGCACTGGAAACTGTCCAACGCTTACTTCCGGTGCTTTGTCAAG
CACACGGCTTAACGCCAGAGCAGGTCGTCGCCATAGCCAGCAATATAGGTGGTAAACAGGCCCTTGAAACGGTCCAAAGACTT
CTGCCGGTCCTTTGCCAAGCGCATGGGCTGACACCTGAGCAGGTAGTCGCGATTGCCTCAAACGGTGGTGGGAAGCAGGCATT
AGAAACAGTTCAAAGATTATTACCAGTCCTGTGTCAGGCGCATGGGTTAACCCCAGAGCAGGTAGTTGCAATAGCATCCAACA
ATGGCGGAAAACAAGCGTTGGAAACGGTTCAGCGGTTATTGCCTGTTTTGTGCCAGGCGCATGGTTTGACACCCGAGCAAGTG
GTAGCCATAGCCTCAAATAATGGGGGTAAACAAGCTTTGGAGACAGTACAACGGCTGCTTCCAGTTTTATGTCAGGCCCATGG
ATTGACGCCTGAACAAGTTGTCGCTATCGCAAGTCATGATGGTGGTAAACAAGCGCTTGAAACCGTTCAACGCCTTCTGCCTG
TGCTTTGTCAGGCACATGGATTAACACCCGAACAGGTTGTCGCGATAGCTTCAAATGGTGGTGGTCGTCCGGCACTGGAAAGC
ATTGTTGCACAGCTGAGCCGTCCTGATCCGGCACTGGCAGCACTGACCAATGATCATCTGGTTGCACTGGCATGTCTGGGTGG
TCGCCCTGCCCTGGATGCAGTTAAAAAAGGTCTGCCGCATGCACCGGCACTGATTAAACGTACCAATCGTCGTATTCCGGAAC
GTACCAGCCATCGTGTTGCTAGCGGCAGCGGCGGCGGCAGCGGCGGCGACGCCCTGGACGACTTCGACCTGGACATGCTGGGC
AGCGACGCCCTGGACGACTTCGACCTGGACATGCTGGGCAGCGACGCCCTGGACGACTTCGACCTGGACATGCTGGGCAGCGA
CGCCCTGGACGACTTCGACCTGGACATGCTGAGCGGCGGCCCCAAGAAGAAGCGGAAGGTGGGCAGCCAGTACCTGCCCGACA
CCGACGACCGGCACCGGATCGAGGAGAAGCGGAAGCGGACCTACGAGACCTTCAAGAGCATCATGAAGAAATCCCCCTTCAGC
GGCCCCACCGACCCCCGGCCCCCCCCCCGGCGGATCGCCGTGCCCAGCCGGAGCAGCGCCAGCGTGCCCAAGCCCGCCCCCCA
GCCCTACCCCTTCACCAGCAGCCTGAGCACCATCAACTACGACGAGTTCCCCACCATGGTGTTCCCCAGCGGCCAGATCAGCC
AGGCCAGCGCCCTGGCCCCCGCCCCCCCCCAGGTGCTGCCCCAGGCCCCCGCCCCCGCCCCCGCCCCCGCCATGGTGAGCGCC
CTGGCCCAGGCCCCCGCCCCCGTGCCCGTGCTGGCCCCCGGCCCCCCCCAGGCCGTGGCCCCCCCCGCCCCCAAGCCCACCCA
GGCCGGCGAGGGCACCCTGAGCGAGGCCCTGCTGCAGCTGCAGTTCGACGACGAGGACCTGGGCGCCCTGCTGGGCAACAGCA
CCGACCCCGCCGTGTTCACCGACCTGGCCAGCGTGGACAACAGCGAGTTCCAGCAGCTGCTGAACCAGGGCATCCCCGTGGCC
CCCCACACCACCGAGCCCATGCTGATGGAGTACCCCGAGGCCATCACCCGGCTGGTGACCGGCGCCCAGCGGCCCCCCGACCC
CGCCCCCGCCCCCCTGGGCGCCCCCGGCCTGCCCAACGGCCTGCTGAGCGGCGACGAGGACTTCAGCAGCATCGCCGACATGG
ACTTCAGCGCCCTGCTGGGCAGCGGCAGCGGCAGCCGGGACAGCCGGGAGGGCATGTTCCTGCCCAAGCCCGAGGCCGGCAGC
GCCATCAGCGACGTGTTCGAGGGCCGGGAGGTGTGCCAGCCCAAGCGGCTCCGGCCCTTCCACCCCCCCGGCAGCCCCTGGGC
CAACCGGCCCCTGCCCGCCAGCCTGGCCCCCACCCCCACCGGCCCCGTGCACGAGCCCGTGGGCAGCCTGACCCCCGCCCCCG
TGCCCCAGCCCCTGGACCCCGCCCCCGCCGTGACCCCCGAGGCCAGCCACCTGCTGGAGGACCCCGACGAGGAGACCAGCCAG
GCCGTGAAGGCCCTGCGGGAGATGGCCGACACCGTGATCCCCCAGAAGGAGGAGGCCGCCATCTGCGGCCAGATGGACCTGAG
CCACCCCCCCCCCCGGGGCCACCTGGACGAGCTGACCACCACCCTGGAGAGCATGACCGAGGACCTGAACCTGGACAGCCCCC
TGACCCCCGAGCTGAACGAGATCCTGGACACCTTCCTGAACGACGAGTGCCTGCTGCACGCCATGCACATCAGCACCGGCCTG
AGCATCTTCGACACCAGCCTGTTCAGCGGCGGCAAGCGGCCCGCCGCCACCAAGAAGGCCGGCCAGGCCAAGAAGAAGAAGGG
CAGCTACCCCTACGACGTGCCCGACTACGCCTGAGCGGCCGCTTAATTAAGCTGCCTTCTGCGGGGCTTGCCTTCTGGCCATG
CCCTTCTTCTCTCCCTTGCACCTGTACCTCTTGGTCTTTGAATAAAGCCTGAGTAGGAAGTCTAGAAAAAAAAAAAAAAAAAA
AAAAAAAAAAAAAAAAAAAAAAAAAAAAAAAAAAAAAAAAAAAAAAAAAAAAAAAAAAAAAA
>TAL8 amino acid sequence
SEQ ID NO.: 207
GSHMVDLRTLGYSQQQQEKIKPKVRSTVAQHHEALVGHGFTHAHIVALSQHPAALGTVAVKYQDMIAALPEATHEAIVGVGKR
GAGARALEALLTVAGELRGPPLQLDTGQLLKIAKRGGVTAVEAVHAWRNALTGAPLULTPEQVVAIASHDGGKQALETVQRLL
PVLCQAHGLTPEQVVAIASUGGGKQALETVQRLLPVLCQAHGLTPEQVVAIASUGGGKQALETVQRLLPVLCQAHGLTPEQVV
AIASUNGGKQALETVQRLLPVLCQAHGLTPEQVVAIASUNGGKQALETVQRLLPVLCQAHGLTPEQVVAIASNNGGKQALETV
QRLLPVLCQAHGLTPEQVVAIASUNGGKQALETVQRLLPVLCQAHGLTPEQVVAIASUGGGKQALETVQRLLPVLCQAHGLTP
EQVVAIASUNGGKQALETVQRLLPVLCQAHGLTPEQVVAIASNIGGKQALETVQRLLPVLCQAHGLTPEQVVAIASHDGGKQA
LETVQRLLPVLCQAHGLTPEQVVAIASNIGGKQALETVQRLLPVLCQAHGLTPEQVVAIASNIGGKQALETVQRLLPVLCQAH
GLTPEQVVAIASUGGGKQALETVQRLLPVLCQAHGLTPEQVVAIASUNGGKQALETVQRLLPVLCQAHGLTPEQVVAIASNNG
GKQALETVQRLLPVLCQAHGLTPEQVVAIASHDGGKQALETVQRLLPVLCQAHGLTPEQVVAIASUGGGRPALESIVAQLSRP
DPALAALTNDHLVALACLGGRPALDAVKKGLPHAPALIKRTURRIPERTSHRVAS
>TAL8 mRNA sequence
SEQ ID NO.: 251
GGAUCCCAUAUGGUUGAUCUGCGUACCCUGGGUUAUAGCCAGCAGCAGCAAGAAAAAAUCAAACCGAAAGUUCGUAGCACCGU
UGCACAGCAUCAUGAAGCACUGGUUGGUCAUGGUUUUACCCAUGCACAUAUUGUUGCACUGAGCCAGCAUCCGGCAGCACUGG
GCACCGUUGCAGUUAAAUAUCAGGAUAUGAUUGCAGCACUGCCGGAAGCAACCCAUGAAGCAAUUGUUGGUGUUGGUAAACGC
GGAGCUGGUGCACGUGCCCUGGAAGCACUGCUGACCGUUGCCGGUGAACUGCGUGGUCCGCCUCUGCAGCUGGAUACCGGUCA
GCUGCUGAAAAUUGCAAAACGUGGUGGUGUUACCGCAGUUGAAGCAGUUCAUGCAUGGCGUAAUGCACUGACCGGUGCACCGC
UGAAUCUGACACCGGAACAGGUUGUUGCAAUUGCCAGCCAUGAUGGUGGCAAACAGGCACUGGAAACCGUUCAGCGUCUGCUG
CCGGUUCUGUGUCAGGCACAUGGUCUGACCCCUGAACAGGUGGUGGCCAUUGCAAGCAAUGGUGGCGGUAAACAAGCCCUGGA
AACAGUGCAGCGCCUGUUACCGGUGCUGUGCCAGGCCCAUGGCUUAACUCCGGAACAGGUGGUAGCGAUCGCAUCAAAUGGCG
GAGGUAAACAGGCCUUAGAAACCGUACAGCGCUUACUGCCGGUGUUAUGCCAGGCGCACGGCCUGACGCCAGAACAGGUAGUG
GCAAUCGCCUCAAAUAAUGGUGGAAAACAGGCGUUAGAGACAGUCCAGCGCCUGCUGCCUGUAUUAUGUCAAGCCCAUGGCCU
GACCCCAGAGCAAGUUGUUGCGAUUGCAAGUAACAAUGGGGGUAAACAGGCACUUGAGACAGUUCAACGUUUACUGCCUGUAC
UGUGCCAAGCUCACGGUCUGACUCCGGAACAAGUCGUCGCGAUUGCGAGUAAUAAUGGUGGCAAACAAGCAUUAGAAACGGUG
CAACGCCUGCUGCCAGUUCUUUGCCAGGCUCACGGUUUAACCCCUGAGCAGGUUGUAGCUAUUGCGAGUAACAAUGGUGGUAA
GCAGGCGUUGGAAACUGUGCAAAGACUGCUGCCCGUGUUGUGCCAAGCACAUGGUUUAACCCCAGAACAAGUCGUAGCAAUCG
CAAGCAAUGGGGGUGGCAAGCAAGCGCUUGAAACAGUACAGCGUUUAUUACCGGUACUUUGUCAGGCCCACGGUCUUACACCA
GAACAAGUUGUGGCCAUAGCCAGUAAUAAUGGCGGAAAGCAGGCUCUGGAAACGGUACAACGUCUGUUACCUGUUCUGUGUCA
AGCGCACGGAUUAACACCUGAACAAGUAGUUGCCAUUGCGUCAAACAUUGGAGGCAAGCAGGCCUUGGAGACAGUGCAGAGAU
UACUGCCAGUGUUGUGUCAGGCUCAUGGCCUUACACCCGAGCAGGUCGUGGCAAUUGCAUCUCAUGACGGCGGUAAGCAAGCU
UUAGAGACUGUUCAGAGACUGCUUCCUGUCCUGUGCCAGGCACACGGACUUACGCCUGAGCAAGUGGUUGCAAUCGCCUCUAA
UAUCGGUGGUAAGCAAGCACUGGAAACUGUCCAACGCUUACUUCCGGUGCUUUGUCAAGCACACGGCUUAACGCCAGAGCAGG
UCGUCGCCAUAGCCAGCAAUAUAGGUGGUAAACAGGCCCUUGAAACGGUCCAAAGACUUCUGCCGGUCCUUUGCCAAGCGCAU
GGGCUGACACCUGAGCAGGUAGUCGCGAUUGCCUCAAACGGUGGUGGGAAGCAGGCAUUAGAAACAGUUCAAAGAUUAUUACC
AGUCCUGUGUCAGGCGCAUGGGUUAACCCCAGAGCAGGUAGUUGCAAUAGCAUCCAACAAUGGCGGAAAACAAGCGUUGGAAA
CGGUUCAGCGGUUAUUGCCUGUUUUGUGCCAGGCGCAUGGUUUGACACCCGAGCAAGUGGUAGCCAUAGCCUCAAAUAAUGGG
GGUAAACAAGCUUUGGAGACAGUACAACGGCUGCUUCCAGUUUUAUGUCAGGCCCAUGGAUUGACGCCUGAACAAGUUGUCGC
UAUCGCAAGUCAUGAUGGUGGUAAACAAGCGCUUGAAACCGUUCAACGCCUUCUGCCUGUGCUUUGUCAGGCACAUGGAUUAA
CACCCGAACAGGUUGUCGCGAUAGCUUCAAAUGGUGGUGGUCGUCCGGCACUGGAAAGCAUUGUUGCACAGCUGAGCCGUCCU
GAUCCGGCACUGGCAGCACUGACCAAUGAUCAUCUGGUUGCACUGGCAUGUCUGGGUGGUCGCCCUGCCCUGGAUGCAGUUAA
AAAAGGUCUGCCGCAUGCACCGGCACUGAUUAAACGUACCAAUCGUCGUAUUCCGGAACGUACCAGCCAUCGUGUUGCUAGC
>TAL9-VPR protein
SEQ ID NO.: 208
MAPKKKRKVGIHGVPAAGSSGSHMVDLRTLGYSQQQQEKIKPKVRSTVAQHHEALVGHGFTHAHIVALSQHPAALGTVAVKYQ
DMIAALPEATHEAIVGVGKRGAGARALEALLTVAGELRGPPLQLDTGQLLKIAKRGGVTAVEAVHAWRNALTGAPLULTPEQV
VAIASUNGGKQALETVQRLLPVLCQAHGLTPEQVVAIASNIGGKQALETVQRLLPVLCQAHGLTPEQVVAIASNIGGKQALET
VQRLLPVLCQAHGLTPEQVVAIASUGGGKQALETVQRLLPVLCQAHGLTPEQVVAIASUGGGKQALETVQRLLPVLCQAHGLT
PEQVVAIASNIGGKQALETVQRLLPVLCQAHGLTPEQVVAIASUNGGKQALETVQRLLPVLCQAHGLTPEQVVAIASUNGGKQ
ALETVQRLLPVLCQAHGLTPEQVVAIASUNGGKQALETVQRLLPVLCQAHGLTPEQVVAIASUNGGKQALETVQRLLPVLCQA
HGLTPEQVVAIASNIGGKQALETVQRLLPVLCQAHGLTPEQVVAIASUGGGKQALETVQRLLPVLCQAHGLTPEQVVAIASHD
GGKQALETVQRLLPVLCQAHGLTPEQVVAIASUGGGKQALETVQRLLPVLCQAHGLTPEQVVAIASHDGGKQALETVQRLLPV
LCQAHGLTPEQVVAIASUNGGKQALETVQRLLPVLCQAHGLTPEQVVAIASUNGGKQALETVQRLLPVLCQAHGLTPEQVVAI
ASNIGGRPALESIVAQLSRPDPALAALTNDHLVALACLGGRPALDAVKKGLPHAPALIKRTURRIPERTSHRVASGSGGGSGG
DALDDFDLDMLGSDALDDFDLDMLGSDALDDFDLDMLGSDALDDFDLDMLSGGPKKKRKVGSQYLPDTDDRHRIEEKRKRTYE
TFKSIMKKSPFSGPTDPRPPPRRIAVPSRSSASVPKPAPQPYPFTSSLSTINYDEFPTMVFPSGQISQASALAPAPPQVLPQA
PAPAPAPAMVSALAQAPAPVPVLAPGPPQAVAPPAPKPTQAGEGTLSEALLQLQFDDEDLGALLGNSTDPAVFTDLASVDNSE
FQQLLNQGIPVAPHTTEPMLMEYPEAITRLVTGAQRPPDPAPAPLGAPGLPNGLLSGDEDFSSIADMDFSALLGSGSGSRDSR
EGMFLPKPEAGSAISDVFEGREVCQPKRLRPFHPPGSPWANRPLPASLAPTPTGPVHEPVGSLTPAPVPQPLDPAPAVTPEAS
HLLEDPDEETSQAVKALREMADTVIPQKEEAAICGQMDLSHPPPRGHLDELTTTLESMTEDLNLDSPLTPELNEILDTFLNDE
CLLHAMHISTGLSIFDTSLFSGGKRPAATKKAGQAKKKKGSYPYDVPDYA*
>TAL9-VPR mRNA
SEQ ID NO.: 209
AGGAAATAAGAGAGAAAAGAAGAGTAAGAAGAAATATAAGAGCCACCATGGCCCCCAAGAAGAAGCGGAAGGTGGGCATCCAC
GGCGTGCCCGCCGCCGGCAGCAGCGGATCCCATATGGTTGATCTGCGTACCCTGGGTTATAGCCAGCAGCAGCAAGAAAAAAT
CAAACCGAAAGTTCGTAGCACCGTTGCACAGCATCATGAAGCACTGGTTGGTCATGGTTTTACCCATGCACATATTGTTGCAC
TGAGCCAGCATCCGGCAGCACTGGGCACCGTTGCAGTTAAATATCAGGATATGATTGCAGCACTGCCGGAAGCAACCCATGAA
GCAATTGTTGGTGTTGGTAAACGCGGAGCTGGTGCACGTGCCCTGGAAGCACTGCTGACCGTTGCCGGTGAACTGCGTGGTCC
GCCTCTGCAGCTGGATACCGGTCAGCTGCTGAAAATTGCAAAACGTGGTGGTGTTACCGCAGTTGAAGCAGTTCATGCATGGC
GTAATGCACTGACCGGTGCACCGCTGAATCTGACACCGGAACAGGTTGTTGCAATTGCCAGCAATAATGGTGGCAAACAGGCA
CTGGAAACCGTTCAGCGTCTGCTGCCGGTTCTGTGTCAGGCACATGGTCTGACCCCTGAACAGGTGGTGGCCATTGCAAGCAA
CATTGGCGGTAAACAAGCCCTGGAAACAGTGCAGCGCCTGTTACCGGTGCTGTGCCAGGCCCATGGCTTAACTCCGGAACAGG
TGGTAGCGATCGCATCAAATATCGGAGGTAAACAGGCCTTAGAAACCGTACAGCGCTTACTGCCGGTGTTATGCCAGGCGCAC
GGCCTGACGCCAGAACAGGTAGTGGCAATCGCCTCAAATGGTGGTGGAAAACAGGCGTTAGAGACAGTCCAGCGCCTGCTGCC
TGTATTATGTCAAGCCCATGGCCTGACCCCAGAGCAAGTTGTTGCGATTGCAAGTAATGGCGGGGGTAAACAGGCACTTGAGA
CAGTTCAACGTTTACTGCCTGTACTGTGCCAAGCTCACGGTCTGACTCCGGAACAAGTCGTCGCGATTGCGAGTAATATAGGT
GGCAAACAAGCATTAGAAACGGTGCAACGCCTGCTGCCAGTTCTTTGCCAGGCTCACGGTTTAACCCCTGAGCAGGTTGTAGC
TATTGCGAGTAACAATGGTGGTAAGCAGGCGTTGGAAACTGTGCAAAGACTGCTGCCCGTGTTGTGCCAAGCACATGGTTTAA
CCCCAGAACAAGTCGTAGCAATCGCAAGCAATAATGGTGGCAAGCAAGCGCTTGAAACAGTACAGCGTTTATTACCGGTACTT
TGTCAGGCCCACGGTCTTACACCAGAACAAGTTGTGGCCATAGCCAGTAACAATGGCGGAAAGCAGGCTCTGGAAACGGTACA
ACGTCTGTTACCTGTTCTGTGTCAAGCGCACGGATTAACACCTGAACAAGTAGTTGCCATTGCGTCAAATAATGGAGGCAAGC
AGGCCTTGGAGACAGTGCAGAGATTACTGCCAGTGTTGTGTCAGGCTCATGGCCTTACACCCGAGCAGGTCGTGGCAATTGCA
TCTAACATTGGCGGTAAGCAAGCTTTAGAGACTGTTCAGAGACTGCTTCCTGTCCTGTGCCAGGCACACGGACTTACGCCTGA
GCAAGTGGTTGCAATCGCCTCTAATGGGGGTGGTAAGCAAGCACTGGAAACTGTCCAACGCTTACTTCCGGTGCTTTGTCAAG
CACACGGCTTAACGCCAGAGCAGGTCGTCGCCATAGCCAGCCATGATGGTGGTAAACAGGCCCTTGAAACGGTCCAAAGACTT
CTGCCGGTCCTTTGCCAAGCGCATGGGCTGACACCTGAGCAGGTAGTCGCGATTGCCTCAAACGGTGGTGGGAAGCAGGCATT
AGAAACAGTTCAAAGATTATTACCAGTCCTGTGTCAGGCGCATGGGTTAACCCCAGAGCAGGTAGTTGCAATAGCATCCCATG
ACGGCGGAAAACAAGCGTTGGAAACGGTTCAGCGGTTATTGCCTGTTTTGTGCCAGGCGCATGGTTTGACACCCGAGCAAGTG
GTAGCCATAGCCTCAAACAATGGGGGTAAACAAGCTTTGGAGACAGTACAACGGCTGCTTCCAGTTTTATGTCAGGCCCATGG
ATTGACGCCTGAACAAGTTGTCGCTATCGCAAGTAATAATGGTGGTAAACAAGCGCTTGAAACCGTTCAACGCCTTCTGCCTG
TGCTTTGTCAGGCACATGGATTAACACCCGAACAGGTTGTCGCGATAGCTTCAAATATCGGTGGTCGTCCGGCACTGGAAAGC
ATTGTTGCACAGCTGAGCCGTCCTGATCCGGCACTGGCAGCACTGACCAATGATCATCTGGTTGCACTGGCATGTCTGGGTGG
TCGCCCTGCCCTGGATGCAGTTAAAAAAGGTCTGCCGCATGCACCGGCACTGATTAAACGTACCAATCGTCGTATTCCGGAAC
GTACCAGCCATCGTGTTGCTAGCGGCAGCGGCGGCGGCAGCGGCGGCGACGCCCTGGACGACTTCGACCTGGACATGCTGGGC
AGCGACGCCCTGGACGACTTCGACCTGGACATGCTGGGCAGCGACGCCCTGGACGACTTCGACCTGGACATGCTGGGCAGCGA
CGCCCTGGACGACTTCGACCTGGACATGCTGAGCGGCGGCCCCAAGAAGAAGCGGAAGGTGGGCAGCCAGTACCTGCCCGACA
CCGACGACCGGCACCGGATCGAGGAGAAGCGGAAGCGGACCTACGAGACCTTCAAGAGCATCATGAAGAAATCCCCCTTCAGC
GGCCCCACCGACCCCCGGCCCCCCCCCCGGCGGATCGCCGTGCCCAGCCGGAGCAGCGCCAGCGTGCCCAAGCCCGCCCCCCA
GCCCTACCCCTTCACCAGCAGCCTGAGCACCATCAACTACGACGAGTTCCCCACCATGGTGTTCCCCAGCGGCCAGATCAGCC
AGGCCAGCGCCCTGGCCCCCGCCCCCCCCCAGGTGCTGCCCCAGGCCCCCGCCCCCGCCCCCGCCCCCGCCATGGTGAGCGCC
CTGGCCCAGGCCCCCGCCCCCGTGCCCGTGCTGGCCCCCGGCCCCCCCCAGGCCGTGGCCCCCCCCGCCCCCAAGCCCACCCA
GGCCGGCGAGGGCACCCTGAGCGAGGCCCTGCTGCAGCTGCAGTTCGACGACGAGGACCTGGGCGCCCTGCTGGGCAACAGCA
CCGACCCCGCCGTGTTCACCGACCTGGCCAGCGTGGACAACAGCGAGTTCCAGCAGCTGCTGAACCAGGGCATCCCCGTGGCC
CCCCACACCACCGAGCCCATGCTGATGGAGTACCCCGAGGCCATCACCCGGCTGGTGACCGGCGCCCAGCGGCCCCCCGACCC
CGCCCCCGCCCCCCTGGGCGCCCCCGGCCTGCCCAACGGCCTGCTGAGCGGCGACGAGGACTTCAGCAGCATCGCCGACATGG
ACTTCAGCGCCCTGCTGGGCAGCGGCAGCGGCAGCCGGGACAGCCGGGAGGGCATGTTCCTGCCCAAGCCCGAGGCCGGCAGC
GCCATCAGCGACGTGTTCGAGGGCCGGGAGGTGTGCCAGCCCAAGCGGCTCCGGCCCTTCCACCCCCCCGGCAGCCCCTGGGC
CAACCGGCCCCTGCCCGCCAGCCTGGCCCCCACCCCCACCGGCCCCGTGCACGAGCCCGTGGGCAGCCTGACCCCCGCCCCCG
TGCCCCAGCCCCTGGACCCCGCCCCCGCCGTGACCCCCGAGGCCAGCCACCTGCTGGAGGACCCCGACGAGGAGACCAGCCAG
GCCGTGAAGGCCCTGCGGGAGATGGCCGACACCGTGATCCCCCAGAAGGAGGAGGCCGCCATCTGCGGCCAGATGGACCTGAG
CCACCCCCCCCCCCGGGGCCACCTGGACGAGCTGACCACCACCCTGGAGAGCATGACCGAGGACCTGAACCTGGACAGCCCCC
TGACCCCCGAGCTGAACGAGATCCTGGACACCTTCCTGAACGACGAGTGCCTGCTGCACGCCATGCACATCAGCACCGGCCTG
AGCATCTTCGACACCAGCCTGTTCAGCGGCGGCAAGCGGCCCGCCGCCACCAAGAAGGCCGGCCAGGCCAAGAAGAAGAAGGG
CAGCTACCCCTACGACGTGCCCGACTACGCCTGAGCGGCCGCTTAATTAAGCTGCCTTCTGCGGGGCTTGCCTTCTGGCCATG
CCCTTCTTCTCTCCCTTGCACCTGTACCTCTTGGTCTTTGAATAAAGCCTGAGTAGGAAGTCTAGAAAAAAAAAAAAAAAAAA
AAAAAAAAAAAAAAAAAAAAAAAAAAAAAAAAAAAAAAAAAAAAAAAAAAAAAAAAAAAAAA
>TAL9 amino acid sequence
SEQ ID NO.: 210
GSHMVDLRTLGYSQQQQEKIKPKVRSTVAQHHEALVGHGFTHAHIVALSQHPAALGTVAVKYQDMIAALPEATHEAIVGVGKR
GAGARALEALLTVAGELRGPPLQLDTGQLLKIAKRGGVTAVEAVHAWRNALTGAPLULTPEQVVAIASUNGGKQALETVQRLL
PVLCQAHGLTPEQVVAIASNIGGKQALETVQRLLPVLCQAHGLTPEQVVAIASNIGGKQALETVQRLLPVLCQAHGLTPEQVV
AIASUGGGKQALETVQRLLPVLCQAHGLTPEQVVAIASUGGGKQALETVQRLLPVLCQAHGLTPEQVVAIASNIGGKQALETV
QRLLPVLCQAHGLTPEQVVAIASUNGGKQALETVQRLLPVLCQAHGLTPEQVVAIASUNGGKQALETVQRLLPVLCQAHGLTP
EQVVAIASUNGGKQALETVQRLLPVLCQAHGLTPEQVVAIASUNGGKQALETVQRLLPVLCQAHGLTPEQVVAIASNIGGKQA
LETVQRLLPVLCQAHGLTPEQVVAIASUGGGKQALETVQRLLPVLCQAHGLTPEQVVAIASHDGGKQALETVQRLLPVLCQAH
GLTPEQVVAIASUGGGKQALETVQRLLPVLCQAHGLTPEQVVAIASHDGGKQALETVQRLLPVLCQAHGLTPEQVVAIASUNG
GKQALETVQRLLPVLCQAHGLTPEQVVAIASUNGGKQALETVQRLLPVLCQAHGLTPEQVVAIASNIGGRPALESIVAQLSRP
DPALAALTNDHLVALACLGGRPALDAVKKGLPHAPALIKRTURRIPERTSHRVAS
>TAL9 mRNA sequence
SEQ ID NO.: 252
GGAUCCCAUAUGGUUGAUCUGCGUACCCUGGGUUAUAGCCAGCAGCAGCAAGAAAAAAUCAAACCGAAAGUUCGUAGCACCGU
UGCACAGCAUCAUGAAGCACUGGUUGGUCAUGGUUUUACCCAUGCACAUAUUGUUGCACUGAGCCAGCAUCCGGCAGCACUGG
GCACCGUUGCAGUUAAAUAUCAGGAUAUGAUUGCAGCACUGCCGGAAGCAACCCAUGAAGCAAUUGUUGGUGUUGGUAAACGC
GGAGCUGGUGCACGUGCCCUGGAAGCACUGCUGACCGUUGCCGGUGAACUGCGUGGUCCGCCUCUGCAGCUGGAUACCGGUCA
GCUGCUGAAAAUUGCAAAACGUGGUGGUGUUACCGCAGUUGAAGCAGUUCAUGCAUGGCGUAAUGCACUGACCGGUGCACCGC
UGAAUCUGACACCGGAACAGGUUGUUGCAAUUGCCAGCAAUAAUGGUGGCAAACAGGCACUGGAAACCGUUCAGCGUCUGCUG
CCGGUUCUGUGUCAGGCACAUGGUCUGACCCCUGAACAGGUGGUGGCCAUUGCAAGCAACAUUGGCGGUAAACAAGCCCUGGA
AACAGUGCAGCGCCUGUUACCGGUGCUGUGCCAGGCCCAUGGCUUAACUCCGGAACAGGUGGUAGCGAUCGCAUCAAAUAUCG
GAGGUAAACAGGCCUUAGAAACCGUACAGCGCUUACUGCCGGUGUUAUGCCAGGCGCACGGCCUGACGCCAGAACAGGUAGUG
GCAAUCGCCUCAAAUGGUGGUGGAAAACAGGCGUUAGAGACAGUCCAGCGCCUGCUGCCUGUAUUAUGUCAAGCCCAUGGCCU
GACCCCAGAGCAAGUUGUUGCGAUUGCAAGUAAUGGCGGGGGUAAACAGGCACUUGAGACAGUUCAACGUUUACUGCCUGUAC
UGUGCCAAGCUCACGGUCUGACUCCGGAACAAGUCGUCGCGAUUGCGAGUAAUAUAGGUGGCAAACAAGCAUUAGAAACGGUG
CAACGCCUGCUGCCAGUUCUUUGCCAGGCUCACGGUUUAACCCCUGAGCAGGUUGUAGCUAUUGCGAGUAACAAUGGUGGUAA
GCAGGCGUUGGAAACUGUGCAAAGACUGCUGCCCGUGUUGUGCCAAGCACAUGGUUUAACCCCAGAACAAGUCGUAGCAAUCG
CAAGCAAUAAUGGUGGCAAGCAAGCGCUUGAAACAGUACAGCGUUUAUUACCGGUACUUUGUCAGGCCCACGGUCUUACACCA
GAACAAGUUGUGGCCAUAGCCAGUAACAAUGGCGGAAAGCAGGCUCUGGAAACGGUACAACGUCUGUUACCUGUUCUGUGUCA
AGCGCACGGAUUAACACCUGAACAAGUAGUUGCCAUUGCGUCAAAUAAUGGAGGCAAGCAGGCCUUGGAGACAGUGCAGAGAU
UACUGCCAGUGUUGUGUCAGGCUCAUGGCCUUACACCCGAGCAGGUCGUGGCAAUUGCAUCUAACAUUGGCGGUAAGCAAGCU
UUAGAGACUGUUCAGAGACUGCUUCCUGUCCUGUGCCAGGCACACGGACUUACGCCUGAGCAAGUGGUUGCAAUCGCCUCUAA
UGGGGGUGGUAAGCAAGCACUGGAAACUGUCCAACGCUUACUUCCGGUGCUUUGUCAAGCACACGGCUUAACGCCAGAGCAGG
UCGUCGCCAUAGCCAGCCAUGAUGGUGGUAAACAGGCCCUUGAAACGGUCCAAAGACUUCUGCCGGUCCUUUGCCAAGCGCAU
GGGCUGACACCUGAGCAGGUAGUCGCGAUUGCCUCAAACGGUGGUGGGAAGCAGGCAUUAGAAACAGUUCAAAGAUUAUUACC
AGUCCUGUGUCAGGCGCAUGGGUUAACCCCAGAGCAGGUAGUUGCAAUAGCAUCCCAUGACGGCGGAAAACAAGCGUUGGAAA
CGGUUCAGCGGUUAUUGCCUGUUUUGUGCCAGGCGCAUGGUUUGACACCCGAGCAAGUGGUAGCCAUAGCCUCAAACAAUGGG
GGUAAACAAGCUUUGGAGACAGUACAACGGCUGCUUCCAGUUUUAUGUCAGGCCCAUGGAUUGACGCCUGAACAAGUUGUCGC
UAUCGCAAGUAAUAAUGGUGGUAAACAAGCGCUUGAAACCGUUCAACGCCUUCUGCCUGUGCUUUGUCAGGCACAUGGAUUAA
CACCCGAACAGGUUGUCGCGAUAGCUUCAAAUAUCGGUGGUCGUCCGGCACUGGAAAGCAUUGUUGCACAGCUGAGCCGUCCU
GAUCCGGCACUGGCAGCACUGACCAAUGAUCAUCUGGUUGCACUGGCAUGUCUGGGUGGUCGCCCUGCCCUGGAUGCAGUUAA
AAAAGGUCUGCCGCAUGCACCGGCACUGAUUAAACGUACCAAUCGUCGUAUUCCGGAACGUACCAGCCAUCGUGUUGCUAGC

### EQUIVALENTS

[0580] Those skilled in the art will recognize, or be able to ascertain using no more than routine experimentation, many equivalents to the specific embodiments of the present invention described herein. Such equivalents are intended to be encompassed by the following claims.

1. A site-specific HNF4α disrupting agent, comprising a site-specific HNF4α targeting moiety which targets an HNF4α expression control region.

2-4. (canceled)

5. The site-specific HNF4α disrupting agent of claim 1, wherein the expression control region comprises an HNF4α-specific transcriptional control element.

6. The site-specific HNF4α disrupting agent of claim 5, wherein the transcriptional control element comprises an HNF4α promoter.

7. The site-specific HNF4α disrupting agent of claim 1, wherein the HNF4α expression control region comprises the nucleotide sequence of HNF4α promoter 1, or a fragment thereof.

8. The site-specific HNF4α disrupting agent of claim 7,
wherein the HNF4α expression control region comprises the nucleotide sequence of any one of the nucleotide sequences in column 3 of Table 1 or column 1 of Table 10.

9-10. (canceled)

11. The site-specific HNF4α disrupting agent of claim 1, wherein the HNF4α targeting moiety comprises a nucleotide sequence having at least 85% nucleotide identity to the entire nucleotide sequence of any of the nucleotide sequences in any one of Tables 2, 3, 4, and 9.

12. The site-specific HNF4α disrupting agent of claim 1, wherein the HNF4α target moiety comprises a polynucleotide encoding a DNA-binding domain of a Transcription activator-like effector (TALE) polypeptide or a zinc finger (ZNF) polypeptide, or fragment thereof, that specifically binds to the HNF4α expression control region.

13. The site-specific HNF4α disrupting agent of claim 12, wherein the DNA-binding domain of the TALE or ZNF polypeptide comprises an amino acid sequence having at least about 85% amino acid identity to the entire amino acid sequence of any one of the amino acid sequences listed in column 5 of Table 6A or column 4 of Table 10.

14. The site-specific HNF4α disrupting agent of claim 1, wherein the expression control region comprises one or more HNF4α-associated anchor sequences within an anchor sequence-mediated conjunction comprising a first and a second HNF4α-associated anchor sequence.

15. The site-specific HNF4α disrupting agent of claim 14, wherein the anchor sequence comprises a CCCTC-binding factor (CTCF) binding motif.

16. The site-specific HNF4α disrupting agent of claim 14, wherein the anchor sequence-mediated conjunction comprises one or more transcriptional control elements internal to the conjunction.

17. The site-specific HNF4α disrupting agent of claim 14, wherein the anchor sequence-mediated conjunction comprises one or more transcriptional control elements external to the conjunction.

18. The site-specific HNF4α disrupting agent of claim 14, wherein the first and/or the second anchor sequence is located within about 500 kb of the transcriptional control element.

19. The site-specific HNF4α disrupting agent of claim 18, wherein the first and/or the second anchor sequence is located within 300 kb of the transcriptional control element.

20-24. (canceled)

25. The site-specific HNF4α disrupting agent of claim 1, wherein the site-specific HNF4α disrupting agent is present in a composition.

26.-29. (canceled)

30. A site-specific HNF4α disrupting agent, comprising a nucleic acid molecule encoding a fusion protein, the fusion protein comprising a site-specific HNF4α targeting moiety which targets an HNF4α expression control region and an effector molecule.

31. The site-specific HNF4α disrupting agent of claim 30, wherein the site-specific HNF4α targeting moiety comprises a polynucleotide encoding a DNA-binding domain of a Transcription activator-like effector (TALE) polypeptide or a zinc finger (ZNF) polypeptide, or fragment thereof, that specifically binds to the HNF4α expression control region.

32. The site-specific HNF4α disrupting agent of claim 31, wherein the DNA-binding domain of the TALE or zinc finger polypeptide comprises an amino acid sequence having at least 85% amino acid identity to the entire amino acid sequence of an amino acid sequence selected from the amino acid sequences listed in column 5 of Table 6A or column 4 of Table 10.

33. The site-specific HNF4α disrupting agent of claim 30, wherein the HNF4α expression control region comprises the nucleotide sequence of HNF4α promoter 1, or a fragment thereof.

34. The site-specific HNF4α disrupting agent of claim 33, wherein the HNF4α expression control region comprises the nucleotide sequence of any one of the nucleotide sequences in column 3 of Table 1 or column 1 of Table 10.

35. The site-specific HNF4α disrupting agent of claim 30, wherein the effector is selected from the group consisting of a nuclease, a physical blocker, an epigenetic recruiter, and an epigenetic CpG modifier, and combinations of any of the foregoing.

36-39. (canceled)

40. The site-specific HNF4α disrupting agent of claim 30, wherein the effector is a VPR (VP64-p65-Rta).

41. The site-specific HNF4α disrupting agent of claim 40, wherein the VPR comprises an amino acid sequence having at least about 85% amino acid identity to the entire amino acid sequence of
(SEQ ID NO: 66)
DALDDFDLDMLGSDALDDFDLDMLGSDALDDFDLDMLGSDALDDFD
LDMLSGGPKKKRKVGSQYLPDTDDRHRIEEKRKRTYETFKSIMKKS
PFSGPTDPRPPPRRIAVPSRSSASVPKPAPQPYPFTSSLSTINYDE
FPTMVFPSGQISQASALAPAPPQVLPQAPAPAPAPAMVSALAQAPA
PVPVLAPGPPQAVAPPAPKPTQAGEGTLSEALLQLQFDDEDLGALL
GNSTDPAVFTDLASVDNSEFQQLLNQGIPVAPHTTEPMLMEYPEAI
TRLVTGAQRPPDPAPAPLGAPGLPNGLLSGDEDFSSIADMDFSALL
GSGSGSRDSREGMFLPKPEAGSAISDVFEGREVCQPKRLRPFHPPG
SPWANRPLPASLAPTPTGPVHEPVGSLTPAPVPQPLDPAPAVTPEA
SHLLEDPDEETSQAVKALREMADTVIPQKEEAAICGQMDLSHPPPR
GHLDELTTTLESMTEDLNLDSPLTPELNEILDTFLNDECLLHAMHI
STGLSIFDTSLF.

42. (canceled)

43. The site-specific HNF4α disrupting agent of claim 30, wherein the effector is a p300.

44. The site-specific HNF4α disrupting agent of claim 43, wherein the p300 comprises an amino acid sequence having at least about 85% identity to the entire amino acid sequence of
(SEQ ID NO: 67)
IFKPEELRQALMPTLEALYRQDPESLPFRQPVDPQLLGIPDYFDIV
KSPMDLSTIKRKLDTGQYQEPWQYVDDIWLMFNNAWLYNRKTSRVY
KYCSKLSEVFEQEIDPVMQSLGYCCGRKLEFSPQTLCCYGKQLCTI
PRDATYYSYQNRYHFCEKCFNEIQGESVSLGDDPSQPQTTINKEQF
SKRKNDTLDPELFVECTECGRKMHQICVLHHEIIWPAGFVCDGCLK
KSARTRKENKFSAKRLPSTRLGTFLENRVNDFLRRQNHPESGEVTV
RVVHASDKTVEVKPGMKARFVDSGEMAESFPYRTKALFAFEEIDGV
DLCFFGMHVQEYGSDCPPPNQRRVYISYLDSVHFFRPKCLRTAVYH
EILIGYLEYVKKLGYTTGHIWACPPSEGDDYIFHCHPPDQKIPKPK
RLQEWYKKMLDKAVSERIVHDYKDIFKQATEDRLTSAKELPYFEGD
FWPNVLEESIKELEQEEEERKREENTSNESTDVTKGDSKNAKKKNN
KKTSKNKSSLSRGNKKKPGMPNVSNDLSQKLYATMEKHKEVFFVIR
LIAGPAANSLPPIVDPDPLIPCDLMDGRDAFLTLARDKHLEFSSLR
RAQWSTMCMLVELHTQSQD.

45-47. (canceled)

48. The site-specific HNF4α disrupting agent of claim 30, further comprising a second nucleic acid molecule encoding a second fusion protein, wherein the second fusion comprises a second site-specific HNF4α targeting moiety which targets a second HNF4α expression control region and a second effector molecule, wherein the second HNF4α expression control region is different than the HNF4α expression control region.

49-51. (canceled)

52. The site-specific HNF4α disrupting agent of claim 48, wherein the fusion protein and the second fusion protein are operably linked.

53-58. (canceled)

59. A vector comprising a nucleic acid molecule encoding the site-specific HNF4α disrupting agent of claim 30.

60. The vector of claim 59, wherein the vector is a viral expression vector.

61. A cell comprising the site-specific HNF4α disrupting agent of claim 30.

62. The site-specific HNF4α disrupting agent of claim 30, wherein the site-specific HNF4α disrupting agent is present in a composition comprising a lipid formulation.

63-65. (canceled)

66. The site-specific HNF4α disrupting agent of claim 62, wherein the composition comprises a lipid nanoparticle.

67. A method of modulating expression of hepatocyte nuclear factor 4 alpha-(HNF4α) in a cell, the method comprising contacting the cell with a site-specific HNF4α disrupting agent, the disrupting agent comprising a site-specific HNF4α targeting moiety which targets an HNF4α expression control region, and an effector molecule, thereby modulating expression of HNF4α in the cell.

68-107. (canceled)

108. The method of claim 67, wherein the site-specific HNF4α disrupting agent comprises
a nucleic acid molecule encoding a first fusion protein, wherein the first fusion protein comprises a first site-specific HNF4α targeting moiety which targets a first HNF4α expression control region and a first effector molecule; and
a second nucleic acid molecule encoding a second fusion protein, wherein the second fusion protein comprises a second site-specific HNF4α targeting moiety which targets a second HNF4α expression control region and a second effector molecule, wherein the second HNF4α expression control region is different than the HNF4α expression control region.

109-140. (canceled)

141. The method of claim 67, wherein the cell is within a subject, wherein the subject has an HNF4α-associated disease.

142. (canceled)

143. The method of claim 141, wherein the HNF4α-associated disease is selected from the group consisting of fatty liver (steatosis), nonalcoholic steatohepatitis (NASH), cirrhosis of the liver, accumulation of fat in the liver, inflammation of the liver, hepatocellular necrosis, liver fibrosis, and nonalcoholic fatty liver disease (NAFLD), polycystic kidney disease, inflammatory bowel disease (IBD), and MODY I.

144. A method for treating a subject having an HNF4α-associated disease, comprising administering to the subject a therapeutically effective amount of the site-specific HNF4α disrupting agent, the disrupting agent comprising a site-specific HNF4α targeting moiety which targets an HNF4α expression control region, and an effector molecule, thereby treating the subject.

145. (canceled)

146. The method of claim 144, wherein the HNF4α-associated disease is selected from the group consisting of fatty liver (steatosis), nonalcoholic steatohepatitis (NASH), cirrhosis of the liver, accumulation of fat in the liver, inflammation of the liver, hepatocellular necrosis, liver fibrosis, and nonalcoholic fatty liver disease (NAFLD) and the site-specific HNF4α disrupting agent enhances expression of HNF4α in the subject.

147-179. (canceled)

The application's sequence listing, which the Patent Office published only in electronic form, follows.

SEQUENCE LISTING (2525 sequences)

SEQ ID NO: 1 - protein, 7 aa, Artificial Sequence
  source: /note="Description of Artificial Sequence: Synthetic peptide"
RKDALRG

SEQ ID NO: 2 - protein, 7 aa, Artificial Sequence
  source: /note="Description of Artificial Sequence: Synthetic peptide"
TTGALTE

SEQ ID NO: 3 - protein, 7 aa, Artificial Sequence
  source: /note="Description of Artificial Sequence: Synthetic peptide"
QRHHLVE

SEQ ID NO: 4 - protein, 7 aa, Artificial Sequence
  source: /note="Description of Artificial Sequence: Synthetic peptide"
QNSTLTE

SEQ ID NO: 5 - protein, 7 aa, Artificial Sequence
  source: /note="Description of Artificial Sequence: Synthetic peptide"
RNDALTE

SEQ ID NO: 6 - protein, 7 aa, Artificial Sequence
  source: /note="Description of Artificial Sequence: Synthetic peptide"
HKNALQN

SEQ ID NO: 7 - protein, 7 aa, Artificial Sequence
  source: /note="Description of Artificial Sequence: Synthetic peptide"
RRSACRR

SEQ ID NO: 8 - protein, 7 aa, Artificial Sequence
  source: /note="Description of Artificial Sequence: Synthetic peptide"
QKSSLIA

SEQ ID NO: 9 - protein, 7 aa, Artificial Sequence
  source: /note="Description of Artificial Sequence: Synthetic peptide"
RRDELNV

SEQ ID NO: 10 - protein, 7 aa, Artificial Sequence
  source: /note="Description of Artificial Sequence: Synthetic peptide"
TSGSLVR

SEQ ID NO: 11 - protein, 7 aa, Artificial Sequence
  source: /note="Description of Artificial Sequence: Synthetic peptide"
DPGALVR

SEQ ID NO: 12 - protein, 7 aa, Artificial Sequence
  source: /note="Description of Artificial Sequence: Synthetic peptide"
QSSSLVR

SEQ ID NO: 13 - protein, 7 aa, Artificial Sequence
  source: /note="Description of Artificial Sequence: Synthetic peptide"
RSDELVR

SEQ ID NO: 14 - protein, 7 aa, Artificial Sequence
  source: /note="Description of Artificial Sequence: Synthetic peptide"
RLRDIQF

SEQ ID NO: 15 - protein, 7 aa, Artificial Sequence
  source: /note="Description of Artificial Sequence: Synthetic peptide"
RSDERKR

SEQ ID NO: 16 - protein, 7 aa, Artificial Sequence
  source: /note="Description of Artificial Sequence: Synthetic peptide"
RSDHLTT

SEQ ID NO: 17 - protein, 7 aa, Artificial Sequence
  source: /note="Description of Artificial Sequence: Synthetic peptide"
RLRALDR

SEQ ID NO: 18 - protein, 7 aa, Artificial Sequence
  source: /note="Description of Artificial Sequence: Synthetic peptide"
TKNSLTE

SEQ ID NO: 19 - protein, 7 aa, Artificial Sequence
  source: /note="Description of Artificial Sequence: Synthetic peptide"
SKKHLAE

SEQ ID NO: 20 - protein, 7 aa, Artificial Sequence
  source: /note="Description of Artificial Sequence: Synthetic peptide"
TSHSLTE

SEQ ID NO: 21 - protein, 7 aa, Artificial Sequence
  source: /note="Description of Artificial Sequence: Synthetic peptide"
RNDTLTE

SEQ ID NO: 22 - protein, 7 aa, Artificial Sequence
  source: /note="Description of Artificial Sequence: Synthetic peptide"
THLDLIR

SEQ ID NO: 23 - protein, 7 aa, Artificial Sequence
  source: /note="Description of Artificial Sequence: Synthetic peptide"
DKKDLTR

SEQ ID NO: 24 - protein, 7 aa, Artificial Sequence
  source: /note="Description of Artificial Sequence: Synthetic peptide"
SPADLTR

SEQ ID NO: 25 - protein, 7 aa, Artificial Sequence
  source: /note="Description of Artificial Sequence: Synthetic peptide"
RTDTLRD

SEQ ID NO: 26 - protein, 7 aa, Artificial Sequence
  source: /note="Description of Artificial Sequence: Synthetic peptide"
TSGELVR

SEQ ID NO: 27 - protein, 7 aa, Artificial Sequence
  source: /note="Description of Artificial Sequence: Synthetic peptide"
DCRDLAR

SEQ ID NO: 28 - protein, 7 aa, Artificial Sequence
  source: /note="Description of Artificial Sequence: Synthetic peptide"
QSGDLRR

SEQ ID NO: 29 - protein, 7 aa, Artificial Sequence
  source: /note="Description of Artificial Sequence: Synthetic peptide"
RSDDLVR

SEQ ID NO: 30 - protein, 7 aa, Artificial Sequence
  source: /note="Description of Artificial Sequence: Synthetic peptide"
ARGNLRT

SEQ ID NO: 31 - protein, 7 aa, Artificial Sequence
  source: /note="Description of Artificial Sequence: Synthetic peptide"
SRGNLKS

SEQ ID NO: 32 - protein, 7 aa, Artificial Sequence
  source: /note="Description of Artificial Sequence: Synthetic peptide"
QASNLIS

SEQ ID NO: 33 - protein, 7 aa, Artificial Sequence
  source: /note="Description of Artificial Sequence: Synthetic peptide"
REDNLHT

SEQ ID NO: 34 - protein, 7 aa, Artificial Sequence
  source: /note="Description of Artificial Sequence: Synthetic peptide"
TSGNLTE

SEQ ID NO: 35 - protein, 7 aa, Artificial Sequence
  source: /note="Description of Artificial Sequence: Synthetic peptide"
SKKALTE

SEQ ID NO: 36 - protein, 7 aa, Artificial Sequence
  source: /note="Description of Artificial Sequence: Synthetic peptide"
QSGNLTE

SEQ ID NO: 37 - protein, 7 aa, Artificial Sequence
  source: /note="Description of Artificial Sequence: Synthetic peptide"
RADNLTE

SEQ ID NO: 38 - protein, 7 aa, Artificial Sequence
  source: /note="Description of Artificial Sequence: Synthetic peptide"
TTGNLTV

SEQ ID NO: 39 - protein, 7 aa, Artificial Sequence
  source: /note="Description of Artificial Sequence: Synthetic peptide"
DSGNLRV

SEQ ID NO: 40 - protein, 7 aa, Artificial Sequence
  source: /note="Description of Artificial Sequence: Synthetic peptide"
QRANLRA

SEQ ID NO: 41 - protein, 7 aa, Artificial Sequence
  source: /note="Description of Artificial Sequence: Synthetic peptide"
RKDNLKN

SEQ ID NO: 42 - protein, 7 aa, Artificial Sequence
  source: /note="Description of Artificial Sequence: Synthetic peptide"
TSGNLVR

SEQ ID NO: 43 - protein, 7 aa, Artificial Sequence
  source: /note="Description of Artificial Sequence: Synthetic peptide"
DPGNLVR

SEQ ID NO: 44 - protein, 7 aa, Artificial Sequence
  source: /note="Description of Artificial Sequence: Synthetic peptide"
QSSNLVR

SEQ ID NO: 45 - protein, 7 aa, Artificial Sequence
  source: /note="Description of Artificial Sequence: Synthetic peptide"
RSDNLVR

SEQ ID NO: 46 - protein, 7 aa, Artificial Sequence
  source: /note="Description of Artificial Sequence: Synthetic peptide"
APKALGW

SEQ ID NO: 47 - protein, 7 aa, Artificial Sequence
  source: /note="Description of Artificial Sequence: Synthetic peptide"
QAGHLAS

SEQ ID NO: 48 - protein, 7 aa, Artificial Sequence
  source: /note="Description of Artificial Sequence: Synthetic peptide"
RSDHLTT

SEQ ID NO: 49 - protein, 7 aa, Artificial Sequence
  source: /note="Description of Artificial Sequence: Synthetic peptide"
SRRTCRA

SEQ ID NO: 50 - protein, 7 aa, Artificial Sequence
  source: /note="Description of Artificial Sequence: Synthetic peptide"
HTGHLLE

SEQ ID NO: 51 - protein, 7 aa, Artificial Sequence
  source: /note="Description of Artificial Sequence: Synthetic peptide"
QSGHLTE

SEQ ID NO: 52 - protein, 7 aa, Artificial Sequence
  source: /note="Description of Artificial Sequence: Synthetic peptide"
RSDKLTE

SEQ ID NO: 53 - protein, 7 aa, Artificial Sequence
  source: /note="Description of Artificial Sequence: Synthetic peptide"
HRTTLTN

SEQ ID NO: 54 - protein, 7 aa, Artificial Sequence
  source: /note="Description of Artificial Sequence: Synthetic peptide"
ERSHLRE

SEQ ID NO: 55 - protein, 7 aa, Artificial Sequence
  source: /note="Description of Artificial Sequence: Synthetic peptide"
QLAHLRA

SEQ ID NO: 56 - protein, 7 aa, Artificial Sequence
  source: /note="Description of Artificial Sequence: Synthetic peptide"
RSDHLTN

SEQ ID NO: 57 - protein, 7 aa, Artificial Sequence
  source: /note="Description of Artificial Sequence: Synthetic peptide"
TSGHLVR

SEQ ID NO: 58 - protein, 7 aa, Artificial Sequence
  source: /note="Description of Artificial Sequence: Synthetic peptide"
DPGHLVR

SEQ ID NO: 59 - protein, 7 aa, Artificial Sequence
  source: /note="Description of Artificial Sequence: Synthetic peptide"
QRAHLER

SEQ ID NO: 60 - protein, 7 aa, Artificial Sequence
  source: /note="Description of Artificial Sequence: Synthetic peptide"
RSDKLVR

SEQ ID NO: 61 - protein, 11 aa, Artificial Sequence
  source: /note="Description of Artificial Sequence: Synthetic peptide"
YKCPECGKSFS

SEQ ID NO: 62 - protein, 5 aa, Artificial Sequence
  source: /note="Description of Artificial Sequence: Synthetic peptide"
HQRTH

SEQ ID NO: 63 - protein, 5 aa, Artificial Sequence
  source: /note="Description of Artificial Sequence: Synthetic peptide"
TGEKP

SEQ ID NO: 64 - DNA, 20 bp, Artificial Sequence
  source: /note="Description of Artificial Sequence: Synthetic oligonucleotide"
  modified_base (1)..(1): a, c, t, g, unknown or other
  modified_base (3)..(3): a, c, t, g, unknown or other
nbndccdshagrkgghrshv

SEQ ID NO: 65 - DNA, 20 bp, Artificial Sequence
  source: /note="Description of Artificial Sequence: Synthetic oligonucleotide"
  modified_base (18)..(18): a, c, t, g, unknown or other
  modified_base (20)..(20): a, c, t, g, unknown or other
vhsrhggkrgahsdccdnbn

SEQ ID NO: 66 - protein, 518 aa, Artificial Sequence
  source: /note="Description of Artificial Sequence: Synthetic polypeptide"
DALDDFDLDMLGSDALDDFDLDMLGSDALDDFDLDMLGSDALDDFDLDMLSGGPKKKRKVGSQYLPDTDDRHRIEEKRKRTYETFKSIMKKSPFSGPTDPRPPPRRIAVPSRSSASVPKPAPQPYPFTSSLSTINYDEFPTMVFPSGQISQASALAPAPPQVLPQAPAPAPAPAMVSALAQAPAPVPVLAPGPPQAVAPPAPKPTQAGEGTLSEALLQLQFDDEDLGALLGNSTDPAVFTDLASVDNSEFQQLLNQGIPVAPHTTEPMLMEYPEAITRLVTGAQRPPDPAPAPLGAPGLPNGLLSGDEDFSSIADMDFSALLGSGSGSRDSREGMFLPKPEAGSAISDVFEGREVCQPKRLRPFHPPGSPWANRPLPASLAPTPTGPVHEPVGSLTPAPVPQPLDPAPAVTPEASHLLEDPDEETSQAVKALREMADTVIPQKEEAAICGQMDLSHPPPRGHLDELTTTLESMTEDLNLDSPLTPELNEILDTFLNDECLLHAMHISTGLSIFDTSLF

SEQ ID NO: 67 - protein, 617 aa, Homo sapiens
IFKPEELRQALMPTLEALYRQDPESLPFRQPVDPQLLGIPDYFDIVKSPMDLSTIKRKLDTGQYQEPWQYVDDIWLMFNNAWLYNRKTSRVYKYCSKLSEVFEQEIDPVMQSLGYCCGRKLEFSPQTLCCYGKQLCTIPRDATYYSYQNRYHFCEKCFNEIQGESVSLGDDPSQPQTTINKEQFSKRKNDTLDPELFVECTECGRKMHQICVLHHEIIWPAGFVCDGCLKKSARTRKENKFSAKRLPSTRLGTFLENRVNDFLRRQNHPESGEVTVRVVHASDKTVEVKPGMKARFVDSGEMAESFPYRTKALFAFEEIDGVDLCFFGMHVQEYGSDCPPPNQRRVYISYLDSVHFFRPKCLRTAVYHEILIGYLEYVKKLGYTTGHIWACPPSEGDDYIFHCHPPDQKIPKPKRLQEWYKKMLDKAVSERIVHDYKDIFKQATEDRLTSAKELPYFEGDFWPNVLEESIKELEQEEEERKREENTSNESTDVTKGDSKNAKKKNNKKTSKNKSSLSRGNKKKPGMPNVSNDLSQKLYATMEKHKEVFFVIRLIAGPAANSLPPIVDPDPLIPCDLMDGRDAFLTLARDKHLEFSSLRRAQWSTMCMLVELHTQSQD

SEQ ID NO: 68 - RNA, 100 nt, Artificial Sequence
  source: /note="Description of Artificial Sequence: Synthetic polynucleotide"
auugaauuaggggaucucggguuuuagagcuagaaauagcaaguuaaaauaaggcuaguccguuaucaacuugaaaaaguggcaccgagucggugcuuuu

SEQ ID NO: 69 - RNA, 100 nt, Artificial Sequence
  source: /note="Description of Artificial Sequence: Synthetic polynucleotide"
gacuuggggugacaauggcuguuuuagagcuagaaauagcaaguuaaaauaaggcuaguccguuaucaacuugaaaaaguggcaccgagucggugcuuuu

SEQ ID NO: 70 - RNA, 100 nt, Artificial Sequence
  source: /note="Description of Artificial Sequence: Synthetic polynucleotide"
aacugaacaucggugaguuaguuuuagagcuagaaauagcaaguuaaaauaaggcuaguccguuaucaacuugaaaaaguggcaccgagucggugcuuuu

SEQ ID NO: 71 - RNA, 100 nt, Artificial Sequence
  source: /note="Description of Artificial Sequence: Synthetic polynucleotide"
ugguuucuggcugacacccgguuuuagagcuagaaauagcaaguuaaaauaaggcuaguccguuaucaacuugaaaaaguggcaccgagucggugcuuuu

SEQ ID NO: 72 - RNA, 100 nt, Artificial Sequence
  source: /note="Description of Artificial Sequence: Synthetic polynucleotide"
augguuaaucggucccccgcguuuuagagcuagaaauagcaaguuaaaauaaggcuaguccguuaucaacuugaaaaaguggcaccgagucggugcuuuu

SEQ ID NO: 73 - RNA, 100 nt, Artificial Sequence
  source: /note="Description of Artificial Sequence: Synthetic polynucleotide"
guccucugggaagaucugcuguuuuagagcuagaaauagcaaguuaaaauaaggcuaguccguuaucaacuugaaaaaguggcaccgagucggugcuuuu

SEQ ID NO: 74 - RNA, 100 nt, Artificial Sequence
  source: /note="Description of Artificial Sequence: Synthetic polynucleotide"
gguuugaaaggaaggcagagguuuuagagcuagaaauagcaaguuaaaauaaggcuaguccguuaucaacuugaaaaaguggcaccgagucggugcuuuu

SEQ ID NO: 75 - RNA, 100 nt, Artificial Sequence
  source: /note="Description of Artificial Sequence: Synthetic polynucleotide"
acccugggcgcccaccccgaguuuuagagcuagaaauagcaaguuaaaauaaggcuaguccguuaucaacuugaaaaaguggcaccgagucggugcuuuu

SEQ ID NO: 76 - RNA, 100 nt, Artificial Sequence
  source: /note="Description of Artificial Sequence: Synthetic polynucleotide"
uucucccugccuccacgccgguuuuagagcuagaaauagcaaguuaaaauaaggcuaguccguuaucaacuugaaaaaguggcaccgagucggugcuuuu

SEQ ID NO: 77 - RNA, 100 nt, Artificial Sequence
  source: /note="Description of Artificial Sequence: Synthetic polynucleotide"
augcccccagcucuccggcuguuuuagagcuagaaauagcaaguuaaaauaaggcuaguccguuaucaacuugaaaaaguggcaccgagucggugcuuuu

SEQ ID NO: 78 - RNA, 100 nt, Artificial Sequence
  source: /note="Description of Artificial Sequence: Synthetic polynucleotide"
cagcgugaacgcgccccucgguuuuagagcuagaaauagcaaguuaaaauaaggcuaguccguuaucaacuugaaaaaguggcaccgagucggugcuuuu

SEQ ID NO: 79 - RNA, 100 nt, Artificial Sequence
  source: /note="Description of Artificial Sequence: Synthetic polynucleotide"
cuuacgguaaguggggcuggguuuuagagcuagaaauagcaaguuaaaauaaggcuaguccguuaucaacuugaaaaaguggcaccgagucggugcuuuu

SEQ ID NO: 80 - RNA, 100 nt, Artificial Sequence
  source: /note="Description of Artificial Sequence: Synthetic polynucleotide"
cccguaagaaacacacggggguuuuagagcuagaaauagcaaguuaaaauaaggcuaguccguuaucaacuugaaaaaguggcaccgagucggugcuuuu

SEQ ID NO: 81 - DNA, 20 bp, Artificial Sequence
  source: /note="Description of Artificial Sequence: Synthetic oligonucleotide"
aactgaacatcggtgagtta

SEQ ID NO: 82 - DNA, 20 bp, Artificial Sequence
  source: /note="Description of Artificial Sequence: Synthetic oligonucleotide"
taactcaccgatgttcagtt

SEQ ID NO: 83 - DNA, 20 bp, Artificial Sequence
  source: /note="Description of Artificial Sequence: Synthetic oligonucleotide"
tggtttctggctgacacccg

SEQ ID NO: 84 - DNA, 20 bp, Artificial Sequence
  source: /note="Description of Artificial Sequence: Synthetic oligonucleotide"
cgggtgtcagccagaaacca

SEQ ID NO: 85 - DNA, 20 bp, Artificial Sequence
  source: /note="Description of Artificial Sequence: Synthetic oligonucleotide"
atggttaatcggtcccccgc

SEQ ID NO: 86 - DNA, 20 bp, Artificial Sequence
  source: /note="Description of Artificial Sequence: Synthetic oligonucleotide"
gcgggggaccgattaaccat

SEQ ID NO: 87 - DNA, 20 bp, Artificial Sequence
  source: /note="Description of Artificial Sequence: Synthetic oligonucleotide"
gtcctctgggaagatctgct

SEQ ID NO: 88 - DNA, 20 bp, Artificial Sequence
  source: /note="Description of Artificial Sequence: Synthetic oligonucleotide"
agcagatcttcccagaggac

SEQ ID NO: 89 - DNA, 20 bp, Artificial Sequence
  source: /note="Description of Artificial Sequence: Synthetic oligonucleotide"
ggtttgaaaggaaggcagag

SEQ ID NO: 90 - DNA, 20 bp, Artificial Sequence
  source: /note="Description of Artificial Sequence: Synthetic oligonucleotide"
ctctgccttcctttcaaacc

SEQ ID NO: 91 - DNA, 20 bp, Artificial Sequence
  source: /note="Description of Artificial Sequence: Synthetic oligonucleotide"
accctgggcgcccaccccga

SEQ ID NO: 92 - DNA, 20 bp, Artificial Sequence
  source: /note="Description of Artificial Sequence: Synthetic oligonucleotide"
tcggggtgggcgcccagggt

SEQ ID NO: 93 - DNA, 20 bp, Artificial Sequence
  source: /note="Description of Artificial Sequence: Synthetic oligonucleotide"
ttctccctgcctccacgccg

SEQ ID NO: 94 - DNA, 20 bp, Artificial Sequence
  source: /note="Description of Artificial Sequence: Synthetic oligonucleotide"
cggcgtggaggcagggagaa

SEQ ID NO: 95 - protein, 1951 aa, Artificial Sequence
  source: /note="Description of Artificial Sequence: Synthetic polypeptide"
MAPKKKRKVGIHGVPAADKKYSIGLAIGTNSVGWAVITDEYKVPSKKFKVLGNTDRHSIKKNLIGALLFDSGETAEATRLKRTARRRYTRRKNRICYLQEIFSNEMAKVDDSFFHRLEESFLVEEDKKHERHPIFGNIVDEVAYHEKYPTIYHLRKKLVDSTDKADLRLIYLALAHMIKFRGHFLIEGDLNPDNSDVDKLFIQLVQTYNQLFEENPINASGVDAKAILSARLSKSRRLENLIAQLPGEKKNGLFGNLIALSLGLTPNFKSNFDLAEDAKLQLSKDTYDDDLDNLLAQIGDQYADLFLAAKNLSDAILLSDILRVNTEITKAPLSASMIKRYDEHHQDLTLLKALVRQQLPEKYKEIFFDQSKNGYAGYIDGGASQEEFYKFIKPILEKMDGTEELLVKLNREDLLRKQRTFDNGSIPHQIHLGELHAILRRQEDFYPFLKDNREKIEKILTFRIPYYVGPLARGNSRFAWMTRKSEETITPWNFEEVVDKGASAQSFIERMTNFDKNLPNEKVLPKHSLLYEYFTVYNELTKVKYVTEGMRKPAFLSGEQKKAIVDLLFKTNRKVTVKQLKEDYFKKIECFDSVEISGVEDRFNASLGTYHDLLKIIKDKDFLDNEENEDILEDIVLTLTLFEDREMIEERLKTYAHLFDDKVMKQLKRRRYTGWGRLSRKLINGIRDKQSGKTILDFLKSDGFANRNFMQLIHDDSLTFKEDIQKAQVSGQGDSLHEHIANLAGSPAIKKGILQTVKVVDELVKVMGRHKPENIVIEMARENQTTQKGQKNSRERMKRIEEGIKELGSQILKEHPVENTQLQNEKLYLYYLQNGRDMYVDQELDINRLSDYDVAAIVPQSFLKDDSIDNKVLTRSDKARGKSDNVPSEEVVKKMKNYWRQLLNAKLITQRKFDNLTKAERGGLSELDKAGFIKRQLVETRQITKHVAQILDSRMNTKYDENDKLIREVKVITLKSKLVSDFRKDFQFYKVREINNYHHAHDAYLNAVVGTALIKKYPKLESEFVYGDYKVYDVRKMIAKSEQEIGKATAKYFFYSNIMNFFKTEITLANGEIRKRPLIETNGETGEIVWDKGRDFATVRKVLSMPQVNIVKKTEVQTGGFSKESILPKRNSDKLIARKKDWDPKKYGGFDSPTVAYSVLVVAKVEKGKSKKLKSVKELLGITIMERSSFEKNPIDFLEAKGYKEVKKDLIIKLPKYSLFELENGRKRMLASAGELQKGNELALPSKYVNFLYLASHYEKLKGSPEDNEQKQLFVEQHKHYLDEIIEQISEFSKRVILADANLDKVLSAYNKHRDKPIREQAENIIHLFTLTNLGAPAAFKYFDTTIDRKRYTSTKEVLDATLIHQSITGLYETRIDLSQLGGDKRPAATKKAGQAKKKKGRADALDDFDLDMLGSDALDDFDLDMLGSDALDDFDLDMLGSDALDDFDLDMLSGGPKKKRKVGSQYLPDTDDRHRIEEKRKRTYETFKSIMKKSPFSGPTDPRPPPRRIAVPSRSSASVPKPAPQPYPFTSSLSTINYDEFPTMVFPSGQISQASALAPAPPQVLPQAPAPAPAPAMVSALAQAPAPVPVLAPGPPQAVAPPAPKPTQAGEGTLSEALLQLQFDDEDLGALLGNSTDPAVFTDLASVDNSEFQQLLNQGIPVAPHTTEPMLMEYPEAITRLVTGAQRPPDPAPAPLGAPGLPNGLLSGDEDFSSIADMDFSALLGSGSGSRDSREGMFLPKPEAGSAISDVFEGREVCQPKRIRPFHPPGSPWANRPLPASLAPTPTGPVHEPVGSLTPAPVPQPLDPAPAVTPEASHLLEDPDEETSQAVKALREMADTVIPQKEEAAICGQMDLSHPPPRGHLDELTTTLESMTEDLNLDSPLTPELNEILDTFLNDECLLHAMHISTGLSIFDTSLFSGGKRPAATKKAGQAKKKKGSYPYDVPDYA

SEQ ID NO: 96 - RNA, 6097 nt, Artificial Sequence
  source: /note="Description of Artificial Sequence: Synthetic polynucleotide"
aggaaauaagagagaaaagaagaguaagaagaaauauaagagccaccauggcccccaagaagaagcggaaggugggcauccacggcgugcccgccgccgacaagaaguacagcaucggccuggccaucggcaccaacagcgugggcugggccgugaucaccgacgaguacaaggugcccagcaagaaguucaaggugcugggcaacaccgaccggcacagcaucaagaagaaccugaucggcgcccugcuguucgacagcggcgagaccgccgaggccacccggcugaagcggaccgcccggcggcgguacacccggcggaagaaccggaucugcuaccugcaggagaucuucagcaacgagauggccaagguggacgacagcuucuuccaccggcuggaggagagcuuccugguggaggaggacaagaagcacgagcggcaccccaucuucggcaacaucguggacgagguggccuaccacgagaaguaccccaccaucuaccaccugcggaagaagcugguggacagcaccgacaaggccgaccugcggcugaucuaccuggcccuggcccacaugaucaaguuccggggccacuuccugaucgagggcgaccugaaccccgacaacagcgacguggacaagcuguucauccagcuggugcagaccuacaaccagcuguucgaggagaaccccaucaacgccagcggcguggacgccaaggccauccugagcgcccggcugagcaagagccggcggcuggagaaccugaucgcccagcugcccggcgagaagaagaacggccuguucggcaaccugaucgcccugagccugggccugacccccaacuucaagagcaacuucgaccuggccgaggacgccaagcugcagcugagcaaggacaccuacgacgacgaccuggacaaccugcuggcccagaucggcgaccaguacgccgaccuguuccuggccgccaagaaccugagcgacgccauccugcugagcgacauccugcgggugaacaccgagaucaccaaggccccccugagcgccagcaugaucaagcgguacgacgagcaccaccaggaccugacccugcugaaggcccuggugcggcagcagcugcccgagaaguacaaggagaucuucuucgaccagagcaagaacggcuacgccggcuacaucgacggcggcgccagccaggaggaguucuacaaguucaucaagcccauccuggagaagauggacggcaccgaggagcugcuggugaagcugaaccgggaggaccugcugcggaagcagcggaccuucgacaacggcagcaucccccaccagauccaccugggcgagcugcacgccauccugcggcggcaggaggacuucuaccccuuccugaaggacaaccgggagaagaucgagaagauccugaccuuccggauccccuacuacgugggcccccuggcccggggcaacagccgguucgccuggaugacccggaaauccgaggagaccaucacccccuggaacuucgaggaggugguggacaagggcgccagcgcccagagcuucaucgagcggaugaccaacuucgacaagaaccugcccaacgagaaggugcugcccaagcacagccugcuguacgaguacuucaccguguacaacgagcugaccaaggugaaguacgugaccgagggcaugcggaagcccgccuuccugagcggcgagcagaagaaggccaucguggaccugcuguucaagaccaaccggaaggugaccgugaagcagcugaaggaggacuacuucaagaagaucgagugcuucgacagcguggagaucagcggcguggaggaccgguucaacgccagccugggcaccuaccacgaccugcugaagaucaucaaggacaaggacuuccuggacaacgaggagaacgaggacauccuggaggacaucgugcugacccugacccuguucgaggaccgggagaugaucgaggagcggcugaaaaccuacgcccaccuguucgacgacaaggugaugaagcagcugaagcggcggcgguacaccggcuggggccggcugagccggaagcugaucaacggcauccgggacaagcagagcggcaagaccauccuggacuuccugaaauccgacggcuucgccaaccggaacuucaugcagcugauccacgacgacagccugaccuucaaggaggacauccagaaggcccaggugagcggccagggcgacagccugcacgagcacaucgccaaccuggccggcagccccgccaucaagaagggcauccugcagaccgugaaggugguggacgagcuggugaaggugaugggccggcacaagcccgagaacaucgugaucgagauggcccgggagaaccagaccacccagaagggccagaagaacagccgggagcggaugaagcggaucgaggagggcaucaaggagcugggcagccagauccugaaggagcaccccguggagaacacccagcugcagaacgagaagcuguaccuguacuaccugcagaacggccgggacauguacguggaccaggagcuggacaucaaccggcugagcgacuacgacguggccgccaucgugccccagagcuuccugaaggacgacagcaucgacaacaaggugcugacccggagcgacaaggcccggggcaagagcgacaacgugcccagcgaggagguggugaagaagaugaagaacuacuggcggcagcugcugaacgccaagcugaucacccagcggaaguucgacaaccugaccaaggccgagcggggcggccugagcgagcuggacaaggccggcuucaucaagcggcagcugguggagacccggcagaucaccaagcacguggcccagauccuggacagccggaugaacaccaaguacgacgagaacgacaagcugauccgggaggugaaggugaucacccugaaauccaagcuggugagcgacuuccggaaggacuuccaguucuacaaggugcgggagaucaacaacuaccaccacgcccacgacgccuaccugaacgccguggugggcaccgcccugaucaagaaguaccccaagcuggagagcgaguucguguacggcgacuacaagguguacgacgugcggaagaugaucgccaagagcgagcaggagaucggcaaggccaccgccaaguacuucuucuacagcaacaucaugaacuucuucaagaccgagaucacccuggccaacggcgagauccggaagcggccccugaucgagaccaacggcgagaccggcgagaucgugugggacaagggccgggacuucgccaccgugcggaaggugcugagcaugccccaggugaacaucgugaagaaaaccgaggugcagaccggcggcuucagcaaggagagcauccugcccaagcggaacagcgacaagcugaucgcccggaagaaggacugggaccccaagaaguacggcggcuucgacagccccaccguggccuacagcgugcuggugguggccaagguggagaagggcaagagcaagaagcugaaauccgugaaggagcugcugggcaucaccaucauggagcggagcagcuucgagaagaaccccaucgacuuccuggaggccaagggcuacaaggaggugaagaaggaccugaucaucaagcugcccaaguacagccuguucgagcuggagaacggccggaagcggaugcuggccagcgccggcgagcugcagaagggcaacgagcuggcccugcccagcaaguacgugaacuuccuguaccuggccagccacuacgagaagcugaagggcagccccgaggacaacgagcagaagcagcuguucguggagcagcacaagcacuaccuggacgagaucaucgagcagaucagcgaguucagcaagcgggugauccuggccgacgccaaccuggacaaggugcugagcgccuacaacaagcaccgggacaagcccauccgggagcaggccgagaacaucauccaccuguucacccugaccaaccugggcgcccccgccgccuucaaguacuucgacaccaccaucgaccggaagcgguacaccagcaccaaggaggugcuggacgccacccugauccaccagagcaucaccggccuguacgagacccggaucgaccugagccagcugggcggcgacaagcggcccgccgccaccaagaaggccggccaggccaagaagaagaagggccgggccgacgcccuggacgacuucgaccuggacaugcugggcagcgacgcccuggacgacuucgaccuggacaugcugggcagcgacgcccuggacgacuucgaccuggacaugcugggcagcgacgcccuggacgacuucgaccuggacaugcugagcggcggccccaagaagaagcggaaggugggcagccaguaccugcccgacaccgacgaccggcaccggaucgaggagaagcggaagcggaccuacgagaccuucaagagcaucaugaagaaaucccccuucagcggccccaccgacccccggccccccccccggcggaucgccgugcccagccggagcagcgccagcgugcccaagcccgccccccagcccuaccccuucaccagcagccugagcaccaucaacuacgacgaguuccccaccaugguguuccccagcggccagaucagccaggccagcgcccuggcccccgcccccccccaggugcugccccaggcccccgcccccgcccccgcccccgccauggugagcgcccuggcccaggcccccgcccccgugcccgugcuggcccccggccccccccaggccguggccccccccgcccccaagcccacccaggccggcgagggcacccugagcgaggcccugcugcagcugcaguucgacgacgaggaccugggcgcccugcugggcaacagcaccgaccccgccguguucaccgaccuggccagcguggacaacagcgaguuccagcagcugcugaaccagggcauccccguggccccccacaccaccgagcccaugcugauggaguaccccgaggccaucacccggcuggugaccggcgcccagcggccccccgaccccgcccccgccccccugggcgcccccggccugcccaacggccugcugagcggcgacgaggacuucagcagcaucgccgacauggacuucagcgcccugcugggcagcggcagcggcagccgggacagccgggagggcauguuccugcccaagcccgaggccggcagcgccaucagcgacguguucgagggccgggaggugugccagcccaagcggauccggcccuuccacccccccggcagccccugggccaaccggccccugcccgccagccuggcccccacccccaccggccccgugcacgagcccgugggcagccugacccccgcccccgugccccagccccuggaccccgcccccgccgugacccccgaggccagccaccugcuggaggaccccgacgaggagaccagccaggccgugaaggcccugcgggagauggccgacaccgugaucccccagaaggaggaggccgccaucugcggccagauggaccugagccacccccccccccggggccaccuggacgagcugaccaccacccuggagagcaugaccgaggaccugaaccuggacagcccccugacccccgagcugaacgagauccuggacaccuuccugaacgacgagugccugcugcacgccaugcacaucagcaccggccugagcaucuucgacaccagccuguucagcggcggcaagcggcccgccgccaccaagaaggccggccaggccaagaagaagaagggcagcuaccccuacgacgugcccgacuacgccugagcggccgcuuaauuaagcugccuucugcggggcuugccuucuggccaugcccuucuucucucccuugcaccuguaccucuuggucuuugaauaaagccugaguaggaagucuagaaaaaaaaaaaaaaaaaaaaaaaaaaaaaaaaaaaaaaaaaaaaaaaaaaaaaaaaaaaaaaaaaaaaaaaaaaaaaaaa

SEQ ID NO: 97 - protein, 1367 aa, Artificial Sequence
  source: /note="Description of Artificial Sequence: Synthetic polypeptide"
DKKYSIGLAIGTNSVGWAVITDEYKVPSKKFKVLGNTDRHSIKKNLIGALLFDSGETAEATRLKRTARRRYTRRKNRICYLQEIFSNEMAKVDDSFFHRLEESFLVEEDKKHERHPIFGNIVDEVAYHEKYPTIYHLRKKLVDSTDKADLRLIYLALAHMIKFRGHFLIEGDLNPDNSDVDKLFIQLVQTYNQLFEENPINASGVDAKAILSARLSKSRRLENLIAQLPGEKKNGLFGNLIALSLGLTPNFKSNFDLAEDAKLQLSKDTYDDDLDNLLAQIGDQYADLFLAAKNLSDAILLSDILRVNTEITKAPLSASMIKRYDEHHQDLTLLKALVRQQLPEKYKEIFFDQSKNGYAGYIDGGASQEEFYKFIKPILEKMDGTEELLVKLNREDLLRKQRTFDNGSIPHQIHLGELHAILRRQEDFYPFLKDNREKIEKILTFRIPYYVGPLARGNSRFAWMTRKSEETITPWNFEEVVDKGASAQSFIERMTNFDKNLPNEKVLPKHSLLYEYFTVYNELTKVKYVTEGMRKPAFLSGEQKKAIVDLLFKTNRKVTVKQLKEDYFKKIECFDSVEISGVEDRFNASLGTYHDLLKIIKDKDFLDNEENEDILEDIVLTLTLFEDREMIEERLKTYAHLFDDKVMKQLKRRRYTGWGRLSRKLINGIRDKQSGKTILDFLKSDGFANRNFMQLIHDDSLTFKEDIQKAQVSGQGDSLHEHIANLAGSPAIKKGILQTVKVVDELVKVMGRHKPENIVIEMARENQTTQKGQKNSRERMKRIEEGIKELGSQILKEHPVENTQLQNEKLYLYYLQNGRDMYVDQELDINRLSDYDVAAIVPQSFLKDDSIDNKVLTRSDKARGKSDNVPSEEVVKKMKNYWRQLLNAKLITQRKFDNLTKAERGGLSELDKAGFIKRQLVETRQITKHVAQILDSRMNTKYDENDKLIREVKVITLKSKLVSDFRKDFQFYKVREINNYHHAHDAYLNAVVGTALIKKYPKLESEFVYGDYKVYDVRKMIAKSEQEIGKATAKYFFYSNIMNFFKTEITLANGEIRKRPLIETNGETGEIVWDKGRDFATVRKVLSMPQVNIVKKTEVQTGGFSKESILPKRNSDKLIARKKDWDPKKYGGFDSPTVAYSVLVVAKVEKGKSKKLKSVKELLGITIMERSSFEKNPIDFLEAKGYKEVKKDLIIKLPKYSLFELENGRKRMLASAGELQKGNELALPSKYVNFLYLASHYEKLKGSPEDNEQKQLFVEQHKHYLDEIIEQISEFSKRVILADANLDKVLSAYNKHRDKPIREQAENIIHLFTLTNLGAPAAFKYFDTTIDRKRYTSTKEVLDATLIHQSITGLYETRIDLSQLGGD

SEQ ID NO: 98 - protein, 2050 aa, Artificial Sequence
  source: /note="Description of Artificial Sequence: Synthetic polypeptide"
MAPKKKRKVGIHGVPAADKKYSIGLAIGTNSVGWAVITDEYKVPSKKFKVLGNTDRHSIKKNLIGALLFDSGETAEATRLKRTARRRYTRRKNRICYLQEIFSNEMAKVDDSFFHRLEESFLVEEDKKHERHPIFGNIVDEVAYHEKYPTIYHLRKKLVDSTDKADLRLIYLALAHMIKFRGHFLIEGDLNPDNSDVDKLFIQLVQTYNQLFEENPINASGVDAKAILSARLSKSRRLENLIAQLPGEKKNGLFGNLIALSLGLTPNFKSNFDLAEDAKLQLSKDTYDDDLDNLLAQIGDQYADLFLAAKNLSDAILLSDILRVNTEITKAPLSASMIKRYDEHHQDLTLLKALVRQQLPEKYKEIFFDQSKNGYAGYIDGGASQEEFYKFIKPILEKMDGTEELLVKLNREDLLRKQRTFDNGSIPHQIHLGELHAILRRQEDFYPFLKDNREKIEKILTFRIPYYVGPLARGNSRFAWMTRKSEETITPWNFEEVVDKGASAQSFIERMTNFDKNLPNEKVLPKHSLLYEYFTVYNELTKVKYVTEGMRKPAFLSGEQKKAIVDLLFKTNRKVTVKQLKEDYFKKIECFDSVEISGVEDRFNASLGTYHDLLKIIKDKDFLDNEENEDILEDIVLTLTLFEDREMIEERLKTYAHLFDDKVMKQLKRRRYTGWGRLSRKLINGIRDKQSGKTILDFLKSDGFANRNFMQLIHDDSLTFKEDIQKAQVSGQGDSLHEHIANLAGSPAIKKGILQTVKVVDELVKVMGRHKPENIVIEMARENQTTQKGQKNSRERMKRIEEGIKELGSQILKEHPVENTQLQNEKLYLYYLQNGRDMYVDQELDINRLSDYDVAAIVPQSFLKDDSIDNKVLTRSDKARGKSDNVPSEEVVKKMKNYWRQLLNAKLITQRKFDNLTKAERGGLSELDKAGFIKRQLVETRQITKHVAQILDSRMNTKYDENDKLIREVKVITLKSKLVSDFRKDFQFYKVREINNYHHAHDAYLNAVVGTALIKKYPKLESEFVYGDYKVYDVRKMIAKSEQEIGKATAKYFFYSNIMNFFKTEITLANGEIRKRPLIETNGETGEIVWDKGRDFATVRKVLSMPQVNIVKKTEVQTGGFSKESILPKRNSDKLIARKKDWDPKKYGGFDSPTVAYSVLVVAKVEKGKSKKLKSVKELLGITIMERSSFEKNPIDFLEAKGYKEVKKDLIIKLPKYSLFELENGRKRMLASAGELQKGNELALPSKYVNFLYLASHYEKLKGSPEDNEQKQLFVEQHKHYLDEIIEQISEFSKRVILADANLDKVLSAYNKHRDKPIREQAENIIHLFTLTNLGAPAAFKYFDTTIDRKRYTSTKEVLDATLIHQSITGLYETRIDLSQLGGDKRPAATKKAGQAKKKKGRAIFKPEELRQALMPTLEALYRQDPESLPFRQPVDPQLLGIPDYFDIVKSPMDLSTIKRKLDTGQYQEPWQYVDDIWLMFNNAWLYNRKTSRVYKYCSKLSEVFEQEIDPVMQSLGYCCGRKLEFSPQTLCCYGKQLCTIPRDATYYSYQNRYHFCEKCFNEIQGESVSLGDDPSQPQTTINKEQFSKRKNDTLDPELFVECTECGRKMHQICVLHHEIIWPAGFVCDGCLKKSARTRKENKFSAKRLPSTRLGTFLENRVNDFLRRQNHPESGEVTVRVVHASDKTVEVKPGMKARFVDSGEMAESFPYRTKALFAFEEIDGVDLCFFGMHVQEYGSDCPPPNQRRVYISYLDSVHFFRPKCLRTAVYHEILIGYLEYVKKLGYTTGHIWACPPSEGDDYIFHCHPPDQKIPKPKRLQEWYKKMLDKAVSERIVHDYKDIFKQATEDRLTSAKELPYFEGDFWPNVLEESIKELEQEEEERKREENTSNESTDVTKGDSKNAKKKNNKKTSKNKSSLSRGNKKKPGMPNVSNDLSQKLYATMEKHKEVFFVIRLIAGPAANSLPPIVDPDPLIPCDLMDGRDAFLTLARDKHLEFSSLRRAQWSTMCMLVELHTQSQDSGGKRPAATKKAGQAKKKKGSYPYDVPDYA

SEQ ID NO: 99 - RNA, 6394 nt, Artificial Sequence
  source: /note="Description of Artificial Sequence: Synthetic polynucleotide"
aggaaauaagagagaaaagaagaguaagaagaaauauaagagccaccauggcccccaagaagaagcggaaggugggcauccacggcgugcccgccgccgacaagaaguacagcaucggccuggccaucggcaccaacagcgugggcugggccgugaucaccgacgaguacaaggugcccagcaagaaguucaaggugcugggcaacaccgaccggcacagcaucaagaagaaccugaucggcgcccugcuguucgacagcggcgagaccgccgaggccacccggcugaagcggaccgcccggcggcgguacacccggcggaagaaccggaucugcuaccugcaggagaucuucagcaacgagauggccaagguggacgacagcuucuuccaccggcuggaggagagcuuccugguggaggaggacaagaagcacgagcggcaccccaucuucggcaacaucguggacgagguggccuaccacgagaaguaccccaccaucuaccaccugcggaagaagcugguggacagcaccgacaaggccgaccugcggcugaucuaccuggcccuggcccacaugaucaaguuccggggccacuuccugaucgagggcgaccugaaccccgacaacagcgacguggacaagcuguucauccagcuggugcagaccuacaaccagcuguucgaggagaaccccaucaacgccagcggcguggacgccaaggccauccugagcgcccggcugagcaagagccggcggcuggagaaccugaucgcccagcugcccggcgagaagaagaacggccuguucggcaaccugaucgcccugagccugggccugacccccaacuucaagagcaacuucgaccuggccgaggacgccaagcugcagcugagcaaggacaccuacgacgacgaccuggacaaccugcuggcccagaucggcgaccaguacgccgaccuguuccuggccgccaagaaccugagcgacgccauccugcugagcgacauccugcgggugaacaccgagaucaccaaggccccccugagcgccagcaugaucaagcgguacgacgagcaccaccaggaccugacccugcugaaggcccuggugcggcagcagcugcccgagaaguacaaggagaucuucuucgaccagagcaagaacggcuacgccggcuacaucgacggcggcgccagccaggaggaguucuacaaguucaucaagcccauccuggagaagauggacggcaccgaggagcugcuggugaagcugaaccgggaggaccugcugcggaagcagcggaccuucgacaacggcagcaucccccaccagauccaccugggcgagcugcacgccauccugcggcggcaggaggacuucuaccccuuccugaaggacaaccgggagaagaucgagaagauccugaccuuccggauccccuacuacgugggcccccuggcccggggcaacagccgguucgccuggaugacccggaaauccgaggagaccaucacccccuggaacuucgaggaggugguggacaagggcgccagcgcccagagcuucaucgagcggaugaccaacuucgacaagaaccugcccaacgagaaggugcugcccaagcacagccugcuguacgaguacuucaccguguacaacgagcugaccaaggugaaguacgugaccgagggcaugcggaagcccgccuuccugagcggcgagcagaagaaggccaucguggaccugcuguucaagaccaaccggaaggugaccgugaagcagcugaaggaggacuacuucaagaagaucgagugcuucgacagcguggagaucagcggcguggaggaccgguucaacgccagccugggcaccuaccacgaccugcugaagaucaucaaggacaaggacuuccuggacaacgaggagaacgaggacauccuggaggacaucgugcugacccugacccuguucgaggaccgggagaugaucgaggagcggcugaaaaccuacgcccaccuguucgacgacaaggugaugaagcagcugaagcggcggcgguacaccggcuggggccggcugagccggaagcugaucaacggcauccgggacaagcagagcggcaagaccauccuggacuuccugaaauccgacggcuucgccaaccggaacuucaugcagcugauccacgacgacagccugaccuucaaggaggacauccagaaggcccaggugagcggccagggcgacagccugcacgagcacaucgccaaccuggccggcagccccgccaucaagaagggcauccugcagaccgugaaggugguggacgagcuggugaaggugaugggccggcacaagcccgagaacaucgugaucgagauggcccgggagaaccagaccacccagaagggccagaagaacagccgggagcggaugaagcggaucgaggagggcaucaaggagcugggcagccagauccugaaggagcaccccguggagaacacccagcugcagaacgagaagcuguaccuguacuaccugcagaacggccgggacauguacguggaccaggagcuggacaucaaccggcugagcgacuacgacguggccgccaucgugccccagagcuuccugaaggacgacagcaucgacaacaaggugcugacccggagcgacaaggcccggggcaagagcgacaacgugcccagcgaggagguggugaagaagaugaagaacuacuggcggcagcugcugaacgccaagcugaucacccagcggaaguucgacaaccugaccaaggccgagcggggcggccugagcgagcuggacaaggccggcuucaucaagcggcagcugguggagacccggcagaucaccaagcacguggcccagauccuggacagccggaugaacaccaaguacgacgagaacgacaagcugauccgggaggugaaggugaucacccugaaauccaagcuggugagcgacuuccggaaggacuuccaguucuacaaggugcgggagaucaacaacuaccaccacgcccacgacgccuaccugaacgccguggugggcaccgcccugaucaagaaguaccccaagcuggagagcgaguucguguacggcgacuacaagguguacgacgugcggaagaugaucgccaagagcgagcaggagaucggcaaggccaccgccaaguacuucuucuacagcaacaucaugaacuucuucaagaccgagaucacccuggccaacggcgagauccggaagcggccccugaucgagaccaacggcgagaccggcgagaucgugugggacaagggccgggacuucgccaccgugcggaaggugcugagcaugccccaggugaacaucgugaagaaaaccgaggugcagaccggcggcuucagcaaggagagcauccugcccaagcggaacagcgacaagcugaucgcccggaagaaggacugggaccccaagaaguacggcggcuucgacagccccaccguggccuacagcgugcuggugguggccaagguggagaagggcaagagcaagaagcugaaauccgugaaggagcugcugggcaucaccaucauggagcggagcagcuucgagaagaaccccaucgacuuccuggaggccaagggcuacaaggaggugaagaaggaccugaucaucaagcugcccaaguacagccuguucgagcuggagaacggccggaagcggaugcuggccagcgccggcgagcugcagaagggcaacgagcuggcccugcccagcaaguacgugaacuuccuguaccuggccagccacuacgagaagcugaagggcagccccgaggacaacgagcagaagcagcuguucguggagcagcacaagcacuaccuggacgagaucaucgagcagaucagcgaguucagcaagcgggugauccuggccgacgccaaccuggacaaggugcugagcgccuacaacaagcaccgggacaagcccauccgggagcaggccgagaacaucauccaccuguucacccugaccaaccugggcgcccccgccgccuucaaguacuucgacaccaccaucgaccggaagcgguacaccagcaccaaggaggugcuggacgccacccugauccaccagagcaucaccggccuguacgagacccggaucgaccugagccagcugggcggcgacaagcggcccgccgccaccaagaaggccggccaggccaagaagaagaagggccgggccaucuucaagcccgaggagcugcggcaggcccugaugcccacccuggaggcccuguaccggcaggaccccgagagccugcccuuccggcagcccguggacccccagcugcugggcauccccgacuacuucgacaucgugaaaucccccauggaccugagcaccaucaagcggaagcuggacaccggccaguaccaggagcccuggcaguacguggacgacaucuggcugauguucaacaacgccuggcuguacaaccggaaaaccagccggguguacaaguacugcagcaagcugagcgagguguucgagcaggagaucgaccccgugaugcagagccugggcuacugcugcggccggaagcuggaguucagcccccagacccugugcugcuacggcaagcagcugugcaccaucccccgggacgccaccuacuacagcuaccagaaccgguaccacuucugcgagaagugcuucaacgagauccagggcgagagcgugagccugggcgacgaccccagccagccccagaccaccaucaacaaggagcaguucagcaagcggaagaacgacacccuggaccccgagcuguucguggagugcaccgagugcggccggaagaugcaccagaucugcgugcugcaccacgagaucaucuggcccgccggcuucgugugcgacggcugccugaagaaauccgcccggacccggaaggagaacaaguucagcgccaagcggcugcccagcacccggcugggcaccuuccuggagaaccgggugaacgacuuccugcggcggcagaaccaccccgagagcggcgaggugaccgugcggguggugcacgccagcgacaagaccguggaggugaagcccggcaugaaggcccgguucguggacagcggcgagauggccgagagcuuccccuaccggaccaaggcccuguucgccuucgaggagaucgacggcguggaccugugcuucuucggcaugcacgugcaggaguacggcagcgacugccccccccccaaccagcggcggguguacaucagcuaccuggacagcgugcacuucuuccggcccaagugccugcggaccgccguguaccacgagauccugaucggcuaccuggaguacgugaagaagcugggcuacaccaccggccacaucugggccugcccccccagcgagggcgacgacuacaucuuccacugccacccccccgaccagaagauccccaagcccaagcggcugcaggagugguacaagaagaugcuggacaaggccgugagcgagcggaucgugcacgacuacaaggacaucuucaagcaggccaccgaggaccggcugaccagcgccaaggagcugcccuacuucgagggcgacuucuggcccaacgugcuggaggagagcaucaaggagcuggagcaggaggaggaggagcggaagcgggaggagaacaccagcaacgagagcaccgacgugaccaagggcgacagcaagaacgccaagaagaagaacaacaagaaaaccagcaagaacaagagcagccugagccggggcaacaagaagaagcccggcaugcccaacgugagcaacgaccugagccagaagcuguacgccaccauggagaagcacaaggagguguucuucgugauccggcugaucgccggccccgccgccaacagccugccccccaucguggaccccgacccccugauccccugcgaccugauggacggccgggacgccuuccugacccuggcccgggacaagcaccuggaguucagcagccugcggcgggcccaguggagcaccaugugcaugcugguggagcugcacacccagagccaggacagcggcggcaagcggcccgccgccaccaagaaggccggccaggccaagaagaagaagggcagcuaccccuacgacgugcccgacuacgccugagcggccgcuuaauuaagcugccuucugcggggcuugccuucuggccaugcccuucuucucucccuugcaccuguaccucuuggucuuugaauaaagccugaguaggaagucuagaaaaaaaaaaaaaaaaaaaaaaaaaaaaaaaaaaaaaaaaaaaaaaaaaaaaaaaaaaaaaaaaaaaaaaaaaaaaaaaa

SEQ ID NO: 100 - protein, 789 aa, Artificial Sequence
  source: /note="Description of Artificial Sequence: Synthetic polypeptide"
MAPKKKRKVGIHGVPAAGSSGSLEPGEKPYKCPECGKSFSRSDNLVRHQRTHTGEKPYKCPECGKSFSRSDHLTNHQRTHTGEKPYKCPECGKSFSDPGHLVRHQRTHTGEKPYKCPECGKSFSQRAHLERHQRTHTGEKPYKCPECGKSFSSRRTCRAHQRTHTGEKPYKCPECGKSFSRSDKLTEHQRTHTGEKPYKCPECGKSFSRNDTLTEHQRTHTGEKPTGKKTSASGSGGGSGGDALDDFDLDMLGSDALDDFDLDMLGSDALDDFDLDMLGSDALDDFDLDMLSGGPKKKRKVGSQYLPDTDDRHRIEEKRKRTYETFKSIMKKSPFSGPTDPRPPPRRIAVPSRSSASVPKPAPQPYPFTSSLSTINYDEFPTMVFPSGQISQASALAPAPPQVLPQAPAPAPAPAMVSALAQAPAPVPVLAPGPPQAVAPPAPKPTQAGEGTLSEALLQLQFDDEDLGALLGNSTDPAVFTDLASVDNSEFQQLLNQGIPVAPHTTEPMLMEYPEAITRLVTGAQRPPDPAPAPLGAPGLPNGLLSGDEDFSSIADMDFSALLGSGSGSRDSREGMFLPKPEAGSAISDVFEGREVCQPKRLRPFHPPGSPWANRPLPASLAPTPTGPVHEPVGSLTPAPVPQPLDPAPAVTPEASHLLEDPDEETSQAVKALREMADTVIPQKEEAAICGQMDLSHPPPRGHLDELTTTLESMTEDLNLDSPLTPELNEILDTFLNDECLLHAMHISTGLSIFDTSLFSGGKRPAATKKAGQAKKKKGSYPYDVPDYA

SEQ ID NO: 101 - RNA, 2611 nt, Artificial Sequence
  source: /note="Description of Artificial Sequence: Synthetic polynucleotide"
aggaaauaagagagaaaagaagaguaagaagaaauauaagagccaccauggcccccaagaagaagcggaaggugggcauccacggcgugcccgccgccggcagcagcggaucccuggagccgggugagaagccauacaagugcccagaaugcggcaagagcuuuagccgcagcgauaaucugguucgucaucagcgcacgcauacgggugagaaaccguacaaauguccagaaugcggcaaaagcuuuagucgcagcgaucaucugacgaaucaccagcgcacccauaccggcgaaaaaccguacaagugcccggagugcgguaaaagcuucagcgacccgggucaucuggugcgccaccaacgcacgcacaccggugagaaaccauauaaauguccagagugcggcaagaguuuuagccagcgugcccaucuggaacgucaucagcguacccacacgggugaaaaaccauauaagugcccggagugcgguaagaguuuuaguagccgccguacgugccgugcgcaccaacgcacccacaccggugaaaagccauacaaguguccggaaugcggcaagagcuucagccgcagcgacaaacucaccgaacaucaacguacccauacgggcgagaagccguacaaaugcccagaauguggcaaaagcuucagucgcaacgauacgcugaccgagcaucagcguacgcacaccggcgaaaagccaaccggcaagaaaaccagcgcuagcggcagcggcggcggcagcggcggcgacgcccuggacgacuucgaccuggacaugcugggcagcgacgcccuggacgacuucgaccuggacaugcugggcagcgacgcccuggacgacuucgaccuggacaugcugggcagcgacgcccuggacgacuucgaccuggacaugcugagcggcggccccaagaagaagcggaaggugggcagccaguaccugcccgacaccgacgaccggcaccggaucgaggagaagcggaagcggaccuacgagaccuucaagagcaucaugaagaaaucccccuucagcggccccaccgacccccggccccccccccggcggaucgccgugcccagccggagcagcgccagcgugcccaagcccgccccccagcccuaccccuucaccagcagccugagcaccaucaacuacgacgaguuccccaccaugguguuccccagcggccagaucagccaggccagcgcccuggcccccgcccccccccaggugcugccccaggcccccgcccccgcccccgcccccgccauggugagcgcccuggcccaggcccccgcccccgugcccgugcuggcccccggccccccccaggccguggccccccccgcccccaagcccacccaggccggcgagggcacccugagcgaggcccugcugcagcugcaguucgacgacgaggaccugggcgcccugcugggcaacagcaccgaccccgccguguucaccgaccuggccagcguggacaacagcgaguuccagcagcugcugaaccagggcauccccguggccccccacaccaccgagcccaugcugauggaguaccccgaggccaucacccggcuggugaccggcgcccagcggccccccgaccccgcccccgccccccugggcgcccccggccugcccaacggccugcugagcggcgacgaggacuucagcagcaucgccgacauggacuucagcgcccugcugggcagcggcagcggcagccgggacagccgggagggcauguuccugcccaagcccgaggccggcagcgccaucagcgacguguucgagggccgggaggugugccagcccaagcggcuccggcccuuccacccccccggcagccccugggccaaccggccccugcccgccagccuggcccccacccccaccggccccgugcacgagcccgugggcagccugacccccgcccccgugccccagccccuggaccccgcccccgccgugacccccgaggccagccaccugcuggaggaccccgacgaggagaccagccaggccgugaaggcccugcgggagauggccgacaccgugaucccccagaaggaggaggccgccaucugcggccagauggaccugagccacccccccccccggggccaccuggacgagcugaccaccacccuggagagcaugaccgaggaccugaaccuggacagcccccugacccccgagcugaacgagauccuggacaccuuccugaacgacgagugccugcugcacgccaugcacaucagcaccggccugagcaucuucgacaccagccuguucagcggcggcaagcggcccgccgccaccaagaaggccggccaggccaagaagaagaagggcagcuaccccuacgacgugcccgacuacgccugagcggccgcuuaauuaagcugccuucugcggggcuugccuucuggccaugcccuucuucucucccuugcaccuguaccucuuggucuuugaauaaagccugaguaggaagucuagaaaaaaaaaaaaaaaaaaaaaaaaaaaaaaaaaaaaaaaaaaaaaaaaaaaaaaaaaaaaaaaaaaaaaaaaaaaaaaaa

SEQ ID NO: 102 - DNA, 21 bp, Homo sapiens
ccgcggcgtggaggcagggag

SEQ ID NO: 103 - protein, 209 aa, Artificial Sequence
  source: /note="Description of Artificial Sequence: Synthetic polypeptide"
LEPGEKPYKCPECGKSFSRSDNLVRHQRTHTGEKPYKCPECGKSFSRSDHLTNHQRTHTGEKPYKCPECGKSFSDPGHLVRHQRTHTGEKPYKCPECGKSFSQRAHLERHQRTHTGEKPYKCPECGKSFSSRRTCRAHQRTHTGEKPYKCPECGKSFSRSDKLTEHQRTHTGEKPYKCPECGKSFSRNDTLTEHQRTHTGEKPTGKKTS

SEQ ID NO: 104 - protein, 789 aa, Artificial Sequence
  source: /note="Description of Artificial Sequence: Synthetic polypeptide"
MAPKKKRKVGIHGVPAAGSSGSLEPGEKPYKCPECGKSFSQSSNLVRHQRTHTGEKPYKCPECGKSFSSKKHLAEHQRTHTGEKPYKCPECGKSFSSKKALTEHQRTHTGEKPYKCPECGKSFSDCRDLARHQRTHTGEKPYKCPECGKSFSDPGHLVRHQRTHTGEKPYKCPECGKSFSRNDALTEHQRTHTGEKPYKCPECGKSFSDKKDLTRHQRTHTGEKPTGKKTSASGSGGGSGGDALDDFDLDMLGSDALDDFDLDMLGSDALDDFDLDMLGSDALDDFDLDMLSGGPKKKRKVGSQYLPDTDDRHRIEEKRKRTYETFKSIMKKSPFSGPTDPRPPPRRIAVPSRSSASVPKPAPQPYPFTSSLSTINYDEFPTMVFPSGQISQASALAPAPPQVLPQAPAPAPAPAMVSALAQAPAPVPVLAPGPPQAVAPPAPKPTQAGEGTLSEALLQLQFDDEDLGALLGNSTDPAVFTDLASVDNSEFQQLLNQGIPVAPHTTEPMLMEYPEAITRLVTGAQRPPDPAPAPLGAPGLPNGLLSGDEDFSSIADMDFSALLGSGSGSRDSREGMFLPKPEAGSAISDVFEGREVCQPKRLRPFHPPGSPWANRPLPASLAPTPTGPVHEPVGSLTPAPVPQPLDPAPAVTPEASHLLEDPDEETSQAVKALREMADTVIPQKEEAAICGQMDLSHPPPRGHLDELTTTLESMTEDLNLDSPLTPELNEILDTFLNDECLLHAMHISTGLSIFDTSLFSGGKRPAATKKAGQAKKKKGSYPYDVPDYA

SEQ ID NO: 105 - RNA, 2512 nt, Artificial Sequence
  source: /note="Description of Artificial Sequence: Synthetic polynucleotide"
aggaaauaagagagaaaagaagaguaagaagaaauauaagagccaccauggcccccaagaagaagcggaaggugggcauccacggcgugcccgccgccggcagcagcggaucccuggaaccgggcgagaaaccguacaagugcccagaaugcgguaaaagcuucagccagagcaguaaucugguucgucaccagcgcacccacacgggugaaaagccauacaaauguccagagugugguaagaguuucaguagcaaaaagcaucuggcggaacaccaacguacgcauacgggugaaaagccguacaaguguccggaauguggcaagagcuuuagcagcaagaaggcgcugaccgaacaucagcguacccauaccggugaaaaaccauacaagugcccggagugcggcaaaaguuucagcgauugucgcgaucuggcccgucaucaacgcacccacaccggcgagaaaccauauaaguguccggagugcgguaaaagcuuuagcgauccgggccaucugguucgccaccaacgcacgcacaccggcgagaaaccguauaagugcccagagugcgguaagaguuuuagccguaacgaugcgcugacggagcaucagcgcacgcacacgggcgagaaaccauauaaaugcccggaaugugguaagagcuucagugacaaaaaggaucugacccgccaucaacguacgcauacgggcgagaagccaaccggcaagaaaaccagcgcuagcggcagcggcggcggcagcggcggcgacgcccuggacgacuucgaccuggacaugcugggcagcgacgcccuggacgacuucgaccuggacaugcugggcagcgacgcccuggacgacuucgaccuggacaugcugggcagcgacgcccuggacgacuucgaccuggacaugcugagcggcggccccaagaagaagcggaaggugggcagccaguaccugcccgacaccgacgaccggcaccggaucgaggagaagcggaagcggaccuacgagaccuucaagagcaucaugaagaaaucccccuucagcggccccaccgacccccggccccccccccggcggaucgccgugcccagccggagcagcgccagcgugcccaagcccgccccccagcccuaccccuucaccagcagccugagcaccaucaacuacgacgaguuccccaccaugguguuccccagcggccagaucagccaggccagcgcccuggcccccgcccccccccaggugcugccccaggcccccgcccccgcccccgcccccgccauggugagcgcccuggcccaggcccccgcccccgugcccgugcuggcccccggccccccccaggccguggccccccccgcccccaagcccacccaggccggcgagggcacccugagcgaggcccugcugcagcugcaguucgacgacgaggaccugggcgcccugcugggcaacagcaccgaccccgccguguucaccgaccuggccagcguggacaacagcgaguuccagcagcugcugaaccagggcauccccguggccccccacaccaccgagcccaugcugauggaguaccccgaggccaucacccggcuggugaccggcgcccagcggccccccgaccccgcccccgccccccugggcgcccccggccugcccaacggccugcugagcggcgacgaggacuucagcagcaucgccgacauggacuucagcgcccugcugggcagcggcagcggcagccgggacagccgggagggcauguuccugcccaagcccgaggccggcagcgccaucagcgacguguucgagggccgggaggugugccagcccaagcggcuccggcccuuccacccccccggcagccccugggccaaccggccccugcccgccagccuggcccccacccccaccggccccgugcacgagcccgugggcagccugacccccgcccccgugccccagccccuggaccccgcccccgccgugacccccgaggccagccaccugcuggaggaccccgacgaggagaccagccaggccgugaaggcccugcgggagauggccgacaccgugaucccccagaaggaggaggccgccaucugcggccagauggaccugagccacccccccccccggggccaccuggacgagcugaccaccacccuggagagcaugaccgaggaccugaaccuggacagcccccugacccccgagcugaacgagauccuggacaccuuccugaacgacgagugccugcugcacgccaugcacaucagcaccggccugagcaucuucgacaccagccuguucagcggcggcaagcggcccgccgccaccaagaaggccggccaggccaagaagaagaagggcagcuaccccuacgacgugcccgacuacgccugagcggccgcuuaauuaagcugccuucugcggggcuugccuucuggccaugcccuucuucucucccuugcaccuguaccucuuggucuuugaauaaa

SEQ ID NO: 106 - DNA, 21 bp, Homo sapiens
accctgggcgcccaccccgaa

SEQ ID NO: 107 - protein, 209 aa, Artificial Sequence
  source: /note="Description of Artificial Sequence: Synthetic polypeptide"
LEPGEKPYKCPECGKSFSQSSNLVRHQRTHTGEKPYKCPECGKSFSSKKHLAEHQRTHTGEKPYKCPECGKSFSSKKALTEHQRTHTGEKPYKCPECGKSFSDCRDLARHQRTHTGEKPYKCPECGKSFSDPGHLVRHQRTHTGEKPYKCPECGKSFSRNDALTEHQRTHTGEKPYKCPECGKSFSDKKDLTRHQRTHTGEKPTGKKTS

SEQ ID NO: 108 - protein, 789 aa, Artificial Sequence
  source: /note="Description of Artificial Sequence: Synthetic polypeptide"
MAPKKKRKVGIHGVPAAGSSGSLEPGEKPYKCPECGKSFSRSDNLVRHQRTHTGEKPYKCPECGKSFSQLAHLRAHQRTHTGEKPYKCPECGKSFSDPGHLVRHQRTHTGEKPYKCPECGKSFSQSSNLVRHQRTHTGEKPYKCPECGKSFSRKDNLKNHQRTHTGEKPYKCPECGKSFSQAGHLASHQRTHTGEKPYKCPECGKSFSTSGSLVRHQRTHTGEKPTGKKTSASGSGGGSGGDALDDFDLDMLGSDALDDFDLDMLGSDALDDFDLDMLGSDALDDFDLDMLSGGPKKKRKVGSQYLPDTDDRHRIEEKRKRTYETFKSIMKKSPFSGPTDPRPPPRRIAVPSRSSASVPKPAPQPYPFTSSLSTINYDEFPTMVFPSGQISQASALAPAPPQVLPQAPAPAPAPAMVSALAQAPAPVPVLAPGPPQAVAPPAPKPTQAGEGTLSEALLQLQFDDEDLGALLGNSTDPAVFTDLASVDNSEFQQLLNQGIPVAPHTTEPMLMEYPEAITRLVTGAQRPPDPAPAPLGAPGLPNGLLSGDEDFSSIADMDFSALLGSGSGSRDSREGMFLPKPEAGSAISDVFEGREVCQPKRLRPFHPPGSPWANRPLPASLAPTPTGPVHEPVGSLTPAPVPQPLDPAPAVTPEASHLLEDPDEETSQAVKALREMADTVIPQKEEAAICGQMDLSHPPPRGHLDELTTTLESMTEDLNLDSPLTPELNEILDTFLNDECLLHAMHISTGLSIFDTSLFSGGKRPAATKKAGQAKKKKGSYPYDVPDYA

SEQ ID NO: 109 - RNA, 2611 nt, Artificial Sequence
  source: /note="Description of Artificial Sequence: Synthetic polynucleotide"
aggaaauaagagagaaaagaagaguaagaagaaauauaagagccaccauggcccccaagaagaagcggaaggugggcauccacggcgugcccgccgccggcagcagcggaucccucgaaccgggcgagaaaccauauaaguguccggaaugugguaaaaguuuuagccgcagcgauaaucucgugcgucaccagcguacgcauaccggugagaagccauacaaguguccggaguguggcaaaagcuucagucagcuggcgcaucugcgcgcgcaucagcgcacccacaccggugagaaaccguacaaguguccagaaugcggcaaaagcuuuagcgauccgggucaucuggugcgucaucaacguacgcacacgggcgaaaaaccguacaaauguccggagugcggcaagagcuucagccagagcagcaaucugguucgccaccagcguacgcacaccggugaaaagccauacaagugcccggagugcggcaagaguuucagucgcaaggacaaucugaagaaccaucaacgcacccauacgggcgagaagccguacaaauguccggaaugcgguaaaaguuuuagccaagccggucaucuggccagccaucagcguacccauacgggugagaaaccguauaaauguccagaaugugguaagaguuucagcaccagcgguagucugguucgucaucaacgcacgcauacgggugaaaaaccaaccggcaagaaaaccagcgcuagcggcagcggcggcggcagcggcggcgacgcccuggacgacuucgaccuggacaugcugggcagcgacgcccuggacgacuucgaccuggacaugcugggcagcgacgcccuggacgacuucgaccuggacaugcugggcagcgacgcccuggacgacuucgaccuggacaugcugagcggcggccccaagaagaagcggaaggugggcagccaguaccugcccgacaccgacgaccggcaccggaucgaggagaagcggaagcggaccuacgagaccuucaagagcaucaugaagaaaucccccuucagcggccccaccgacccccggccccccccccggcggaucgccgugcccagccggagcagcgccagcgugcccaagcccgccccccagcccuaccccuucaccagcagccugagcaccaucaacuacgacgaguuccccaccaugguguuccccagcggccagaucagccaggccagcgcccuggcccccgcccccccccaggugcugccccaggcccccgcccccgcccccgcccccgccauggugagcgcccuggcccaggcccccgcccccgugcccgugcuggcccccggccccccccaggccguggccccccccgcccccaagcccacccaggccggcgagggcacccugagcgaggcccugcugcagcugcaguucgacgacgaggaccugggcgcccugcugggcaacagcaccgaccccgccguguucaccgaccuggccagcguggacaacagcgaguuccagcagcugcugaaccagggcauccccguggccccccacaccaccgagcccaugcugauggaguaccccgaggccaucacccggcuggugaccggcgcccagcggccccccgaccccgcccccgccccccugggcgcccccggccugcccaacggccugcugagcggcgacgaggacuucagcagcaucgccgacauggacuucagcgcccugcugggcagcggcagcggcagccgggacagccgggagggcauguuccugcccaagcccgaggccggcagcgccaucagcgacguguucgagggccgggaggugugccagcccaagcggcuccggcccuuccacccccccggcagccccugggccaaccggccccugcccgccagccuggcccccacccccaccggccccgugcacgagcccgugggcagccugacccccgcccccgugccccagccccuggaccccgcccccgccgugacccccgaggccagccaccugcuggaggaccccgacgaggagaccagccaggccgugaaggcccugcgggagauggccgacaccgugaucccccagaaggaggaggccgccaucugcggccagauggaccugagccacccccccccccggggccaccuggacgagcugaccaccacccuggagagcaugaccgaggaccugaaccuggacagcccccugacccccgagcugaacgagauccuggacaccuuccugaacgacgagugccugcugcacgccaugcacaucagcaccggccugagcaucuucgacaccagccuguucagcggcggcaagcggcccgccgccaccaagaaggccggccaggccaagaagaagaagggcagcuaccccuacgacgugcccgacuacgccugagcggccgcuuaauuaagcugccuucugcggggcuugccuucuggccaugcccuucuucucucccuugcaccuguaccucuuggucuuugaauaaagccugaguaggaagucuagaaaaaaaaaaaaaaaaaaaaaaaaaaaaaaaaaaaaaaaaaaaaaaaaaaaaaaaaaaaaaaaaaaaaaaaaaaaaaaaa

SEQ ID NO: 110 - DNA, 21 bp, Homo sapiens
gtttgaaaggaaggcagagag

SEQ ID NO: 111 - protein, 209 aa, Artificial Sequence
  source: /note="Description of Artificial Sequence: Synthetic polypeptide"
LEPGEKPYKCPECGKSFSRSDNLVRHQRTHTGEKPYKCPECGKSFSQLAHLRAHQRTHTGEKPYKCPECGKSFSDPGHLVRHQRTHTGEKPYKCPECGKSFSQSSNLVRHQRTHTGEKPYKCPECGKSFSRKDNLKNHQRTHTGEKPYKCPECGKSFSQAGHLASHQRTHTGEKPYKCPECGKSFSTSGSLVRHQRTHTGEKPTGKKTS

SEQ ID NO: 112 - protein, 789 aa, Artificial Sequence
  source: /note="Description of Artificial Sequence: Synthetic polypeptide"
MAPKKKRKVGIHGVPAAGSSGSLEPGEKPYKCPECGKSFSQRAHLERHQRTHTGEKPYKCPECGKSFSQLAHLRAHQRTHTGEKPYKCPECGKSFSSKKHLAEHQRTHTGEKPYKCPECGKSFSTTGALTEHQRTHTGEKPYKCPECGKSFSTSGNLVRHQRTHTGEKPYKCPECGKSFSQSGDLRRHQRTHTGEKPYKCPECGKSFSTSHSLTEHQRTHTGEKPTGKKTSASGSGGGSGGDALDDFDLDMLGSDALDDFDLDMLGSDALDDFDLDMLGSDALDDFDLDMLSGGPKKKRKVGSQYLPDTDDRHRIEEKRKRTYETFKSIMKKSPFSGPTDPRPPPRRIAVPSRSSASVPKPAPQPYPFTSSLSTINYDEFPTMVFPSGQISQASALAPAPPQVLPQAPAPAPAPAMVSALAQAPAPVPVLAPGPPQAVAPPAPKPTQAGEGTLSEALLQLQFDDEDLGALLGNSTDPAVFTDLASVDNSEFQQLLNQGIPVAPHTTEPMLMEYPEAITRLVTGAQRPPDPAPAPLGAPGLPNGLLSGDEDFSSIADMDFSALLGSGSGSRDSREGMFLPKPEAGSAISDVFEGREVCQPKRLRPFHPPGSPWANRPLPASLAPTPTGPVHEPVGSLTPAPVPQPLDPAPAVTPEASHLLEDPDEETSQAVKALREMADTVIPQKEEAAICGQMDLSHPPPRGHLDELTTTLESMTEDLNLDSPLTPELNEILDTFLNDECLLHAMHISTGLSIFDTSLFSGGKRPAATKKAGQAKKKKGSYPYDVPDYA

SEQ ID NO: 113 - RNA, 2611 nt, Artificial Sequence
  source: /note="Description of Artificial Sequence: Synthetic polynucleotide"
aggaaauaagagagaaaagaagaguaagaagaaauauaagagccaccauggcccccaagaagaagcggaaggugggcauccacggcgugcccgccgccggcagcagcggaucccucgaaccgggcgaaaagccguauaagugcccggaaugcggcaagaguuuuagccagcgcgcccaucuggaacgucaccagcguacccauaccggugaaaagccauauaaaugcccagaaugugguaaaagcuuuagucagcuggcccaucugcgcgcccaccaacguacgcacacgggcgagaagccguacaaaugcccagaaugcgguaaaagcuucagcagcaaaaagcaucuggcggaacaucaacguacccacaccggcgagaaaccauacaagugcccggaaugcgguaaaagcuucagcaccaccggugcgcugacggagcaucagcgcacccacacgggcgaaaaaccguauaaguguccggaguguggcaaaaguuuuaguaccagcggcaaucuggugcgccaucaacguacgcauaccggcgagaagccauauaaauguccagaguguggcaagagcuuuagccaaagcggugaucugcgucgccaccaacgcacgcacaccggcgaaaaaccauacaaauguccggaaugcgguaagaguuucagcacgagccauagucugaccgaacaucaacguacccauacgggugagaaaccaaccggcaagaaaaccagcgcuagcggcagcggcggcggcagcggcggcgacgcccuggacgacuucgaccuggacaugcugggcagcgacgcccuggacgacuucgaccuggacaugcugggcagcgacgcccuggacgacuucgaccuggacaugcugggcagcgacgcccuggacgacuucgaccuggacaugcugagcggcggccccaagaagaagcggaaggugggcagccaguaccugcccgacaccgacgaccggcaccggaucgaggagaagcggaagcggaccuacgagaccuucaagagcaucaugaagaaaucccccuucagcggccccaccgacccccggccccccccccggcggaucgccgugcccagccggagcagcgccagcgugcccaagcccgccccccagcccuaccccuucaccagcagccugagcaccaucaacuacgacgaguuccccaccaugguguuccccagcggccagaucagccaggccagcgcccuggcccccgcccccccccaggugcugccccaggcccccgcccccgcccccgcccccgccauggugagcgcccuggcccaggcccccgcccccgugcccgugcuggcccccggccccccccaggccguggccccccccgcccccaagcccacccaggccggcgagggcacccugagcgaggcccugcugcagcugcaguucgacgacgaggaccugggcgcccugcugggcaacagcaccgaccccgccguguucaccgaccuggccagcguggacaacagcgaguuccagcagcugcugaaccagggcauccccguggccccccacaccaccgagcccaugcugauggaguaccccgaggccaucacccggcuggugaccggcgcccagcggccccccgaccccgcccccgccccccugggcgcccccggccugcccaacggccugcugagcggcgacgaggacuucagcagcaucgccgacauggacuucagcgcccugcugggcagcggcagcggcagccgggacagccgggagggcauguuccugcccaagcccgaggccggcagcgccaucagcgacguguucgagggccgggaggugugccagcccaagcggcuccggcccuuccacccccccggcagccccugggccaaccggccccugcccgccagccuggcccccacccccaccggccccgugcacgagcccgugggcagccugacccccgcccccgugccccagccccuggaccccgcccccgccgugacccccgaggccagccaccugcuggaggaccccgacgaggagaccagccaggccgugaaggcccugcgggagauggccgacaccgugaucccccagaaggaggaggccgccaucugcggccagauggaccugagccacccccccccccggggccaccuggacgagcugaccaccacccuggagagcaugaccgaggaccugaaccuggacagcccccugacccccgagcugaacgagauccuggacaccuuccugaacgacgagugccugcugcacgccaugcacaucagcaccggccugagcaucuucgacaccagccuguucagcggcggcaagcggcccgccgccaccaagaaggccggccaggccaagaagaagaagggcagcuaccccuacgacgugcccgacuacgccugagcggccgcuuaauuaagcugccuucugcggggcuugccuucuggccaugcccuucuucucucccuugcaccuguaccucuuggucuuugaauaaagccugaguaggaagucuagaaaaaaaaaaaaaaaaaaaaaaaaaaaaaaaaaaaaaaaaaaaaaaaaaaaaaaaaaaaaaaaaaaaaaaaaaaaaaaaa

SEQ ID NO: 114 - DNA, 21 bp, Homo sapiens
ccagcagatcttcccagagga

SEQ ID NO: 115 - protein, 209 aa, Artificial Sequence
  source: /note="Description of Artificial Sequence: Synthetic polypeptide"
LEPGEKPYKCPECGKSFSQRAHLERHQRTHTGEKPYKCPECGKSFSQLAHLRAHQRTHTGEKPYKCPECGKSFSSKKHLAEHQRTHTGEKPYKCPECGKSFSTTGALTEHQRTHTGEKPYKCPECGKSFSTSGNLVRHQRTHTGEKPYKCPECGKSFSQSGDLRRHQRTHTGEKPYKCPECGKSFSTSHSLTEHQRTHTGEKPTGKKTS

SEQ ID NO: 116 - protein, 789 aa, Artificial Sequence
  source: /note="Description of Artificial Sequence: Synthetic polypeptide"
MAPKKKRKVGIHGVPAAGSSGSLEPGEKPYKCPECGKSFSTSGNLTEHQRTHTGEKPYKCPECGKSFSDSGNLRVHQRTHTGEKPYKCPECGKSFSHKNALQNHQRTHTGEKPYKCPECGKSFSRNDTLTEHQRTHTGEKPYKCPECGKSFSQRAHLERHQRTHTGEKPYKCPECGKSFSRSDKLVRHQRTHTGEKPYKCPECGKSFSDPGHLVRHQRTHTGEKPTGKKTSASGSGGGSGGDALDDFDLDMLGSDALDDFDLDMLGSDALDDFDLDMLGSDALDDFDLDMLSGGPKKKRKVGSQYLPDTDDRHRIEEKRKRTYETFKSIMKKSPFSGPTDPRPPPRRIAVPSRSSASVPKPAPQPYPFTSSLSTINYDEFPTMVFPSGQISQASALAPAPPQVLPQAPAPAPAPAMVSALAQAPAPVPVLAPGPPQAVAPPAPKPTQAGEGTLSEALLQLQFDDEDLGALLGNSTDPAVFTDLASVDNSEFQQLLNQGIPVAPHTTEPMLMEYPEAITRLVTGAQRPPDPAPAPLGAPGLPNGLLSGDEDFSSIADMDFSALLGSGSGSRDSREGMFLPKPEAGSAISDVFEGREVCQPKRLRPFHPPGSPWANRPLPASLAPTPTGPVHEPVGSLTPAPVPQPLDPAPAVTPEASHLLEDPDEETSQAVKALREMADTVIPQKEEAAICGQMDLSHPPPRGHLDELTTTLESMTEDLNLDSPLTPELNEILDTFLNDECLLHAMHISTGLSIFDTSLFSGGKRPAATKKAGQAKKKKGSYPYDVPDYA

SEQ ID NO: 117 - RNA, 2611 nt, Artificial Sequence
  source: /note="Description of Artificial Sequence: Synthetic polynucleotide"
aggaaauaagagagaaaagaagaguaagaagaaauauaagagccaccauggcccccaagaagaagcggaaggugggcauccacggcgugcccgccgccggcagcagcggaucccucgaaccgggcgagaaaccauauaaguguccagagugugguaagagcuuuagcaccaguggcaaucugaccgagcaucaacgcacgcauacgggugagaaaccguacaagugcccggaaugcggcaaaaguuucagcgauagcggcaaucugcgugugcaccagcguacgcauacgggcgaaaagccguauaagugcccagaaugcgguaagaguuuuagccacaaaaacgcgcugcagaaccaccagcgcacccacacgggugagaagccauacaaauguccggaaugcggcaaaagcuucagccgcaacgauacgcugacggaacaccaacguacgcauaccggcgaaaagccauacaagugcccggagugcgguaaaagcuuuagccagcgcgcgcaucucgaacgucaucaacguacccauaccggugaaaaaccauauaaaugcccggaaugugguaaaaguuuuagccgcagcgacaaacuggugcgucaucaacgcacccauaccggugaaaagccauauaagugcccggagugugguaaaagcuucagcgauccgggucaucugguucgccaucaacguacgcacaccggcgagaagccaaccggcaagaaaaccagcgcuagcggcagcggcggcggcagcggcggcgacgcccuggacgacuucgaccuggacaugcugggcagcgacgcccuggacgacuucgaccuggacaugcugggcagcgacgcccuggacgacuucgaccuggacaugcugggcagcgacgcccuggacgacuucgaccuggacaugcugagcggcggccccaagaagaagcggaaggugggcagccaguaccugcccgacaccgacgaccggcaccggaucgaggagaagcggaagcggaccuacgagaccuucaagagcaucaugaagaaaucccccuucagcggccccaccgacccccggccccccccccggcggaucgccgugcccagccggagcagcgccagcgugcccaagcccgccccccagcccuaccccuucaccagcagccugagcaccaucaacuacgacgaguuccccaccaugguguuccccagcggccagaucagccaggccagcgcccuggcccccgcccccccccaggugcugccccaggcccccgcccccgcccccgcccccgccauggugagcgcccuggcccaggcccccgcccccgugcccgugcuggcccccggccccccccaggccguggccccccccgcccccaagcccacccaggccggcgagggcacccugagcgaggcccugcugcagcugcaguucgacgacgaggaccugggcgcccugcugggcaacagcaccgaccccgccguguucaccgaccuggccagcguggacaacagcgaguuccagcagcugcugaaccagggcauccccguggccccccacaccaccgagcccaugcugauggaguaccccgaggccaucacccggcuggugaccggcgcccagcggccccccgaccccgcccccgccccccugggcgcccccggccugcccaacggccugcugagcggcgacgaggacuucagcagcaucgccgacauggacuucagcgcccugcugggcagcggcagcggcagccgggacagccgggagggcauguuccugcccaagcccgaggccggcagcgccaucagcgacguguucgagggccgggaggugugccagcccaagcggcuccggcccuuccacccccccggcagccccugggccaaccggccccugcccgccagccuggcccccacccccaccggccccgugcacgagcccgugggcagccugacccccgcccccgugccccagccccuggaccccgcccccgccgugacccccgaggccagccaccugcuggaggaccccgacgaggagaccagccaggccgugaaggcccugcgggagauggccgacaccgugaucccccagaaggaggaggccgccaucugcggccagauggaccugagccacccccccccccggggccaccuggacgagcugaccaccacccuggagagcaugaccgaggaccugaaccuggacagcccccugacccccgagcugaacgagauccuggacaccuuccugaacgacgagugccugcugcacgccaugcacaucagcaccggccugagcaucuucgacaccagccuguucagcggcggcaagcggcccgccgccaccaagaaggccggccaggccaagaagaagaagggcagcuaccccuacgacgugcccgacuacgccugagcggccgcuuaauuaagcugccuucugcggggcuugccuucuggccaugcccuucuucucucccuugcaccuguaccucuuggucuuugaauaaagccugaguaggaagucuagaaaaaaaaaaaaaaaaaaaaaaaaaaaaaaaaaaaaaaaaaaaaaaaaaaaaaaaaaaaaaaaaaaaaaaaaaaaaaaaa

SEQ ID NO: 118 - DNA, 21 bp, Homo sapiens
ggcgggggaccgattaaccat

SEQ ID NO: 119 - protein, 209 aa, Artificial Sequence
  source: /note="Description of Artificial Sequence: Synthetic polypeptide"
LEPGEKPYKCPECGKSFSTSGNLTEHQRTHTGEKPYKCPECGKSFSDSGNLRVHQRTHTGEKPYKCPECGKSFSHKNALQNHQRTHTGEKPYKCPECGKSFSRNDTLTEHQRTHTGEKPYKCPECGKSFSQRAHLERHQRTHTGEKPYKCPECGKSFSRSDKLVRHQRTHTGEKPYKCPECGKSFSDPGHLVRHQRTHTGEKPTGKKTS

SEQ ID NO: 120 - protein, 789 aa, Artificial Sequence
  source: /note="Description of Artificial Sequence: Synthetic polypeptide"
MAPKKKRKVGIHGVPAAGSSGSLEPGEKPYKCPECGKSFSTSHSLTEHQRTHTGEKPYKCPECGKSFSQRANLRAHQRTHTGEKPYKCPECGKSFSRADNLTEHQRTHTGEKPYKCPECGKSFSERSHLREHQRTHTGEKPYKCPECGKSFSDPGALVRHQRTHTGEKPYKCPECGKSFSTSGHLVRHQRTHTGEKPYKCPECGKSFSRNDTLTEHQRTHTGEKPTGKKTSASGSGGGSGGDALDDFDLDMLGSDALDDFDLDMLGSDALDDFDLDMLGSDALDDFDLDMLSGGPKKKRKVGSQYLPDTDDRHRIEEKRKRTYETFKSIMKKSPFSGPTDPRPPPRRIAVPSRSSASVPKPAPQPYPFTSSLSTINYDEFPTMVFPSGQISQASALAPAPPQVLPQAPAPAPAPAMVSALAQAPAPVPVLAPGPPQAVAPPAPKPTQAGEGTLSEALLQLQFDDEDLGALLGNSTDPAVFTDLASVDNSEFQQLLNQGIPVAPHTTEPMLMEYPEAITRLVTGAQRPPDPAPAPLGAPGLPNGLLSGDEDFSSIADMDFSALLGSGSGSRDSREGMFLPKPEAGSAISDVFEGREVCQPKRLRPFHPPGSPWANRPLPASLAPTPTGPVHEPVGSLTPAPVPQPLDPAPAVTPEASHLLEDPDEETSQAVKALREMADTVIPQKEEAAICGQMDLSHPPPRGHLDELTTTLESMTEDLNLDSPLTPELNEILDTFLNDECLLHAMHISTGLSIFDTSLFSGGKRPAATKKAGQAKKKKGSYPYDVPDYA

SEQ ID NO: 121 - RNA, 2611 nt, Artificial Sequence
  source: /note="Description of Artificial Sequence: Synthetic polynucleotide"
aggaaauaagagagaaaagaagaguaagaagaaauauaagagccaccauggcccccaagaagaagcggaaggugggcauccacggcgugcccgccgccggcagcagcggaucccucgaaccgggcgaaaaaccguauaaguguccggagugcggcaagagcuucagcacgagccauagucugaccgaacaccagcgcacccacacgggcgaaaagccguacaaauguccagagugugguaagaguuucagccagcgugccaaucugcgcgcccaccaacguacccacaccggugagaagccguauaagugcccagagugugguaaaagcuucagccgcgccgauaaucugacggagcaccaacgcacccacaccggcgaaaagccauacaagugcccggaguguggcaagagcuuuagcgaacgcagccaucugcgcgaacaccaacguacgcacacgggugagaaaccauacaaauguccagaaugugguaaaaguuuuagcgauccgggcgcgcugguucgccaccagcgcacgcacaccggugaaaagccguauaaauguccagaaugcggcaaaagcuucaguaccagcggucaucugguucgucaucagcguacccauaccggcgagaagccauauaagugcccggaguguggcaaaaguuucagccgcaaugauacgcugaccgagcaucagcguacgcauaccggugaaaaaccaaccggcaagaaaaccagcgcuagcggcagcggcggcggcagcggcggcgacgcccuggacgacuucgaccuggacaugcugggcagcgacgcccuggacgacuucgaccuggacaugcugggcagcgacgcccuggacgacuucgaccuggacaugcugggcagcgacgcccuggacgacuucgaccuggacaugcugagcggcggccccaagaagaagcggaaggugggcagccaguaccugcccgacaccgacgaccggcaccggaucgaggagaagcggaagcggaccuacgagaccuucaagagcaucaugaagaaaucccccuucagcggccccaccgacccccggccccccccccggcggaucgccgugcccagccggagcagcgccagcgugcccaagcccgccccccagcccuaccccuucaccagcagccugagcaccaucaacuacgacgaguuccccaccaugguguuccccagcggccagaucagccaggccagcgcccuggcccccgcccccccccaggugcugccccaggcccccgcccccgcccccgcccccgccauggugagcgcccuggcccaggcccccgcccccgugcccgugcuggcccccggccccccccaggccguggccccccccgcccccaagcccacccaggccggcgagggcacccugagcgaggcccugcugcagcugcaguucgacgacgaggaccugggcgcccugcugggcaacagcaccgaccccgccguguucaccgaccuggccagcguggacaacagcgaguuccagcagcugcugaaccagggcauccccguggccccccacaccaccgagcccaugcugauggaguaccccgaggccaucacccggcuggugaccggcgcccagcggccccccgaccccgcccccgccccccugggcgcccccggccugcccaacggccugcugagcggcgacgaggacuucagcagcaucgccgacauggacuucagcgcccugcugggcagcggcagcggcagccgggacagccgggagggcauguuccugcccaagcccgaggccggcagcgccaucagcgacguguucgagggccgggaggugugccagcccaagcggcuccggcccuuccacccccccggcagccccugggccaaccggccccugcccgccagccuggcccccacccccaccggccccgugcacgagcccgugggcagccugacccccgcccccgugccccagccccuggaccccgcccccgccgugacccccgaggccagccaccugcuggaggaccccgacgaggagaccagccaggccgugaaggcccugcgggagauggccgacaccgugaucccccagaaggaggaggccgccaucugcggccagauggaccugagccacccccccccccggggccaccuggacgagcugaccaccacccuggagagcaugaccgaggaccugaaccuggacagcccccugacccccgagcugaacgagauccuggacaccuuccugaacgacgagugccugcugcacgccaugcacaucagcaccggccugagcaucuucgacaccagccuguucagcggcggcaagcggcccgccgccaccaagaaggccggccaggccaagaagaagaagggcagcuaccccuacgacgugcccgacuacgccugagcggccgcuuaauuaagcugccuucugcggggcuugccuucuggccaugcccuucuucucucccuugcaccuguaccucuuggucuuugaauaaagccugaguaggaagucuagaaaaaaaaaaaaaaaaaaaaaaaaaaaaaaaaaaaaaaaaaaaaaaaaaaaaaaaaaaaaaaaaaaaaaaaaaaaaaaaa

SEQ ID NO: 122 - DNA, 21 bp, Homo sapiens
ccgggtgtcagccagaaacca

SEQ ID NO: 123 - protein, 209 aa, Artificial Sequence
  source: /note="Description of Artificial Sequence: Synthetic polypeptide"
LEPGEKPYKCPECGKSFSTSHSLTEHQRTHTGEKPYKCPECGKSFSQRANLRAHQRTHTGEKPYKCPECGKSFSRADNLTEHQRTHTGEKPYKCPECGKSFSERSHLREHQRTHTGEKPYKCPECGKSFSDPGALVRHQRTHTGEKPYKCPECGKSFSTSGHLVRHQRTHTGEKPYKCPECGKSFSRNDTLTEHQRTHTGEKPTGKKTS

SEQ ID NO: 124 - protein, 789 aa, Artificial Sequence
  source: /note="Description of Artificial Sequence: Synthetic polypeptide"
MAPKKKRKVGIHGVPAAGSSGSLEPGEKPYKCPECGKSFSRSDHLTNHQRTHTGEKPYKCPECGKSFSTSGSLVRHQRTHTGEKPYKCPECGKSFSQAGHLASHQRTHTGEKPYKCPECGKSFSRSDKLTEHQRTHTGEKPYKCPECGKSFSTSGNLTEHQRTHTGEKPYKCPECGKSFSQSSNLVRHQRTHTGEKPYKCPECGKSFSTHLDLIRHQRTHTGEKPTGKKTSASGSGGGSGGDALDDFDLDMLGSDALDDFDLDMLGSDALDDFDLDMLGSDALDDFDLDMLSGGPKKKRKVGSQYLPDTDDRHRIEEKRKRTYETFKSIMKKSPFSGPTDPRPPPRRIAVPSRSSASVPKPAPQPYPFTSSLSTINYDEFPTMVFPSGQISQASALAPAPPQVLPQAPAPAPAPAMVSALAQAPAPVPVLAPGPPQAVAPPAPKPTQAGEGTLSEALLQLQFDDEDLGALLGNSTDPAVFTDLASVDNSEFQQLLNQGIPVAPHTTEPMLMEYPEAITRLVTGAQRPPDPAPAPLGAPGLPNGLLSGDEDFSSIADMDFSALLGSGSGSRDSREGMFLPKPEAGSAISDVFEGREVCQPKRLRPFHPPGSPWANRPLPASLAPTPTGPVHEPVGSLTPAPVPQPLDPAPAVTPEASHLLEDPDEETSQAVKALREMADTVIPQKEEAAICGQMDLSHPPPRGHLDELTTTLESMTEDLNLDSPLTPELNEILDTFLNDECLLHAMHISTGLSIFDTSLFSGGKRPAATKKAGQAKKKKGSYPYDVPDYA

SEQ ID NO: 125 - RNA, 2611 nt, Artificial Sequence
  source: /note="Description of Artificial Sequence: Synthetic polynucleotide"
aggaaauaagagagaaaagaagaguaagaagaaauauaagagccaccauggcccccaagaagaagcggaaggugggcauccacggcgugcccgccgccggcagcagcggaucccuggaaccgggcgagaagccauacaagugcccagagugcggcaaaagcuucagccgcagcgaccaucugaccaaucaccaacgcacccauaccggugagaagccguacaaaugcccagagugcgguaagagcuuuaguaccaguggcagucugguucgucaucagcgcacgcacacgggcgaaaaaccauacaaaugcccggagugcggcaaaagcuuuagccaagccggucaucuggcgagccaucaacguacgcacaccggcgagaagccguauaaauguccggagugcgguaagagcuuuagccguagcgauaaacugaccgaacaccaacguacgcauacgggcgagaaaccauauaaauguccagaguguggcaagaguuucagcaccagcggcaaucugaccgagcaucaacguacccauaccggugaaaagccauauaaauguccagaaugcgguaagaguuuuagucagagcaguaaucuggugcgccaucagcguacccacacgggugagaaaccauauaaguguccggaaugcggcaagaguuuuagcacccaucuggaucugauccgucaucagcgcacccacaccggugaaaaaccaaccggcaagaaaaccagugcuagcggcagcggcggcggcagcggcggcgacgcccuggacgacuucgaccuggacaugcugggcagcgacgcccuggacgacuucgaccuggacaugcugggcagcgacgcccuggacgacuucgaccuggacaugcugggcagcgacgcccuggacgacuucgaccuggacaugcugagcggcggccccaagaagaagcggaaggugggcagccaguaccugcccgacaccgacgaccggcaccggaucgaggagaagcggaagcggaccuacgagaccuucaagagcaucaugaagaaaucccccuucagcggccccaccgacccccggccccccccccggcggaucgccgugcccagccggagcagcgccagcgugcccaagcccgccccccagcccuaccccuucaccagcagccugagcaccaucaacuacgacgaguuccccaccaugguguuccccagcggccagaucagccaggccagcgcccuggcccccgcccccccccaggugcugccccaggcccccgcccccgcccccgcccccgccauggugagcgcccuggcccaggcccccgcccccgugcccgugcuggcccccggccccccccaggccguggccccccccgcccccaagcccacccaggccggcgagggcacccugagcgaggcccugcugcagcugcaguucgacgacgaggaccugggcgcccugcugggcaacagcaccgaccccgccguguucaccgaccuggccagcguggacaacagcgaguuccagcagcugcugaaccagggcauccccguggccccccacaccaccgagcccaugcugauggaguaccccgaggccaucacccggcuggugaccggcgcccagcggccccccgaccccgcccccgccccccugggcgcccccggccugcccaacggccugcugagcggcgacgaggacuucagcagcaucgccgacauggacuucagcgcccugcugggcagcggcagcggcagccgggacagccgggagggcauguuccugcccaagcccgaggccggcagcgccaucagcgacguguucgagggccgggaggugugccagcccaagcggcuccggcccuuccacccccccggcagccccugggccaaccggccccugcccgccagccuggcccccacccccaccggccccgugcacgagcccgugggcagccugacccccgcccccgugccccagccccuggaccccgcccccgccgugacccccgaggccagccaccugcuggaggaccccgacgaggagaccagccaggccgugaaggcccugcgggagauggccgacaccgugaucccccagaaggaggaggccgccaucugcggccagauggaccugagccacccccccccccggggccaccuggacgagcugaccaccacccuggagagcaugaccgaggaccugaaccuggacagcccccugacccccgagcugaacgagauccuggacaccuuccugaacgacgagugccugcugcacgccaugcacaucagcaccggccugagcaucuucgacaccagccuguucagcggcggcaagcggcccgccgccaccaagaaggccggccaggccaagaagaagaagggcagcuaccccuacgacgugcccgacuacgccugagcggccgcuuaauuaagcugccuucugcggggcuugccuucuggccaugcccuucuucucucccuugcaccuguaccucuuggucuuugaauaaagccugaguaggaagucuagaaaaaaaaaaaaaaaaaaaaaaaaaaaaaaaaaaaaaaaaaaaaaaaaaaaaaaaaaaaaaaaaaaaaaaaaaaaaaaaa

SEQ ID NO: 126 - DNA, 21 bp, Homo sapiens
actgaacatcggtgagttagg

SEQ ID NO: 127 - protein, 209 aa, Artificial Sequence
  source: /note="Description of Artificial Sequence: Synthetic polypeptide"
LEPGEKPYKCPECGKSFSRSDHLTNHQRTHTGEKPYKCPECGKSFSTSGSLVRHQRTHTGEKPYKCPECGKSFSQAGHLASHQRTHTGEKPYKCPECGKSFSRSDKLTEHQRTHTGEKPYKCPECGKSFSTSGNLTEHQRTHTGEKPYKCPECGKSFSQSSNLVRHQRTHTGEKPYKCPECGKSFSTHLDLIRHQRTHTGEKPTGKKTS

SEQ ID NO: 128 - protein, 789 aa, Artificial Sequence
  source: /note="Description of Artificial Sequence: Synthetic polypeptide"
MAPKKKRKVGIHGVPAAGSSGSLEPGEKPYKCPECGKSFSRSDHLTTHQRTHTGEKPYKCPECGKSFSTSGELVRHQRTHTGEKPYKCPECGKSFSRRDELNVHQRTHTGEKPYKCPECGKSFSSPADLTRHQRTHTGEKPYKCPECGKSFSRSDELVRHQRTHTGEKPYKCPECGKSFSRSDKLVRHQRTHTGEKPYKCPECGKSFSTTGALTEHQRTHTGEKPTGKKTSASGSGGGSGGDALDDFDLDMLGSDALDDFDLDMLGSDALDDFDLDMLGSDALDDFDLDMLSGGPKKKRKVGSQYLPDTDDRHRIEEKRKRTYETFKSIMKKSPFSGPTDPRPPPRRIAVPSRSSASVPKPAPQPYPFTSSLSTINYDEFPTMVFPSGQISQASALAPAPPQVLPQAPAPAPAPAMVSALAQAPAPVPVLAPGPPQAVAPPAPKPTQAGEGTLSEALLQLQFDDEDLGALLGNSTDPAVFTDLASVDNSEFQQLLNQGIPVAPHTTEPMLMEYPEAITRLVTGAQRPPDPAPAPLGAPGLPNGLLSGDEDFSSIADMDFSALLGSGSGSRDSREGMFLPKPEAGSAISDVFEGREVCQPKRLRPFHPPGSPWANRPLPASLAPTPTGPVHEPVGSLTPAPVPQPLDPAPAVTPEASHLLEDPDEETSQAVKALREMADTVIPQKEEAAICGQMDLSHPPPRGHLDELTTTLESMTEDLNLDSPLTPELNEILDTFLNDECLLHAMHISTGLSIFDTSLFSGGKRPAATKKAGQAKKKKGSYPYDVPDYA

SEQ ID NO: 129 - RNA, 2611 nt, Artificial Sequence
  source: /note="Description of Artificial Sequence: Synthetic polynucleotide"
aggaaauaagagagaaaagaagaguaagaagaaauauaagagccaccauggcccccaagaagaagcggaaggugggcauccacggcgugcccgccgccggcagcagcggaucccuggaaccgggcgaaaagccguacaagugcccggaauguggcaaaaguuuuagucgcagcgaucaucugaccacccaucagcguacccauaccggugagaagccauacaaaugcccagaaugugguaagagcuuuagcaccagcggcgagcugguucgucaccagcguacccacaccggcgagaagccguauaaguguccagaaugcgguaaaagcuuuagccgccgcgacgagcugaaugugcaucaacgcacccacacgggcgagaagccauauaagugcccggagugugguaagaguuucaguagcccagcggaucugacccgucaucaacguacgcacacgggcgagaaaccauacaaguguccggagugcggcaaaaguuuuagccgcagugaugaacuggugcgccaccagcgcacccauaccggcgaaaaaccguauaagugcccagagugcgguaagagcuucagccgcagcgacaaacuggugcgucaccagcgcacgcauacgggugagaaaccguacaagugcccggagugcggcaaaagcuucagcaccaccggcgcgcugaccgaacaucaacguacccauacgggugagaaaccaacgggcaaaaagaccagcgcuagcggcagcggcggcggcagcggcggcgacgcccuggacgacuucgaccuggacaugcugggcagcgacgcccuggacgacuucgaccuggacaugcugggcagcgacgcccuggacgacuucgaccuggacaugcugggcagcgacgcccuggacgacuucgaccuggacaugcugagcggcggccccaagaagaagcggaaggugggcagccaguaccugcccgacaccgacgaccggcaccggaucgaggagaagcggaagcggaccuacgagaccuucaagagcaucaugaagaaaucccccuucagcggccccaccgacccccggccccccccccggcggaucgccgugcccagccggagcagcgccagcgugcccaagcccgccccccagcccuaccccuucaccagcagccugagcaccaucaacuacgacgaguuccccaccaugguguuccccagcggccagaucagccaggccagcgcccuggcccccgcccccccccaggugcugccccaggcccccgcccccgcccccgcccccgccauggugagcgcccuggcccaggcccccgcccccgugcccgugcuggcccccggccccccccaggccguggccccccccgcccccaagcccacccaggccggcgagggcacccugagcgaggcccugcugcagcugcaguucgacgacgaggaccugggcgcccugcugggcaacagcaccgaccccgccguguucaccgaccuggccagcguggacaacagcgaguuccagcagcugcugaaccagggcauccccguggccccccacaccaccgagcccaugcugauggaguaccccgaggccaucacccggcuggugaccggcgcccagcggccccccgaccccgcccccgccccccugggcgcccccggccugcccaacggccugcugagcggcgacgaggacuucagcagcaucgccgacauggacuucagcgcccugcugggcagcggcagcggcagccgggacagccgggagggcauguuccugcccaagcccgaggccggcagcgccaucagcgacguguucgagggccgggaggugugccagcccaagcggcuccggcccuuccacccccccggcagccccugggccaaccggccccugcccgccagccuggcccccacccccaccggccccgugcacgagcccgugggcagccugacccccgcccccgugccccagccccuggaccccgcccccgccgugacccccgaggccagccaccugcuggaggaccccgacgaggagaccagccaggccgugaaggcccugcgggagauggccgacaccgugaucccccagaaggaggaggccgccaucugcggccagauggaccugagccacccccccccccggggccaccuggacgagcugaccaccacccuggagagcaugaccgaggaccugaaccuggacagcccccugacccccgagcugaacgagauccuggacaccuuccugaacgacgagugccugcugcacgccaugcacaucagcaccggccugagcaucuucgacaccagccuguucagcggcggcaagcggcccgccgccaccaagaaggccggccaggccaagaagaagaagggcagcuaccccuacgacgugcccgacuacgccugagcggccgcuuaauuaagcugccuucugcggggcuugccuucuggccaugcccuucuucucucccuugcaccuguaccucuuggucuuugaauaaagccugaguaggaagucuagaaaaaaaaaaaaaaaaaaaaaaaaaaaaaaaaaaaaaaaaaaaaaaaaaaaaaaaaaaaaaaaaaaaaaaaaaaaaaaaa

SEQ ID NO: 130 - DNA, 21 bp, Homo sapiens
cttggggtgacaatggcttgg

SEQ ID NO: 131 - protein, 209 aa, Artificial Sequence
  source: /note="Description of Artificial Sequence: Synthetic polypeptide"
LEPGEKPYKCPECGKSFSRSDHLTTHQRTHTGEKPYKCPECGKSFSTSGELVRHQRTHTGEKPYKCPECGKSFSRRDELNVHQRTHTGEKPYKCPECGKSFSSPADLTRHQRTHTGEKPYKCPECGKSFSRSDELVRHQRTHTGEKPYKCPECGKSFSRSDKLVRHQRTHTGEKPYKCPECGKSFSTTGALTEHQRTHTGEKPTGKKTS

SEQ ID NO: 132 - protein, 800 aa, Artificial Sequence
  source: /note="Description of Artificial Sequence: Synthetic polypeptide"
MAPKKKRKVGIHGVPAAGSSGSLEPGEKPYKCPECGKSFSQSGNLTEHQRTHTGEKPYKCPECGKSFSHKNALQNHQRTHTGEKPYKCPECGKSFSQNSTLTEHQRTHTGEKPYKCPECGKSFSSKKHLAEHQRTHTGEKPYKCPECGKSFSTSGNLVRHQRTHTGEKPYKCPECGKSFSQSGHLTEHQRTHTPNPHRRTDPSHKPFQYKCPECGKSFSDKKDLTRHQRTHTGEKPTGKKTSASGSGGGSGGDALDDFDLDMLGSDALDDFDLDMLGSDALDDFDLDMLGSDALDDFDLDMLSGGPKKKRKVGSQYLPDTDDRHRIEEKRKRTYETFKSIMKKSPFSGPTDPRPPPRRIAVPSRSSASVPKPAPQPYPFTSSLSTINYDEFPTMVFPSGQISQASALAPAPPQVLPQAPAPAPAPAMVSALAQAPAPVPVLAPGPPQAVAPPAPKPTQAGEGTLSEALLQLQFDDEDLGALLGNSTDPAVFTDLASVDNSEFQQLLNQGIPVAPHTTEPMLMEYPEAITRLVTGAQRPPDPAPAPLGAPGLPNGLLSGDEDFSSIADMDFSALLGSGSGSRDSREGMFLPKPEAGSAISDVFEGREVCQPKRLRPFHPPGSPWANRPLPASLAPTPTGPVHEPVGSLTPAPVPQPLDPAPAVTPEASHLLEDPDEETSQAVKALREMADTVIPQKEEAAICGQMDLSHPPPRGHLDELTTTLESMTEDLNLDSPLTPELNEILDTFLNDECLLHAMHISTGLSIFDTSLFSGGKRPAATKKAGQAKKKKGSYPYDVPDYA

SEQ ID NO: 133 - RNA, 2644 nt, Artificial Sequence
  source: /note="Description of Artificial Sequence: Synthetic polynucleotide"
aggaaauaagagagaaaagaagaguaagaagaaauauaagagccaccauggcccccaagaagaagcggaaggugggcauccacggcgugcccgccgccggcagcagcggaucccucgaaccgggcgaaaagccauacaaauguccggaguguggcaagaguuucagccaaagcggcaaccucaccgagcaccagcgcacgcacaccggcgagaagccauauaaauguccagaaugcggcaagagcuucagccauaagaaugcgcugcagaaccaucagcgcacccacaccggugagaagccauacaagugcccagagugcggcaaaaguuucagccagaauagcacccucacggagcaucaacgcacgcauacgggugaaaagccguacaaaugcccagaauguggcaagagcuuuagcagcaagaaacaucuggcggagcaucagcguacccacacgggcgaaaagccauacaaauguccggaaugcggcaaaagcuucagcacgaguggcaaucuggugcgccaucaacguacgcacacgggugagaaaccguauaaaugcccagagugugguaaaagcuucagucagagcggccaucugaccgaacaccagcgcacccauacgccaaacccgcaucgccgcaccgauccgagccacaagccguuccaguacaaguguccagagugcgguaaaaguuuuagcgacaagaaggaucugacccgucaccaacguacccauaccggugaaaaaccaacgggcaagaaaaccagcgcuagcggcagcggcggcggcagcggcggcgacgcccuggacgacuucgaccuggacaugcugggcagcgacgcccuggacgacuucgaccuggacaugcugggcagcgacgcccuggacgacuucgaccuggacaugcugggcagcgacgcccuggacgacuucgaccuggacaugcugagcggcggccccaagaagaagcggaaggugggcagccaguaccugcccgacaccgacgaccggcaccggaucgaggagaagcggaagcggaccuacgagaccuucaagagcaucaugaagaaaucccccuucagcggccccaccgacccccggccccccccccggcggaucgccgugcccagccggagcagcgccagcgugcccaagcccgccccccagcccuaccccuucaccagcagccugagcaccaucaacuacgacgaguuccccaccaugguguuccccagcggccagaucagccaggccagcgcccuggcccccgcccccccccaggugcugccccaggcccccgcccccgcccccgcccccgccauggugagcgcccuggcccaggcccccgcccccgugcccgugcuggcccccggccccccccaggccguggccccccccgcccccaagcccacccaggccggcgagggcacccugagcgaggcccugcugcagcugcaguucgacgacgaggaccugggcgcccugcugggcaacagcaccgaccccgccguguucaccgaccuggccagcguggacaacagcgaguuccagcagcugcugaaccagggcauccccguggccccccacaccaccgagcccaugcugauggaguaccccgaggccaucacccggcuggugaccggcgcccagcggccccccgaccccgcccccgccccccugggcgcccccggccugcccaacggccugcugagcggcgacgaggacuucagcagcaucgccgacauggacuucagcgcccugcugggcagcggcagcggcagccgggacagccgggagggcauguuccugcccaagcccgaggccggcagcgccaucagcgacguguucgagggccgggaggugugccagcccaagcggcuccggcccuuccacccccccggcagccccugggccaaccggccccugcccgccagccuggcccccacccccaccggccccgugcacgagcccgugggcagccugacccccgcccccgugccccagccccuggaccccgcccccgccgugacccccgaggccagccaccugcuggaggaccccgacgaggagaccagccaggccgugaaggcccugcgggagauggccgacaccgugaucccccagaaggaggaggccgccaucugcggccagauggaccugagccacccccccccccggggccaccuggacgagcugaccaccacccuggagagcaugaccgaggaccugaaccuggacagcccccugacccccgagcugaacgagauccuggacaccuuccugaacgacgagugccugcugcacgccaugcacaucagcaccggccugagcaucuucgacaccagccuguucagcggcggcaagcggcccgccgccaccaagaaggccggccaggccaagaagaagaagggcagcuaccccuacgacgugcccgacuacgccugagcggccgcuuaauuaagcugccuucugcggggcuugccuucuggccaugcccuucuucucucccuugcaccuguaccucuuggucuuugaauaaagccugaguaggaagucuagaaaaaaaaaaaaaaaaaaaaaaaaaaaaaaaaaaaaaaaaaaaaaaaaaaaaaaaaaaaaaaaaaaaaaaaaaaaaaaaa

SEQ ID NO: 134 - DNA, 23 bp, Homo sapiens
acctccgagatcccctaattcaa

SEQ ID NO: 135 - protein, 220 aa, Artificial Sequence
  source: /note="Description of Artificial Sequence: Synthetic polypeptide"
LEPGEKPYKCPECGKSFSQSGNLTEHQRTHTGEKPYKCPECGKSFSHKNALQNHQRTHTGEKPYKCPECGKSFSQNSTLTEHQRTHTGEKPYKCPECGKSFSSKKHLAEHQRTHTGEKPYKCPECGKSFSTSGNLVRHQRTHTGEKPYKCPECGKSFSQSGHLTEHQRTHTPNPHRRTDPSHKPFQYKCPECGKSFSDKKDLTRHQRTHTGEKPTGKKTS

SEQ ID NO: 136 - protein, 789 aa, Artificial Sequence
  source: /note="Description of Artificial Sequence: Synthetic polypeptide"
MAPKKKRKVGIHGVPAAGSSGSLEPGEKPYKCPECGKSFSQNSTLTEHQRTHTGEKPYKCPECGKSFSERSHLREHQRTHTGEKPYKCPECGKSFSSKKHLAEHQRTHTGEKPYKCPECGKSFSRNDTLTEHQRTHTGEKPYKCPECGKSFSDCRDLARHQRTHTGEKPYKCPECGKSFSQSGDLRRHQRTHTGEKPYKCPECGKSFSTKNSLTEHQRTHTGEKPTGKKTSASGSGGGSGGDALDDFDLDMLGSDALDDFDLDMLGSDALDDFDLDMLGSDALDDFDLDMLSGGPKKKRKVGSQYLPDTDDRHRIEEKRKRTYETFKSIMKKSPFSGPTDPRPPPRRIAVPSRSSASVPKPAPQPYPFTSSLSTINYDEFPTMVFPSGQISQASALAPAPPQVLPQAPAPAPAPAMVSALAQAPAPVPVLAPGPPQAVAPPAPKPTQAGEGTLSEALLQLQFDDEDLGALLGNSTDPAVFTDLASVDNSEFQQLLNQGIPVAPHTTEPMLMEYPEAITRLVTGAQRPPDPAPAPLGAPGLPNGLLSGDEDFSSIADMDFSALLGSGSGSRDSREGMFLPKPEAGSAISDVFEGREVCQPKRLRPFHPPGSPWANRPLPASLAPTPTGPVHEPVGSLTPAPVPQPLDPAPAVTPEASHLLEDPDEETSQAVKALREMADTVIPQKEEAAICGQMDLSHPPPRGHLDELTTTLESMTEDLNLDSPLTPELNEILDTFLNDECLLHAMHISTGLSIFDTSLFSGGKRPAATKKAGQAKKKKGSYPYDVPDYA

SEQ ID NO: 137 - RNA, 2611 nt, Artificial Sequence
  source: /note="Description of Artificial Sequence: Synthetic polynucleotide"
aggaaauaagagagaaaagaagaguaagaagaaauauaagagccaccauggcccccaagaagaagcggaaggugggcauccacggcgugcccgccgccggcagcagcggaucccuggagcccggcgagaagcccuacaaaugucccgaguguggcaaguccuucucccagaauagcacacugacagaacaccagaggacacacaccggcgagaaaccuuauaagugccccgaaugcggcaaaagcuuuuccgagaggagccaccugagggaacaccagagaacacacaccggagaaaaaccuuacaaaugccccgagugcggaaaguccuucagcagcaagaagcaccuggcugaacaccagagaacccacaccggcgagaagccuuacaagugccccgaauguggcaaaagcuucucuagaaacgacacacucaccgagcaccagagaacccacaccggcgaaaagccuuauaagugucccgaguguggcaagagcuucagcgauuguagagaucuggccagacaccaaaggacccacaccggagaaaaaccuuacaagugccccgaguguggaaagagcuuuagccaaagcggcgaucugaggagacaccagagaacacacaccggcgaaaaacccuauaagugucccgaaugcggaaaauccuucagcaccaaaaacucucugaccgagcaccaaagaacccacaccggcgaaaagccuaccggcaaaaagacaagcgcuagcggcagcggcggcggcagcggcggcgacgcccuggacgacuucgaccuggacaugcugggcagcgacgcccuggacgacuucgaccuggacaugcugggcagcgacgcccuggacgacuucgaccuggacaugcugggcagcgacgcccuggacgacuucgaccuggacaugcugagcggcggccccaagaagaagcggaaggugggcagccaguaccugcccgacaccgacgaccggcaccggaucgaggagaagcggaagcggaccuacgagaccuucaagagcaucaugaagaaaucccccuucagcggccccaccgacccccggccccccccccggcggaucgccgugcccagccggagcagcgccagcgugcccaagcccgccccccagcccuaccccuucaccagcagccugagcaccaucaacuacgacgaguuccccaccaugguguuccccagcggccagaucagccaggccagcgcccuggcccccgcccccccccaggugcugccccaggcccccgcccccgcccccgcccccgccauggugagcgcccuggcccaggcccccgcccccgugcccgugcuggcccccggccccccccaggccguggccccccccgcccccaagcccacccaggccggcgagggcacccugagcgaggcccugcugcagcugcaguucgacgacgaggaccugggcgcccugcugggcaacagcaccgaccccgccguguucaccgaccuggccagcguggacaacagcgaguuccagcagcugcugaaccagggcauccccguggccccccacaccaccgagcccaugcugauggaguaccccgaggccaucacccggcuggugaccggcgcccagcggccccccgaccccgcccccgccccccugggcgcccccggccugcccaacggccugcugagcggcgacgaggacuucagcagcaucgccgacauggacuucagcgcccugcugggcagcggcagcggcagccgggacagccgggagggcauguuccugcccaagcccgaggccggcagcgccaucagcgacguguucgagggccgggaggugugccagcccaagcggcuccggcccuuccacccccccggcagccccugggccaaccggccccugcccgccagccuggcccccacccccaccggccccgugcacgagcccgugggcagccugacccccgcccccgugccccagccccuggaccccgcccccgccgugacccccgaggccagccaccugcuggaggaccccgacgaggagaccagccaggccgugaaggcccugcgggagauggccgacaccgugaucccccagaaggaggaggccgccaucugcggccagauggaccugagccacccccccccccggggccaccuggacgagcugaccaccacccuggagagcaugaccgaggaccugaaccuggacagcccccugacccccgagcugaacgagauccuggacaccuuccugaacgacgagugccugcugcacgccaugcacaucagcaccggccugagcaucuucgacaccagccuguucagcggcggcaagcggcccgccgccaccaagaaggccggccaggccaagaagaagaagggcagcuaccccuacgacgugcccgacuacgccugagcggccgcuuaauuaagcugccuucugcggggcuugccuucuggccaugcccuucuucucucccuugcaccuguaccucuuggucuuugaauaaagccugaguaggaagucuagaaaaaaaaaaaaaaaaaaaaaaaaaaaaaaaaaaaaaaaaaaaaaaaaaaaaaaaaaaaaaaaaaaaaaaaaaaaaaaaa

SEQ ID NO: 138 - DNA, 21 bp, Homo sapiens
cctgcagccccgcccagccta

SEQ ID NO: 139 - protein, 209 aa, Artificial Sequence
  source: /note="Description of Artificial Sequence: Synthetic polypeptide"
LEPGEKPYKCPECGKSFSQNSTLTEHQRTHTGEKPYKCPECGKSFSERSHLREHQRTHTGEKPYKCPECGKSFSSKKHLAEHQRTHTGEKPYKCPECGKSFSRNDTLTEHQRTHTGEKPYKCPECGKSFSDCRDLARHQRTHTGEKPYKCPECGKSFSQSGDLRRHQRTHTGEKPYKCPECGKSFSTKNSLTEHQRTHTGEKPTGKKTS

SEQ ID NO: 140 - protein, 789 aa, Artificial Sequence
  source: /note="Description of Artificial Sequence: Synthetic polypeptide"
MAPKKKRKVGIHGVPAAGSSGSLEPGEKPYKCPECGKSFSERSHLREHQRTHTGEKPYKCPECGKSFSRADNLTEHQRTHTGEKPYKCPECGKSFSRSDKLTEHQRTHTGEKPYKCPECGKSFSSKKHLAEHQRTHTGEKPYKCPECGKSFSTKNSLTEHQRTHTGEKPYKCPECGKSFSDKKDLTRHQRTHTGEKPYKCPECGKSFSSKKHLAEHQRTHTGEKPTGKKTSASGSGGGSGGDALDDFDLDMLGSDALDDFDLDMLGSDALDDFDLDMLGSDALDDFDLDMLSGGPKKKRKVGSQYLPDTDDRHRIEEKRKRTYETFKSIMKKSPFSGPTDPRPPPRRIAVPSRSSASVPKPAPQPYPFTSSLSTINYDEFPTMVFPSGQISQASALAPAPPQVLPQAPAPAPAPAMVSALAQAPAPVPVLAPGPPQAVAPPAPKPTQAGEGTLSEALLQLQFDDEDLGALLGNSTDPAVFTDLASVDNSEFQQLLNQGIPVAPHTTEPMLMEYPEAITRLVTGAQRPPDPAPAPLGAPGLPNGLLSGDEDFSSIADMDFSALLGSGSGSRDSREGMFLPKPEAGSAISDVFEGREVCQPKRLRPFHPPGSPWANRPLPASLAPTPTGPVHEPVGSLTPAPVPQPLDPAPAVTPEASHLLEDPDEETSQAVKALREMADTVIPQKEEAAICGQMDLSHPPPRGHLDELTTTLESMTEDLNLDSPLTPELNEILDTFLNDECLLHAMHISTGLSIFDTSLFSGGKRPAATKKAGQAKKKKGSYPYDVPDYA

SEQ ID NO: 141 - RNA, 2611 nt, Artificial Sequence
  source: /note="Description of Artificial Sequence: Synthetic polynucleotide"
aggaaauaagagagaaaagaagaguaagaagaaauauaagagccaccauggcccccaagaagaagcggaaggugggcauccacggcgugcccgccgccggcagcagcggaucccuggagcccggcgagaaacccuacaagugucccgaguguggcaagagcuuuuccgagagaagccaccugagggaacaccagagaacccacaccggcgagaagccuuacaaaugccccgaauguggaaagagcuuuucuagagccgacaaucugaccgaacaccaaagaacccacaccggcgaaaaacccuauaagugucccgaguguggaaaaagcuucucuagaagcgacaaacucacagagcaccagaggacacacaccggcgagaagcccuacaaaugucccgagugcggcaaaagcuucagcagcaagaagcaccuggccgagcaccaaagaacacacaccggcgaaaaaccuuauaaaugccccgagugcggcaaguccuuuuccaccaagaacucucugacagaacaccaaaggacacacaccggagaaaaacccuacaaaugucccgaauguggcaaauccuucagcgauaagaaggaccucaccagacaccagaggacacacaccggcgaaaaaccuuauaaaugucccgagugcggaaaguccuucuccagcaaaaagcaccucgcugagcaccaaaggacccacaccggcgagaagcccaccggaaaaaagaccagcgcuagcggcagcggcggcggcagcggcggcgacgcccuggacgacuucgaccuggacaugcugggcagcgacgcccuggacgacuucgaccuggacaugcugggcagcgacgcccuggacgacuucgaccuggacaugcugggcagcgacgcccuggacgacuucgaccuggacaugcugagcggcggccccaagaagaagcggaaggugggcagccaguaccugcccgacaccgacgaccggcaccggaucgaggagaagcggaagcggaccuacgagaccuucaagagcaucaugaagaaaucccccuucagcggccccaccgacccccggccccccccccggcggaucgccgugcccagccggagcagcgccagcgugcccaagcccgccccccagcccuaccccuucaccagcagccugagcaccaucaacuacgacgaguuccccaccaugguguuccccagcggccagaucagccaggccagcgcccuggcccccgcccccccccaggugcugccccaggcccccgcccccgcccccgcccccgccauggugagcgcccuggcccaggcccccgcccccgugcccgugcuggcccccggccccccccaggccguggccccccccgcccccaagcccacccaggccggcgagggcacccugagcgaggcccugcugcagcugcaguucgacgacgaggaccugggcgcccugcugggcaacagcaccgaccccgccguguucaccgaccuggccagcguggacaacagcgaguuccagcagcugcugaaccagggcauccccguggccccccacaccaccgagcccaugcugauggaguaccccgaggccaucacccggcuggugaccggcgcccagcggccccccgaccccgcccccgccccccugggcgcccccggccugcccaacggccugcugagcggcgacgaggacuucagcagcaucgccgacauggacuucagcgcccugcugggcagcggcagcggcagccgggacagccgggagggcauguuccugcccaagcccgaggccggcagcgccaucagcgacguguucgagggccgggaggugugccagcccaagcggcuccggcccuuccacccccccggcagccccugggccaaccggccccugcccgccagccuggcccccacccccaccggccccgugcacgagcccgugggcagccugacccccgcccccgugccccagccccuggaccccgcccccgccgugacccccgaggccagccaccugcuggaggaccccgacgaggagaccagccaggccgugaaggcccugcgggagauggccgacaccgugaucccccagaaggaggaggccgccaucugcggccagauggaccugagccacccccccccccggggccaccuggacgagcugaccaccacccuggagagcaugaccgaggaccugaaccuggacagcccccugacccccgagcugaacgagauccuggacaccuuccugaacgacgagugccugcugcacgccaugcacaucagcaccggccugagcaucuucgacaccagccuguucagcggcggcaagcggcccgccgccaccaagaaggccggccaggccaagaagaagaagggcagcuaccccuacgacgugcccgacuacgccugagcggccgcuuaauuaagcugccuucugcggggcuugccuucuggccaugcccuucuucucucccuugcaccuguaccucuuggucuuugaauaaagccugaguaggaagucuagaaaaaaaaaaaaaaaaaaaaaaaaaaaaaaaaaaaaaaaaaaaaaaaaaaaaaaaaaaaaaaaaaaaaaaaaaaaaaaaa

SEQ ID NO: 142 - DNA, 21 bp, Homo sapiens
cccacccctccccggcagagc

SEQ ID NO: 143 - protein, 209 aa, Artificial Sequence
  source: /note="Description of Artificial Sequence: Synthetic polypeptide"
LEPGEKPYKCPECGKSFSERSHLREHQRTHTGEKPYKCPECGKSFSRADNLTEHQRTHTGEKPYKCPECGKSFSRSDKLTEHQRTHTGEKPYKCPECGKSFSSKKHLAEHQRTHTGEKPYKCPECGKSFSTKNSLTEHQRTHTGEKPYKCPECGKSFSDKKDLTRHQRTHTGEKPYKCPECGKSFSSKKHLAEHQRTHTGEKPTGKKTS

SEQ ID NO: 144 - protein, 789 aa, Artificial Sequence
  source: /note="Description of Artificial Sequence: Synthetic polypeptide"
MAPKKKRKVGIHGVPAAGSSGSLEPGEKPYKCPECGKSFSSKKHLAEHQRTHTGEKPYKCPECGKSFSTHLDLIRHQRTHTGEKPYKCPECGKSFSRKDNLKNHQRTHTGEKPYKCPECGKSFSDCRDLARHQRTHTGEKPYKCPECGKSFSREDNLHTHQRTHTGEKPYKCPECGKSFSDPGHLVRHQRTHTGEKPYKCPECGKSFSQLAHLRAHQRTHTGEKPTGKKTSASGSGGGSGGDALDDFDLDMLGSDALDDFDLDMLGSDALDDFDLDMLGSDALDDFDLDMLSGGPKKKRKVGSQYLPDTDDRHRIEEKRKRTYETFKSIMKKSPFSGPTDPRPPPRRIAVPSRSSASVPKPAPQPYPFTSSLSTINYDEFPTMVFPSGQISQASALAPAPPQVLPQAPAPAPAPAMVSALAQAPAPVPVLAPGPPQAVAPPAPKPTQAGEGTLSEALLQLQFDDEDLGALLGNSTDPAVFTDLASVDNSEFQQLLNQGIPVAPHTTEPMLMEYPEAITRLVTGAQRPPDPAPAPLGAPGLPNGLLSGDEDFSSIADMDFSALLGSGSGSRDSREGMFLPKPEAGSAISDVFEGREVCQPKRLRPFHPPGSPWANRPLPASLAPTPTGPVHEPVGSLTPAPVPQPLDPAPAVTPEASHLLEDPDEETSQAVKALREMADTVIPQKEEAAICGQMDLSHPPPRGHLDELTTTLESMTEDLNLDSPLTPELNEILDTFLNDECLLHAMHISTGLSIFDTSLFSGGKRPAATKKAGQAKKKKGSYPYDVPDYA

SEQ ID NO: 145 - RNA, 2611 nt, Artificial Sequence
  source: /note="Description of Artificial Sequence: Synthetic polynucleotide"
aggaaauaagagagaaaagaagaguaagaagaaauauaagagccaccauggcccccaagaagaagcggaaggugggcauccacggcgugcccgccgccggcagcagcggaucccuggagcccggcgaaaagcccuacaaaugucccgaauguggcaagagcuucagcagcaaaaagcaccuggcugaacaccagaggacccacaccggagagaaacccuauaaaugucccgaguguggaaaaagcuucagcacccaccucgaccucauuaggcaccaaagaacccacaccggcgaaaaacccuauaagugucccgaguguggaaaauccuuuucuagaaaggacaaucucaagaaucaccaaagaacacacaccggcgagaaaccuuacaagugucccgagugcggaaaguccuucuccgacuguagagaucuggcuagacaccagagaacccacaccggcgagaagcccuauaagugccccgagugcggcaaguccuucucuagagaggacaaucugcacacacaccagaggacccacaccggcgaaaaaccuuacaaaugccccgaguguggcaagagcuuuagcgaucccggacaccuggugagacaccaaagaacccacaccggcgagaagccuuacaagugucccgaauguggaaaauccuuuagccagcuggcccaccugagggcccaccaaaggacacacaccggcgaaaaacccaccggcaaaaagaccagcgcuagcggcagcggcggcggcagcggcggcgacgcccuggacgacuucgaccuggacaugcugggcagcgacgcccuggacgacuucgaccuggacaugcugggcagcgacgcccuggacgacuucgaccuggacaugcugggcagcgacgcccuggacgacuucgaccuggacaugcugagcggcggccccaagaagaagcggaaggugggcagccaguaccugcccgacaccgacgaccggcaccggaucgaggagaagcggaagcggaccuacgagaccuucaagagcaucaugaagaaaucccccuucagcggccccaccgacccccggccccccccccggcggaucgccgugcccagccggagcagcgccagcgugcccaagcccgccccccagcccuaccccuucaccagcagccugagcaccaucaacuacgacgaguuccccaccaugguguuccccagcggccagaucagccaggccagcgcccuggcccccgcccccccccaggugcugccccaggcccccgcccccgcccccgcccccgccauggugagcgcccuggcccaggcccccgcccccgugcccgugcuggcccccggccccccccaggccguggccccccccgcccccaagcccacccaggccggcgagggcacccugagcgaggcccugcugcagcugcaguucgacgacgaggaccugggcgcccugcugggcaacagcaccgaccccgccguguucaccgaccuggccagcguggacaacagcgaguuccagcagcugcugaaccagggcauccccguggccccccacaccaccgagcccaugcugauggaguaccccgaggccaucacccggcuggugaccggcgcccagcggccccccgaccccgcccccgccccccugggcgcccccggccugcccaacggccugcugagcggcgacgaggacuucagcagcaucgccgacauggacuucagcgcccugcugggcagcggcagcggcagccgggacagccgggagggcauguuccugcccaagcccgaggccggcagcgccaucagcgacguguucgagggccgggaggugugccagcccaagcggcuccggcccuuccacccccccggcagccccugggccaaccggccccugcccgccagccuggcccccacccccaccggccccgugcacgagcccgugggcagccugacccccgcccccgugccccagccccuggaccccgcccccgccgugacccccgaggccagccaccugcuggaggaccccgacgaggagaccagccaggccgugaaggcccugcgggagauggccgacaccgugaucccccagaaggaggaggccgccaucugcggccagauggaccugagccacccccccccccggggccaccuggacgagcugaccaccacccuggagagcaugaccgaggaccugaaccuggacagcccccugacccccgagcugaacgagauccuggacaccuuccugaacgacgagugccugcugcacgccaugcacaucagcaccggccugagcaucuucgacaccagccuguucagcggcggcaagcggcccgccgccaccaagaaggccggccaggccaagaagaagaagggcagcuaccccuacgacgugcccgacuacgccugagcggccgcuuaauuaagcugccuucugcggggcuugccuucuggccaugcccuucuucucucccuugcaccuguaccucuuggucuuugaauaaagccugaguaggaagucuagaaaaaaaaaaaaaaaaaaaaaaaaaaaaaaaaaaaaaaaaaaaaaaaaaaaaaaaaaaaaaaaaaaaaaaaaaaaaaaaa

SEQ ID NO: 146 - DNA, 21 bp, Homo sapiens
agaggctaggccaagactccc

SEQ ID NO: 147 - protein, 209 aa, Artificial Sequence
  source: /note="Description of Artificial Sequence: Synthetic polypeptide"
LEPGEKPYKCPECGKSFSSKKHLAEHQRTHTGEKPYKCPECGKSFSTHLDLIRHQRTHTGEKPYKCPECGKSFSRKDNLKNHQRTHTGEKPYKCPECGKSFSDCRDLARHQRTHTGEKPYKCPECGKSFSREDNLHTHQRTHTGEKPYKCPECGKSFSDPGHLVRHQRTHTGEKPYKCPECGKSFSQLAHLRAHQRTHTGEKPTGKKTS

SEQ ID NO: 148 - protein, 789 aa, Artificial Sequence
  source: /note="Description of Artificial Sequence: Synthetic polypeptide"
MAPKKKRKVGIHGVPAAGSSGSLEPGEKPYKCPECGKSFSRSDKLVRHQRTHTGEKPYKCPECGKSFSQSGDLRRHQRTHTGEKPYKCPECGKSFSTSGELVRHQRTHTGEKPYKCPECGKSFSRSDKLVRHQRTHTGEKPYKCPECGKSFSDPGHLVRHQRTHTGEKPYKCPECGKSFSRNDALTEHQRTHTGEKPYKCPECGKSFSRSDHLTNHQRTHTGEKPTGKKTSASGSGGGSGGDALDDFDLDMLGSDALDDFDLDMLGSDALDDFDLDMLGSDALDDFDLDMLSGGPKKKRKVGSQYLPDTDDRHRIEEKRKRTYETFKSIMKKSPFSGPTDPRPPPRRIAVPSRSSASVPKPAPQPYPFTSSLSTINYDEFPTMVFPSGQISQASALAPAPPQVLPQAPAPAPAPAMVSALAQAPAPVPVLAPGPPQAVAPPAPKPTQAGEGTLSEALLQLQFDDEDLGALLGNSTDPAVFTDLASVDNSEFQQLLNQGIPVAPHTTEPMLMEYPEAITRLVTGAQRPPDPAPAPLGAPGLPNGLLSGDEDFSSIADMDFSALLGSGSGSRDSREGMFLPKPEAGSAISDVFEGREVCQPKRLRPFHPPGSPWANRPLPASLAPTPTGPVHEPVGSLTPAPVPQPLDPAPAVTPEASHLLEDPDEETSQAVKALREMADTVIPQKEEAAICGQMDLSHPPPRGHLDELTTTLESMTEDLNLDSPLTPELNEILDTFLNDECLLHAMHISTGLSIFDTSLFSGGKRPAATKKAGQAKKKKGSYPYDVPDYA

SEQ ID NO: 149 - RNA, 2611 nt, Artificial Sequence
  source: /note="Description of Artificial Sequence: Synthetic polynucleotide"
aggaaauaagagagaaaagaagaguaagaagaaauauaagagccaccauggcccccaagaagaagcggaaggugggcauccacggcgugcccgccgccggcagcagcggaucccuggagcccggcgaaaagcccuauaagugccccgagugcggcaagagcuucucuagaagcgacaaacucgugagacaccagagaacacacaccggagagaaaccuuacaagugccccgaguguggcaaguccuucucccaauccggcgaucugaggagacaccagagaacccacaccggcgaaaaacccuacaaaugccccgagugcggaaaguccuuuuccaccuccggcgagcucgugagacaccaaaggacccacaccggcgagaagccuuacaagugccccgagugcggcaaauccuucuccagauccgacaagcucgugaggcaccagaggacacacaccggagagaaaccuuauaagugucccgaauguggaaaguccuucagcgaccccggacaccuggugagacaccagaggacccacaccggcgaaaagccuuauaaaugucccgagugcggaaaaagcuuuucuagaaacgaugcucugacagagcaccaaagaacccacaccggcgaaaaacccuacaagugucccgagugcggaaagagcuucagcagaagcgaccaccugaccaaccaccagagaacacacaccggagaaaaacccaccggcaaaaagaccuccgcuagcggcagcggcggcggcagcggcggcgacgcccuggacgacuucgaccuggacaugcugggcagcgacgcccuggacgacuucgaccuggacaugcugggcagcgacgcccuggacgacuucgaccuggacaugcugggcagcgacgcccuggacgacuucgaccuggacaugcugagcggcggccccaagaagaagcggaaggugggcagccaguaccugcccgacaccgacgaccggcaccggaucgaggagaagcggaagcggaccuacgagaccuucaagagcaucaugaagaaaucccccuucagcggccccaccgacccccggccccccccccggcggaucgccgugcccagccggagcagcgccagcgugcccaagcccgccccccagcccuaccccuucaccagcagccugagcaccaucaacuacgacgaguuccccaccaugguguuccccagcggccagaucagccaggccagcgcccuggcccccgcccccccccaggugcugccccaggcccccgcccccgcccccgcccccgccauggugagcgcccuggcccaggcccccgcccccgugcccgugcuggcccccggccccccccaggccguggccccccccgcccccaagcccacccaggccggcgagggcacccugagcgaggcccugcugcagcugcaguucgacgacgaggaccugggcgcccugcugggcaacagcaccgaccccgccguguucaccgaccuggccagcguggacaacagcgaguuccagcagcugcugaaccagggcauccccguggccccccacaccaccgagcccaugcugauggaguaccccgaggccaucacccggcuggugaccggcgcccagcggccccccgaccccgcccccgccccccugggcgcccccggccugcccaacggccugcugagcggcgacgaggacuucagcagcaucgccgacauggacuucagcgcccugcugggcagcggcagcggcagccgggacagccgggagggcauguuccugcccaagcccgaggccggcagcgccaucagcgacguguucgagggccgggaggugugccagcccaagcggcuccggcccuuccacccccccggcagccccugggccaaccggccccugcccgccagccuggcccccacccccaccggccccgugcacgagcccgugggcagccugacccccgcccccgugccccagccccuggaccccgcccccgccgugacccccgaggccagccaccugcuggaggaccccgacgaggagaccagccaggccgugaaggcccugcgggagauggccgacaccgugaucccccagaaggaggaggccgccaucugcggccagauggaccugagccacccccccccccggggccaccuggacgagcugaccaccacccuggagagcaugaccgaggaccugaaccuggacagcccccugacccccgagcugaacgagauccuggacaccuuccugaacgacgagugccugcugcacgccaugcacaucagcaccggccugagcaucuucgacaccagccuguucagcggcggcaagcggcccgccgccaccaagaaggccggccaggccaagaagaagaagggcagcuaccccuacgacgugcccgacuacgccugagcggccgcuuaauuaagcugccuucugcggggcuugccuucuggccaugcccuucuucucucccuugcaccuguaccucuuggucuuugaauaaagccugaguaggaagucuagaaaaaaaaaaaaaaaaaaaaaaaaaaaaaaaaaaaaaaaaaaaaaaaaaaaaaaaaaaaaaaaaaaaaaaaaaaaaaaaa

SEQ ID NO: 150 - DNA, 21 bp, Homo sapiens
aggctgggcggggctgcaggg

SEQ ID NO: 151 - protein, 209 aa, Artificial Sequence
  source: /note="Description of Artificial Sequence: Synthetic polypeptide"
LEPGEKPYKCPECGKSFSRSDKLVRHQRTHTGEKPYKCPECGKSFSQSGDLRRHQRTHTGEKPYKCPECGKSFSTSGELVRHQRTHTGEKPYKCPECGKSFSRSDKLVRHQRTHTGEKPYKCPECGKSFSDPGHLVRHQRTHTGEKPYKCPECGKSFSRNDALTEHQRTHTGEKPYKCPECGKSFSRSDHLTNHQRTHTGEKPTGKKTS

SEQ ID NO: 152 - protein, 789 aa, Artificial Sequence
  source: /note="Description of Artificial Sequence: Synthetic polypeptide"
MAPKKKRKVGIHGVPAAGSSGSLEPGEKPYKCPECGKSFSTSGHLVRHQRTHTGEKPYKCPECGKSFSTTGNLTVHQRTHTGEKPYKCPECGKSFSTSGSLVRHQRTHTGEKPYKCPECGKSFSRSDKLVRHQRTHTGEKPYKCPECGKSFSRSDELVRHQRTHTGEKPYKCPECGKSFSRSDKLVRHQRTHTGEKPYKCPECGKSFSQRAHLERHQRTHTGEKPTGKKTSASGSGGGSGGDALDDFDLDMLGSDALDDFDLDMLGSDALDDFDLDMLGSDALDDFDLDMLSGGPKKKRKVGSQYLPDTDDRHRIEEKRKRTYETFKSIMKKSPFSGPTDPRPPPRRIAVPSRSSASVPKPAPQPYPFTSSLSTINYDEFPTMVFPSGQISQASALAPAPPQVLPQAPAPAPAPAMVSALAQAPAPVPVLAPGPPQAVAPPAPKPTQAGEGTLSEALLQLQFDDEDLGALLGNSTDPAVFTDLASVDNSEFQQLLNQGIPVAPHTTEPMLMEYPEAITRLVTGAQRPPDPAPAPLGAPGLPNGLLSGDEDFSSIADMDFSALLGSGSGSRDSREGMFLPKPEAGSAISDVFEGREVCQPKRLRPFHPPGSPWANRPLPASLAPTPTGPVHEPVGSLTPAPVPQPLDPAPAVTPEASHLLEDPDEETSQAVKALREMADTVIPQKEEAAICGQMDLSHPPPRGHLDELTTTLESMTEDLNLDSPLTPELNEILDTFLNDECLLHAMHISTGLSIFDTSLFSGGKRPAATKKAGQAKKKKGSYPYDVPDYA

SEQ ID NO: 153 - RNA, 2611 nt, Artificial Sequence
  source: /note="Description of Artificial Sequence: Synthetic polynucleotide"
aggaaauaagagagaaaagaagaguaagaagaaauauaagagccaccauggcccccaagaagaagcggaaggugggcauccacggcgugcccgccgccggcagcagcggaucccuggagcccggcgaaaagcccuacaaaugucccgaaugcggcaaauccuucuccaccuccggccaccucgugagacaccagaggacacacaccggcgagaagccuuauaagugccccgaaugcggcaaaagcuucuccaccaccggcaaucugaccguccaccagagaacacacaccggcgaaaaaccuuauaagugucccgaguguggcaaauccuuuuccaccagcggaucucuggugagacaccaaaggacacacaccggcgaaaaacccuacaaaugccccgaguguggaaaauccuucucuagaagcgacaagcuggugagacaccagaggacccacaccggcgagaaacccuacaagugccccgaauguggcaagagcuucucuagauccgacgagcucgugagacaccaaagaacccacaccggcgaaaagccuuacaaaugucccgagugcggaaagagcuuuagcagaagcgauaagcuggucagacaccaaagaacacacaccggagaaaaacccuauaagugccccgaguguggcaaguccuuuagccagagagcccaccuggagagacaccaaagaacccacaccggcgaaaaacccaccggaaaaaagacaagcgcuagcggcagcggcggcggcagcggcggcgacgcccuggacgacuucgaccuggacaugcugggcagcgacgcccuggacgacuucgaccuggacaugcugggcagcgacgcccuggacgacuucgaccuggacaugcugggcagcgacgcccuggacgacuucgaccuggacaugcugagcggcggccccaagaagaagcggaaggugggcagccaguaccugcccgacaccgacgaccggcaccggaucgaggagaagcggaagcggaccuacgagaccuucaagagcaucaugaagaaaucccccuucagcggccccaccgacccccggccccccccccggcggaucgccgugcccagccggagcagcgccagcgugcccaagcccgccccccagcccuaccccuucaccagcagccugagcaccaucaacuacgacgaguuccccaccaugguguuccccagcggccagaucagccaggccagcgcccuggcccccgcccccccccaggugcugccccaggcccccgcccccgcccccgcccccgccauggugagcgcccuggcccaggcccccgcccccgugcccgugcuggcccccggccccccccaggccguggccccccccgcccccaagcccacccaggccggcgagggcacccugagcgaggcccugcugcagcugcaguucgacgacgaggaccugggcgcccugcugggcaacagcaccgaccccgccguguucaccgaccuggccagcguggacaacagcgaguuccagcagcugcugaaccagggcauccccguggccccccacaccaccgagcccaugcugauggaguaccccgaggccaucacccggcuggugaccggcgcccagcggccccccgaccccgcccccgccccccugggcgcccccggccugcccaacggccugcugagcggcgacgaggacuucagcagcaucgccgacauggacuucagcgcccugcugggcagcggcagcggcagccgggacagccgggagggcauguuccugcccaagcccgaggccggcagcgccaucagcgacguguucgagggccgggaggugugccagcccaagcggcuccggcccuuccacccccccggcagccccugggccaaccggccccugcccgccagccuggcccccacccccaccggccccgugcacgagcccgugggcagccugacccccgcccccgugccccagccccuggaccccgcccccgccgugacccccgaggccagccaccugcuggaggaccccgacgaggagaccagccaggccgugaaggcccugcgggagauggccgacaccgugaucccccagaaggaggaggccgccaucugcggccagauggaccugagccacccccccccccggggccaccuggacgagcugaccaccacccuggagagcaugaccgaggaccugaaccuggacagcccccugacccccgagcugaacgagauccuggacaccuuccugaacgacgagugccugcugcacgccaugcacaucagcaccggccugagcaucuucgacaccagccuguucagcggcggcaagcggcccgccgccaccaagaaggccggccaggccaagaagaagaagggcagcuaccccuacgacgugcccgacuacgccugagcggccgcuuaauuaagcugccuucugcggggcuugccuucuggccaugcccuucuucucucccuugcaccuguaccucuuggucuuugaauaaagccugaguaggaagucuagaaaaaaaaaaaaaaaaaaaaaaaaaaaaaaaaaaaaaaaaaaaaaaaaaaaaaaaaaaaaaaaaaaaaaaaaaaaaaaaa

SEQ ID NO: 154 - DNA, 21 bp, Homo sapiens
ggaggggtgggggttaatggt

SEQ ID NO: 155 - protein, 209 aa, Artificial Sequence
  source: /note="Description of Artificial Sequence: Synthetic polypeptide"
LEPGEKPYKCPECGKSFSTSGHLVRHQRTHTGEKPYKCPECGKSFSTTGNLTVHQRTHTGEKPYKCPECGKSFSTSGSLVRHQRTHTGEKPYKCPECGKSFSRSDKLVRHQRTHTGEKPYKCPECGKSFSRSDELVRHQRTHTGEKPYKCPECGKSFSRSDKLVRHQRTHTGEKPYKCPECGKSFSQRAHLERHQRTHTGEKPTGKKTS

SEQ ID NO: 156 - protein, 789 aa, Artificial Sequence
  source: /note="Description of Artificial Sequence: Synthetic polypeptide"
MAPKKKRKVGIHGVPAAGSSGSLEPGEKPYKCPECGKSFSRNDTLTEHQRTHTGEKPYKCPECGKSFSRNDALTEHQRTHTGEKPYKCPECGKSFSTSGELVRHQRTHTGEKPYKCPECGKSFSRSDNLVRHQRTHTGEKPYKCPECGKSFSRSDELVRHQRTHTGEKPYKCPECGKSFSRSDKLVRHQRTHTGEKPYKCPECGKSFSQSSNLVRHQRTHTGEKPTGKKTSASGSGGGSGGDALDDFDLDMLGSDALDDFDLDMLGSDALDDFDLDMLGSDALDDFDLDMLSGGPKKKRKVGSQYLPDTDDRHRIEEKRKRTYETFKSIMKKSPFSGPTDPRPPPRRIAVPSRSSASVPKPAPQPYPFTSSLSTINYDEFPTMVFPSGQISQASALAPAPPQVLPQAPAPAPAPAMVSALAQAPAPVPVLAPGPPQAVAPPAPKPTQAGEGTLSEALLQLQFDDEDLGALLGNSTDPAVFTDLASVDNSEFQQLLNQGIPVAPHTTEPMLMEYPEAITRLVTGAQRPPDPAPAPLGAPGLPNGLLSGDEDFSSIADMDFSALLGSGSGSRDSREGMFLPKPEAGSAISDVFEGREVCQPKRLRPFHPPGSPWANRPLPASLAPTPTGPVHEPVGSLTPAPVPQPLDPAPAVTPEASHLLEDPDEETSQAVKALREMADTVIPQKEEAAICGQMDLSHPPPRGHLDELTTTLESMTEDLNLDSPLTPELNEILDTFLNDECLLHAMHISTGLSIFDTSLFSGGKRPAATKKAGQAKKKKGSYPYDVPDYA

SEQ ID NO: 157 - RNA, 2611 nt, Artificial Sequence
  source: /note="Description of Artificial Sequence: Synthetic polynucleotide"
aggaaauaagagagaaaagaagaguaagaagaaauauaagagccaccauggcccccaagaagaagcggaaggugggcauccacggcgugcccgccgccggcagcagcggaucccuggagcccggcgagaagcccuacaaaugucccgaauguggcaagagcuucucuagaaacgacacacugaccgaacaccagagaacacacaccggcgaaaaaccuuauaaaugucccgaguguggaaaauccuucucuagaaaugacgcucucaccgagcaccaaagaacacacaccggcgaaaagccuuacaaaugccccgaauguggaaaguccuucuccaccuccggagagcuggugagacaccagagaacccacaccggcgaaaaacccuacaagugccccgagugcggaaaaagcuucucuagaagcgauaaucuggugagacaccaaaggacacacaccggcgagaagcccuauaagugucccgaaugcggcaaguccuuuuccagaagcgacgaacuggugagacaccagagaacccacaccggagagaagccuuauaagugucccgagugcggaaagagcuuuucuagauccgacaagcucgugagacaccaaaggacccacaccggcgagaaacccuauaaaugucccgaguguggcaaauccuuuucccagagcagcaaccucgugaggcaccagaggacccacaccggcgagaaacccaccggcaaaaagaccagcgcuagcggcagcggcggcggcagcggcggcgacgcccuggacgacuucgaccuggacaugcugggcagcgacgcccuggacgacuucgaccuggacaugcugggcagcgacgcccuggacgacuucgaccuggacaugcugggcagcgacgcccuggacgacuucgaccuggacaugcugagcggcggccccaagaagaagcggaaggugggcagccaguaccugcccgacaccgacgaccggcaccggaucgaggagaagcggaagcggaccuacgagaccuucaagagcaucaugaagaaaucccccuucagcggccccaccgacccccggccccccccccggcggaucgccgugcccagccggagcagcgccagcgugcccaagcccgccccccagcccuaccccuucaccagcagccugagcaccaucaacuacgacgaguuccccaccaugguguuccccagcggccagaucagccaggccagcgcccuggcccccgcccccccccaggugcugccccaggcccccgcccccgcccccgcccccgccauggugagcgcccuggcccaggcccccgcccccgugcccgugcuggcccccggccccccccaggccguggccccccccgcccccaagcccacccaggccggcgagggcacccugagcgaggcccugcugcagcugcaguucgacgacgaggaccugggcgcccugcugggcaacagcaccgaccccgccguguucaccgaccuggccagcguggacaacagcgaguuccagcagcugcugaaccagggcauccccguggccccccacaccaccgagcccaugcugauggaguaccccgaggccaucacccggcuggugaccggcgcccagcggccccccgaccccgcccccgccccccugggcgcccccggccugcccaacggccugcugagcggcgacgaggacuucagcagcaucgccgacauggacuucagcgcccugcugggcagcggcagcggcagccgggacagccgggagggcauguuccugcccaagcccgaggccggcagcgccaucagcgacguguucgagggccgggaggugugccagcccaagcggcuccggcccuuccacccccccggcagccccugggccaaccggccccugcccgccagccuggcccccacccccaccggccccgugcacgagcccgugggcagccugacccccgcccccgugccccagccccuggaccccgcccccgccgugacccccgaggccagccaccugcuggaggaccccgacgaggagaccagccaggccgugaaggcccugcgggagauggccgacaccgugaucccccagaaggaggaggccgccaucugcggccagauggaccugagccacccccccccccggggccaccuggacgagcugaccaccacccuggagagcaugaccgaggaccugaaccuggacagcccccugacccccgagcugaacgagauccuggacaccuuccugaacgacgagugccugcugcacgccaugcacaucagcaccggccugagcaucuucgacaccagccuguucagcggcggcaagcggcccgccgccaccaagaaggccggccaggccaagaagaagaagggcagcuaccccuacgacgugcccgacuacgccugagcggccgcuuaauuaagcugccuucugcggggcuugccuucuggccaugcccuucuucucucccuugcaccuguaccucuuggucuuugaauaaagccugaguaggaagucuagaaaaaaaaaaaaaaaaaaaaaaaaaaaaaaaaaaaaaaaaaaaaaaaaaaaaaaaaaaaaaaaaaaaaaaaaaaaaaaaa

SEQ ID NO: 158 - DNA, 21 bp, Homo sapiens
gaaggggtggaggctctgccg

SEQ ID NO: 159 - protein, 209 aa, Artificial Sequence
  source: /note="Description of Artificial Sequence: Synthetic polypeptide"
LEPGEKPYKCPECGKSFSRNDTLTEHQRTHTGEKPYKCPECGKSFSRNDALTEHQRTHTGEKPYKCPECGKSFSTSGELVRHQRTHTGEKPYKCPECGKSFSRSDNLVRHQRTHTGEKPYKCPECGKSFSRSDELVRHQRTHTGEKPYKCPECGKSFSRSDKLVRHQRTHTGEKPYKCPECGKSFSQSSNLVRHQRTHTGEKPTGKKTS

SEQ ID NO: 160 - RNA, 2645 nt, Artificial Sequence
  source: /note="Description of Artificial Sequence: Synthetic polynucleotide"
aggaaauaagagagaaaagaagaguaagaagaaauauaagagccaccauggccccgaagaaaaagcgcaaagucggaauccauggugucccugcggcuggaaguuccggcuccuuggaaccgggagagaagccuuauaaguguccggagugugggaagucguucuccaccucgggcaaccucaccgaacaucagcgcacacauacgggggagaaaccuuacaaaugcccggaauguggaaagagcuucuccgauucgggaaaucucagagugcaccaacgcacccacacaggagaaaaaccguauaagugccccgaaugcgggaaaucguucucccacaagaaugcgcugcagaaccaccagaggacacauacuggggagaagcccuacaaguguccugaaugcggaaaguccuucucgcgcaacgauacuuugaccgagcaccagcgcacucacaccggcgaaaagccguacaagugcccagagugcgguaaaagcuucucgcaacgggcccaucuggaacggcaccagcggacucacacuggagaaaagcccuacaagugucccgagugcgggaaguccuuuucccgguccgauaagcucgugcgccaccagagaacccauacuggagagaaaccguacaaauguccagaaugcggcaaauccuucucggacccgggacaccucgugcggcaucaacggacccauaccggggaaaagcccaccggaaagaaaacuagcgcgucaggcucugguggaggaucggggggagaugcucuggacgacuuugaccuugacaugcuuggcuccgacgcccuugacgacuucgaccucgauaugcugggaucggacgcccuggaugacuucgaucuggacauguugggcucggacgcgcuagacgauuuugaccuggauaugcuguccggaggucccaagaagaagcggaaggucggcagccaguaucugccggauacugaugaccggcacagaaucgaggagaagcgaaagcggaccuacgaaacuuucaagagcauuaugaagaaguccccguucucggguccaaccgaccccagaccuccuccgcggagaauugccgugccaagccgcucaagcgccagcgugcccaagccagcaccacagcccuacccguucaccuccucccuuucgaccaucaacuacgacgaauucccaaccaugguguucccuagcggacaaaucagccaggcuuccgcucuggcaccagccccaccucaagugcucccgcaagcgccugcuccagcaccggcuccugccaugguuucagcgcuggcccaagcacccgcuccugugccugugcuggccccuggaccaccacaagcaguagccccgccugcaccuaagccaacucaggccggcgaaggaacccugagcgaagcguugcugcagcuucaguucgacgacgaggaccugggugcccuguugggcaacucaacugacccugccguguucaccgaccuggcauccgucgauaacuccgaguuccagcaguugcugaaccagggaaucccagucgccccccauaccaccgaaccgaugcucauggaguaccccgaagccaucaccagacuggucaccggcgcacaaaggcccccugauccugcucccgcaccucucggugccccuggacugccaaacggccuucuguccggcgacgaggacuucucguccaucgccgauauggauuucuccgcccugcucggauccggcagcggaucacgcgacucgcgcgaagggauguuccugccgaagccugaggcugguuccgccauuagcgacguguucgaggggcgcgaagucugccaacccaagagacugcgcccguuucaucccccgggaagcccuugggccaacagaccucugccagccucccuggcacccacuccgacugggccugugcacgaacccgugggcucccugacuccggcaccagugccacagccccuggauccagccccugcugugaccccggaggccucacaccuucuggaagauccggacgaggaaacgucccaggccgugaaggcccugcgggagauggcggacacugugaucccucagaaagaagaggcggccauuugcggccagauggaccucucccauccgccuccgagaggacaccuggaugaacucacgaccacccucgaguccaugaccgaggaccugaaccuggacuccccccugacacccgaacucaacgagauccuggacaccuuccugaacgacgagugccugcuccacgccaugcacaucucaaccgggcugucgaucuucgacacuagcuuguucucuggaggaaagaggccggccgcuacuaagaaggccggacaagcgaagaagaagaagggaucguacccuuacgacgugcccgacuacgcaugagcggccgcuuaauuaagcugccuucugcggggcuugccuucuggccaugcccuucuucucucccuugcaccuguaccucuuggucuuugaauaaagccugaguaggaagucuagaaaaaaaaaaaaaaaaaaaaaaaaaaaaaaaaaaaaaaaaaaaaaaaaaaaaaaaaaaaaaaaaaaaaaaaaaaaaaaaaaaaaaaaaaaaaaaaaaaaaaaaaaaaaaaaaaa

SEQ ID NO: 161 - RNA, 2645 nt, Artificial Sequence
  source: /note="Description of Artificial Sequence: Synthetic polynucleotide"
aggaaauaagagagaaaagaagaguaagaagaaauauaagagccaccauggccccgaagaagaagcggaaggucggcauccacggagugccggcagcagggucaucaggcucccucgaacccggggaaaagccguacaaguguccggagugugggaagucauucuccacuuccgggaaucugaccgagcaucaacgcacccacacuggcgagaagcccuacaaaugcccggagugcggaaaaucguucucggacuccgggaaccuucggguccaccaaaggacucauaccggggagaaaccguacaaaugucccgaaugcgggaagucguucagccauaagaacgcgcugcagaaccaucagaggacccauacuggagaaaagcccuauaaguguccggaaugcggaaagucguucucacgcaacgacacccucaccgaacaccagcgcacucacaccggagagaagccuuacaagugcccggaauguggaaagagcuucagccagcgggcacaucuggaaagacaccagcgaacccacaccggggaaaaaccguauaagugccccgaguguggaaaguccuuuucacgguccgauaagcucgugcgccaccagagaacucacacuggggagaagccguacaagugucccgagugcggcaagagcuucucagauccgggacaccuugugcgacaucaacggacccauaccggagaaaaaccgaccgggaaaaagaccucagcaucaggcucaggaggcggaucaggaggcgacgcgcucgaugacuucgaucuggacauguugggguccgacgcgcuugacgacuucgaccuugauaugcucggauccgacgcccucgacgauuuugaucucgacaugcuugggucagacgcccuggacgauuucgaccuggacaugcuguccgguggaccgaaaaagaagaggaaggucgggucccaguaccucccggacaccgaugaccgacaccggauugaagagaagcgcaagagaaccuacgaaaccuucaagucgauuaugaagaagucgccguucucgggaccgacugaucccagaccgccgcccagaaggauugccgugccgucgaggucaagcgccucagugccgaaacccgcuccgcaaccguaccccuucaccucaucacuuuccaccaucaacuacgaugaguuccccaccaugguguucccguccggccagaucucacaggccucagcccuugcaccggcaccgccccaaguccuuccgcaagcacccgcacccgcucccgcuccggcaaugguguccgcgcucgcacaagcaccggcuccggugccggucuuggcuccgggaccgccgcaagcaguggcaccacccgcuccgaaaccgacucaggcuggggagggaacccuguccgaagcccugcugcaacuucaauucgacgaugaagaucugggcgcacuguugggaaacuccacugauccggcaguguucaccgaucuggccucgguggacaacuccgaguuccagcagcugcucaaccaagggauuccggucgccccgcauacuaccgagcccaugcugauggaauacccggaagcaaucacccggcuggucacuggugcacaaagaccccccgauccugcuccggcaccguugggagcaccgggguugcccaaugggcugcuuucgggggacgaggauuucucgucaauugccgacauggacuucucggcccuguugggauccggaagcggaagcagggacucacgagagggaauguuccuaccgaagcccgaagcgggaucagcaaucucagacguguuugaaggccgcgaagucugccagccgaagcgccuucgcccguuccauccgccgggaucacccugggccaacagaccccugccggcaucacuggccccgacuccgacugguccggugcacgaaccggucgggagccugacuccggcacccgugccccaaccguuggauccggcaccggcagugacuccggaagcuucccaccuccuggaggauccggacgaagagacuucgcaggcagugaaggcccugcgcgaaauggcggacaccgugauuccccagaaggaagaggcagcgaucugcgggcagauggaccugucacauccgcccccgagaggacaccuggacgagcugaccacuacccuggaaucgaugacugaagaucugaaccuggacucaccgcugacucccgagcugaacgaaauccuggacaccuuccugaacgacgagugccuucuccacgccaugcauaucuccaccgggcugagcaucuucgacaccucgcuguucucgggaggaaaacgcccggccgcaacuaagaaggccggacaggccaagaagaagaaggggucauacccguacgacgugcccgacuaugcgugagcggccgcuuaauuaagcugccuucugcggggcuugccuucuggccaugcccuucuucucucccuugcaccuguaccucuuggucuuugaauaaagccugaguaggaagucuagaaaaaaaaaaaaaaaaaaaaaaaaaaaaaaaaaaaaaaaaaaaaaaaaaaaaaaaaaaaaaaaaaaaaaaaaaaaaaaaaaaaaaaaaaaaaaaaaaaaaaaaaaaaaaaaaaa

SEQ ID NO: 162 - RNA, 2645 nt, Artificial Sequence
  source: /note="Description of Artificial Sequence: Synthetic polynucleotide"
aggaaauaagagagaaaagaagaguaagaagaaauauaagagccaccauggcccccaagaagaagcgcaaggucgggauccacggagucccggcagcaggauccucaggcucacuggaaccgggggaaaaacccuacaagugcccggaaugcggcaagagcuucucgaccuccgggaaccugaccgagcaccagcgcacccacaccggagagaaaccguacaagugccccgaaugcgggaaaucguucucagacucgggaaaccucagggugcaccagcggacccacacgggggaaaagccguacaaaugcccggagugcgggaagucauucucccacaagaacgcgcugcagaaccaccaaagaacccacaccggcgaaaaaccguacaagugccccgagugcggaaaguccuucucccgcaacgacacccucaccgaacaccaacgcacccacaccggagaaaagcccuacaagugcccggaaugcggaaagagcuucagccagagggcccaccuggaaagacaccagagaacccacaccggcgaaaagccguacaaaugcccggagugcgggaaguccuucagccggucagacaagcugguccgccaccaaaggacccacacaggagaaaagcccuacaagugcccggaaugcggaaaaucguucagcgaccccggacaccugguccggcaccagaggacccacaccggggagaagccgaccggcaaaaagaccucagcgagcggauccggaggaggaucagggggggacgcacuggacgacuucgaccuggacaugcugggauccgacgcacuggacgacuucgaccuagacaugcucggaucggacgcacucgacgacuucgaccucgacaugcuaggaucagacgcacuagacgacuucgaccucgacaugcugucgggaggaccgaagaaaaagcggaaggucggaucacaguaccucccggacaccgacgacaggcacagaaucgaagaaaaacgcaagcgcaccuacgaaaccuucaagagcaucaugaaaaagucgccguucucaggaccgaccgaccccagaccgccaccgaggagaauagccgucccgagccgauccuccgcauccgugccgaaaccggcaccgcaacccuacccguucaccucgucccugucgaccaucaacuacgacgaguuccccaccaugguguuccccuccgggcagaucucacaggccucggcacuggcacccgcaccaccgcaagugcugccccaagcaccggcacccgcaccggcgcccgcaauggugucagcgcuggcacaggcaccagcaccggugccaguccucgcaccgggaccgccgcaagcaguggcaccgccggcaccgaaaccgacccaggccggagaagggacccuguccgaggcgcugcugcaacuccaguucgacgacgaggaccugggagcacuccugggaaacuccaccgacccggcaguguucaccgaccucgcaucgguggacaacuccgaguuccaacagcuccugaaccaggggauaccgguggcaccgcacaccaccgaaccgaugcugauggaauacccggaagccaucacccggcucgugaccggagcgcaaagaccgcccgaccccgcgcccgcaccgcugggagcaccgggacuaccgaacgggcugcucucaggggacgaggacuucuccagcaucgcagacauggacuucuccgcccugcugggaucaggauccggaucacgcgacucccgggaaggaauguuccugccgaagccggaagcaggcagcgcaaucuccgacguguucgaaggccgcgaggucugccagcccaagcgccugcgaccguuccacccgccgggaucaccgugggcaaaccgcccgcuaccggcaucacuggcaccgacacccaccggaccggugcacgaaccggucgggucacugacccccgcaccggucccgcaaccgcuagacccggcaccggcagugaccccggaagcaucgcaccuccuggaggacccggacgaggaaaccucacaggcagugaaggcccugcgggagauggccgacaccgugauaccgcagaaggaggaggccgccaucugcggacaaauggaccugucacacccgcccccgagaggacaccuggacgaacucaccaccacccuggagagcaugaccgaggaccugaaccuggacucaccgcugaccccggagcugaacgaaauccuggacaccuuccugaacgacgagugccugcugcacgcaaugcacaucagcaccgggcugucgaucuucgacaccagccuguucuccggagggaaaagacccgccgccaccaagaaagcgggccaagcaaagaaaaagaagggaucguaccccuacgacgugccggacuacgcaugagcggccgcuuaauuaagcugccuucugcggggcuugccuucuggccaugcccuucuucucucccuugcaccuguaccucuuggucuuugaauaaagccugaguaggaagucuagaaaaaaaaaaaaaaaaaaaaaaaaaaaaaaaaaaaaaaaaaaaaaaaaaaaaaaaaaaaaaaaaaaaaaaaaaaaaaaaaaaaaaaaaaaaaaaaaaaaaaaaaaaaaaaaaaa

SEQ ID NO: 163 - RNA, 2645 nt, Artificial Sequence
  source: /note="Description of Artificial Sequence: Synthetic polynucleotide"
aggaaauaagagagaaaagaagaguaagaagaaauauaagagccaccauggccccgaagaaaaagaggaaggucgggauccacggagucccagccgcaggaagcagcggaagccuggaacccggagaaaaacccuacaagugcccagaaugcggcaagagcuucagcaccagcggaaaccugaccgaacaccagcggacgcacacaggggagaaaccguacaaaugcccggagugcggaaagagcuucagcgacagcggcaaccuccgcgugcaccagagaacccacacgggagagaagccguacaagugcccggaaugcggaaaaagcuucagccacaagaacgcgcugcagaaccaccagaggacacacacgggcgagaagcccuacaaaugccccgaaugcgggaaaagcuucagccggaacgacacccucaccgagcaccagcgaacccacaccggagaaaagccguacaagugcccggaaugcggaaaaagcuucagccaacgggcccaccuggaacgccaccaaaggacccacacaggagaaaagcccuacaagugcccagagugcggcaaaagcuucagccggagcgacaagcugguccggcaccagcgcacacacaccggcgaaaagccauacaagugccccgagugcggaaagagcuucagcgacccaggacaccucgugcggcaccaacgcacgcacaccggggaaaaaccgaccggaaaaaagaccagcgcgagcggaagcggaggaggaagcggaggcgacgcccuggacgacuucgaccuggacaugcuggggagcgacgcacuggacgacuucgaccuggacaugcugggaagcgacgcgcuggacgacuucgaccuggacaugcugggcagcgacgcccucgacgacuucgaccucgacaugcugagcggcggacccaagaagaagagaaaggucggaagccaguaccucccggacaccgacgacaggcaccgcaucgaagagaagcggaaaagaaccuacgaaaccuucaagagcaucaugaaaaagagcccguucagcggaccaaccgaccccagaccaccaccgagaagaaucgcggucccaagcaggagcagcgccagcgucccgaagccagccccacagccguaccccuucaccagcagccugagcaccaucaacuacgacgaguuccccaccaugguguucccgagcggccagauaagccaggccagcgcacuggcaccagccccaccgcaagugcugccccaagcacccgcaccagcacccgcccccgcgauggucagcgcccuggcacaagccccagccccagucccggugcucgcaccaggaccaccccaagcagucgcaccgccagccccaaagccgacccaagccggagaaggcacccucagcgaggcgcuccugcaacuccaauucgacgacgaggaccugggagcccugcugggcaacagcaccgacccggcaguguucaccgaccuggccagcguggacaacagcgaauuccagcagcuccugaaccaaggaaucccagucgcgccacacaccaccgagccgaugcugauggaauacccagaagcgaucacgagacuggucaccggggcccaaagaccgccggacccagcgccagcaccacugggagccccaggacugcccaacggacugcucagcggcgacgaggacuucagcagcaucgcggacauggacuucagcgcacuccucggaagcggaagcggcagcagagacagccgggaaggaauguuccuccccaagccagaagccggaagcgcaaucagcgacguguucgaaggacgggaagucugccagccgaagcgccucagaccguuccacccaccgggaagcccaugggccaacagaccgcugccagccagccuggcaccgaccccaaccggaccaguccacgaaccagucggcagccugacaccagcaccagugccccagccacuggacccagcaccggcagugaccccagaagccagccaccuccuggaggaccccgacgaagaaaccagccaggccgugaaggcccugagggagauggccgacacggugaucccacagaaggaagaagcagcgaucugcggccaaauggaccucagccacccaccgccaagaggccaccuggacgagcucaccaccacccuggaaagcaugaccgaggaccucaaccucgacagcccccugacaccggagcucaacgagauccuggacaccuuccucaacgacgaaugccugcuccacgccaugcacaucagcaccggacugagcaucuucgacaccagccuguucagcgggggaaaacgaccggcagccaccaaaaaggccggacaggcgaagaagaagaaggggagcuacccguacgacgugcccgacuacgccugagcggccgcuuaauuaagcugccuucugcggggcuugccuucuggccaugcccuucuucucucccuugcaccuguaccucuuggucuuugaauaaagccugaguaggaagucuagaaaaaaaaaaaaaaaaaaaaaaaaaaaaaaaaaaaaaaaaaaaaaaaaaaaaaaaaaaaaaaaaaaaaaaaaaaaaaaaaaaaaaaaaaaaaaaaaaaaaaaaaaaaaaaaaaa

SEQ ID NO: 164 - RNA, 2645 nt, Artificial Sequence
  source: /note="Description of Artificial Sequence: Synthetic polynucleotide"
aggaaauaagagagaaaagaagaguaagaagaaauauaagagccaccauggccccgaagaagaagcgcaaggucggcauacacggagucccagccgcuggauccuccggaucccuggaaccuggggagaaacccuauaagugcccggagugcggaaagucauucucaacuagcggaaaccugacagagcaccagaggacccauacuggcgaaaagccauacaaaugccccgaaugcgggaaaagcuucagcgacagcgggaaccugagagugcaccagcggacucauaccggggagaagccuuacaagugccccgaguguggaaaguccuucucccauaagaacgcgcuccagaaccaccagagaacccacaccggagaaaagccguacaagugcccggaaugcggcaaauccuuuucacggaacgacacucucaccgagcaccaacggacgcacaccggagagaagccguacaagugcccugaaugcggaaagagcuuuagccagagggcccaccuggaacggcaucagcgcacucacaccggggaaaagcccuacaagugcccagagugcggcaagagcuucucccggucugacaagcuugugcgccaucagcggacccacacuggagaaaaaccguacaaguguccggaguguggcaaaucguucucagacccgggacaccugguccgacaccaacgcacacacaccggcgaaaagccgaccggcaaaaagaccucggccucgggaucuggaggaggaagcggcggagaugcccuggacgacuucgaccuggacauguugggcagcgacgcacuggaugacuucgaccuggauaugcugggauccgacgcccucgacgauuucgaccucgauaugcuuggcuccgaugcgcucgaugauuucgauuuggacaugcuguccggcggaccuaagaagaagagaaaggucggcagccaauaccucccggacacugaugaccggcaccggaucgaagagaagcggaagcgcacuuacgagacuuucaagucgaucaugaagaagucacccuucucgggaccuacugauccucggccgccaccuagacggaucgcggugccauccaggucauccgcuuccguccccaagccugcgccucaaccguacccuuucacuuccucccugucgaccaucaacuacgacgaguuccccaccaugguguuccccuccggacagauuucccaagccucggcgcuagcaccagccccuccacaagugcuuccgcaagcuccagcuccggcaccagcaccagccaugguguccgcucuggcccaagcuccugcuccggugccugugcuggcuccuggaccgccucaggcaguggcaccacccgcaccaaagccgacccaagcgggagagggaacucuguccgaagcgcugcugcagcuccaguucgacgacgaggaccugggugcccugcucggaaauucgaccgauccggccguguuuaccgacuuggccaguguggacaacuccgaguuccaacagcugcugaaccaggggauuccaguggccccccacacuacugaaccgaugcugauggaauaccccgaggccauuaccagacuggucacuggagcccagaggccuccagacccugccccugcuccacugggugccccaggacugcccaaugggcuucugucgggcgaugaggauuucagcucaaucgcggauauggacuucuccgcccuucuggguuccggauccgguucacgggauuccagagagggcauguuccuacccaagcccgaagccggaagcgcgaucagcgacguguucgagggucgcgaagucugucagccaaagagacuccggccguuucauccacccggaucacccugggccaaucgcccacucccugccucauuggccccgaccccuacugguccggugcacgagccugucgggucgcucacuccggcaccugugccacaaccgcuggacccugcaccagccgugaccccagaggcgucccaccuccucgaagaucccgaugaagaaacaagccaggccgugaaggcccugcgcgaaauggccgacaccgugaucccgcagaaagaggaagccgccaucugcggucagauggaccugagccaucccccuccgagaggacaccuggacgaacugaccacuacacuggagagcaugaccgaggaccugaaccuggacuccccccuuaccccggaacugaacgagauucucgacacuuuccugaacgacgagugucugcuccacgcgaugcacaucucgaccggacugucgaucuuugacaccucgcuguucuccgguggcaaaaggccugccgccaccaagaaggccggacaggccaagaaaaagaagggcuccuacccguacgaugugcccgacuacgcuugagcggccgcuuaauuaagcugccuucugcggggcuugccuucuggccaugcccuucuucucucccuugcaccuguaccucuuggucuuugaauaaagccugaguaggaagucuagaaaaaaaaaaaaaaaaaaaaaaaaaaaaaaaaaaaaaaaaaaaaaaaaaaaaaaaaaaaaaaaaaaaaaaaaaaaaaaaaaaaaaaaaaaaaaaaaaaaaaaaaaaaaaaaaaa

SEQ ID NO: 165 - RNA, 2645 nt, Artificial Sequence
  source: /note="Description of Artificial Sequence: Synthetic polynucleotide"
aggaaauaagagagaaaagaagaguaagaagaaauauaagagccaccauggcccccaagaaaaagcgcaaagugggcauccacggcgugccagcagcaggaagcagcggaagccuggaacccggggagaagccguacaagugcccagaaugcggaaagagcuucagcaccagcggcaaccucaccgagcaccagagaacccacaccggggagaaaccguacaaaugcccggaaugcggcaagagcuucagcgacagcggaaaccugagagugcaccaacgcacccacacgggagaaaaacccuacaaaugccccgagugcgggaaaagcuucagccacaagaacgcgcugcagaaccaccaaagaacgcacaccggagaaaagccguacaagugcccagaaugcggaaagagcuucagcagaaacgacacccugaccgaacaccagcggacgcacacaggcgaaaaaccauacaagugcccggagugcggcaaaagcuucagccagagagcgcaccuggaaaggcaccagcgcacacacaccggcgaaaagccauacaaaugcccagagugcggaaaaagcuucagccggagcgacaagcugguccgccaccaacggacccacacaggggaaaagcccuacaagugccccgaaugcggcaagagcuucagcgacccgggacaccucgugcggcaccagaggacccacaccggagaaaagccgaccgggaaaaagaccagcgcaagcgggagcggaggaggaagcggaggcgacgcacucgacgacuucgaccuggacaugcuggggagcgacgcacuggacgacuucgaccucgacaugcucggaagcgacgcccucgacgacuucgaccuggacaugcugggcagcgacgcgcuggacgacuucgaccucgacaugcucagcgggggaccaaaaaagaaaaggaaggucggaagccaguaccucccggacaccgacgacaggcaccggaucgaggaaaagcggaagcgcaccuacgaaaccuucaagagcaucaugaaaaagagccccuucagcggaccgacagacccgaggccaccaccacggagaaucgccgugccaagcaggagcagcgccagcgugcccaaaccggccccacaacccuacccguucaccagcagccucagcaccaucaacuacgacgaguucccaaccaugguguuccccagcggacagaucagccaagccagcgcacuggcaccagcccccccgcaagugcugccacaagcgccggcaccagcgccagcaccagccauggucagcgcgcuggcacaagcccccgcaccagugccagugcucgcaccaggaccaccccaggcaguagcaccgccagccccgaagccaacccaggcaggagaaggcacccucagcgaggcgcugcugcagcuccaguucgacgacgaggaccucggagcccugcugggaaacagcaccgacccagccguguucaccgaccuggccagcguggacaacagcgaauuccagcagcugcucaaccaaggaaucccgguggccccacacaccaccgaacccaugcugauggaguacccggaggccaucaccagacucgugacaggagcccagaggccaccagacccagccccagcaccacugggagccccaggacuccccaacggacugcugagcggcgacgaggacuucagcagcaucgccgacauggacuucagcgcacuccucgggagcggaagcggaagcagagacagcagggaaggaauguuccugcccaagccggaagcgggaagcgcaaucagcgacguguucgaaggaagagaagucugccagcccaagaggcugcgcccguuccacccaccaggaagcccgugggccaacagaccacugccagcaagccucgccccgacaccaaccggaccggugcacgaacccgugggcagccugaccccagcaccggucccacagccacuggacccagcacccgcagugaccccagaagccagccaccuccuggaggacccggacgaagaaaccagccaggccgucaaggcccugcgcgagauggccgacaccgucaucccccaaaaggaagaggcggccaucugcggacagauggaccugagccacccaccgccaagaggccaccucgacgagcugaccaccacccuggaaagcaugacggaggaccugaaccucgacagcccgcuaacgcccgagcugaacgaaauccuggacaccuuccucaacgacgaaugccugcugcacgccaugcacaucagcaccggacugagcaucuucgacacgagccuguucagcggaggaaaacggccagccgcaaccaagaaggccggacaagccaagaagaagaaggggagcuacccguacgacgugccagacuacgcaugagcggccgcuuaauuaagcugccuucugcggggcuugccuucuggccaugcccuucuucucucccuugcaccuguaccucuuggucuuugaauaaagccugaguaggaagucuagaaaaaaaaaaaaaaaaaaaaaaaaaaaaaaaaaaaaaaaaaaaaaaaaaaaaaaaaaaaaaaaaaaaaaaaaaaaaaaaaaaaaaaaaaaaaaaaaaaaaaaaaaaaaaaaaaa

SEQ ID NO: 166 - protein, 888 aa, Artificial Sequence
  source: /note="Description of Artificial Sequence: Synthetic polypeptide"
MAPKKKRKVGIHGVPAAGSSGSLEPGEKPYKCPECGKSFSQRAHLERHQRTHTGEKPYKCPECGKSFSQLAHLRAHQRTHTGEKPYKCPECGKSFSSKKHLAEHQRTHTGEKPYKCPECGKSFSTTGALTEHQRTHTGEKPYKCPECGKSFSTSGNLVRHQRTHTGEKPYKCPECGKSFSQSGDLRRHQRTHTGEKPYKCPECGKSFSTSHSLTEHQRTHTGEKPTGKKTSASGSGGGSGGIFKPEELRQALMPTLEALYRQDPESLPFRQPVDPQLLGIPDYFDIVKSPMDLSTIKRKLDTGQYQEPWQYVDDIWLMFNNAWLYNRKTSRVYKYCSKLSEVFEQEIDPVMQSLGYCCGRKLEFSPQTLCCYGKQLCTIPRDATYYSYQNRYHFCEKCFNEIQGESVSLGDDPSQPQTTINKEQFSKRKNDTLDPELFVECTECGRKMHQICVLHHEIIWPAGFVCDGCLKKSARTRKENKFSAKRLPSTRLGTFLENRVNDFLRRQNHPESGEVTVRVVHASDKTVEVKPGMKARFVDSGEMAESFPYRTKALFAFEEIDGVDLCFFGMHVQEYGSDCPPPNQRRVYISYLDSVHFFRPKCLRTAVYHEILIGYLEYVKKLGYTTGHIWACPPSEGDDYIFHCHPPDQKIPKPKRLQEWYKKMLDKAVSERIVHDYKDIFKQATEDRLTSAKELPYFEGDFWPNVLEESIKELEQEEEERKREENTSNESTDVTKGDSKNAKKKNNKKTSKNKSSLSRGNKKKPGMPNVSNDLSQKLYATMEKHKEVFFVIRLIAGPAANSLPPIVDPDPLIPCDLMDGRDAFLTLARDKHLEFSSLRRAQWSTMCMLVELHTQSQDSGGKRPAATKKAGQAKKKKGSYPYDVPDYA

SEQ ID NO: 167 - RNA, 2908 nt, Artificial Sequence
  source: /note="Description of Artificial Sequence: Synthetic polynucleotide"
aggaaauaagagagaaaagaagaguaagaagaaauauaagagccaccauggcccccaagaagaagcggaaggugggcauccacggcgugcccgccgccggcagcagcggaucccucgaaccgggcgaaaagccguauaagugcccggaaugcggcaagaguuuuagccagcgcgcccaucuggaacgucaccagcguacccauaccggugaaaagccauauaaaugcccagaaugugguaaaagcuuuagucagcuggcccaucugcgcgcccaccaacguacgcacacgggcgagaagccguacaaaugcccagaaugcgguaaaagcuucagcagcaaaaagcaucuggcggaacaucaacguacccacaccggcgagaaaccauacaagugcccggaaugcgguaaaagcuucagcaccaccggugcgcugacggagcaucagcgcacccacacgggcgaaaaaccguauaaguguccggaguguggcaaaaguuuuaguaccagcggcaaucuggugcgccaucaacguacgcauaccggcgagaagccauauaaauguccagaguguggcaagagcuuuagccaaagcggugaucugcgucgccaccaacgcacgcacaccggcgaaaaaccauacaaauguccggaaugcgguaagaguuucagcacgagccauagucugaccgaacaucaacguacccauacgggugagaaaccaaccggcaagaaaaccagcgcuagcggcagcggcggcggcagcggcggcaucuucaagcccgaggagcugcggcaggcccugaugcccacccuggaggcccuguaccggcaggaccccgagagccugcccuuccggcagcccguggacccccagcugcugggcauccccgacuacuucgacaucgugaaaucccccauggaccugagcaccaucaagcggaagcuggacaccggccaguaccaggagcccuggcaguacguggacgacaucuggcugauguucaacaacgccuggcuguacaaccggaaaaccagccggguguacaaguacugcagcaagcugagcgagguguucgagcaggagaucgaccccgugaugcagagccugggcuacugcugcggccggaagcuggaguucagcccccagacccugugcugcuacggcaagcagcugugcaccaucccccgggacgccaccuacuacagcuaccagaaccgguaccacuucugcgagaagugcuucaacgagauccagggcgagagcgugagccugggcgacgaccccagccagccccagaccaccaucaacaaggagcaguucagcaagcggaagaacgacacccuggaccccgagcuguucguggagugcaccgagugcggccggaagaugcaccagaucugcgugcugcaccacgagaucaucuggcccgccggcuucgugugcgacggcugccugaagaaauccgcccggacccggaaggagaacaaguucagcgccaagcggcugcccagcacccggcugggcaccuuccuggagaaccgggugaacgacuuccugcggcggcagaaccaccccgagagcggcgaggugaccgugcggguggugcacgccagcgacaagaccguggaggugaagcccggcaugaaggcccgguucguggacagcggcgagauggccgagagcuuccccuaccggaccaaggcccuguucgccuucgaggagaucgacggcguggaccugugcuucuucggcaugcacgugcaggaguacggcagcgacugccccccccccaaccagcggcggguguacaucagcuaccuggacagcgugcacuucuuccggcccaagugccugcggaccgccguguaccacgagauccugaucggcuaccuggaguacgugaagaagcugggcuacaccaccggccacaucugggccugcccccccagcgagggcgacgacuacaucuuccacugccacccccccgaccagaagauccccaagcccaagcggcugcaggagugguacaagaagaugcuggacaaggccgugagcgagcggaucgugcacgacuacaaggacaucuucaagcaggccaccgaggaccggcugaccagcgccaaggagcugcccuacuucgagggcgacuucuggcccaacgugcuggaggagagcaucaaggagcuggagcaggaggaggaggagcggaagcgggaggagaacaccagcaacgagagcaccgacgugaccaagggcgacagcaagaacgccaagaagaagaacaacaagaaaaccagcaagaacaagagcagccugagccggggcaacaagaagaagcccggcaugcccaacgugagcaacgaccugagccagaagcuguacgccaccauggagaagcacaaggagguguucuucgugauccggcugaucgccggccccgccgccaacagccugccccccaucguggaccccgacccccugauccccugcgaccugauggacggccgggacgccuuccugacccuggcccgggacaagcaccuggaguucagcagccugcggcgggcccaguggagcaccaugugcaugcugguggagcugcacacccagagccaggacagcggcggcaagcggcccgccgccaccaagaaggccggccaggccaagaagaagaagggcagcuaccccuacgacgugcccgacuacgccugagcggccgcuuaauuaagcugccuucugcggggcuugccuucuggccaugcccuucuucucucccuugcaccuguaccucuuggucuuugaauaaagccugaguaggaagucuagaaaaaaaaaaaaaaaaaaaaaaaaaaaaaaaaaaaaaaaaaaaaaaaaaaaaaaaaaaaaaaaaaaaaaaaaaaaaaaaa

SEQ ID NO: 168 - protein, 888 aa, Artificial Sequence
  source: /note="Description of Artificial Sequence: Synthetic polypeptide"
MAPKKKRKVGIHGVPAAGSSGSLEPGEKPYKCPECGKSFSRSDHLTNHQRTHTGEKPYKCPECGKSFSTSGSLVRHQRTHTGEKPYKCPECGKSFSQAGHLASHQRTHTGEKPYKCPECGKSFSRSDKLTEHQRTHTGEKPYKCPECGKSFSTSGNLTEHQRTHTGEKPYKCPECGKSFSQSSNLVRHQRTHTGEKPYKCPECGKSFSTHLDLIRHQRTHTGEKPTGKKTSASGSGGGSGGIFKPEELRQALMPTLEALYRQDPESLPFRQPVDPQLLGIPDYFDIVKSPMDLSTIKRKLDTGQYQEPWQYVDDIWLMFNNAWLYNRKTSRVYKYCSKLSEVFEQEIDPVMQSLGYCCGRKLEFSPQTLCCYGKQLCTIPRDATYYSYQNRYHFCEKCFNEIQGESVSLGDDPSQPQTTINKEQFSKRKNDTLDPELFVECTECGRKMHQICVLHHEIIWPAGFVCDGCLKKSARTRKENKFSAKRLPSTRLGTFLENRVNDFLRRQNHPESGEVTVRVVHASDKTVEVKPGMKARFVDSGEMAESFPYRTKALFAFEEIDGVDLCFFGMHVQEYGSDCPPPNQRRVYISYLDSVHFFRPKCLRTAVYHEILIGYLEYVKKLGYTTGHIWACPPSEGDDYIFHCHPPDQKIPKPKRLQEWYKKMLDKAVSERIVHDYKDIFKQATEDRLTSAKELPYFEGDFWPNVLEESIKELEQEEEERKREENTSNESTDVTKGDSKNAKKKNNKKTSKNKSSLSRGNKKKPGMPNVSNDLSQKLYATMEKHKEVFFVIRLIAGPAANSLPPIVDPDPLIPCDLMDGRDAFLTLARDKHLEFSSLRRAQWSTMCMLVELHTQSQDSGGKRPAATKKAGQAKKKKGSYPYDVPDYA

SEQ ID NO: 169 - RNA, 2908 nt, Artificial Sequence
  source: /note="Description of Artificial Sequence: Synthetic polynucleotide"
aggaaauaagagagaaaagaagaguaagaagaaauauaagagccaccauggcccccaagaagaagcggaaggugggcauccacggcgugcccgccgccggcagcagcggaucccuggaaccgggcgagaagccauacaagugcccagagugcggcaaaagcuucagccgcagcgaccaucugaccaaucaccaacgcacccauaccggugagaagccguacaaaugcccagagugcgguaagagcuuuaguaccaguggcagucugguucgucaucagcgcacgcacacgggcgaaaaaccauacaaaugcccggagugcggcaaaagcuuuagccaagccggucaucuggcgagccaucaacguacgcacaccggcgagaagccguauaaauguccggagugcgguaagagcuuuagccguagcgauaaacugaccgaacaccaacguacgcauacgggcgagaaaccauauaaauguccagaguguggcaagaguuucagcaccagcggcaaucugaccgagcaucaacguacccauaccggugaaaagccauauaaauguccagaaugcgguaagaguuuuagucagagcaguaaucuggugcgccaucagcguacccacacgggugagaaaccauauaaguguccggaaugcggcaagaguuuuagcacccaucuggaucugauccgucaucagcgcacccacaccggugaaaaaccaaccggcaagaaaaccagugcuagcggcagcggcggcggcagcggcggcaucuucaagcccgaggagcugcggcaggcccugaugcccacccuggaggcccuguaccggcaggaccccgagagccugcccuuccggcagcccguggacccccagcugcugggcauccccgacuacuucgacaucgugaaaucccccauggaccugagcaccaucaagcggaagcuggacaccggccaguaccaggagcccuggcaguacguggacgacaucuggcugauguucaacaacgccuggcuguacaaccggaaaaccagccggguguacaaguacugcagcaagcugagcgagguguucgagcaggagaucgaccccgugaugcagagccugggcuacugcugcggccggaagcuggaguucagcccccagacccugugcugcuacggcaagcagcugugcaccaucccccgggacgccaccuacuacagcuaccagaaccgguaccacuucugcgagaagugcuucaacgagauccagggcgagagcgugagccugggcgacgaccccagccagccccagaccaccaucaacaaggagcaguucagcaagcggaagaacgacacccuggaccccgagcuguucguggagugcaccgagugcggccggaagaugcaccagaucugcgugcugcaccacgagaucaucuggcccgccggcuucgugugcgacggcugccugaagaaauccgcccggacccggaaggagaacaaguucagcgccaagcggcugcccagcacccggcugggcaccuuccuggagaaccgggugaacgacuuccugcggcggcagaaccaccccgagagcggcgaggugaccgugcggguggugcacgccagcgacaagaccguggaggugaagcccggcaugaaggcccgguucguggacagcggcgagauggccgagagcuuccccuaccggaccaaggcccuguucgccuucgaggagaucgacggcguggaccugugcuucuucggcaugcacgugcaggaguacggcagcgacugccccccccccaaccagcggcggguguacaucagcuaccuggacagcgugcacuucuuccggcccaagugccugcggaccgccguguaccacgagauccugaucggcuaccuggaguacgugaagaagcugggcuacaccaccggccacaucugggccugcccccccagcgagggcgacgacuacaucuuccacugccacccccccgaccagaagauccccaagcccaagcggcugcaggagugguacaagaagaugcuggacaaggccgugagcgagcggaucgugcacgacuacaaggacaucuucaagcaggccaccgaggaccggcugaccagcgccaaggagcugcccuacuucgagggcgacuucuggcccaacgugcuggaggagagcaucaaggagcuggagcaggaggaggaggagcggaagcgggaggagaacaccagcaacgagagcaccgacgugaccaagggcgacagcaagaacgccaagaagaagaacaacaagaaaaccagcaagaacaagagcagccugagccggggcaacaagaagaagcccggcaugcccaacgugagcaacgaccugagccagaagcuguacgccaccauggagaagcacaaggagguguucuucgugauccggcugaucgccggccccgccgccaacagccugccccccaucguggaccccgacccccugauccccugcgaccugauggacggccgggacgccuuccugacccuggcccgggacaagcaccuggaguucagcagccugcggcgggcccaguggagcaccaugugcaugcugguggagcugcacacccagagccaggacagcggcggcaagcggcccgccgccaccaagaaggccggccaggccaagaagaagaagggcagcuaccccuacgacgugcccgacuacgccugagcggccgcuuaauuaagcugccuucugcggggcuugccuucuggccaugcccuucuucucucccuugcaccuguaccucuuggucuuugaauaaagccugaguaggaagucuagaaaaaaaaaaaaaaaaaaaaaaaaaaaaaaaaaaaaaaaaaaaaaaaaaaaaaaaaaaaaaaaaaaaaaaaaaaaaaaaa

SEQ ID NO: 170 - protein, 1828 aa, Artificial Sequence
  source: /note="Description of Artificial Sequence: Synthetic polypeptide"
MAPKKKRKVGIHGVPAAGSSGSLEPGEKPYKCPECGKSFSRSDHLTNHQRTHTGEKPYKCPECGKSFSTSGSLVRHQRTHTGEKPYKCPECGKSFSQAGHLASHQRTHTGEKPYKCPECGKSFSRSDKLTEHQRTHTGEKPYKCPECGKSFSTSGNLTEHQRTHTGEKPYKCPECGKSFSQSSNLVRHQRTHTGEKPYKCPECGKSFSTHLDLIRHQRTHTGEKPTGKKTSASGSGGGSGGDALDDFDLDMLGSDALDDFDLDMLGSDALDDFDLDMLGSDALDDFDLDMLGSGSGSQYLPDTDDRHRIEEKRKRTYETFKSIMKKSPFSGPTDPRPPPRRIAVPSRSSASVPKPAPQPYPFTSSLSTINYDEFPTMVFPSGQISQASALAPAPPQVLPQAPAPAPAPAMVSALAQAPAPVPVLAPGPPQAVAPPAPKPTQAGEGTLSEALLQLQFDDEDLGALLGNSTDPAVFTDLASVDNSEFQQLLNQGIPVAPHTTEPMLMEYPEAITRLVTGAQRPPDPAPAPLGAPGLPNGLLSGDEDFSSIADMDFSALLGSGSGSRDSREGMFLPKPEAGSAISDVFEGREVCQPKRIRPFHPPGSPWANRPLPASLAPTPTGPVHEPVGSLTPAPVPQPLDPAPAVTPEASHLLEDPDEETSQAVKALREMADTVIPQKEEAAICGQMDLSHPPPRGHLDELTTTLESMTEDLNLDSPLTPELNEILDTFLNDECLLHAMHISTGLSIFDTSLFGSGSGSDALDDFDLDMLGSDALDDFDLDMLGSDALDDFDLDMLGSDALDDFDLDMLGSGSGSQYLPDTDDRHRIEEKRKRTYETFKSIMKKSPFSGPTDPRPPPRRIAVPSRSSASVPKPAPQPYPFTSSLSTINYDEFPTMVFPSGQISQASALAPAPPQVLPQAPAPAPAPAMVSALAQAPAPVPVLAPGPPQAVAPPAPKPTQAGEGTLSEALLQLQFDDEDLGALLGNSTDPAVFTDLASVDNSEFQQLLNQGIPVAPHTTEPMLMEYPEAITRLVTGAQRPPDPAPAPLGAPGLPNGLLSGDEDFSSIADMDFSALLGSGSGSRDSREGMFLPKPEAGSAISDVFEGREVCQPKRIRPFHPPGSPWANRPLPASLAPTPTGPVHEPVGSLTPAPVPQPLDPAPAVTPEASHLLEDPDEETSQAVKALREMADTVIPQKEEAAICGQMDLSHPPPRGHLDELTTTLESMTEDLNLDSPLTPELNEILDTFLNDECLLHAMHISTGLSIFDTSLFGSGSGSDALDDFDLDMLGSDALDDFDLDMLGSDALDDFDLDMLGSDALDDFDLDMLGSGSGSQYLPDTDDRHRIEEKRKRTYETFKSIMKKSPFSGPTDPRPPPRRIAVPSRSSASVPKPAPQPYPFTSSLSTINYDEFPTMVFPSGQISQASALAPAPPQVLPQAPAPAPAPAMVSALAQAPAPVPVLAPGPPQAVAPPAPKPTQAGEGTLSEALLQLQFDDEDLGALLGNSTDPAVFTDLASVDNSEFQQLLNQGIPVAPHTTEPMLMEYPEAITRLVTGAQRPPDPAPAPLGAPGLPNGLLSGDEDFSSIADMDFSALLGSGSGSRDSREGMFLPKPEAGSAISDVFEGREVCQPKRIRPFHPPGSPWANRPLPASLAPTPTGPVHEPVGSLTPAPVPQPLDPAPAVTPEASHLLEDPDEETSQAVKALREMADTVIPQKEEAAICGQMDLSHPPPRGHLDELTTTLESMTEDLNLDSPLTPELNEILDTFLNDECLLHAMHISTGLSIFDTSLFGSGSGSGGGGSGKRPAATKKAGQAKKKKGSYPYDVPDYA

SEQ ID NO: 171 - RNA, 5762 nt, Artificial Sequence
  source: /note="Description of Artificial Sequence: Synthetic polynucleotide"
aggaaauaagagagaaaagaagaguaagaagaaauauaagagccaccauggcccccaagaagaagcgcaaggucgggauccacggagucccggcagcaggauccucaggcucacuggaaccgggggaaaaacccuacaagugcccggaaugcggcaagagcuucucgcgguccgaccaccugaccaaccaccagagaacacacaccggcgagaagccguacaagugccccgagugcgggaagucguucagcaccucaggaucgcugguccgccaccaacggacccacacaggagaaaagcccuacaagugcccggaaugcggaaagagcuucagccaagccgggcaccuggcaucacaccagcgaacccacaccggagaaaaaccguacaaaugcccggagugcggcaaauccuucucgcgcuccgacaagcugaccgaacaccaaaggacacacaccggagagaagcccuacaagugcccggaaugcggaaaaucguucucgaccucggggaaccugaccgagcaccaacgcacccacaccggcgaaaaaccguacaaaugcccggagugcggaaagucguucucacaauccuccaaccugguccggcaccaaagaacgcacacaggggaaaagccguacaagugccccgaaugcgggaaauccuucagcacccaccuggaccucauccggcaccagaggacccacaccggggagaagccgaccggcaaaaagaccucagcgagcggauccggaggaggaucagggggggacgcccucgacgacuucgaucuggacaugcuggguagcgacgcccuggaugacuucgaccucgauaugcugggauccgacgcacuugacgauuuugacuuggacaugcucggcuccgacgcucuggacgauuucgaccuugacaugcuuggcuccggcucaggaucccaguaccuccccgauaccgacgacagacaccggaucgaagaaaagcgcaagcgcaccuacgaaaccuucaagucgauuaugaagaagucgccuuucuccgggccgacugauccuagaccuccaccaagaagaaucgcggugccguccagaucguccgcgucagugccgaaaccagcaccgcagccguauccguucacuuccucccuuuccaccauuaacuacgacgaauuccccacgaugguguucccuagcggacagauuucgcaagccagcgcucuugcuccugcgccuccucaagugcugccucaggccccugcuccugcuccugcacccgccaugguguccgcccuggcucaagcuccagccccugugccuguccuggccccuggaccaccucaggcaguagcaccucccgcucccaagcccacccaagcgggagagggcacucuuuccgaggcccugcugcaacugcaguucgacgacgaggaccugggggcacuucugggaaauagcaccgauccggccguguucaccgaccuggccagcgucgacaacucagaguuccagcagcuccucaaccaagggauuccgguggccccucacacgaccgagccgauguugauggaauacccggaagccaucacccgccuagugaccggagcgcaaagaccgccugacccagcuccugccccuuugggagccccuggauugcccaacggacuccuguccggcgacgaggauuucucguccaucgccgauauggacuucucggcccuguuggguagcgguucggguagucgcgauagccgggaaggaauguuccugccgaagccugaggccgggucugccauuagcgauguguuugaaggacgggaagucugucagcccaagcggauucgcccauuccaccccccuggaucgccuugggccaacaggccacuccccgcuucgcuugcgccgacuccuaccgggccagugcacgaaccugugggaucccugacuccggcuccugugccacagccucuggauccggcucccgcugucaccccugaggccucacaccuucucgaggaccccgacgaagagacuucccaggccgugaaagcgcuccgggagauggcggacacugugaucccgcaaaaggaagaagccgcgauuugcggccagauggaccugucgcauccuccaccacgcggucaccucgaugaacugacaacuacccuggagucgaugaccgaggaccugaaccuggacuccccgcugacuccugagcucaacgaaauccuggacacuuuccugaacgaugagugccugcugcacgccaugcacaucuccacugggcugucaaucuucgacaccagccuguucggcuccggauccgguuccgacgcacuggacgauuuugaccuggauauguuggggagcgacgcacuggacgauuuugaucuggauaugcugggauccgacgcgcucgacgauuucgaccuggacaugcucggaucggacgcccuggacgacuucgaccucgauaugcuuggaucaggguccggcucacaauaucugccggacacugaugaccggcauagaaucgaagaaaagcgcaagcggaccuacgaaacuuucaagagcaucaugaagaaaucgccguucucugggccgacugauccuaggccgccuccgagaaggaucgccgugcccucaagauccuccgccucugugcccaagccggcuccacagccuuaccccuucacuucgucgcugagcaccaucaacuacgacgaauucccgaccauggucuuuccgagcggccagauuucccaggcguccgccuuggcuccugcaccaccccaagugcugccucaggcgccugcaccagcuccagccccugccaugguguccgcgcuggcacaagccccugcaccugugccagugcucgcaccugguccuccgcaagcuguggcaccuccugcgccuaagccgacucaggccggagaagggacccugucagaggcccugcugcaacugcaguuugacgaugaggaucugggagcccuucugggcaacucgacugaccccgccguguucaccgaccuggcguccguggauaacuccgaguuccagcagcuccucaaccaagggauuccugucgccccgcacacuaccgagccgaugcugauggaguacccggaggccaucacccggcuugugacgggugcucagaggccuccagauccggcuccagcaccguuaggagcccccggacuuccuaacggacugcuguccggcgacgaggacuucuccagcaucgccgacauggauuuuuccgcgcuguugggaucggguuccggcucaagagacagccgcgagggaauguuccucccgaaaccagaggccggcucagccaucagcgacguguucgaagggcgcgaagucugccagcccaagcggauccgcccguuucauccgccuggaucaccgugggccaacagaccccuacccgcaagcuuagccccuacccccacuggcccuguccacgaaccugugggcucccugacacccgcuccugugccacaaccucuggaccccgcaccagcagucacacccgaagccagccaccuccuugaggauccggacgaggagacuagccaggccgugaaggcgcuccgcgaaauggccgacacugugaucccucaaaaggaagaggcggccauuuguggacagauggacuugucccacccgccuccaagaggucaccuggacgaacuuaccaccacgcucgaauccaugacugaggaucugaaccuggauuccccgcucacucccgagcucaacgaaauccuugauaccuuccuuaacgacgagugucuccugcaugccaugcacaucuccaccggacugagcauuuucgacaccucgcuguucgguuccggaagcggcucagacgcgcuggaugacuucgauuuggacaugcuuggcagcgaugcccuggaugauuucgaccuggacaugcucgggucggaugcgcuggacgacuucgaucucgauauguugggcuccgaugcccucgacgacuuugaccucgacaugcugggcucgggcucaggaucccaauaccucccggauaccgacgacaggcaucgcauugaggaaaagcggaagcgcaccuaugaaaccuucaaguccauuaugaagaagucgcccuuuuccggaccgacugacccucggccuccuccucgacgaauugccgucccaucucggucauccgccucgguccccaagccagcaccgcagccuuauccguucaccuccucucuguccaccauuaacuacgaugaauuccccaccaugguguucccgucgggacagaucucccaagccucagcccuugcuccugccccuccacaaguccugccccaagcaccagcgccugcuccugcacccgcgaugguguccgcacuggcgcaagcuccugccccugugccugugcuggcuccuggaccaccccaggcaguagcaccuccagccccgaagcccacucaggcuggagagggaacccugagcgaagcgcugcugcagcuccaguucgacgacgaagaucugggugcccugcugggaaauuccaccgauccggcgguguucacagaccuggccuccguggacaacuccgaauuccagcaguuguugaaccagggcauuccuguggccccccacaccacugagccaaugcucauggaauaccccgaggccauuaccagacucgugaccggagcccaaaggccuccggauccagcgccagcuccguugggagcuccgggauugccgaacgggcugcugucgggagaugaagauuucuccucaaucgccgauauggacuucuccgcgcugcuggguucggguucgggaucgcgcgauagccgggagggcauguuccuaccgaagccugaggccggaagcgccaucuccgauguguucgagggcagagaagucugucagccuaagcgcauucgcccguuccacccuccuggaucgcccugggccaaucggccacugccugcgucccucgcuccaacgccgaccggaccugugcacgaaccggucggcucacugacuccagcucccgucccacaaccgcucgacccugcucccgcuguuacccccgaagccucccauuugcuggaagaucccgaugaggaaacuucccaggccgucaaggcccugcgggagauggcagacaccgugauaccccagaaggaagaagcugccaucugcgggcagauggaccugucccauccuccuccacgcggacacuuggacgagcugaccacuacucuggaguccaugaccgaggaccugaaccuugacucgccuuugaccccugaacugaacgaaauucuggacaccuuccugaaugacgagugccuccugcacgcgaugcacaucagcaccggacuguccaucuucgacacuucccucuuugggagcggguccggaucaggcgguggugguagcgggaaacggccagcagcgaccaagaaggccggacaggccaagaagaagaaaggcucauaccccuacgacgugccggacuacgcaugagcggccgcuuaauuaagcugccuucugcggggcuugccuucuggccaugcccuucuucucucccuugcaccuguaccucuuggucuuugaauaaagccugaguaggaagucuagaaaaaaaaaaaaaaaaaaaaaaaaaaaaaaaaaaaaaaaaaaaaaaaaaaaaaaaaaaaaaaaaaaaaaaaaaaaaaaaaaaaaaaaaaaaaaaaaaaaaaaaaaaaaaaaaaa

SEQ ID NO: 172 - protein, 2996 aa, Artificial Sequence
  source: /note="Description of Artificial Sequence: Synthetic polypeptide"
MAPKKKRKVGIHGVPAADKKYSIGLAIGTNSVGWAVITDEYKVPSKKFKVLGNTDRHSIKKNLIGALLFDSGETAEATRLKRTARRRYTRRKNRICYLQEIFSNEMAKVDDSFFHRLEESFLVEEDKKHERHPIFGNIVDEVAYHEKYPTIYHLRKKLVDSTDKADLRLIYLALAHMIKFRGHFLIEGDLNPDNSDVDKLFIQLVQTYNQLFEENPINASGVDAKAILSARLSKSRRLENLIAQLPGEKKNGLFGNLIALSLGLTPNFKSNFDLAEDAKLQLSKDTYDDDLDNLLAQIGDQYADLFLAAKNLSDAILLSDILRVNTEITKAPLSASMIKRYDEHHQDLTLLKALVRQQLPEKYKEIFFDQSKNGYAGYIDGGASQEEFYKFIKPILEKMDGTEELLVKLNREDLLRKQRTFDNGSIPHQIHLGELHAILRRQEDFYPFLKDNREKIEKILTFRIPYYVGPLARGNSRFAWMTRKSEETITPWNFEEVVDKGASAQSFIERMTNFDKNLPNEKVLPKHSLLYEYFTVYNELTKVKYVTEGMRKPAFLSGEQKKAIVDLLFKTNRKVTVKQLKEDYFKKIECFDSVEISGVEDRFNASLGTYHDLLKIIKDKDFLDNEENEDILEDIVLTLTLFEDREMIEERLKTYAHLFDDKVMKQLKRRRYTGWGRLSRKLINGIRDKQSGKTILDFLKSDGFANRNFMQLIHDDSLTFKEDIQKAQVSGQGDSLHEHIANLAGSPAIKKGILQTVKVVDELVKVMGRHKPENIVIEMARENQTTQKGQKNSRERMKRIEEGIKELGSQILKEHPVENTQLQNEKLYLYYLQNGRDMYVDQELDINRLSDYDVAAIVPQSFLKDDSIDNKVLTRSDKARGKSDNVPSEEVVKKMKNYWRQLLNAKLITQRKFDNLTKAERGGLSELDKAGFIKRQLVETRQITKHVAQILDSRMNTKYDENDKLIREVKVITLKSKLVSDFRKDFQFYKVREINNYHHAHDAYLNAVVGTALIKKYPKLESEFVYGDYKVYDVRKMIAKSEQEIGKATAKYFFYSNIMNFFKTEITLANGEIRKRPLIETNGETGEIVWDKGRDFATVRKVLSMPQVNIVKKTEVQTGGFSKESILPKRNSDKLIARKKDWDPKKYGGFDSPTVAYSVLVVAKVEKGKSKKLKSVKELLGITIMERSSFEKNPIDFLEAKGYKEVKKDLIIKLPKYSLFELENGRKRMLASAGELQKGNELALPSKYVNFLYLASHYEKLKGSPEDNEQKQLFVEQHKHYLDEIIEQISEFSKRVILADANLDKVLSAYNKHRDKPIREQAENIIHLFTLTNLGAPAAFKYFDTTIDRKRYTSTKEVLDATLIHQSITGLYETRIDLSQLGGDSGGKRPAATKKAGQAKKKKSGGGGSDALDDFDLDMLGSDALDDFDLDMLGSDALDDFDLDMLGSDALDDFDLDMLGSGSGSQYLPDTDDRHRIEEKRKRTYETFKSIMKKSPFSGPTDPRPPPRRIAVPSRSSASVPKPAPQPYPFTSSLSTINYDEFPTMVFPSGQISQASALAPAPPQVLPQAPAPAPAPAMVSALAQAPAPVPVLAPGPPQAVAPPAPKPTQAGEGTLSEALLQLQFDDEDLGALLGNSTDPAVFTDLASVDNSEFQQLLNQGIPVAPHTTEPMLMEYPEAITRLVTGAQRPPDPAPAPLGAPGLPNGLLSGDEDFSSIADMDFSALLGSGSGSRDSREGMFLPKPEAGSAISDVFEGREVCQPKRIRPFHPPGSPWANRPLPASLAPTPTGPVHEPVGSLTPAPVPQPLDPAPAVTPEASHLLEDPDEETSQAVKALREMADTVIPQKEEAAICGQMDLSHPPPRGHLDELTTTLESMTEDLNLDSPLTPELNEILDTFLNDECLLHAMHISTGLSIFDTSLFGSGSGSDALDDFDLDMLGSDALDDFDLDMLGSDALDDFDLDMLGSDALDDFDLDMLGSGSGSQYLPDTDDRHRIEEKRKRTYETFKSIMKKSPFSGPTDPRPPPRRIAVPSRSSASVPKPAPQPYPFTSSLSTINYDEFPTMVFPSGQISQASALAPAPPQVLPQAPAPAPAPAMVSALAQAPAPVPVLAPGPPQAVAPPAPKPTQAGEGTLSEALLQLQFDDEDLGALLGNSTDPAVFTDLASVDNSEFQQLLNQGIPVAPHTTEPMLMEYPEAITRLVTGAQRPPDPAPAPLGAPGLPNGLLSGDEDFSSIADMDFSALLGSGSGSRDSREGMFLPKPEAGSAISDVFEGREVCQPKRIRPFHPPGSPWANRPLPASLAPTPTGPVHEPVGSLTPAPVPQPLDPAPAVTPEASHLLEDPDEETSQAVKALREMADTVIPQKEEAAICGQMDLSHPPPRGHLDELTTTLESMTEDLNLDSPLTPELNEILDTFLNDECLLHAMHISTGLSIFDTSLFGSGSGSDALDDFDLDMLGSDALDDFDLDMLGSDALDDFDLDMLGSDALDDFDLDMLGSGSGSQYLPDTDDRHRIEEKRKRTYETFKSIMKKSPFSGPTDPRPPPRRIAVPSRSSASVPKPAPQPYPFTSSLSTINYDEFPTMVFPSGQISQASALAPAPPQVLPQAPAPAPAPAMVSALAQAPAPVPVLAPGPPQAVAPPAPKPTQAGEGTLSEALLQLQFDDEDLGALLGNSTDPAVFTDLASVDNSEFQQLLNQGIPVAPHTTEPMLMEYPEAITRLVTGAQRPPDPAPAPLGAPGLPNGLLSGDEDFSSIADMDFSALLGSGSGSRDSREGMFLPKPEAGSAISDVFEGREVCQPKRIRPFHPPGSPWANRPLPASLAPTPTGPVHEPVGSLTPAPVPQPLDPAPAVTPEASHLLEDPDEETSQAVKALREMADTVIPQKEEAAICGQMDLSHPPPRGHLDELTTTLESMTEDLNLDSPLTPELNEILDTFLNDECLLHAMHISTGLSIFDTSLFGSGSGSGGGGSGKRPAATKKAGQAKKKKGSYPYDVPDYA

SEQ ID NO: 173 - RNA, 9266 nt, Artificial Sequence
  source: /note="Description of Artificial Sequence: Synthetic polynucleotide"
aggaaauaagagagaaaagaagaguaagaagaaauauaagagccaccauggcccccaagaagaagaggaaagucggaauucacggagugccugcagcggauaagaaguacuccaucggacucgcaaucggcaccaacuccgugggaugggccgugaucaccgacgaguacaaagugccgucuaaaaaguucaaggugcucggaaacaccgauaggcacuccaucaagaagaaccugauuggggcccugcuguuugauuccggggaaacggcagaggccacucgccucaagagaacugcacgccggcgguacacucgucggaagaaccgcaucugcuaucugcaagagauuuucuccaacgagauggccaaaguggacgacucauucuuccaccgccucgaagaaucuuuccuggucgaagaggacaagaagcacgaacgccaccccauuuucgggaacauugucgacgaaguggcguaccacgagaaguaccccaccaucuaccaucuccgcaagaagcucguggauuccacugacaaggccgaucucagacugaucuaccuggcgcuugcucacaugauuaaguucaggggucacuuccugauugagggagaucugaaccccgacaacagcgaugucgauaagcuguucauucagcuggugcagaccuacaaucagcuguucgaagagaaccccauuaaugccuccggugucgaugccaaggccauccuguccgcacggcugagcaaaucgcgcaggcuggaaaaccugaucgcccagcugccuggagagaaaaagaacggacuguucggcaaccuuaucgcgcuguccuugggacugaccccgaacuucaagagcaacuucgacuuggccgaggaugccaagcugcaacugucgaaggacaccuacgacgaugaccucgauaaucugcuggcccaaauuggcgaucaauaugcagaccuguuccuugccgcaaagaaccugagcgacgcgauucuccugucggacauccugcgggucaacaccgagaucaccaaggcaccguuguccgccuccaugauuaagcgauacgacgaacaccaucaggaccugacucugcugaaggcccugguccgccaacagcugcccgagaaguacaaggagaucuucuucgaccaauccaagaauggauacgcuggauacaucgauggcggugccagccaagaggaauucuacaaguucaucaaaccgauacuggagaagauggacggcacagaggaacuccuggucaagcugaaccgggaggaucugcugcggaagcagaggaccuucgacaacggguccaucccgcaccagauucaccugggcgaacugcaugcgauccugcgacggcaggaggacuucuacccauuccugaaggauaacagagagaaaaucgagaagauccucaccuuccggaucccguauuacgugggaccccuggcuaggggcaacagccgcuucgccuggaugacccgcaaguccgaggaaacuauuacucccuggaacuucgaggaaguaguggacaaaggcgccagcgcgcaauccuucaucgaacggaugaccaacuucgacaagaacuugccgaacgaaaagguguugccgaagcauucucugcuguaugaguacuucacuguguacaacgaacugaccaaagugaaauacgucacagaaggaaugagaaagccagccuuccuuagcggggagcagaagaaggccauuguggaccuccuguucaaaaccaaccgaaaggucaccgugaagcaacugaaggaggauuacuucaagaagaucgaauguuucgacucgguggagaucuccgggguggaggaucgcuucaaugccucccugggcaccuaccaugaucugcucaagaucaucaaggauaaggacuuccucgacaacgaagagaacgaagauauccuggaggauaucgugcucacccucacccuguucgaggauagagagaugaucgaagagagacuuaagaccuacgcccaccuguucgacgacaaagucaugaagcagcugaagcggaggagguacacuggauggggcagacugucccgcaagcucaucaacgggauucgagauaagcaguccggaaagacaauccucgacuuccugaaauccgacggauuugccaacagaaacuucaugcagcugauccaugaugacucgcugaccuucaaggaggauauucagaaggcucaagugucgggacagggcgauucccuccacgagcacaucgccaaccucgcgggauccccugcaaucaagaaggguauccugcagaccgugaaggucguggacgaauuagugaaagucaugggccggcauaagccugaaaacaucgugaucgagauggcccgggaaaaccagaccacccaaaagggacagaagaacucccgcgagcgcaugaagcggaucgaggaagggaucaaggagcuggggucgcagaucuuaaaggagcaccccguggaaaauacucagcugcaaaacgaaaagcuguaccuguauuacuugcaaaacggaagagauauguacguggaucaagaauuggacaucaacagacucuccgacuacgacgucgcugcgauugugccacaaagcuuucuuaaggacgacuccaucgacaacaagguccucacccgguccgauaaggcccgcggaaaguccgacaacgugccaagcgaagagguggucaagaagaugaagaauuacuggcggcagcugcugaacgccaagcugauaacucagcggaaguucgacaaccugacuaaggcugagcggggaggacucucggaacuggacaaggcuggguucaucaagagacaguugguggaaacccgccaaauuaccaaacacguggcgcagauccuggacucacgcaugaacacuaaguacgacgagaacgauaagcugauucgggaagucaaagugaucacccugaaguccaagcucgucagcgacuuccggaaggauuuccaguuuuacaagguccgcgaaauuaacaacuaccaucaugcucacgacgccuacuugaacgccguggucgguaccgcccugaucaagaaguauccaaagcucgaguccgaguuuguguacggcgacuacaaggucuacgacgugcgcaagaugaucgcgaaauccgagcaggaaaucggaaaggccaccgccaaguacuucuucuacucaaacauuaugaacuucuucaagaccgaaaucacucuggcgaacggcgaaauccggaaaagaccgcugaucgagacuaacggcgaaaccggcgaaaucgugugggacaagggacgggacuucgccaccgugcgcaaggugcugucgaugccccaagugaacauugugaagaaaaccgaaguccagacuggcggcuucagcaaagaaucgauccugcccaagagaaacagcgacaagcugaucgcccgcaagaaggacugggaccccaagaaauacggcgguuucgacucacccacuguggccuacucgguccucguggucgccaaggucgagaagggcaaaagcaaaaagcuuaaaucggugaaggaacuucuggguaucacgaucauggaacgcuccuccuucgaaaagaaccccaucgacuuuuuggaagcaaagggauacaaggaagucaagaaggaccucaucaucaagcugccgaaguauagccucuucgaacuggagaacggucggaagagaaugcuggcuucagcgggagagcugcaaaagggaaacgagcuggcccuuccgagcaaauacgucaacuuucuguaccuggccucgcacuacgaaaagcucaagggaucacccgaggacaacgaacagaagcaacuguucguggaacagcauaagcauuaccuggaugagauuaucgaacagauuuccgaauucuccaagcgcgugauucuggccgacgccaaccuggacaagguccuuucagccuacaacaagcaccgggauaagccgauccgggaacaggcggaaaacaucauccaucuguucacguugacuaaucuuggagcaccagccgcguuuaaguacuuugacaccaccauugacaggaaacgguacacauccacgaaggaaguguuggaugcgacgcugauucaucagaguaucaccggacucuacgaaacgcggauugaccucagccaguugggaggggacuccggaggaaagaggccagccgccacuaagaaggcugggcaggccaagaagaaaaaguccgguggaggaggcucagacgcccucgacgacuucgaucuggacaugcuggguagcgacgcccuggaugacuucgaccucgauaugcugggauccgacgcacuugacgauuuugacuuggacaugcucggcuccgacgcucuggacgauuucgaccuugacaugcuuggcuccggcucaggaucccaguaccuccccgauaccgacgacagacaccggaucgaagaaaagcgcaagcgcaccuacgaaaccuucaagucgauuaugaagaagucgccuuucuccgggccgacugauccuagaccuccaccaagaagaaucgcggugccguccagaucguccgcgucagugccgaaaccagcaccgcagccguauccguucacuuccucccuuuccaccauuaacuacgacgaauuccccacgaugguguucccuagcggacagauuucgcaagccagcgcucuugcuccugcgccuccucaagugcugccucaggccccugcuccugcuccugcacccgccaugguguccgcccuggcucaagcuccagccccugugccuguccuggccccuggaccaccucaggcaguagcaccucccgcucccaagcccacccaagcgggagagggcacucuuuccgaggcccugcugcaacugcaguucgacgacgaggaccugggggcacuucugggaaauagcaccgauccggccguguucaccgaccuggccagcgucgacaacucagaguuccagcagcuccucaaccaagggauuccgguggccccucacacgaccgagccgauguugauggaauacccggaagccaucacccgccuagugaccggagcgcaaagaccgccugacccagcuccugccccuuugggagccccuggauugcccaacggacuccuguccggcgacgaggauuucucguccaucgccgauauggacuucucggcccuguuggguagcgguucggguagucgcgauagccgggaaggaauguuccugccgaagccugaggccgggucugccauuagcgauguguuugaaggacgggaagucugucagcccaagcggauucgcccauuccaccccccuggaucgccuugggccaacaggccacuccccgcuucgcuugcgccgacuccuaccgggccagugcacgaaccugugggaucccugacuccggcuccugugccacagccucuggauccggcucccgcugucaccccugaggccucacaccuucucgaggaccccgacgaagagacuucccaggccgugaaagcgcuccgggagauggcggacacugugaucccgcaaaaggaagaagccgcgauuugcggccagauggaccugucgcauccuccaccacgcggucaccucgaugaacugacaacuacccuggagucgaugaccgaggaccugaaccuggacuccccgcugacuccugagcucaacgaaauccuggacacuuuccugaacgaugagugccugcugcacgccaugcacaucuccacugggcugucaaucuucgacaccagccuguucggcuccggauccgguuccgacgcacuggacgauuuugaccuggauauguuggggagcgacgcacuggacgauuuugaucuggauaugcugggauccgacgcgcucgacgauuucgaccuggacaugcucggaucggacgcccuggacgacuucgaccucgauaugcuuggaucaggguccggcucacaauaucugccggacacugaugaccggcauagaaucgaagaaaagcgcaagcggaccuacgaaacuuucaagagcaucaugaagaaaucgccguucucugggccgacugauccuaggccgccuccgagaaggaucgccgugcccucaagauccuccgccucugugcccaagccggcuccacagccuuaccccuucacuucgucgcugagcaccaucaacuacgacgaauucccgaccauggucuuuccgagcggccagauuucccaggcguccgccuuggcuccugcaccaccccaagugcugccucaggcgccugcaccagcuccagccccugccaugguguccgcgcuggcacaagccccugcaccugugccagugcucgcaccugguccuccgcaagcuguggcaccuccugcgccuaagccgacucaggccggagaagggacccugucagaggcccugcugcaacugcaguuugacgaugaggaucugggagcccuucugggcaacucgacugaccccgccguguucaccgaccuggcguccguggauaacuccgaguuccagcagcuccucaaccaagggauuccugucgccccgcacacuaccgagccgaugcugauggaguacccggaggccaucacccggcuugugacgggugcucagaggccuccagauccggcuccagcaccguuaggagcccccggacuuccuaacggacugcuguccggcgacgaggacuucuccagcaucgccgacauggauuuuuccgcgcuguugggaucggguuccggcucaagagacagccgcgagggaauguuccucccgaaaccagaggccggcucagccaucagcgacguguucgaagggcgcgaagucugccagcccaagcggauccgcccguuucauccgccuggaucaccgugggccaacagaccccuacccgcaagcuuagccccuacccccacuggcccuguccacgaaccugugggcucccugacacccgcuccugugccacaaccucuggaccccgcaccagcagucacacccgaagccagccaccuccuugaggauccggacgaggagacuagccaggccgugaaggcgcuccgcgaaauggccgacacugugaucccucaaaaggaagaggcggccauuuguggacagauggacuugucccacccgccuccaagaggucaccuggacgaacuuaccaccacgcucgaauccaugacugaggaucugaaccuggauuccccgcucacucccgagcucaacgaaauccuugauaccuuccuuaacgacgagugucuccugcaugccaugcacaucuccaccggacugagcauuuucgacaccucgcuguucgguuccggaagcggcucagacgcgcuggaugacuucgauuuggacaugcuuggcagcgaugcccuggaugauuucgaccuggacaugcucgggucggaugcgcuggacgacuucgaucucgauauguugggcuccgaugcccucgacgacuuugaccucgacaugcugggcucgggcucaggaucccaauaccucccggauaccgacgacaggcaucgcauugaggaaaagcggaagcgcaccuaugaaaccuucaaguccauuaugaagaagucgcccuuuuccggaccgacugacccucggccuccuccucgacgaauugccgucccaucucggucauccgccucgguccccaagccagcaccgcagccuuauccguucaccuccucucuguccaccauuaacuacgaugaauuccccaccaugguguucccgucgggacagaucucccaagccucagcccuugcuccugccccuccacaaguccugccccaagcaccagcgccugcuccugcacccgcgaugguguccgcacuggcgcaagcuccugccccugugccugugcuggcuccuggaccaccccaggcaguagcaccuccagccccgaagcccacucaggcuggagagggaacccugagcgaagcgcugcugcagcuccaguucgacgacgaagaucugggugcccugcugggaaauuccaccgauccggcgguguucacagaccuggccuccguggacaacuccgaauuccagcaguuguugaaccagggcauuccuguggccccccacaccacugagccaaugcucauggaauaccccgaggccauuaccagacucgugaccggagcccaaaggccuccggauccagcgccagcuccguugggagcuccgggauugccgaacgggcugcugucgggagaugaagauuucuccucaaucgccgauauggacuucuccgcgcugcuggguucggguucgggaucgcgcgauagccgggagggcauguuccuaccgaagccugaggccggaagcgccaucuccgauguguucgagggcagagaagucugucagccuaagcgcauucgcccguuccacccuccuggaucgcccugggccaaucggccacugccugcgucccucgcuccaacgccgaccggaccugugcacgaaccggucggcucacugacuccagcucccgucccacaaccgcucgacccugcucccgcuguuacccccgaagccucccauuugcuggaagaucccgaugaggaaacuucccaggccgucaaggcccugcgggagauggcagacaccgugauaccccagaaggaagaagcugccaucugcgggcagauggaccugucccauccuccuccacgcggacacuuggacgagcugaccacuacucuggaguccaugaccgaggaccugaaccuugacucgccuuugaccccugaacugaacgaaauucuggacaccuuccugaaugacgagugccuccugcacgcgaugcacaucagcaccggacuguccaucuucgacacuucccucuuugggagcggguccggaucaggcgguggugguagcgggaaacggccagcagcgaccaagaaggccggacaggccaagaagaagaaaggcucauaccccuacgacgugccggacuacgcaugagcggccgcuuaauuaagcugccuucugcggggcuugccuucuggccaugcccuucuucucucccuugcaccuguaccucuuggucuuugaauaaagccugaguaggaagucuagaaaaaaaaaaaaaaaaaaaaaaaaaaaaaaaaaaaaaaaaaaaaaaaaaaaaaaaaaaaaaaaaaaaaaaaaaaaaaaaaaaaaaaaaaaaaaaaaaaaaaaaaaaaaaaaaaa

SEQ ID NO: 174 - protein, 263 aa, Artificial Sequence
  source: /note="Description of Artificial Sequence: Synthetic polypeptide"
MAPKKKRKVGIHGVPAAGSSGSLEPGEKPYKCPECGKSFSTSGNLTEHQRTHTGEKPYKCPECGKSFSDSGNLRVHQRTHTGEKPYKCPECGKSFSHKNALQNHQRTHTGEKPYKCPECGKSFSRNDTLTEHQRTHTGEKPYKCPECGKSFSQRAHLERHQRTHTGEKPYKCPECGKSFSRSDKLVRHQRTHTGEKPYKCPECGKSFSDPGHLVRHQRTHTGEKPTGKKTSASSGGKRPAATKKAGQAKKKKGSYPYDVPDYA

SEQ ID NO: 175 - RNA, 1033 nt, Artificial Sequence
  source: /note="Description of Artificial Sequence: Synthetic polynucleotide"
aggaaauaagagagaaaagaagaguaagaagaaauauaagagccaccauggcccccaagaagaagcggaaggugggcauccacggcgugcccgccgccggcagcagcggaucccucgaaccgggcgagaaaccauauaaguguccagagugugguaagagcuuuagcaccaguggcaaucugaccgagcaucaacgcacgcauacgggugagaaaccguacaagugcccggaaugcggcaaaaguuucagcgauagcggcaaucugcgugugcaccagcguacgcauacgggcgaaaagccguauaagugcccagaaugcgguaagaguuuuagccacaaaaacgcgcugcagaaccaccagcgcacccacacgggugagaagccauacaaauguccggaaugcggcaaaagcuucagccgcaacgauacgcugacggaacaccaacguacgcauaccggcgaaaagccauacaagugcccggagugcgguaaaagcuuuagccagcgcgcgcaucucgaacgucaucaacguacccauaccggugaaaaaccauauaaaugcccggaaugugguaaaaguuuuagccgcagcgacaaacuggugcgucaucaacgcacccauaccggugaaaagccauauaagugcccggagugugguaaaagcuucagcgauccgggucaucugguucgccaucaacguacgcacaccggcgagaagccaaccggcaagaaaaccagcgcuagcagcggcggcaagcggcccgccgccaccaagaaggccggccaggccaagaagaagaagggcagcuaccccuacgacgugcccgacuacgccugagcggccgcuuaauuaagcugccuucugcggggcuugccuucuggccaugcccuucuucucucccuugcaccuguaccucuuggucuuugaauaaagccugaguaggaagucuagaaaaaaaaaaaaaaaaaaaaaaaaaaaaaaaaaaaaaaaaaaaaaaaaaaaaaaaaaaaaaaaaaaaaaaaaaaaaaaaa

SEQ ID NO: 176 - protein, 1614 aa, Artificial Sequence
  source: /note="Description of Artificial Sequence: Synthetic polypeptide"
MAPKKKRKVGIHGVPAAGSSGSSGSLEPGEKPYKCPECGKSFSTSGNLTEHQRTHTGEKPYKCPECGKSFSDSGNLRVHQRTHTGEKPYKCPECGKSFSHKNALQNHQRTHTGEKPYKCPECGKSFSRNDTLTEHQRTHTGEKPYKCPECGKSFSQRAHLERHQRTHTGEKPYKCPECGKSFSRSDKLVRHQRTHTGEKPYKCPECGKSFSDPGHLVRHQRTHTGEKPTGKKTSASGSGGGSGGDALDDFDLDMLGSDALDDFDLDMLGSDALDDFDLDMLGSDALDDFDLDMLSGGPKKKRKVGSQYLPDTDDRHRIEEKRKRTYETFKSIMKKSPFSGPTDPRPPPRRIAVPSRSSASVPKPAPQPYPFTSSLSTINYDEFPTMVFPSGQISQASALAPAPPQVLPQAPAPAPAPAMVSALAQAPAPVPVLAPGPPQAVAPPAPKPTQAGEGTLSEALLQLQFDDEDLGALLGNSTDPAVFTDLASVDNSEFQQLLNQGIPVAPHTTEPMLMEYPEAITRLVTGAQRPPDPAPAPLGAPGLPNGLLSGDEDFSSIADMDFSALLGSGSGSRDSREGMFLPKPEAGSAISDVFEGREVCQPKRLRPFHPPGSPWANRPLPASLAPTPTGPVHEPVGSLTPAPVPQPLDPAPAVTPEASHLLEDPDEETSQAVKALREMADTVIPQKEEAAICGQMDLSHPPPRGHLDELTTTLESMTEDLNLDSPLTPELNEILDTFLNDECLLHAMHISTGLSIFDTSLFSGGKRPAATKKAGQAKKKKGSYPYDVPDYAATNFSLLKQAGDVEENPGPTSAGKLGSGEGRGSLLTCGDVEENPGPLEGSSGSGSLEPGEKPYKCPECGKSFSRSDHLTNHQRTHTGEKPYKCPECGKSFSTSGSLVRHQRTHTGEKPYKCPECGKSFSQAGHLASHQRTHTGEKPYKCPECGKSFSRSDKLTEHQRTHTGEKPYKCPECGKSFSTSGNLTEHQRTHTGEKPYKCPECGKSFSQSSNLVRHQRTHTGEKPYKCPECGKSFSTHLDLIRHQRTHTGEKPTGKKTSASGSGGGSGGDALDDFDLDMLGSDALDDFDLDMLGSDALDDFDLDMLGSDALDDFDLDMLSGGPKKKRKVGSQYLPDTDDRHRIEEKRKRTYETFKSIMKKSPFSGPTDPRPPPRRIAVPSRSSASVPKPAPQPYPFTSSLSTINYDEFPTMVFPSGQISQASALAPAPPQVLPQAPAPAPAPAMVSALAQAPAPVPVLAPGPPQAVAPPAPKPTQAGEGTLSEALLQLQFDDEDLGALLGNSTDPAVFTDLASVDNSEFQQLLNQGIPVAPHTTEPMLMEYPEAITRLVTGAQRPPDPAPAPLGAPGLPNGLLSGDEDFSSIADMDFSALLGSGSGSRDSREGMFLPKPEAGSAISDVFEGREVCQPKRLRPFHPPGSPWANRPLPASLAPTPTGPVHEPVGSLTPAPVPQPLDPAPAVTPEASHLLEDPDEETSQAVKALREMADTVIPQKEEAAICGQMDLSHPPPRGHLDELTTTLESMTEDLNLDSPLTPELNEILDTFLNDECLLHAMHISTGLSIFDTSLFSGGKRPAATKKAGQAKKKKGSYPYDVPDYA

SEQ ID NO: 177 - RNA, 5086 nt, Artificial Sequence
  source: /note="Description of Artificial Sequence: Synthetic polynucleotide"
aggaaauaagagagaaaagaagaguaagaagaaauauaagagccaccauggcccccaagaagaagcggaaggugggcauccacggcgugcccgccgccggcagcagcggaucaucaggcucacuggaaccgggggaaaaacccuacaagugcccggaaugcggcaagagcuucucgaccuccgggaaccugaccgagcaccagcgcacccacaccggagagaaaccguacaagugccccgaaugcgggaaaucguucucagacucgggaaaccucagggugcaccagcggacccacacgggggaaaagccguacaaaugcccggagugcgggaagucauucucccacaagaacgcgcugcagaaccaccaaagaacccacaccggcgaaaaaccguacaagugccccgagugcggaaaguccuucucccgcaacgacacccucaccgaacaccaacgcacccacaccggagaaaagcccuacaagugcccggaaugcggaaagagcuucagccagagggcccaccuggaaagacaccagagaacccacaccggcgaaaagccguacaaaugcccggagugcgggaaguccuucagccggucagacaagcugguccgccaccaaaggacccacacaggagaaaagcccuacaagugcccggaaugcggaaaaucguucagcgaccccggacaccugguccggcaccagaggacccacaccggggagaagccgaccggcaaaaagaccucagcgagcggaucaggaggaggaucagggggggacgcacuggacgacuucgaccuggacaugcugggaucagacgcacuggacgacuucgaccuagacaugcucggaucggacgcacucgacgacuucgaccucgacaugcuaggaucagacgcacuagacgacuucgaccucgacaugcugucgggaggaccgaagaaaaagcggaaggucggaucacaguaccucccggacaccgacgacaggcacagaaucgaagaaaaacgcaagcgcaccuacgaaaccuucaagagcaucaugaaaaagucgccguucucaggaccgaccgaccccagaccgccaccgaggagaauagccgucccgagccgauccuccgcauccgugccgaaaccggcaccgcaacccuacccguucaccucgucccugucgaccaucaacuacgacgaguuccccaccaugguguuccccuccgggcagaucucacaggccucggcacuggcacccgcaccaccgcaagugcugccccaagcaccggcacccgcaccggcgcccgcaauggugucagcgcuggcacaggcaccagcaccggugccaguccucgcaccgggaccgccgcaagcaguggcaccgccggcaccgaaaccgacccaggccggagaagggacccuguccgaggcgcugcugcaacuccaguucgacgacgaggaccugggagcacuccugggaaacuccaccgacccggcaguguucaccgaccucgcaucgguggacaacuccgaguuccaacagcuccugaaccaggggauaccgguggcaccgcacaccaccgaaccgaugcugauggaauacccggaagccaucacccggcucgugaccggagcgcaaagaccgcccgaccccgcgcccgcaccgcugggagcaccgggacuaccgaacgggcugcucucaggggacgaggacuucuccagcaucgcagacauggacuucuccgcccugcugggaucaggaucaggaucacgcgacucccgggaaggaauguuccugccgaagccggaagcaggcagcgcaaucuccgacguguucgaaggccgcgaggucugccagcccaagcgccugcgaccguuccacccgccgggaucaccgugggcaaaccgcccgcuaccggcaucacuggcaccgacacccaccggaccggugcacgaaccggucgggucacugacccccgcaccggucccgcaaccgcuagacccggcaccggcagugaccccggaagcaucgcaccuccuggaggacccggacgaggaaaccucacaggcagugaaggcccugcgggagauggccgacaccgugauaccgcagaaggaggaggccgccaucugcggacaaauggaccugucacacccgcccccgagaggacaccuggacgaacucaccaccacccuggagagcaugaccgaggaccugaaccuggacucaccgcugaccccggagcugaacgaaauccuggacaccuuccugaacgacgagugccugcugcacgcaaugcacaucagcaccgggcugucgaucuucgacaccagccuguucuccggagggaaaagacccgccgccaccaagaaagcgggccaagcaaagaaaaagaagggaucguaccccuacgacgugccggacuacgcagccaccaacuuuucucugcugaagcaagccggagauguggaggagaaucccggcccuaccuccgccggaaaacugggcuccggcgaaggcagaggaagccuccucacaugcggcgacguggaggagaaccccggcccucuggagggauccucaggcucaggaucccuggaaccgggcgagaagccauacaagugcccagagugcggcaaaagcuucagccgcagcgaccaucugaccaaucaccaacgcacccauaccggugagaagccguacaaaugcccagagugcgguaagagcuuuaguaccaguggcagucugguucgucaucagcgcacgcacacgggcgaaaaaccauacaaaugcccggagugcggcaaaagcuuuagccaagccggucaucuggcgagccaucaacguacgcacaccggcgagaagccguauaaauguccggagugcgguaagagcuuuagccguagcgauaaacugaccgaacaccaacguacgcauacgggcgagaaaccauauaaauguccagaguguggcaagaguuucagcaccagcggcaaucugaccgagcaucaacguacccauaccggugaaaagccauauaaauguccagaaugcgguaagaguuuuagucagagcaguaaucuggugcgccaucagcguacccacacgggugagaaaccauauaaguguccggaaugcggcaagaguuuuagcacccaucuggaucugauccgucaucagcgcacccacaccggugaaaaaccaaccggcaagaaaaccagugcuagcggcagcggcggcggcagcggcggcgacgcccuggacgacuucgaccuggacaugcugggcagcgacgcccuggacgacuucgaccuggacaugcugggcagcgacgcccuggacgacuucgaccuggacaugcugggcagcgacgcccuggacgacuucgaccuggacaugcugagcggcggccccaagaagaagcggaaggugggcagccaguaccugcccgacaccgacgaccggcaccggaucgaggagaagcggaagcggaccuacgagaccuucaagagcaucaugaagaaaucccccuucagcggccccaccgacccccggccccccccccggcggaucgccgugcccagccggagcagcgccagcgugcccaagcccgccccccagcccuaccccuucaccagcagccugagcaccaucaacuacgacgaguuccccaccaugguguuccccagcggccagaucagccaggccagcgcccuggcccccgcccccccccaggugcugccccaggcccccgcccccgcccccgcccccgccauggugagcgcccuggcccaggcccccgcccccgugcccgugcuggcccccggccccccccaggccguggccccccccgcccccaagcccacccaggccggcgagggcacccugagcgaggcccugcugcagcugcaguucgacgacgaggaccugggcgcccugcugggcaacagcaccgaccccgccguguucaccgaccuggccagcguggacaacagcgaguuccagcagcugcugaaccagggcauccccguggccccccacaccaccgagcccaugcugauggaguaccccgaggccaucacccggcuggugaccggcgcccagcggccccccgaccccgcccccgccccccugggcgcccccggccugcccaacggccugcugagcggcgacgaggacuucagcagcaucgccgacauggacuucagcgcccugcugggcagcggcagcggcagccgggacagccgggagggcauguuccugcccaagcccgaggccggcagcgccaucagcgacguguucgagggccgggaggugugccagcccaagcggcuccggcccuuccacccccccggcagccccugggccaaccggccccugcccgccagccuggcccccacccccaccggccccgugcacgagcccgugggcagccugacccccgcccccgugccccagccccuggaccccgcccccgccgugacccccgaggccagccaccugcuggaggaccccgacgaggagaccagccaggccgugaaggcccugcgggagauggccgacaccgugaucccccagaaggaggaggccgccaucugcggccagauggaccugagccacccccccccccggggccaccuggacgagcugaccaccacccuggagagcaugaccgaggaccugaaccuggacagcccccugacccccgagcugaacgagauccuggacaccuuccugaacgacgagugccugcugcacgccaugcacaucagcaccggccugagcaucuucgacaccagccuguucagcggcggcaagcggcccgccgccaccaagaaggccggccaggccaagaagaagaagggcagcuaccccuacgacgugcccgacuacgccugagcggccgcuuaauuaagcugccuucugcggggcuugccuucuggccaugcccuucuucucucccuugcaccuguaccucuuggucuuugaauaaagccugaguaggaagucuagaaaaaaaaaaaaaaaaaaaaaaaaaaaaaaaaaaaaaaaaaaaaaaaaaaaaaaaaaaaaaaaaaaaaaaaaaaaaaaaa

SEQ ID NO: 178 - protein, 1609 aa, Artificial Sequence
  source: /note="Description of Artificial Sequence: Synthetic polypeptide"
MAPKKKRKVGIHGVPAAGSSGSLEPGEKPYKCPECGKSFSRSDHLTNHQRTHTGEKPYKCPECGKSFSTSGSLVRHQRTHTGEKPYKCPECGKSFSQAGHLASHQRTHTGEKPYKCPECGKSFSRSDKLTEHQRTHTGEKPYKCPECGKSFSTSGNLTEHQRTHTGEKPYKCPECGKSFSQSSNLVRHQRTHTGEKPYKCPECGKSFSTHLDLIRHQRTHTGEKPTGKKTSASGSGGGSGGDALDDFDLDMLGSDALDDFDLDMLGSDALDDFDLDMLGSDALDDFDLDMLSGGPKKKRKVGSQYLPDTDDRHRIEEKRKRTYETFKSIMKKSPFSGPTDPRPPPRRIAVPSRSSASVPKPAPQPYPFTSSLSTINYDEFPTMVFPSGQISQASALAPAPPQVLPQAPAPAPAPAMVSALAQAPAPVPVLAPGPPQAVAPPAPKPTQAGEGTLSEALLQLQFDDEDLGALLGNSTDPAVFTDLASVDNSEFQQLLNQGIPVAPHTTEPMLMEYPEAITRLVTGAQRPPDPAPAPLGAPGLPNGLLSGDEDFSSIADMDFSALLGSGSGSRDSREGMFLPKPEAGSAISDVFEGREVCQPKRLRPFHPPGSPWANRPLPASLAPTPTGPVHEPVGSLTPAPVPQPLDPAPAVTPEASHLLEDPDEETSQAVKALREMADTVIPQKEEAAICGQMDLSHPPPRGHLDELTTTLESMTEDLNLDSPLTPELNEILDTFLNDECLLHAMHISTGLSIFDTSLFSGGKRPAATKKAGQAKKKKGSYPYDVPDYAATNFSLLKQAGDVEENPGPTSAGKLGSGEGRGSLLTCGDVEENPGPLEGSSGSLEPGEKPYKCPECGKSFSTSGNLTEHQRTHTGEKPYKCPECGKSFSDSGNLRVHQRTHTGEKPYKCPECGKSFSHKNALQNHQRTHTGEKPYKCPECGKSFSRNDTLTEHQRTHTGEKPYKCPECGKSFSQRAHLERHQRTHTGEKPYKCPECGKSFSRSDKLVRHQRTHTGEKPYKCPECGKSFSDPGHLVRHQRTHTGEKPTGKKTSASGSGGGSGGDALDDFDLDMLGSDALDDFDLDMLGSDALDDFDLDMLGSDALDDFDLDMLSGGPKKKRKVGSQYLPDTDDRHRIEEKRKRTYETFKSIMKKSPFSGPTDPRPPPRRIAVPSRSSASVPKPAPQPYPFTSSLSTINYDEFPTMVFPSGQISQASALAPAPPQVLPQAPAPAPAPAMVSALAQAPAPVPVLAPGPPQAVAPPAPKPTQAGEGTLSEALLQLQFDDEDLGALLGNSTDPAVFTDLASVDNSEFQQLLNQGIPVAPHTTEPMLMEYPEAITRLVTGAQRPPDPAPAPLGAPGLPNGLLSGDEDFSSIADMDFSALLGSGSGSRDSREGMFLPKPEAGSAISDVFEGREVCQPKRLRPFHPPGSPWANRPLPASLAPTPTGPVHEPVGSLTPAPVPQPLDPAPAVTPEASHLLEDPDEETSQAVKALREMADTVIPQKEEAAICGQMDLSHPPPRGHLDELTTTLESMTEDLNLDSPLTPELNEILDTFLNDECLLHAMHISTGLSIFDTSLFSGGKRPAATKKAGQAKKKKGSYPYDVPDYA

SEQ ID NO: 179 - RNA, 5071 nt, Artificial Sequence
  source: /note="Description of Artificial Sequence: Synthetic polynucleotide"
aggaaauaagagagaaaagaagaguaagaagaaauauaagagccaccauggcccccaagaagaagcggaaggugggcauccacggcgugcccgccgccggcagcagcggaucccuggaaccgggcgagaagccauacaagugcccagagugcggcaaaagcuucagccgcagcgaccaucugaccaaucaccaacgcacccauaccggugagaagccguacaaaugcccagagugcgguaagagcuuuaguaccaguggcagucugguucgucaucagcgcacgcacacgggcgaaaaaccauacaaaugcccggagugcggcaaaagcuuuagccaagccggucaucuggcgagccaucaacguacgcacaccggcgagaagccguauaaauguccggagugcgguaagagcuuuagccguagcgauaaacugaccgaacaccaacguacgcauacgggcgagaaaccauauaaauguccagaguguggcaagaguuucagcaccagcggcaaucugaccgagcaucaacguacccauaccggugaaaagccauauaaauguccagaaugcgguaagaguuuuagucagagcaguaaucuggugcgccaucagcguacccacacgggugagaaaccauauaaguguccggaaugcggcaagaguuuuagcacccaucuggaucugauccgucaucagcgcacccacaccggugaaaaaccaaccggcaagaaaaccagugcuagcggcagcggcggcggcagcggcggcgacgcccuggacgacuucgaccuggacaugcugggcagcgacgcccuggacgacuucgaccuggacaugcugggcagcgacgcccuggacgacuucgaccuggacaugcugggcagcgacgcccuggacgacuucgaccuggacaugcugagcggcggccccaagaagaagcggaaggugggcagccaguaccugcccgacaccgacgaccggcaccggaucgaggagaagcggaagcggaccuacgagaccuucaagagcaucaugaagaaaucccccuucagcggccccaccgacccccggccccccccccggcggaucgccgugcccagccggagcagcgccagcgugcccaagcccgccccccagcccuaccccuucaccagcagccugagcaccaucaacuacgacgaguuccccaccaugguguuccccagcggccagaucagccaggccagcgcccuggcccccgcccccccccaggugcugccccaggcccccgcccccgcccccgcccccgccauggugagcgcccuggcccaggcccccgcccccgugcccgugcuggcccccggccccccccaggccguggccccccccgcccccaagcccacccaggccggcgagggcacccugagcgaggcccugcugcagcugcaguucgacgacgaggaccugggcgcccugcugggcaacagcaccgaccccgccguguucaccgaccuggccagcguggacaacagcgaguuccagcagcugcugaaccagggcauccccguggccccccacaccaccgagcccaugcugauggaguaccccgaggccaucacccggcuggugaccggcgcccagcggccccccgaccccgcccccgccccccugggcgcccccggccugcccaacggccugcugagcggcgacgaggacuucagcagcaucgccgacauggacuucagcgcccugcugggcagcggcagcggcagccgggacagccgggagggcauguuccugcccaagcccgaggccggcagcgccaucagcgacguguucgagggccgggaggugugccagcccaagcggcuccggcccuuccacccccccggcagccccugggccaaccggccccugcccgccagccuggcccccacccccaccggccccgugcacgagcccgugggcagccugacccccgcccccgugccccagccccuggaccccgcccccgccgugacccccgaggccagccaccugcuggaggaccccgacgaggagaccagccaggccgugaaggcccugcgggagauggccgacaccgugaucccccagaaggaggaggccgccaucugcggccagauggaccugagccacccccccccccggggccaccuggacgagcugaccaccacccuggagagcaugaccgaggaccugaaccuggacagcccccugacccccgagcugaacgagauccuggacaccuuccugaacgacgagugccugcugcacgccaugcacaucagcaccggccugagcaucuucgacaccagccuguucagcggcggcaagcggcccgccgccaccaagaaggccggccaggccaagaagaagaagggcagcuaccccuacgacgugcccgacuacgccgccaccaacuuuucucugcugaagcaagccggagauguggaggagaaucccggcccuaccuccgccggaaaacugggcuccggcgaaggcagaggaagccuccucacaugcggcgacguggaggagaaccccggcccucuggagggauccucaggcucacuggaaccgggggaaaaacccuacaagugcccggaaugcggcaagagcuucucgaccuccgggaaccugaccgagcaccagcgcacccacaccggagagaaaccguacaagugccccgaaugcgggaaaucguucucagacucgggaaaccucagggugcaccagcggacccacacgggggaaaagccguacaaaugcccggagugcgggaagucauucucccacaagaacgcgcugcagaaccaccaaagaacccacaccggcgaaaaaccguacaagugccccgagugcggaaaguccuucucccgcaacgacacccucaccgaacaccaacgcacccacaccggagaaaagcccuacaagugcccggaaugcggaaagagcuucagccagagggcccaccuggaaagacaccagagaacccacaccggcgaaaagccguacaaaugcccggagugcgggaaguccuucagccggucagacaagcugguccgccaccaaaggacccacacaggagaaaagcccuacaagugcccggaaugcggaaaaucguucagcgaccccggacaccugguccggcaccagaggacccacaccggggagaagccgaccggcaaaaagaccucagcgagcggaucaggaggaggaucagggggggacgcacuggacgacuucgaccuggacaugcugggaucagacgcacuggacgacuucgaccuagacaugcucggaucggacgcacucgacgacuucgaccucgacaugcuaggaucagacgcacuagacgacuucgaccucgacaugcugucgggaggaccgaagaaaaagcggaaggucggaucacaguaccucccggacaccgacgacaggcacagaaucgaagaaaaacgcaagcgcaccuacgaaaccuucaagagcaucaugaaaaagucgccguucucaggaccgaccgaccccagaccgccaccgaggagaauagccgucccgagccgauccuccgcauccgugccgaaaccggcaccgcaacccuacccguucaccucgucccugucgaccaucaacuacgacgaguuccccaccaugguguuccccuccgggcagaucucacaggccucggcacuggcacccgcaccaccgcaagugcugccccaagcaccggcacccgcaccggcgcccgcaauggugucagcgcuggcacaggcaccagcaccggugccaguccucgcaccgggaccgccgcaagcaguggcaccgccggcaccgaaaccgacccaggccggagaagggacccuguccgaggcgcugcugcaacuccaguucgacgacgaggaccugggagcacuccugggaaacuccaccgacccggcaguguucaccgaccucgcaucgguggacaacuccgaguuccaacagcuccugaaccaggggauaccgguggcaccgcacaccaccgaaccgaugcugauggaauacccggaagccaucacccggcucgugaccggagcgcaaagaccgcccgaccccgcgcccgcaccgcugggagcaccgggacuaccgaacgggcugcucucaggggacgaggacuucuccagcaucgcagacauggacuucuccgcccugcugggaucaggaucaggaucacgcgacucccgggaaggaauguuccugccgaagccggaagcaggcagcgcaaucuccgacguguucgaaggccgcgaggucugccagcccaagcgccugcgaccguuccacccgccgggaucaccgugggcaaaccgcccgcuaccggcaucacuggcaccgacacccaccggaccggugcacgaaccggucgggucacugacccccgcaccggucccgcaaccgcuagacccggcaccggcagugaccccggaagcaucgcaccuccuggaggacccggacgaggaaaccucacaggcagugaaggcccugcgggagauggccgacaccgugauaccgcagaaggaggaggccgccaucugcggacaaauggaccugucacacccgcccccgagaggacaccuggacgaacucaccaccacccuggagagcaugaccgaggaccugaaccuggacucaccgcugaccccggagcugaacgaaauccuggacaccuuccugaacgacgagugccugcugcacgcaaugcacaucagcaccgggcugucgaucuucgacaccagccuguucuccggagggaaaagacccgccgccaccaagaaagcgggccaagcaaagaaaaagaagggaucguaccccuacgacgugccggacuacgcaugagcggccgcuuaauuaagcugccuucugcggggcuugccuucuggccaugcccuucuucucucccuugcaccuguaccucuuggucuuugaauaaagccugaguaggaagucuagaaaaaaaaaaaaaaaaaaaaaaaaaaaaaaaaaaaaaaaaaaaaaaaaaaaaaaaaaaaaaaaaaaaaaaaaaaaaaaaa

SEQ ID NO: 180 - protein, 1713 aa, Artificial Sequence
  source: /note="Description of Artificial Sequence: Synthetic polypeptide"
MAPKKKRKVGIHGVPAAGSSGSSGSLEPGEKPYKCPECGKSFSTSGNLTEHQRTHTGEKPYKCPECGKSFSDSGNLRVHQRTHTGEKPYKCPECGKSFSHKNALQNHQRTHTGEKPYKCPECGKSFSRNDTLTEHQRTHTGEKPYKCPECGKSFSQRAHLERHQRTHTGEKPYKCPECGKSFSRSDKLVRHQRTHTGEKPYKCPECGKSFSDPGHLVRHQRTHTGEKPTGKKTSASGSGGGSGGDALDDFDLDMLGSDALDDFDLDMLGSDALDDFDLDMLGSDALDDFDLDMLSGGPKKKRKVGSQYLPDTDDRHRIEEKRKRTYETFKSIMKKSPFSGPTDPRPPPRRIAVPSRSSASVPKPAPQPYPFTSSLSTINYDEFPTMVFPSGQISQASALAPAPPQVLPQAPAPAPAPAMVSALAQAPAPVPVLAPGPPQAVAPPAPKPTQAGEGTLSEALLQLQFDDEDLGALLGNSTDPAVFTDLASVDNSEFQQLLNQGIPVAPHTTEPMLMEYPEAITRLVTGAQRPPDPAPAPLGAPGLPNGLLSGDEDFSSIADMDFSALLGSGSGSRDSREGMFLPKPEAGSAISDVFEGREVCQPKRLRPFHPPGSPWANRPLPASLAPTPTGPVHEPVGSLTPAPVPQPLDPAPAVTPEASHLLEDPDEETSQAVKALREMADTVIPQKEEAAICGQMDLSHPPPRGHLDELTTTLESMTEDLNLDSPLTPELNEILDTFLNDECLLHAMHISTGLSIFDTSLFSGGKRPAATKKAGQAKKKKGSYPYDVPDYAATNFSLLKQAGDVEENPGPTSAGKLGSGEGRGSLLTCGDVEENPGPLEGSSGSGSLEPGEKPYKCPECGKSFSRSDHLTNHQRTHTGEKPYKCPECGKSFSTSGSLVRHQRTHTGEKPYKCPECGKSFSQAGHLASHQRTHTGEKPYKCPECGKSFSRSDKLTEHQRTHTGEKPYKCPECGKSFSTSGNLTEHQRTHTGEKPYKCPECGKSFSQSSNLVRHQRTHTGEKPYKCPECGKSFSTHLDLIRHQRTHTGEKPTGKKTSASGSGGGSGGIFKPEELRQALMPTLEALYRQDPESLPFRQPVDPQLLGIPDYFDIVKSPMDLSTIKRKLDTGQYQEPWQYVDDIWLMFNNAWLYNRKTSRVYKYCSKLSEVFEQEIDPVMQSLGYCCGRKLEFSPQTLCCYGKQLCTIPRDATYYSYQNRYHFCEKCFNEIQGESVSLGDDPSQPQTTINKEQFSKRKNDTLDPELFVECTECGRKMHQICVLHHEIIWPAGFVCDGCLKKSARTRKENKFSAKRLPSTRLGTFLENRVNDFLRRQNHPESGEVTVRVVHASDKTVEVKPGMKARFVDSGEMAESFPYRTKALFAFEEIDGVDLCFFGMHVQEYGSDCPPPNQRRVYISYLDSVHFFRPKCLRTAVYHEILIGYLEYVKKLGYTTGHIWACPPSEGDDYIFHCHPPDQKIPKPKRLQEWYKKMLDKAVSERIVHDYKDIFKQATEDRLTSAKELPYFEGDFWPNVLEESIKELEQEEEERKREENTSNESTDVTKGDSKNAKKKNNKKTSKNKSSLSRGNKKKPGMPNVSNDLSQKLYATMEKHKEVFFVIRLIAGPAANSLPPIVDPDPLIPCDLMDGRDAFLTLARDKHLEFSSLRRAQWSTMCMLVELHTQSQDSGGKRPAATKKAGQAKKKKGSYPYDVPDYA

SEQ ID NO: 181 - RNA, 5383 nt, Artificial Sequence
  source: /note="Description of Artificial Sequence: Synthetic polynucleotide"
aggaaauaagagagaaaagaagaguaagaagaaauauaagagccaccauggcccccaagaagaagcggaaggugggcauccacggcgugcccgccgccggcagcagcggaucaucaggcucacuggaaccgggggaaaaacccuacaagugcccggaaugcggcaagagcuucucgaccuccgggaaccugaccgagcaccagcgcacccacaccggagagaaaccguacaagugccccgaaugcgggaaaucguucucagacucgggaaaccucagggugcaccagcggacccacacgggggaaaagccguacaaaugcccggagugcgggaagucauucucccacaagaacgcgcugcagaaccaccaaagaacccacaccggcgaaaaaccguacaagugccccgagugcggaaaguccuucucccgcaacgacacccucaccgaacaccaacgcacccacaccggagaaaagcccuacaagugcccggaaugcggaaagagcuucagccagagggcccaccuggaaagacaccagagaacccacaccggcgaaaagccguacaaaugcccggagugcgggaaguccuucagccggucagacaagcugguccgccaccaaaggacccacacaggagaaaagcccuacaagugcccggaaugcggaaaaucguucagcgaccccggacaccugguccggcaccagaggacccacaccggggagaagccgaccggcaaaaagaccucagcgagcggaucaggaggaggaucagggggggacgcacuggacgacuucgaccuggacaugcugggaucagacgcacuggacgacuucgaccuagacaugcucggaucggacgcacucgacgacuucgaccucgacaugcuaggaucagacgcacuagacgacuucgaccucgacaugcugucgggaggaccgaagaaaaagcggaaggucggaucacaguaccucccggacaccgacgacaggcacagaaucgaagaaaaacgcaagcgcaccuacgaaaccuucaagagcaucaugaaaaagucgccguucucaggaccgaccgaccccagaccgccaccgaggagaauagccgucccgagccgauccuccgcauccgugccgaaaccggcaccgcaacccuacccguucaccucgucccugucgaccaucaacuacgacgaguuccccaccaugguguuccccuccgggcagaucucacaggccucggcacuggcacccgcaccaccgcaagugcugccccaagcaccggcacccgcaccggcgcccgcaauggugucagcgcuggcacaggcaccagcaccggugccaguccucgcaccgggaccgccgcaagcaguggcaccgccggcaccgaaaccgacccaggccggagaagggacccuguccgaggcgcugcugcaacuccaguucgacgacgaggaccugggagcacuccugggaaacuccaccgacccggcaguguucaccgaccucgcaucgguggacaacuccgaguuccaacagcuccugaaccaggggauaccgguggcaccgcacaccaccgaaccgaugcugauggaauacccggaagccaucacccggcucgugaccggagcgcaaagaccgcccgaccccgcgcccgcaccgcugggagcaccgggacuaccgaacgggcugcucucaggggacgaggacuucuccagcaucgcagacauggacuucuccgcccugcugggaucaggaucaggaucacgcgacucccgggaaggaauguuccugccgaagccggaagcaggcagcgcaaucuccgacguguucgaaggccgcgaggucugccagcccaagcgccugcgaccguuccacccgccgggaucaccgugggcaaaccgcccgcuaccggcaucacuggcaccgacacccaccggaccggugcacgaaccggucgggucacugacccccgcaccggucccgcaaccgcuagacccggcaccggcagugaccccggaagcaucgcaccuccuggaggacccggacgaggaaaccucacaggcagugaaggcccugcgggagauggccgacaccgugauaccgcagaaggaggaggccgccaucugcggacaaauggaccugucacacccgcccccgagaggacaccuggacgaacucaccaccacccuggagagcaugaccgaggaccugaaccuggacucaccgcugaccccggagcugaacgaaauccuggacaccuuccugaacgacgagugccugcugcacgcaaugcacaucagcaccgggcugucgaucuucgacaccagccuguucuccggagggaaaagacccgccgccaccaagaaagcgggccaagcaaagaaaaagaagggaucguaccccuacgacgugccggacuacgcagccaccaacuuuucucugcugaagcaagccggagauguggaggagaaucccggcccuaccuccgccggaaaacugggcuccggcgaaggcagaggaagccuccucacaugcggcgacguggaggagaaccccggcccucuggagggauccucaggcucaggaucccuggaaccgggcgagaagccauacaagugcccagagugcggcaaaagcuucagccgcagcgaccaucugaccaaucaccaacgcacccauaccggugagaagccguacaaaugcccagagugcgguaagagcuuuaguaccaguggcagucugguucgucaucagcgcacgcacacgggcgaaaaaccauacaaaugcccggagugcggcaaaagcuuuagccaagccggucaucuggcgagccaucaacguacgcacaccggcgagaagccguauaaauguccggagugcgguaagagcuuuagccguagcgauaaacugaccgaacaccaacguacgcauacgggcgagaaaccauauaaauguccagaguguggcaagaguuucagcaccagcggcaaucugaccgagcaucaacguacccauaccggugaaaagccauauaaauguccagaaugcgguaagaguuuuagucagagcaguaaucuggugcgccaucagcguacccacacgggugagaaaccauauaaguguccggaaugcggcaagaguuuuagcacccaucuggaucugauccgucaucagcgcacccacaccggugaaaaaccaaccggcaagaaaaccagugcuagcggcagcggcggcggcagcggcggcaucuucaagcccgaggagcugcggcaggcccugaugcccacccuggaggcccuguaccggcaggaccccgagagccugcccuuccggcagcccguggacccccagcugcugggcauccccgacuacuucgacaucgugaaaucccccauggaccugagcaccaucaagcggaagcuggacaccggccaguaccaggagcccuggcaguacguggacgacaucuggcugauguucaacaacgccuggcuguacaaccggaaaaccagccggguguacaaguacugcagcaagcugagcgagguguucgagcaggagaucgaccccgugaugcagagccugggcuacugcugcggccggaagcuggaguucagcccccagacccugugcugcuacggcaagcagcugugcaccaucccccgggacgccaccuacuacagcuaccagaaccgguaccacuucugcgagaagugcuucaacgagauccagggcgagagcgugagccugggcgacgaccccagccagccccagaccaccaucaacaaggagcaguucagcaagcggaagaacgacacccuggaccccgagcuguucguggagugcaccgagugcggccggaagaugcaccagaucugcgugcugcaccacgagaucaucuggcccgccggcuucgugugcgacggcugccugaagaaauccgcccggacccggaaggagaacaaguucagcgccaagcggcugcccagcacccggcugggcaccuuccuggagaaccgggugaacgacuuccugcggcggcagaaccaccccgagagcggcgaggugaccgugcggguggugcacgccagcgacaagaccguggaggugaagcccggcaugaaggcccgguucguggacagcggcgagauggccgagagcuuccccuaccggaccaaggcccuguucgccuucgaggagaucgacggcguggaccugugcuucuucggcaugcacgugcaggaguacggcagcgacugccccccccccaaccagcggcggguguacaucagcuaccuggacagcgugcacuucuuccggcccaagugccugcggaccgccguguaccacgagauccugaucggcuaccuggaguacgugaagaagcugggcuacaccaccggccacaucugggccugcccccccagcgagggcgacgacuacaucuuccacugccacccccccgaccagaagauccccaagcccaagcggcugcaggagugguacaagaagaugcuggacaaggccgugagcgagcggaucgugcacgacuacaaggacaucuucaagcaggccaccgaggaccggcugaccagcgccaaggagcugcccuacuucgagggcgacuucuggcccaacgugcuggaggagagcaucaaggagcuggagcaggaggaggaggagcggaagcgggaggagaacaccagcaacgagagcaccgacgugaccaagggcgacagcaagaacgccaagaagaagaacaacaagaaaaccagcaagaacaagagcagccugagccggggcaacaagaagaagcccggcaugcccaacgugagcaacgaccugagccagaagcuguacgccaccauggagaagcacaaggagguguucuucgugauccggcugaucgccggccccgccgccaacagccugccccccaucguggaccccgacccccugauccccugcgaccugauggacggccgggacgccuuccugacccuggcccgggacaagcaccuggaguucagcagccugcggcgggcccaguggagcaccaugugcaugcugguggagcugcacacccagagccaggacagcggcggcaagcggcccgccgccaccaagaaggccggccaggccaagaagaagaagggcagcuaccccuacgacgugcccgacuacgccugagcggccgcuuaauuaagcugccuucugcggggcuugccuucuggccaugcccuucuucucucccuugcaccuguaccucuuggucuuugaauaaagccugaguaggaagucuagaaaaaaaaaaaaaaaaaaaaaaaaaaaaaaaaaaaaaaaaaaaaaaaaaaaaaaaaaaaaaaaaaaaaaaaaaaaaaaaa

SEQ ID NO: 182 - protein, 1708 aa, Artificial Sequence
  source: /note="Description of Artificial Sequence: Synthetic polypeptide"
MAPKKKRKVGIHGVPAAGSSGSLEPGEKPYKCPECGKSFSRSDHLTNHQRTHTGEKPYKCPECGKSFSTSGSLVRHQRTHTGEKPYKCPECGKSFSQAGHLASHQRTHTGEKPYKCPECGKSFSRSDKLTEHQRTHTGEKPYKCPECGKSFSTSGNLTEHQRTHTGEKPYKCPECGKSFSQSSNLVRHQRTHTGEKPYKCPECGKSFSTHLDLIRHQRTHTGEKPTGKKTSASGSGGGSGGIFKPEELRQALMPTLEALYRQDPESLPFRQPVDPQLLGIPDYFDIVKSPMDLSTIKRKLDTGQYQEPWQYVDDIWLMFNNAWLYNRKTSRVYKYCSKLSEVFEQEIDPVMQSLGYCCGRKLEFSPQTLCCYGKQLCTIPRDATYYSYQNRYHFCEKCFNEIQGESVSLGDDPSQPQTTINKEQFSKRKNDTLDPELFVECTECGRKMHQICVLHHEIIWPAGFVCDGCLKKSARTRKENKFSAKRLPSTRLGTFLENRVNDFLRRQNHPESGEVTVRVVHASDKTVEVKPGMKARFVDSGEMAESFPYRTKALFAFEEIDGVDLCFFGMHVQEYGSDCPPPNQRRVYISYLDSVHFFRPKCLRTAVYHEILIGYLEYVKKLGYTTGHIWACPPSEGDDYIFHCHPPDQKIPKPKRLQEWYKKMLDKAVSERIVHDYKDIFKQATEDRLTSAKELPYFEGDFWPNVLEESIKELEQEEEERKREENTSNESTDVTKGDSKNAKKKNNKKTSKNKSSLSRGNKKKPGMPNVSNDLSQKLYATMEKHKEVFFVIRLIAGPAANSLPPIVDPDPLIPCDLMDGRDAFLTLARDKHLEFSSLRRAQWSTMCMLVELHTQSQDSGGKRPAATKKAGQAKKKKGSYPYDVPDYAATNFSLLKQAGDVEENPGPTSAGKLGSGEGRGSLLTCGDVEENPGPLEGSSGSLEPGEKPYKCPECGKSFSTSGNLTEHQRTHTGEKPYKCPECGKSFSDSGNLRVHQRTHTGEKPYKCPECGKSFSHKNALQNHQRTHTGEKPYKCPECGKSFSRNDTLTEHQRTHTGEKPYKCPECGKSFSQRAHLERHQRTHTGEKPYKCPECGKSFSRSDKLVRHQRTHTGEKPYKCPECGKSFSDPGHLVRHQRTHTGEKPTGKKTSASGSGGGSGGDALDDFDLDMLGSDALDDFDLDMLGSDALDDFDLDMLGSDALDDFDLDMLSGGPKKKRKVGSQYLPDTDDRHRIEEKRKRTYETFKSIMKKSPFSGPTDPRPPPRRIAVPSRSSASVPKPAPQPYPFTSSLSTINYDEFPTMVFPSGQISQASALAPAPPQVLPQAPAPAPAPAMVSALAQAPAPVPVLAPGPPQAVAPPAPKPTQAGEGTLSEALLQLQFDDEDLGALLGNSTDPAVFTDLASVDNSEFQQLLNQGIPVAPHTTEPMLMEYPEAITRLVTGAQRPPDPAPAPLGAPGLPNGLLSGDEDFSSIADMDFSALLGSGSGSRDSREGMFLPKPEAGSAISDVFEGREVCQPKRLRPFHPPGSPWANRPLPASLAPTPTGPVHEPVGSLTPAPVPQPLDPAPAVTPEASHLLEDPDEETSQAVKALREMADTVIPQKEEAAICGQMDLSHPPPRGHLDELTTTLESMTEDLNLDSPLTPELNEILDTFLNDECLLHAMHISTGLSIFDTSLFSGGKRPAATKKAGQAKKKKGSYPYDVPDYA

SEQ ID NO: 183 - RNA, 5368 nt, Artificial Sequence
  source: /note="Description of Artificial Sequence: Synthetic polynucleotide"
aggaaauaagagagaaaagaagaguaagaagaaauauaagagccaccauggcccccaagaagaagcggaaggugggcauccacggcgugcccgccgccggcagcagcggaucccuggaaccgggcgagaagccauacaagugcccagagugcggcaaaagcuucagccgcagcgaccaucugaccaaucaccaacgcacccauaccggugagaagccguacaaaugcccagagugcgguaagagcuuuaguaccaguggcagucugguucgucaucagcgcacgcacacgggcgaaaaaccauacaaaugcccggagugcggcaaaagcuuuagccaagccggucaucuggcgagccaucaacguacgcacaccggcgagaagccguauaaauguccggagugcgguaagagcuuuagccguagcgauaaacugaccgaacaccaacguacgcauacgggcgagaaaccauauaaauguccagaguguggcaagaguuucagcaccagcggcaaucugaccgagcaucaacguacccauaccggugaaaagccauauaaauguccagaaugcgguaagaguuuuagucagagcaguaaucuggugcgccaucagcguacccacacgggugagaaaccauauaaguguccggaaugcggcaagaguuuuagcacccaucuggaucugauccgucaucagcgcacccacaccggugaaaaaccaaccggcaagaaaaccagugcuagcggcagcggcggcggcagcggcggcaucuucaagcccgaggagcugcggcaggcccugaugcccacccuggaggcccuguaccggcaggaccccgagagccugcccuuccggcagcccguggacccccagcugcugggcauccccgacuacuucgacaucgugaaaucccccauggaccugagcaccaucaagcggaagcuggacaccggccaguaccaggagcccuggcaguacguggacgacaucuggcugauguucaacaacgccuggcuguacaaccggaaaaccagccggguguacaaguacugcagcaagcugagcgagguguucgagcaggagaucgaccccgugaugcagagccugggcuacugcugcggccggaagcuggaguucagcccccagacccugugcugcuacggcaagcagcugugcaccaucccccgggacgccaccuacuacagcuaccagaaccgguaccacuucugcgagaagugcuucaacgagauccagggcgagagcgugagccugggcgacgaccccagccagccccagaccaccaucaacaaggagcaguucagcaagcggaagaacgacacccuggaccccgagcuguucguggagugcaccgagugcggccggaagaugcaccagaucugcgugcugcaccacgagaucaucuggcccgccggcuucgugugcgacggcugccugaagaaauccgcccggacccggaaggagaacaaguucagcgccaagcggcugcccagcacccggcugggcaccuuccuggagaaccgggugaacgacuuccugcggcggcagaaccaccccgagagcggcgaggugaccgugcggguggugcacgccagcgacaagaccguggaggugaagcccggcaugaaggcccgguucguggacagcggcgagauggccgagagcuuccccuaccggaccaaggcccuguucgccuucgaggagaucgacggcguggaccugugcuucuucggcaugcacgugcaggaguacggcagcgacugccccccccccaaccagcggcggguguacaucagcuaccuggacagcgugcacuucuuccggcccaagugccugcggaccgccguguaccacgagauccugaucggcuaccuggaguacgugaagaagcugggcuacaccaccggccacaucugggccugcccccccagcgagggcgacgacuacaucuuccacugccacccccccgaccagaagauccccaagcccaagcggcugcaggagugguacaagaagaugcuggacaaggccgugagcgagcggaucgugcacgacuacaaggacaucuucaagcaggccaccgaggaccggcugaccagcgccaaggagcugcccuacuucgagggcgacuucuggcccaacgugcuggaggagagcaucaaggagcuggagcaggaggaggaggagcggaagcgggaggagaacaccagcaacgagagcaccgacgugaccaagggcgacagcaagaacgccaagaagaagaacaacaagaaaaccagcaagaacaagagcagccugagccggggcaacaagaagaagcccggcaugcccaacgugagcaacgaccugagccagaagcuguacgccaccauggagaagcacaaggagguguucuucgugauccggcugaucgccggccccgccgccaacagccugccccccaucguggaccccgacccccugauccccugcgaccugauggacggccgggacgccuuccugacccuggcccgggacaagcaccuggaguucagcagccugcggcgggcccaguggagcaccaugugcaugcugguggagcugcacacccagagccaggacagcggcggcaagcggcccgccgccaccaagaaggccggccaggccaagaagaagaagggcagcuaccccuacgacgugcccgacuacgccgccaccaacuuuucucugcugaagcaagccggagauguggaggagaaucccggcccuaccuccgccggaaaacugggcuccggcgaaggcagaggaagccuccucacaugcggcgacguggaggagaaccccggcccucuggagggauccucaggcucacuggaaccgggggaaaaacccuacaagugcccggaaugcggcaagagcuucucgaccuccgggaaccugaccgagcaccagcgcacccacaccggagagaaaccguacaagugccccgaaugcgggaaaucguucucagacucgggaaaccucagggugcaccagcggacccacacgggggaaaagccguacaaaugcccggagugcgggaagucauucucccacaagaacgcgcugcagaaccaccaaagaacccacaccggcgaaaaaccguacaagugccccgagugcggaaaguccuucucccgcaacgacacccucaccgaacaccaacgcacccacaccggagaaaagcccuacaagugcccggaaugcggaaagagcuucagccagagggcccaccuggaaagacaccagagaacccacaccggcgaaaagccguacaaaugcccggagugcgggaaguccuucagccggucagacaagcugguccgccaccaaaggacccacacaggagaaaagcccuacaagugcccggaaugcggaaaaucguucagcgaccccggacaccugguccggcaccagaggacccacaccggggagaagccgaccggcaaaaagaccucagcgagcggaucaggaggaggaucagggggggacgcacuggacgacuucgaccuggacaugcugggaucagacgcacuggacgacuucgaccuagacaugcucggaucggacgcacucgacgacuucgaccucgacaugcuaggaucagacgcacuagacgacuucgaccucgacaugcugucgggaggaccgaagaaaaagcggaaggucggaucacaguaccucccggacaccgacgacaggcacagaaucgaagaaaaacgcaagcgcaccuacgaaaccuucaagagcaucaugaaaaagucgccguucucaggaccgaccgaccccagaccgccaccgaggagaauagccgucccgagccgauccuccgcauccgugccgaaaccggcaccgcaacccuacccguucaccucgucccugucgaccaucaacuacgacgaguuccccaccaugguguuccccuccgggcagaucucacaggccucggcacuggcacccgcaccaccgcaagugcugccccaagcaccggcacccgcaccggcgcccgcaauggugucagcgcuggcacaggcaccagcaccggugccaguccucgcaccgggaccgccgcaagcaguggcaccgccggcaccgaaaccgacccaggccggagaagggacccuguccgaggcgcugcugcaacuccaguucgacgacgaggaccugggagcacuccugggaaacuccaccgacccggcaguguucaccgaccucgcaucgguggacaacuccgaguuccaacagcuccugaaccaggggauaccgguggcaccgcacaccaccgaaccgaugcugauggaauacccggaagccaucacccggcucgugaccggagcgcaaagaccgcccgaccccgcgcccgcaccgcugggagcaccgggacuaccgaacgggcugcucucaggggacgaggacuucuccagcaucgcagacauggacuucuccgcccugcugggaucaggaucaggaucacgcgacucccgggaaggaauguuccugccgaagccggaagcaggcagcgcaaucuccgacguguucgaaggccgcgaggucugccagcccaagcgccugcgaccguuccacccgccgggaucaccgugggcaaaccgcccgcuaccggcaucacuggcaccgacacccaccggaccggugcacgaaccggucgggucacugacccccgcaccggucccgcaaccgcuagacccggcaccggcagugaccccggaagcaucgcaccuccuggaggacccggacgaggaaaccucacaggcagugaaggcccugcgggagauggccgacaccgugauaccgcagaaggaggaggccgccaucugcggacaaauggaccugucacacccgcccccgagaggacaccuggacgaacucaccaccacccuggagagcaugaccgaggaccugaaccuggacucaccgcugaccccggagcugaacgaaauccuggacaccuuccugaacgacgagugccugcugcacgcaaugcacaucagcaccgggcugucgaucuucgacaccagccuguucuccggagggaaaagacccgccgccaccaagaaagcgggccaagcaaagaaaaagaagggaucguaccccuacgacgugccggacuacgcaugagcggccgcuuaauuaagcugccuucugcggggcuugccuucuggccaugcccuucuucucucccuugcaccuguaccucuuggucuuugaauaaagccugaguaggaagucuagaaaaaaaaaaaaaaaaaaaaaaaaaaaaaaaaaaaaaaaaaaaaaaaaaaaaaaaaaaaaaaaaaaaaaaaaaaaaaaaa

SEQ ID NO: 184 - protein, 1378 aa, Artificial Sequence
  source: /note="Description of Artificial Sequence: Synthetic polypeptide"
MAPKKKRKVGIHGVPAAGSSGSHMVDLRTLGYSQQQQEKIKPKVRSTVAQHHEALVGHGFTHAHIVALSQHPAALGTVAVKYQDMIAALPEATHEAIVGVGKRGAGARALEALLTVAGELRGPPLQLDTGQLLKIAKRGGVTAVEAVHAWRNALTGAPLNLTPEQVVAIASHDGGKQALETVQRLLPVLCQAHGLTPEQVVAIASNNGGKQALETVQRLLPVLCQAHGLTPEQVVAIASNNGGKQALETVQRLLPVLCQAHGLTPEQVVAIASHDGGKQALETVQRLLPVLCQAHGLTPEQVVAIASNNGGKQALETVQRLLPVLCQAHGLTPEQVVAIASNGGGKQALETVQRLLPVLCQAHGLTPEQVVAIASNNGGKQALETVQRLLPVLCQAHGLTPEQVVAIASNNGGKQALETVQRLLPVLCQAHGLTPEQVVAIASNIGGKQALETVQRLLPVLCQAHGLTPEQVVAIASNNGGKQALETVQRLLPVLCQAHGLTPEQVVAIASNNGGKQALETVQRLLPVLCQAHGLTPEQVVAIASHDGGKQALETVQRLLPVLCQAHGLTPEQVVAIASNIGGKQALETVQRLLPVLCQAHGLTPEQVVAIASNNGGKQALETVQRLLPVLCQAHGLTPEQVVAIASNNGGKQALETVQRLLPVLCQAHGLTPEQVVAIASNNGGKQALETVQRLLPVLCQAHGLTPEQVVAIASNIGGKQALETVQRLLPVLCQAHGLTPEQVVAIASNNGGRPALESIVAQLSRPDPALAALTNDHLVALACLGGRPALDAVKKGLPHAPALIKRTNRRIPERTSHRVASGSGGGSGGDALDDFDLDMLGSDALDDFDLDMLGSDALDDFDLDMLGSDALDDFDLDMLSGGPKKKRKVGSQYLPDTDDRHRIEEKRKRTYETFKSIMKKSPFSGPTDPRPPPRRIAVPSRSSASVPKPAPQPYPFTSSLSTINYDEFPTMVFPSGQISQASALAPAPPQVLPQAPAPAPAPAMVSALAQAPAPVPVLAPGPPQAVAPPAPKPTQAGEGTLSEALLQLQFDDEDLGALLGNSTDPAVFTDLASVDNSEFQQLLNQGIPVAPHTTEPMLMEYPEAITRLVTGAQRPPDPAPAPLGAPGLPNGLLSGDEDFSSIADMDFSALLGSGSGSRDSREGMFLPKPEAGSAISDVFEGREVCQPKRLRPFHPPGSPWANRPLPASLAPTPTGPVHEPVGSLTPAPVPQPLDPAPAVTPEASHLLEDPDEETSQAVKALREMADTVIPQKEEAAICGQMDLSHPPPRGHLDELTTTLESMTEDLNLDSPLTPELNEILDTFLNDECLLHAMHISTGLSIFDTSLFSGGKRPAATKKAGQAKKKKGSYPYDVPDYA

SEQ ID NO: 185 - DNA, 4378 bp, Artificial Sequence
  source: /note="Description of Artificial Sequence: Synthetic polynucleotide"
aggaaataagagagaaaagaagagtaagaagaaatataagagccaccatggcccccaagaagaagcggaaggtgggcatccacggcgtgcccgccgccggcagcagcggatcccatatggttgatctgcgtaccctgggttatagccagcagcagcaagaaaaaatcaaaccgaaagttcgtagcaccgttgcacagcatcatgaagcactggttggtcatggttttacccatgcacatattgttgcactgagccagcatccggcagcactgggcaccgttgcagttaaatatcaggatatgattgcagcactgccggaagcaacccatgaagcaattgttggtgttggtaaacgcggagctggtgcacgtgccctggaagcactgctgaccgttgccggtgaactgcgtggtccgcctctgcagctggataccggtcagctgctgaaaattgcaaaacgtggtggtgttaccgcagttgaagcagttcatgcatggcgtaatgcactgaccggtgcaccgctgaatctgacaccggaacaggttgttgcaattgccagccatgatggtggcaaacaggcactggaaaccgttcagcgtctgctgccggttctgtgtcaggcacatggtctgacccctgaacaggtggtggccattgcaagcaataatggcggtaaacaagccctggaaacagtgcagcgcctgttaccggtgctgtgccaggcccatggcttaactccggaacaggtggtagcgatcgcatcaaacaatggaggtaaacaggccttagaaaccgtacagcgcttactgccggtgttatgccaggcgcacggcctgacgccagaacaggtagtggcaatcgcctcacatgacggtggaaaacaggcgttagagacagtccagcgcctgctgcctgtattatgtcaagcccatggcctgaccccagagcaagttgttgcgattgcaagtaataatgggggtaaacaggcacttgagacagttcaacgtttactgcctgtactgtgccaagctcacggtctgactccggaacaagtcgtcgcgattgcgagtaatggtggtggcaaacaagcattagaaacggtgcaacgcctgctgccagttctttgccaggctcacggtttaacccctgagcaggttgtagctattgcgagtaacaatggtggtaagcaggcgttggaaactgtgcaaagactgctgcccgtgttgtgccaagcacatggtttaaccccagaacaagtcgtagcaatcgcaagcaataatggtggcaagcaagcgcttgaaacagtacagcgtttattaccggtactttgtcaggcccacggtcttacaccagaacaagttgtggccatagccagtaacattggcggaaagcaggctctggaaacggtacaacgtctgttacctgttctgtgtcaagcgcacggattaacacctgaacaagtagttgccattgcgtcaaataatggaggcaagcaggccttggagacagtgcagagattactgccagtgttgtgtcaggctcatggccttacacccgagcaggtcgtggcaattgcatctaacaatggcggtaagcaagctttagagactgttcagagactgcttcctgtcctgtgccaggcacacggacttacgcctgagcaagtggttgcaatcgcctctcatgatggtggtaagcaagcactggaaactgtccaacgcttacttccggtgctttgtcaagcacacggcttaacgccagagcaggtcgtcgccatagccagcaatataggtggtaaacaggcccttgaaacggtccaaagacttctgccggtcctttgccaagcgcatgggctgacacctgagcaggtagtcgcgattgcctcaaataatggtgggaagcaggcattagaaacagttcaaagattattaccagtcctgtgtcaggcgcatgggttaaccccagagcaggtagttgcaatagcatccaacaatggcggaaaacaagcgttggaaacggttcagcggttattgcctgttttgtgccaggcgcatggtttgacacccgagcaagtggtagccatagcctcaaataatgggggtaaacaagctttggagacagtacaacggctgcttccagttttatgtcaggcccatggattgacgcctgaacaagttgtcgctatcgcaagtaatatcggtggtaaacaagcgcttgaaaccgttcaacgccttctgcctgtgctttgtcaggcacatggattaacacccgaacaggttgtcgcgatagcttcaaacaatggtggtcgtccggcactggaaagcattgttgcacagctgagccgtcctgatccggcactggcagcactgaccaatgatcatctggttgcactggcatgtctgggtggtcgccctgccctggatgcagttaaaaaaggtctgccgcatgcaccggcactgattaaacgtaccaatcgtcgtattccggaacgtaccagccatcgtgttgctagcggcagcggcggcggcagcggcggcgacgccctggacgacttcgacctggacatgctgggcagcgacgccctggacgacttcgacctggacatgctgggcagcgacgccctggacgacttcgacctggacatgctgggcagcgacgccctggacgacttcgacctggacatgctgagcggcggccccaagaagaagcggaaggtgggcagccagtacctgcccgacaccgacgaccggcaccggatcgaggagaagcggaagcggacctacgagaccttcaagagcatcatgaagaaatcccccttcagcggccccaccgacccccggccccccccccggcggatcgccgtgcccagccggagcagcgccagcgtgcccaagcccgccccccagccctaccccttcaccagcagcctgagcaccatcaactacgacgagttccccaccatggtgttccccagcggccagatcagccaggccagcgccctggcccccgcccccccccaggtgctgccccaggcccccgcccccgcccccgcccccgccatggtgagcgccctggcccaggcccccgcccccgtgcccgtgctggcccccggccccccccaggccgtggccccccccgcccccaagcccacccaggccggcgagggcaccctgagcgaggccctgctgcagctgcagttcgacgacgaggacctgggcgccctgctgggcaacagcaccgaccccgccgtgttcaccgacctggccagcgtggacaacagcgagttccagcagctgctgaaccagggcatccccgtggccccccacaccaccgagcccatgctgatggagtaccccgaggccatcacccggctggtgaccggcgcccagcggccccccgaccccgcccccgcccccctgggcgcccccggcctgcccaacggcctgctgagcggcgacgaggacttcagcagcatcgccgacatggacttcagcgccctgctgggcagcggcagcggcagccgggacagccgggagggcatgttcctgcccaagcccgaggccggcagcgccatcagcgacgtgttcgagggccgggaggtgtgccagcccaagcggctccggcccttccacccccccggcagcccctgggccaaccggcccctgcccgccagcctggcccccacccccaccggccccgtgcacgagcccgtgggcagcctgacccccgcccccgtgccccagcccctggaccccgcccccgccgtgacccccgaggccagccacctgctggaggaccccgacgaggagaccagccaggccgtgaaggccctgcgggagatggccgacaccgtgatcccccagaaggaggaggccgccatctgcggccagatggacctgagccacccccccccccggggccacctggacgagctgaccaccaccctggagagcatgaccgaggacctgaacctggacagccccctgacccccgagctgaacgagatcctggacaccttcctgaacgacgagtgcctgctgcacgccatgcacatcagcaccggcctgagcatcttcgacaccagcctgttcagcggcggcaagcggcccgccgccaccaagaaggccggccaggccaagaagaagaagggcagctacccctacgacgtgcccgactacgcctgagcggccgcttaattaagctgccttctgcggggcttgccttctggccatgcccttcttctctcccttgcacctgtacctcttggtctttgaataaagcctgagtaggaagtctagaaaaaaaaaaaaaaaaaaaaaaaaaaaaaaaaaaaaaaaaaaaaaaaaaaaaaaaaaaaaaaaaaaaaaaaaaaaaaaaa

SEQ ID NO: 186 - protein, 802 aa, Artificial Sequence
  source: /note="Description of Artificial Sequence: Synthetic polypeptide"
GSHMVDLRTLGYSQQQQEKIKPKVRSTVAQHHEALVGHGFTHAHIVALSQHPAALGTVAVKYQDMIAALPEATHEAIVGVGKRGAGARALEALLTVAGELRGPPLQLDTGQLLKIAKRGGVTAVEAVHAWRNALTGAPLNLTPEQVVAIASHDGGKQALETVQRLLPVLCQAHGLTPEQVVAIASNNGGKQALETVQRLLPVLCQAHGLTPEQVVAIASNNGGKQALETVQRLLPVLCQAHGLTPEQVVAIASHDGGKQALETVQRLLPVLCQAHGLTPEQVVAIASNNGGKQALETVQRLLPVLCQAHGLTPEQVVAIASNGGGKQALETVQRLLPVLCQAHGLTPEQVVAIASNNGGKQALETVQRLLPVLCQAHGLTPEQVVAIASNNGGKQALETVQRLLPVLCQAHGLTPEQVVAIASNIGGKQALETVQRLLPVLCQAHGLTPEQVVAIASNNGGKQALETVQRLLPVLCQAHGLTPEQVVAIASNNGGKQALETVQRLLPVLCQAHGLTPEQVVAIASHDGGKQALETVQRLLPVLCQAHGLTPEQVVAIASNIGGKQALETVQRLLPVLCQAHGLTPEQVVAIASNNGGKQALETVQRLLPVLCQAHGLTPEQVVAIASNNGGKQALETVQRLLPVLCQAHGLTPEQVVAIASNNGGKQALETVQRLLPVLCQAHGLTPEQVVAIASNIGGKQALETVQRLLPVLCQAHGLTPEQVVAIASNNGGRPALESIVAQLSRPDPALAALTNDHLVALACLGGRPALDAVKKGLPHAPALIKRTNRRIPERTSHRVAS

SEQ ID NO: 187 - protein, 1378 aa, Artificial Sequence
  source: /note="Description of Artificial Sequence: Synthetic polypeptide"
MAPKKKRKVGIHGVPAAGSSGSHMVDLRTLGYSQQQQEKIKPKVRSTVAQHHEALVGHGFTHAHIVALSQHPAALGTVAVKYQDMIAALPEATHEAIVGVGKRGAGARALEALLTVAGELRGPPLQLDTGQLLKIAKRGGVTAVEAVHAWRNALTGAPLNLTPEQVVAIASNGGGKQALETVQRLLPVLCQAHGLTPEQVVAIASNGGGKQALETVQRLLPVLCQAHGLTPEQVVAIASHDGGKQALETVQRLLPVLCQAHGLTPEQVVAIASNNGGKQALETVQRLLPVLCQAHGLTPEQVVAIASNNGGKQALETVQRLLPVLCQAHGLTPEQVVAIASNNGGKQALETVQRLLPVLCQAHGLTPEQVVAIASNNGGKQALETVQRLLPVLCQAHGLTPEQVVAIASNGGGKQALETVQRLLPVLCQAHGLTPEQVVAIASNNGGKQALETVQRLLPVLCQAHGLTPEQVVAIASNNGGKQALETVQRLLPVLCQAHGLTPEQVVAIASNNGGKQALETVQRLLPVLCQAHGLTPEQVVAIASHDGGKQALETVQRLLPVLCQAHGLTPEQVVAIASNNGGKQALETVQRLLPVLCQAHGLTPEQVVAIASHDGGKQALETVQRLLPVLCQAHGLTPEQVVAIASHDGGKQALETVQRLLPVLCQAHGLTPEQVVAIASHDGGKQALETVQRLLPVLCQAHGLTPEQVVAIASNIGGKQALETVQRLLPVLCQAHGLTPEQVVAIASNNGGRPALESIVAQLSRPDPALAALTNDHLVALACLGGRPALDAVKKGLPHAPALIKRTNRRIPERTSHRVASGSGGGSGGDALDDFDLDMLGSDALDDFDLDMLGSDALDDFDLDMLGSDALDDFDLDMLSGGPKKKRKVGSQYLPDTDDRHRIEEKRKRTYETFKSIMKKSPFSGPTDPRPPPRRIAVPSRSSASVPKPAPQPYPFTSSLSTINYDEFPTMVFPSGQISQASALAPAPPQVLPQAPAPAPAPAMVSALAQAPAPVPVLAPGPPQAVAPPAPKPTQAGEGTLSEALLQLQFDDEDLGALLGNSTDPAVFTDLASVDNSEFQQLLNQGIPVAPHTTEPMLMEYPEAITRLVTGAQRPPDPAPAPLGAPGLPNGLLSGDEDFSSIADMDFSALLGSGSGSRDSREGMFLPKPEAGSAISDVFEGREVCQPKRLRPFHPPGSPWANRPLPASLAPTPTGPVHEPVGSLTPAPVPQPLDPAPAVTPEASHLLEDPDEETSQAVKALREMADTVIPQKEEAAICGQMDLSHPPPRGHLDELTTTLESMTEDLNLDSPLTPELNEILDTFLNDECLLHAMHISTGLSIFDTSLFSGGKRPAATKKAGQAKKKKGSYPYDVPDYA

SEQ ID NO: 188 - DNA, 4378 bp, Artificial Sequence
  source: /note="Description of Artificial Sequence: Synthetic polynucleotide"
aggaaataagagagaaaagaagagtaagaagaaatataagagccaccatggcccccaagaagaagcggaaggtgggcatccacggcgtgcccgccgccggcagcagcggatcccatatggttgatctgcgtaccctgggttatagccagcagcagcaagaaaaaatcaaaccgaaagttcgtagcaccgttgcacagcatcatgaagcactggttggtcatggttttacccatgcacatattgttgcactgagccagcatccggcagcactgggcaccgttgcagttaaatatcaggatatgattgcagcactgccggaagcaacccatgaagcaattgttggtgttggtaaacgcggagctggtgcacgtgccctggaagcactgctgaccgttgccggtgaactgcgtggtccgcctctgcagctggataccggtcagctgctgaaaattgcaaaacgtggtggtgttaccgcagttgaagcagttcatgcatggcgtaatgcactgaccggtgcaccgctgaatctgacaccggaacaggttgttgcaattgccagcaatggtggtggcaaacaggcactggaaaccgttcagcgtctgctgccggttctgtgtcaggcacatggtctgacccctgaacaggtggtggccattgcaagcaatggcggcggtaaacaagccctggaaacagtgcagcgcctgttaccggtgctgtgccaggcccatggcttaactccggaacaggtggtagcgatcgcatcacatgatggaggtaaacaggccttagaaaccgtacagcgcttactgccggtgttatgccaggcgcacggcctgacgccagaacaggtagtggcaatcgcctcaaataatggtggaaaacaggcgttagagacagtccagcgcctgctgcctgtattatgtcaagcccatggcctgaccccagagcaagttgttgcgattgcaagtaacaatgggggtaaacaggcacttgagacagttcaacgtttactgcctgtactgtgccaagctcacggtctgactccggaacaagtcgtcgcgattgcgagtaataatggtggcaaacaagcattagaaacggtgcaacgcctgctgccagttctttgccaggctcacggtttaacccctgagcaggttgtagctattgcgagtaacaatggtggtaagcaggcgttggaaactgtgcaaagactgctgcccgtgttgtgccaagcacatggtttaaccccagaacaagtcgtagcaatcgcaagcaatgggggtggcaagcaagcgcttgaaacagtacagcgtttattaccggtactttgtcaggcccacggtcttacaccagaacaagttgtggccatagccagtaataatggcggaaagcaggctctggaaacggtacaacgtctgttacctgttctgtgtcaagcgcacggattaacacctgaacaagtagttgccattgcgtcaaacaatggaggcaagcaggccttggagacagtgcagagattactgccagtgttgtgtcaggctcatggccttacacccgagcaggtcgtggcaattgcatctaataatggcggtaagcaagctttagagactgttcagagactgcttcctgtcctgtgccaggcacacggacttacgcctgagcaagtggttgcaatcgcctctcatgatggtggtaagcaagcactggaaactgtccaacgcttacttccggtgctttgtcaagcacacggcttaacgccagagcaggtcgtcgccatagccagcaacaatggtggtaaacaggcccttgaaacggtccaaagacttctgccggtcctttgccaagcgcatgggctgacacctgagcaggtagtcgcgattgcctcacatgacggtgggaagcaggcattagaaacagttcaaagattattaccagtcctgtgtcaggcgcatgggttaaccccagagcaggtagttgcaatagcatcccatgatggcggaaaacaagcgttggaaacggttcagcggttattgcctgttttgtgccaggcgcatggtttgacacccgagcaagtggtagccatagcctcacatgacgggggtaaacaagctttggagacagtacaacggctgcttccagttttatgtcaggcccatggattgacgcctgaacaagttgtcgctatcgcaagtaacattggtggtaaacaagcgcttgaaaccgttcaacgccttctgcctgtgctttgtcaggcacatggattaacacccgaacaggttgtcgcgatagcttcaaacaatggtggtcgtccggcactggaaagcattgttgcacagctgagccgtcctgatccggcactggcagcactgaccaatgatcatctggttgcactggcatgtctgggtggtcgccctgccctggatgcagttaaaaaaggtctgccgcatgcaccggcactgattaaacgtaccaatcgtcgtattccggaacgtaccagccatcgtgttgctagcggcagcggcggcggcagcggcggcgacgccctggacgacttcgacctggacatgctgggcagcgacgccctggacgacttcgacctggacatgctgggcagcgacgccctggacgacttcgacctggacatgctgggcagcgacgccctggacgacttcgacctggacatgctgagcggcggccccaagaagaagcggaaggtgggcagccagtacctgcccgacaccgacgaccggcaccggatcgaggagaagcggaagcggacctacgagaccttcaagagcatcatgaagaaatcccccttcagcggccccaccgacccccggccccccccccggcggatcgccgtgcccagccggagcagcgccagcgtgcccaagcccgccccccagccctaccccttcaccagcagcctgagcaccatcaactacgacgagttccccaccatggtgttccccagcggccagatcagccaggccagcgccctggcccccgcccccccccaggtgctgccccaggcccccgcccccgcccccgcccccgccatggtgagcgccctggcccaggcccccgcccccgtgcccgtgctggcccccggccccccccaggccgtggccccccccgcccccaagcccacccaggccggcgagggcaccctgagcgaggccctgctgcagctgcagttcgacgacgaggacctgggcgccctgctgggcaacagcaccgaccccgccgtgttcaccgacctggccagcgtggacaacagcgagttccagcagctgctgaaccagggcatccccgtggccccccacaccaccgagcccatgctgatggagtaccccgaggccatcacccggctggtgaccggcgcccagcggccccccgaccccgcccccgcccccctgggcgcccccggcctgcccaacggcctgctgagcggcgacgaggacttcagcagcatcgccgacatggacttcagcgccctgctgggcagcggcagcggcagccgggacagccgggagggcatgttcctgcccaagcccgaggccggcagcgccatcagcgacgtgttcgagggccgggaggtgtgccagcccaagcggctccggcccttccacccccccggcagcccctgggccaaccggcccctgcccgccagcctggcccccacccccaccggccccgtgcacgagcccgtgggcagcctgacccccgcccccgtgccccagcccctggaccccgcccccgccgtgacccccgaggccagccacctgctggaggaccccgacgaggagaccagccaggccgtgaaggccctgcgggagatggccgacaccgtgatcccccagaaggaggaggccgccatctgcggccagatggacctgagccacccccccccccggggccacctggacgagctgaccaccaccctggagagcatgaccgaggacctgaacctggacagccccctgacccccgagctgaacgagatcctggacaccttcctgaacgacgagtgcctgctgcacgccatgcacatcagcaccggcctgagcatcttcgacaccagcctgttcagcggcggcaagcggcccgccgccaccaagaaggccggccaggccaagaagaagaagggcagctacccctacgacgtgcccgactacgcctgagcggccgcttaattaagctgccttctgcggggcttgccttctggccatgcccttcttctctcccttgcacctgtacctcttggtctttgaataaagcctgagtaggaagtctagaaaaaaaaaaaaaaaaaaaaaaaaaaaaaaaaaaaaaaaaaaaaaaaaaaaaaaaaaaaaaaaaaaaaaaaaaaaaaaaa

SEQ ID NO: 189 - protein, 802 aa, Artificial Sequence
  source: /note="Description of Artificial Sequence: Synthetic polypeptide"
GSHMVDLRTLGYSQQQQEKIKPKVRSTVAQHHEALVGHGFTHAHIVALSQHPAALGTVAVKYQDMIAALPEATHEAIVGVGKRGAGARALEALLTVAGELRGPPLQLDTGQLLKIAKRGGVTAVEAVHAWRNALTGAPLNLTPEQVVAIASNGGGKQALETVQRLLPVLCQAHGLTPEQVVAIASNGGGKQALETVQRLLPVLCQAHGLTPEQVVAIASHDGGKQALETVQRLLPVLCQAHGLTPEQVVAIASNNGGKQALETVQRLLPVLCQAHGLTPEQVVAIASNNGGKQALETVQRLLPVLCQAHGLTPEQVVAIASNNGGKQALETVQRLLPVLCQAHGLTPEQVVAIASNNGGKQALETVQRLLPVLCQAHGLTPEQVVAIASNGGGKQALETVQRLLPVLCQAHGLTPEQVVAIASNNGGKQALETVQRLLPVLCQAHGLTPEQVVAIASNNGGKQALETVQRLLPVLCQAHGLTPEQVVAIASNNGGKQALETVQRLLPVLCQAHGLTPEQVVAIASHDGGKQALETVQRLLPVLCQAHGLTPEQVVAIASNNGGKQALETVQRLLPVLCQAHGLTPEQVVAIASHDGGKQALETVQRLLPVLCQAHGLTPEQVVAIASHDGGKQALETVQRLLPVLCQAHGLTPEQVVAIASHDGGKQALETVQRLLPVLCQAHGLTPEQVVAIASNIGGKQALETVQRLLPVLCQAHGLTPEQVVAIASNNGGRPALESIVAQLSRPDPALAALTNDHLVALACLGGRPALDAVKKGLPHAPALIKRTNRRIPERTSHRVAS

SEQ ID NO: 190 - protein, 1378 aa, Artificial Sequence
  source: /note="Description of Artificial Sequence: Synthetic polypeptide"
MAPKKKRKVGIHGVPAAGSSGSHMVDLRTLGYSQQQQEKIKPKVRSTVAQHHEALVGHGFTHAHIVALSQHPAALGTVAVKYQDMIAALPEATHEAIVGVGKRGAGARALEALLTVAGELRGPPLQLDTGQLLKIAKRGGVTAVEAVHAWRNALTGAPLNLTPEQVVAIASNNGGKQALETVQRLLPVLCQAHGLTPEQVVAIASNGGGKQALETVQRLLPVLCQAHGLTPEQVVAIASNGGGKQALETVQRLLPVLCQAHGLTPEQVVAIASNGGGKQALETVQRLLPVLCQAHGLTPEQVVAIASNNGGKQALETVQRLLPVLCQAHGLTPEQVVAIASNIGGKQALETVQRLLPVLCQAHGLTPEQVVAIASNIGGKQALETVQRLLPVLCQAHGLTPEQVVAIASNIGGKQALETVQRLLPVLCQAHGLTPEQVVAIASNNGGKQALETVQRLLPVLCQAHGLTPEQVVAIASNNGGKQALETVQRLLPVLCQAHGLTPEQVVAIASNIGGKQALETVQRLLPVLCQAHGLTPEQVVAIASNIGGKQALETVQRLLPVLCQAHGLTPEQVVAIASNNGGKQALETVQRLLPVLCQAHGLTPEQVVAIASNNGGKQALETVQRLLPVLCQAHGLTPEQVVAIASHDGGKQALETVQRLLPVLCQAHGLTPEQVVAIASNIGGKQALETVQRLLPVLCQAHGLTPEQVVAIASNNGGKQALETVQRLLPVLCQAHGLTPEQVVAIASNIGGRPALESIVAQLSRPDPALAALTNDHLVALACLGGRPALDAVKKGLPHAPALIKRTNRRIPERTSHRVASGSGGGSGGDALDDFDLDMLGSDALDDFDLDMLGSDALDDFDLDMLGSDALDDFDLDMLSGGPKKKRKVGSQYLPDTDDRHRIEEKRKRTYETFKSIMKKSPFSGPTDPRPPPRRIAVPSRSSASVPKPAPQPYPFTSSLSTINYDEFPTMVFPSGQISQASALAPAPPQVLPQAPAPAPAPAMVSALAQAPAPVPVLAPGPPQAVAPPAPKPTQAGEGTLSEALLQLQFDDEDLGALLGNSTDPAVFTDLASVDNSEFQQLLNQGIPVAPHTTEPMLMEYPEAITRLVTGAQRPPDPAPAPLGAPGLPNGLLSGDEDFSSIADMDFSALLGSGSGSRDSREGMFLPKPEAGSAISDVFEGREVCQPKRLRPFHPPGSPWANRPLPASLAPTPTGPVHEPVGSLTPAPVPQPLDPAPAVTPEASHLLEDPDEETSQAVKALREMADTVIPQKEEAAICGQMDLSHPPPRGHLDELTTTLESMTEDLNLDSPLTPELNEILDTFLNDECLLHAMHISTGLSIFDTSLFSGGKRPAATKKAGQAKKKKGSYPYDVPDYA

SEQ ID NO: 191 - DNA, 4378 bp, Artificial Sequence
  source: /note="Description of Artificial Sequence: Synthetic polynucleotide"
aggaaataagagagaaaagaagagtaagaagaaatataagagccaccatggcccccaagaagaagcggaaggtgggcatccacggcgtgcccgccgccggcagcagcggatcccatatggttgatctgcgtaccctgggttatagccagcagcagcaagaaaaaatcaaaccgaaagttcgtagcaccgttgcacagcatcatgaagcactggttggtcatggttttacccatgcacatattgttgcactgagccagcatccggcagcactgggcaccgttgcagttaaatatcaggatatgattgcagcactgccggaagcaacccatgaagcaattgttggtgttggtaaacgcggagctggtgcacgtgccctggaagcactgctgaccgttgccggtgaactgcgtggtccgcctctgcagctggataccggtcagctgctgaaaattgcaaaacgtggtggtgttaccgcagttgaagcagttcatgcatggcgtaatgcactgaccggtgcaccgctgaatctgacaccggaacaggttgttgcaattgccagcaataatggtggcaaacaggcactggaaaccgttcagcgtctgctgccggttctgtgtcaggcacatggtctgacccctgaacaggtggtggccattgcaagcaatggtggcggtaaacaagccctggaaacagtgcagcgcctgttaccggtgctgtgccaggcccatggcttaactccggaacaggtggtagcgatcgcatcaaatggcggaggtaaacaggccttagaaaccgtacagcgcttactgccggtgttatgccaggcgcacggcctgacgccagaacaggtagtggcaatcgcctcaaatgggggtggaaaacaggcgttagagacagtccagcgcctgctgcctgtattatgtcaagcccatggcctgaccccagagcaagttgttgcgattgcaagtaacaatgggggtaaacaggcacttgagacagttcaacgtttactgcctgtactgtgccaagctcacggtctgactccggaacaagtcgtcgcgattgcgagtaacattggtggcaaacaagcattagaaacggtgcaacgcctgctgccagttctttgccaggctcacggtttaacccctgagcaggttgtagctattgcgagtaatatcggtggtaagcaggcgttggaaactgtgcaaagactgctgcccgtgttgtgccaagcacatggtttaaccccagaacaagtcgtagcaatcgcaagcaatataggtggcaagcaagcgcttgaaacagtacagcgtttattaccggtactttgtcaggcccacggtcttacaccagaacaagttgtggccatagccagtaataatggcggaaagcaggctctggaaacggtacaacgtctgttacctgttctgtgtcaagcgcacggattaacacctgaacaagtagttgccattgcgtcaaacaatggaggcaagcaggccttggagacagtgcagagattactgccagtgttgtgtcaggctcatggccttacacccgagcaggtcgtggcaattgcatctaacattggcggtaagcaagctttagagactgttcagagactgcttcctgtcctgtgccaggcacacggacttacgcctgagcaagtggttgcaatcgcctctaatatcggtggtaagcaagcactggaaactgtccaacgcttacttccggtgctttgtcaagcacacggcttaacgccagagcaggtcgtcgccatagccagcaataatggtggtaaacaggcccttgaaacggtccaaagacttctgccggtcctttgccaagcgcatgggctgacacctgagcaggtagtcgcgattgcctcaaacaatggtgggaagcaggcattagaaacagttcaaagattattaccagtcctgtgtcaggcgcatgggttaaccccagagcaggtagttgcaatagcatcccatgatggcggaaaacaagcgttggaaacggttcagcggttattgcctgttttgtgccaggcgcatggtttgacacccgagcaagtggtagccatagcctcaaatatagggggtaaacaagctttggagacagtacaacggctgcttccagttttatgtcaggcccatggattgacgcctgaacaagttgtcgctatcgcaagtaataatggtggtaaacaagcgcttgaaaccgttcaacgccttctgcctgtgctttgtcaggcacatggattaacacccgaacaggttgtcgcgatagcttcaaacattggtggtcgtccggcactggaaagcattgttgcacagctgagccgtcctgatccggcactggcagcactgaccaatgatcatctggttgcactggcatgtctgggtggtcgccctgccctggatgcagttaaaaaaggtctgccgcatgcaccggcactgattaaacgtaccaatcgtcgtattccggaacgtaccagccatcgtgttgctagcggcagcggcggcggcagcggcggcgacgccctggacgacttcgacctggacatgctgggcagcgacgccctggacgacttcgacctggacatgctgggcagcgacgccctggacgacttcgacctggacatgctgggcagcgacgccctggacgacttcgacctggacatgctgagcggcggccccaagaagaagcggaaggtgggcagccagtacctgcccgacaccgacgaccggcaccggatcgaggagaagcggaagcggacctacgagaccttcaagagcatcatgaagaaatcccccttcagcggccccaccgacccccggccccccccccggcggatcgccgtgcccagccggagcagcgccagcgtgcccaagcccgccccccagccctaccccttcaccagcagcctgagcaccatcaactacgacgagttccccaccatggtgttccccagcggccagatcagccaggccagcgccctggcccccgcccccccccaggtgctgccccaggcccccgcccccgcccccgcccccgccatggtgagcgccctggcccaggcccccgcccccgtgcccgtgctggcccccggccccccccaggccgtggccccccccgcccccaagcccacccaggccggcgagggcaccctgagcgaggccctgctgcagctgcagttcgacgacgaggacctgggcgccctgctgggcaacagcaccgaccccgccgtgttcaccgacctggccagcgtggacaacagcgagttccagcagctgctgaaccagggcatccccgtggccccccacaccaccgagcccatgctgatggagtaccccgaggccatcacccggctggtgaccggcgcccagcggccccccgaccccgcccccgcccccctgggcgcccccggcctgcccaacggcctgctgagcggcgacgaggacttcagcagcatcgccgacatggacttcagcgccctgctgggcagcggcagcggcagccgggacagccgggagggcatgttcctgcccaagcccgaggccggcagcgccatcagcgacgtgttcgagggccgggaggtgtgccagcccaagcggctccggcccttccacccccccggcagcccctgggccaaccggcccctgcccgccagcctggcccccacccccaccggccccgtgcacgagcccgtgggcagcctgacccccgcccccgtgccccagcccctggaccccgcccccgccgtgacccccgaggccagccacctgctggaggaccccgacgaggagaccagccaggccgtgaaggccctgcgggagatggccgacaccgtgatcccccagaaggaggaggccgccatctgcggccagatggacctgagccacccccccccccggggccacctggacgagctgaccaccaccctggagagcatgaccgaggacctgaacctggacagccccctgacccccgagctgaacgagatcctggacaccttcctgaacgacgagtgcctgctgcacgccatgcacatcagcaccggcctgagcatcttcgacaccagcctgttcagcggcggcaagcggcccgccgccaccaagaaggccggccaggccaagaagaagaagggcagctacccctacgacgtgcccgactacgcctgagcggccgcttaattaagctgccttctgcggggcttgccttctggccatgcccttcttctctcccttgcacctgtacctcttggtctttgaataaagcctgagtaggaagtctagaaaaaaaaaaaaaaaaaaaaaaaaaaaaaaaaaaaaaaaaaaaaaaaaaaaaaaaaaaaaaaaaaaaaaaaaaaaaaaaa

SEQ ID NO: 192 - protein, 802 aa, Artificial Sequence
  source: /note="Description of Artificial Sequence: Synthetic polypeptide"
GSHMVDLRTLGYSQQQQEKIKPKVRSTVAQHHEALVGHGFTHAHIVALSQHPAALGTVAVKYQDMIAALPEATHEAIVGVGKRGAGARALEALLTVAGELRGPPLQLDTGQLLKIAKRGGVTAVEAVHAWRNALTGAPLNLTPEQVVAIASNNGGKQALETVQRLLPVLCQAHGLTPEQVVAIASNGGGKQALETVQRLLPVLCQAHGLTPEQVVAIASNGGGKQALETVQRLLPVLCQAHGLTPEQVVAIASNGGGKQALETVQRLLPVLCQAHGLTPEQVVAIASNNGGKQALETVQRLLPVLCQAHGLTPEQVVAIASNIGGKQALETVQRLLPVLCQAHGLTPEQVVAIASNIGGKQALETVQRLLPVLCQAHGLTPEQVVAIASNIGGKQALETVQRLLPVLCQAHGLTPEQVVAIASNNGGKQALETVQRLLPVLCQAHGLTPEQVVAIASNNGGKQALETVQRLLPVLCQAHGLTPEQVVAIASNIGGKQALETVQRLLPVLCQAHGLTPEQVVAIASNIGGKQALETVQRLLPVLCQAHGLTPEQVVAIASNNGGKQALETVQRLLPVLCQAHGLTPEQVVAIASNNGGKQALETVQRLLPVLCQAHGLTPEQVVAIASHDGGKQALETVQRLLPVLCQAHGLTPEQVVAIASNIGGKQALETVQRLLPVLCQAHGLTPEQVVAIASNNGGKQALETVQRLLPVLCQAHGLTPEQVVAIASNIGGRPALESIVAQLSRPDPALAALTNDHLVALACLGGRPALDAVKKGLPHAPALIKRTNRRIPERTSHRVAS

SEQ ID NO: 193 - protein, 1377 aa, Artificial Sequence
  source: /note="Description of Artificial Sequence: Synthetic polypeptide"
MAPKKKRKVGIHGVPAAGSSGSHMVDLRTLGYSQQQQEKIKPKVRSTVAQHHEALVGHGFTHAHIVALSQHPAALGTVAVKYQDMIAALPEATHEAIVGVGKRGAGARALEALLTVAGELRGPPLQLDTGQLLKIAKRGGVTAVEAVHAWRNALTGAPLNLTPEQVVAIASHDGGKQALETVQRLLPVLCQAHGLTPEQVVAIASHDGGKQALETVQRLLPVLCQAHGLTPEQVVAIASNIGGKQALETVQRLLPVLCQAHGLTPEQVVAIASNNGGKQALETVQRLLPVLCQAHGLTPEQVVAIASHDGGKQALETVQRLLPVLCQAHGLTPEQVVAIASNIGGKQALETVQRLLPVLCQAHGLTPEQVVAIASNNGGKQALETVQRLLPVLCQAHGLTPEQVVAIASNIGGKQALETVQRLLPVLCQAHGLTPEQVVAIASNGGGKQALETVQRLLPVLCQAHGLTPEQVVAIASHDGGKQALETVQRLLPVLCQAHGLTPEQVVAIASNGGGKQALETVQRLLPVLCQAHGLTPEQVVAIASNGGGKQALETVQRLLPVLCQAHGLTPEQVVAIASHDGGKQALETVQRLLPVLCQAHGLTPEQVVAIASHDGGKQALETVQRLLPVLCQAHGLTPEQVVAIASHDGGKQALETVQRLLPVLCQAHGLTPEQVVAIASNIGGKQALETVQRLLPVLCQAHGLTPEQVVAIASNNGGKQALETVQRLLPVLCQAHGLTPEQVVAIASNIGGRPALESIVAQLSRPDPALAALTNDHLVALACLGGRPALDAVKKGLPHAPALIKRTNRRIPERTSHRVASGSGGGSGGDALDDFDLDMLGSDALDDFDLDMLGSDALDDFDLDMLGSDALDDFDLDMLSGGPKKKRKVGSQYLPDTDDRHRIEEKRKRTYETFKSIMKKSPFSGPTDPRPPPRRIAVPSRSSASVPKPAPQPYPFTSSLSTINYDEFPTMVFPSGQISQASALAPAPPQVLPQAPAPAPAPAMVSALAQAPAPVPVLAPGPPQAVAPPAPKPTQAGEGTLSEALLQLQFDDEDLGALLGNSTDPAVFTDLASVDNSEFQQLLNQGIPVAPHTTEPMLMEYPEAITRLVTGAQRPPDPAPAPLGAPGLPNGLLSGDEDFSSIADMDFSALLGSGSGSRDSREGMFLPKPEAGSAISDVFEGREVCQPKRLRPFHPPGSPWANRPLPASLAPTPTGPVHEPVGSLTPAPVPQPLDPAPAVTPEASHLLEDPDEETSQAVKALREMADTVIPQKEEAAICGQMDLSHPPPRGHLDELTTTLESMTEDLNLDSPLTPELNEILDTFLNDECLLHAMHISTGLSIFDTSLFSGGKRPAATKKAGQAKKKKGSYPYDVPDY

SEQ ID NO: 194 - DNA, 4378 bp, Artificial Sequence
  source: /note="Description of Artificial Sequence: Synthetic polynucleotide"
aggaaataagagagaaaagaagagtaagaagaaatataagagccaccatggcccccaagaagaagcggaaggtgggcatccacggcgtgcccgccgccggcagcagcggatcccatatggttgatctgcgtaccctgggttatagccagcagcagcaagaaaaaatcaaaccgaaagttcgtagcaccgttgcacagcatcatgaagcactggttggtcatggttttacccatgcacatattgttgcactgagccagcatccggcagcactgggcaccgttgcagttaaatatcaggatatgattgcagcactgccggaagcaacccatgaagcaattgttggtgttggtaaacgcggagctggtgcacgtgccctggaagcactgctgaccgttgccggtgaactgcgtggtccgcctctgcagctggataccggtcagctgctgaaaattgcaaaacgtggtggtgttaccgcagttgaagcagttcatgcatggcgtaatgcactgaccggtgcaccgctgaatctgacaccggaacaggttgttgcaattgccagccatgatggtggcaaacaggcactggaaaccgttcagcgtctgctgccggttctgtgtcaggcacatggtctgacccctgaacaggtggtggccattgcaagccatgacggcggtaaacaagccctggaaacagtgcagcgcctgttaccggtgctgtgccaggcccatggcttaactccggaacaggtggtagcgatcgcatcaaacattggaggtaaacaggccttagaaaccgtacagcgcttactgccggtgttatgccaggcgcacggcctgacgccagaacaggtagtggcaatcgcctcaaataatggtggaaaacaggcgttagagacagtccagcgcctgctgcctgtattatgtcaagcccatggcctgaccccagagcaagttgttgcgattgcaagtcatgatgggggtaaacaggcacttgagacagttcaacgtttactgcctgtactgtgccaagctcacggtctgactccggaacaagtcgtcgcgattgcgagtaatatcggtggcaaacaagcattagaaacggtgcaacgcctgctgccagttctttgccaggctcacggtttaacccctgagcaggttgtagctattgcgagtaacaatggtggtaagcaggcgttggaaactgtgcaaagactgctgcccgtgttgtgccaagcacatggtttaaccccagaacaagtcgtagcaatcgcaagcaatataggtggcaagcaagcgcttgaaacagtacagcgtttattaccggtactttgtcaggcccacggtcttacaccagaacaagttgtggccatagccagtaatggtggcggaaagcaggctctggaaacggtacaacgtctgttacctgttctgtgtcaagcgcacggattaacacctgaacaagtagttgccattgcgtcacatgacggaggcaagcaggccttggagacagtgcagagattactgccagtgttgtgtcaggctcatggccttacacccgagcaggtcgtggcaattgcatctaatggcggcggtaagcaagctttagagactgttcagagactgcttcctgtcctgtgccaggcacacggacttacgcctgagcaagtggttgcaatcgcctctaatgggggtggtaagcaagcactggaaactgtccaacgcttacttccggtgctttgtcaagcacacggcttaacgccagagcaggtcgtcgccatagccagccatgatggtggtaaacaggcccttgaaacggtccaaagacttctgccggtcctttgccaagcgcatgggctgacacctgagcaggtagtcgcgattgcctcacatgacggtgggaagcaggcattagaaacagttcaaagattattaccagtcctgtgtcaggcgcatgggttaaccccagagcaggtagttgcaatagcatcccatgatggcggaaaacaagcgttggaaacggttcagcggttattgcctgttttgtgccaggcgcatggtttgacacccgagcaagtggtagccatagcctcaaacattgggggtaaacaagctttggagacagtacaacggctgcttccagttttatgtcaggcccatggattgacgcctgaacaagttgtcgctatcgcaagtaataatggtggtaaacaagcgcttgaaaccgttcaacgccttctgcctgtgctttgtcaggcacatggattaacacccgaacaggttgtcgcgatagcttcaaatatcggtggtcgtccggcactggaaagcattgttgcacagctgagccgtcctgatccggcactggcagcactgaccaatgatcatctggttgcactggcatgtctgggtggtcgccctgccctggatgcagttaaaaaaggtctgccgcatgcaccggcactgattaaacgtaccaatcgtcgtattccggaacgtaccagccatcgtgttgctagcggcagcggcggcggcagcggcggcgacgccctggacgacttcgacctggacatgctgggcagcgacgccctggacgacttcgacctggacatgctgggcagcgacgccctggacgacttcgacctggacatgctgggcagcgacgccctggacgacttcgacctggacatgctgagcggcggccccaagaagaagcggaaggtgggcagccagtacctgcccgacaccgacgaccggcaccggatcgaggagaagcggaagcggacctacgagaccttcaagagcatcatgaagaaatcccccttcagcggccccaccgacccccggccccccccccggcggatcgccgtgcccagccggagcagcgccagcgtgcccaagcccgccccccagccctaccccttcaccagcagcctgagcaccatcaactacgacgagttccccaccatggtgttccccagcggccagatcagccaggccagcgccctggcccccgcccccccccaggtgctgccccaggcccccgcccccgcccccgcccccgccatggtgagcgccctggcccaggcccccgcccccgtgcccgtgctggcccccggccccccccaggccgtggccccccccgcccccaagcccacccaggccggcgagggcaccctgagcgaggccctgctgcagctgcagttcgacgacgaggacctgggcgccctgctgggcaacagcaccgaccccgccgtgttcaccgacctggccagcgtggacaacagcgagttccagcagctgctgaaccagggcatccccgtggccccccacaccaccgagcccatgctgatggagtaccccgaggccatcacccggctggtgaccggcgcccagcggccccccgaccccgcccccgcccccctgggcgcccccggcctgcccaacggcctgctgagcggcgacgaggacttcagcagcatcgccgacatggacttcagcgccctgctgggcagcggcagcggcagccgggacagccgggagggcatgttcctgcccaagcccgaggccggcagcgccatcagcgacgtgttcgagggccgggaggtgtgccagcccaagcggctccggcccttccacccccccggcagcccctgggccaaccggcccctgcccgccagcctggcccccacccccaccggccccgtgcacgagcccgtgggcagcctgacccccgcccccgtgccccagcccctggaccccgcccccgccgtgacccccgaggccagccacctgctggaggaccccgacgaggagaccagccaggccgtgaaggccctgcgggagatggccgacaccgtgatcccccagaaggaggaggccgccatctgcggccagatggacctgagccacccccccccccggggccacctggacgagctgaccaccaccctggagagcatgaccgaggacctgaacctggacagccccctgacccccgagctgaacgagatcctggacaccttcctgaacgacgagtgcctgctgcacgccatgcacatcagcaccggcctgagcatcttcgacaccagcctgttcagcggcggcaagcggcccgccgccaccaagaaggccggccaggccaagaagaagaagggcagctacccctacgacgtgcccgactacgcctgagcggccgcttaattaagctgccttctgcggggcttgccttctggccatgcccttcttctctcccttgcacctgtacctcttggtctttgaataaagcctgagtaggaagtctagaaaaaaaaaaaaaaaaaaaaaaaaaaaaaaaaaaaaaaaaaaaaaaaaaaaaaaaaaaaaaaaaaaaaaaaaaaaaaaaa

SEQ ID NO: 195 - protein, 802 aa, Artificial Sequence
  source: /note="Description of Artificial Sequence: Synthetic polypeptide"
GSHMVDLRTLGYSQQQQEKIKPKVRSTVAQHHEALVGHGFTHAHIVALSQHPAALGTVAVKYQDMIAALPEATHEAIVGVGKRGAGARALEALLTVAGELRGPPLQLDTGQLLKIAKRGGVTAVEAVHAWRNALTGAPLNLTPEQVVAIASHDGGKQALETVQRLLPVLCQAHGLTPEQVVAIASHDGGKQALETVQRLLPVLCQAHGLTPEQVVAIASNIGGKQALETVQRLLPVLCQAHGLTPEQVVAIASNNGGKQALETVQRLLPVLCQAHGLTPEQVVAIASHDGGKQALETVQRLLPVLCQAHGLTPEQVVAIASNIGGKQALETVQRLLPVLCQAHGLTPEQVVAIASNNGGKQALETVQRLLPVLCQAHGLTPEQVVAIASNIGGKQALETVQRLLPVLCQAHGLTPEQVVAIASNGGGKQALETVQRLLPVLCQAHGLTPEQVVAIASHDGGKQALETVQRLLPVLCQAHGLTPEQVVAIASNGGGKQALETVQRLLPVLCQAHGLTPEQVVAIASNGGGKQALETVQRLLPVLCQAHGLTPEQVVAIASHDGGKQALETVQRLLPVLCQAHGLTPEQVVAIASHDGGKQALETVQRLLPVLCQAHGLTPEQVVAIASHDGGKQALETVQRLLPVLCQAHGLTPEQVVAIASNIGGKQALETVQRLLPVLCQAHGLTPEQVVAIASNNGGKQALETVQRLLPVLCQAHGLTPEQVVAIASNIGGRPALESIVAQLSRPDPALAALTNDHLVALACLGGRPALDAVKKGLPHAPALIKRTNRRIPERTSHRVAS

SEQ ID NO: 196 - protein, 1378 aa, Artificial Sequence
  source: /note="Description of Artificial Sequence: Synthetic polypeptide"
MAPKKKRKVGIHGVPAAGSSGSHMVDLRTLGYSQQQQEKIKPKVRSTVAQHHEALVGHGFTHAHIVALSQHPAALGTVAVKYQDMIAALPEATHEAIVGVGKRGAGARALEALLTVAGELRGPPLQLDTGQLLKIAKRGGVTAVEAVHAWRNALTGAPLNLTPEQVVAIASNNGGKQALETVQRLLPVLCQAHGLTPEQVVAIASNNGGKQALETVQRLLPVLCQAHGLTPEQVVAIASNNGGKQALETVQRLLPVLCQAHGLTPEQVVAIASNNGGKQALETVQRLLPVLCQAHGLTPEQVVAIASNNGGKQALETVQRLLPVLCQAHGLTPEQVVAIASNIGGKQALETVQRLLPVLCQAHGLTPEQVVAIASHDGGKQALETVQRLLPVLCQAHGLTPEQVVAIASHDGGKQALETVQRLLPVLCQAHGLTPEQVVAIASNNGGKQALETVQRLLPVLCQAHGLTPEQVVAIASNIGGKQALETVQRLLPVLCQAHGLTPEQVVAIASNGGGKQALETVQRLLPVLCQAHGLTPEQVVAIASNGGGKQALETVQRLLPVLCQAHGLTPEQVVAIASNIGGKQALETVQRLLPVLCQAHGLTPEQVVAIASNIGGKQALETVQRLLPVLCQAHGLTPEQVVAIASHDGGKQALETVQRLLPVLCQAHGLTPEQVVAIASHDGGKQALETVQRLLPVLCQAHGLTPEQVVAIASNIGGKQALETVQRLLPVLCQAHGLTPEQVVAIASNGGGRPALESIVAQLSRPDPALAALTNDHLVALACLGGRPALDAVKKGLPHAPALIKRTNRRIPERTSHRVASGSGGGSGGDALDDFDLDMLGSDALDDFDLDMLGSDALDDFDLDMLGSDALDDFDLDMLSGGPKKKRKVGSQYLPDTDDRHRIEEKRKRTYETFKSIMKKSPFSGPTDPRPPPRRIAVPSRSSASVPKPAPQPYPFTSSLSTINYDEFPTMVFPSGQISQASALAPAPPQVLPQAPAPAPAPAMVSALAQAPAPVPVLAPGPPQAVAPPAPKPTQAGEGTLSEALLQLQFDDEDLGALLGNSTDPAVFTDLASVDNSEFQQLLNQGIPVAPHTTEPMLMEYPEAITRLVTGAQRPPDPAPAPLGAPGLPNGLLSGDEDFSSIADMDFSALLGSGSGSRDSREGMFLPKPEAGSAISDVFEGREVCQPKRLRPFHPPGSPWANRPLPASLAPTPTGPVHEPVGSLTPAPVPQPLDPAPAVTPEASHLLEDPDEETSQAVKALREMADTVIPQKEEAAICGQMDLSHPPPRGHLDELTTTLESMTEDLNLDSPLTPELNEILDTFLNDECLLHAMHISTGLSIFDTSLFSGGKRPAATKKAGQAKKKKGSYPYDVPDYA

SEQ ID NO: 197 - DNA, 4378 bp, Artificial Sequence
  source: /note="Description of Artificial Sequence: Synthetic polynucleotide"
aggaaataagagagaaaagaagagtaagaagaaatataagagccaccatggcccccaagaagaagcggaaggtgggcatccacggcgtgcccgccgccggcagcagcggatcccatatggttgatctgcgtaccctgggttatagccagcagcagcaagaaaaaatcaaaccgaaagttcgtagcaccgttgcacagcatcatgaagcactggttggtcatggttttacccatgcacatattgttgcactgagccagcatccggcagcactgggcaccgttgcagttaaatatcaggatatgattgcagcactgccggaagcaacccatgaagcaattgttggtgttggtaaacgcggagctggtgcacgtgccctggaagcactgctgaccgttgccggtgaactgcgtggtccgcctctgcagctggataccggtcagctgctgaaaattgcaaaacgtggtggtgttaccgcagttgaagcagttcatgcatggcgtaatgcactgaccggtgcaccgctgaatctgacaccggaacaggttgttgcaattgccagcaataatggtggcaaacaggcactggaaaccgttcagcgtctgctgccggttctgtgtcaggcacatggtctgacccctgaacaggtggtggccattgcaagcaacaatggcggtaaacaagccctggaaacagtgcagcgcctgttaccggtgctgtgccaggcccatggcttaactccggaacaggtggtagcgatcgcatcaaataatggaggtaaacaggccttagaaaccgtacagcgcttactgccggtgttatgccaggcgcacggcctgacgccagaacaggtagtggcaatcgcctcaaacaatggtggaaaacaggcgttagagacagtccagcgcctgctgcctgtattatgtcaagcccatggcctgaccccagagcaagttgttgcgattgcaagtaataatgggggtaaacaggcacttgagacagttcaacgtttactgcctgtactgtgccaagctcacggtctgactccggaacaagtcgtcgcgattgcgagtaacattggtggcaaacaagcattagaaacggtgcaacgcctgctgccagttctttgccaggctcacggtttaacccctgagcaggttgtagctattgcgagtcatgatggtggtaagcaggcgttggaaactgtgcaaagactgctgcccgtgttgtgccaagcacatggtttaaccccagaacaagtcgtagcaatcgcaagccatgacggtggcaagcaagcgcttgaaacagtacagcgtttattaccggtactttgtcaggcccacggtcttacaccagaacaagttgtggccatagccagtaacaatggcggaaagcaggctctggaaacggtacaacgtctgttacctgttctgtgtcaagcgcacggattaacacctgaacaagtagttgccattgcgtcaaatatcggaggcaagcaggccttggagacagtgcagagattactgccagtgttgtgtcaggctcatggccttacacccgagcaggtcgtggcaattgcatctaatggtggcggtaagcaagctttagagactgttcagagactgcttcctgtcctgtgccaggcacacggacttacgcctgagcaagtggttgcaatcgcctctaatggcggtggtaagcaagcactggaaactgtccaacgcttacttccggtgctttgtcaagcacacggcttaacgccagagcaggtcgtcgccatagccagcaatataggtggtaaacaggcccttgaaacggtccaaagacttctgccggtcctttgccaagcgcatgggctgacacctgagcaggtagtcgcgattgcctcaaacattggtgggaagcaggcattagaaacagttcaaagattattaccagtcctgtgtcaggcgcatgggttaaccccagagcaggtagttgcaatagcatcccatgatggcggaaaacaagcgttggaaacggttcagcggttattgcctgttttgtgccaggcgcatggtttgacacccgagcaagtggtagccatagcctcacatgacgggggtaaacaagctttggagacagtacaacggctgcttccagttttatgtcaggcccatggattgacgcctgaacaagttgtcgctatcgcaagtaatatcggtggtaaacaagcgcttgaaaccgttcaacgccttctgcctgtgctttgtcaggcacatggattaacacccgaacaggttgtcgcgatagcttcaaatgggggtggtcgtccggcactggaaagcattgttgcacagctgagccgtcctgatccggcactggcagcactgaccaatgatcatctggttgcactggcatgtctgggtggtcgccctgccctggatgcagttaaaaaaggtctgccgcatgcaccggcactgattaaacgtaccaatcgtcgtattccggaacgtaccagccatcgtgttgctagcggcagcggcggcggcagcggcggcgacgccctggacgacttcgacctggacatgctgggcagcgacgccctggacgacttcgacctggacatgctgggcagcgacgccctggacgacttcgacctggacatgctgggcagcgacgccctggacgacttcgacctggacatgctgagcggcggccccaagaagaagcggaaggtgggcagccagtacctgcccgacaccgacgaccggcaccggatcgaggagaagcggaagcggacctacgagaccttcaagagcatcatgaagaaatcccccttcagcggccccaccgacccccggccccccccccggcggatcgccgtgcccagccggagcagcgccagcgtgcccaagcccgccccccagccctaccccttcaccagcagcctgagcaccatcaactacgacgagttccccaccatggtgttccccagcggccagatcagccaggccagcgccctggcccccgcccccccccaggtgctgccccaggcccccgcccccgcccccgcccccgccatggtgagcgccctggcccaggcccccgcccccgtgcccgtgctggcccccggccccccccaggccgtggccccccccgcccccaagcccacccaggccggcgagggcaccctgagcgaggccctgctgcagctgcagttcgacgacgaggacctgggcgccctgctgggcaacagcaccgaccccgccgtgttcaccgacctggccagcgtggacaacagcgagttccagcagctgctgaaccagggcatccccgtggccccccacaccaccgagcccatgctgatggagtaccccgaggccatcacccggctggtgaccggcgcccagcggccccccgaccccgcccccgcccccctgggcgcccccggcctgcccaacggcctgctgagcggcgacgaggacttcagcagcatcgccgacatggacttcagcgccctgctgggcagcggcagcggcagccgggacagccgggagggcatgttcctgcccaagcccgaggccggcagcgccatcagcgacgtgttcgagggccgggaggtgtgccagcccaagcggctccggcccttccacccccccggcagcccctgggccaaccggcccctgcccgccagcctggcccccacccccaccggccccgtgcacgagcccgtgggcagcctgacccccgcccccgtgccccagcccctggaccccgcccccgccgtgacccccgaggccagccacctgctggaggaccccgacgaggagaccagccaggccgtgaaggccctgcgggagatggccgacaccgtgatcccccagaaggaggaggccgccatctgcggccagatggacctgagccacccccccccccggggccacctggacgagctgaccaccaccctggagagcatgaccgaggacctgaacctggacagccccctgacccccgagctgaacgagatcctggacaccttcctgaacgacgagtgcctgctgcacgccatgcacatcagcaccggcctgagcatcttcgacaccagcctgttcagcggcggcaagcggcccgccgccaccaagaaggccggccaggccaagaagaagaagggcagctacccctacgacgtgcccgactacgcctgagcggccgcttaattaagctgccttctgcggggcttgccttctggccatgcccttcttctctcccttgcacctgtacctcttggtctttgaataaagcctgagtaggaagtctagaaaaaaaaaaaaaaaaaaaaaaaaaaaaaaaaaaaaaaaaaaaaaaaaaaaaaaaaaaaaaaaaaaaaaaaaaaaaaaaa

SEQ ID NO: 198 - protein, 802 aa, Artificial Sequence
  source: /note="Description of Artificial Sequence: Synthetic polypeptide"
GSHMVDLRTLGYSQQQQEKIKPKVRSTVAQHHEALVGHGFTHAHIVALSQHPAALGTVAVKYQDMIAALPEATHEAIVGVGKRGAGARALEALLTVAGELRGPPLQLDTGQLLKIAKRGGVTAVEAVHAWRNALTGAPLNLTPEQVVAIASNNGGKQALETVQRLLPVLCQAHGLTPEQVVAIASNNGGKQALETVQRLLPVLCQAHGLTPEQVVAIASNNGGKQALETVQRLLPVLCQAHGLTPEQVVAIASNNGGKQALETVQRLLPVLCQAHGLTPEQVVAIASNNGGKQALETVQRLLPVLCQAHGLTPEQVVAIASNIGGKQALETVQRLLPVLCQAHGLTPEQVVAIASHDGGKQALETVQRLLPVLCQAHGLTPEQVVAIASHDGGKQALETVQRLLPVLCQAHGLTPEQVVAIASNNGGKQALETVQRLLPVLCQAHGLTPEQVVAIASNIGGKQALETVQRLLPVLCQAHGLTPEQVVAIASNGGGKQALETVQRLLPVLCQAHGLTPEQVVAIASNGGGKQALETVQRLLPVLCQAHGLTPEQVVAIASNIGGKQALETVQRLLPVLCQAHGLTPEQVVAIASNIGGKQALETVQRLLPVLCQAHGLTPEQVVAIASHDGGKQALETVQRLLPVLCQAHGLTPEQVVAIASHDGGKQALETVQRLLPVLCQAHGLTPEQVVAIASNIGGKQALETVQRLLPVLCQAHGLTPEQVVAIASNGGGRPALESIVAQLSRPDPALAALTNDHLVALACLGGRPALDAVKKGLPHAPALIKRTNRRIPERTSHRVAS

SEQ ID NO: 199 - protein, 1377 aa, Artificial Sequence
  source: /note="Description of Artificial Sequence: Synthetic polypeptide"
MAPKKKRKVGIHGVPAAGSSGSHMVDLRTLGYSQQQQEKIKPKVRSTVAQHHEALVGHGFTHAHIVALSQHPAALGTVAVKYQDMIAALPEATHEAIVGVGKRGAGARALEALLTVAGELRGPPLQLDTGQLLKIAKRGGVTAVEAVHAWRNALTGAPLNLTPEQVVAIASNNGGKQALETVQRLLPVLCQAHGLTPEQVVAIASNNGGKQALETVQRLLPVLCQAHGLTPEQVVAIASNGGGKQALETVQRLLPVLCQAHGLTPEQVVAIASNNGGKQALETVQRLLPVLCQAHGLTPEQVVAIASNGGGKQALETVQRLLPVLCQAHGLTPEQVVAIASHDGGKQALETVQRLLPVLCQAHGLTPEQVVAIASNIGGKQALETVQRLLPVLCQAHGLTPEQVVAIASNNGGKQALETVQRLLPVLCQAHGLTPEQVVAIASHDGGKQALETVQRLLPVLCQAHGLTPEQVVAIASHDGGKQALETVQRLLPVLCQAHGLTPEQVVAIASNIGGKQALETVQRLLPVLCQAHGLTPEQVVAIASNNGGKQALETVQRLLPVLCQAHGLTPEQVVAIASNIGGKQALETVQRLLPVLCQAHGLTPEQVVAIASNIGGKQALETVQRLLPVLCQAHGLTPEQVVAIASNIGGKQALETVQRLLPVLCQAHGLTPEQVVAIASHDGGKQALETVQRLLPVLCQAHGLTPEQVVAIASHDGGKQALETVQRLLPVLCQAHGLTPEQVVAIASNIGGRPALESIVAQLSRPDPALAALTNDHLVALACLGGRPALDAVKKGLPHAPALIKRTNRRIPERTSHRVASGSGGGSGGDALDDFDLDMLGSDALDDFDLDMLGSDALDDFDLDMLGSDALDDFDLDMLSGGPKKKRKVGSQYLPDTDDRHRIEEKRKRTYETFKSIMKKSPFSGPTDPRPPPRRIAVPSRSSASVPKPAPQPYPFTSSLSTINYDEFPTMVFPSGQISQASALAPAPPQVLPQAPAPAPAPAMVSALAQAPAPVPVLAPGPPQAVAPPAPKPTQAGEGTLSEALLQLQFDDEDLGALLGNSTDPAVFTDLASVDNSEFQQLLNQGIPVAPHTTEPMLMEYPEAITRLVTGAQRPPDPAPAPLGAPGLPNGLLSGDEDFSSIADMDFSALLGSGSGSRDSREGMFLPKPEAGSAISDVFEGREVCQPKRLRPFHPPGSPWANRPLPASLAPTPTGPVHEPVGSLTPAPVPQPLDPAPAVTPEASHLLEDPDEETSQAVKALREMADTVIPQKEEAAICGQMDLSHPPPRGHLDELTTTLESMTEDLNLDSPLTPELNEILDTFLNDECLLHAMHISTGLSIFDTSLFSGGKRPAATKKAGQAKKKKGSYPYDVPDY

SEQ ID NO: 200 - DNA, 4378 bp, Artificial Sequence
  source: /note="Description of Artificial Sequence: Synthetic polynucleotide"
aggaaataagagagaaaagaagagtaagaagaaatataagagccaccatggcccccaagaagaagcggaaggtgggcatccacggcgtgcccgccgccggcagcagcggatcccatatggttgatctgcgtaccctgggttatagccagcagcagcaagaaaaaatcaaaccgaaagttcgtagcaccgttgcacagcatcatgaagcactggttggtcatggttttacccatgcacatattgttgcactgagccagcatccggcagcactgggcaccgttgcagttaaatatcaggatatgattgcagcactgccggaagcaacccatgaagcaattgttggtgttggtaaacgcggagctggtgcacgtgccctggaagcactgctgaccgttgccggtgaactgcgtggtccgcctctgcagctggataccggtcagctgctgaaaattgcaaaacgtggtggtgttaccgcagttgaagcagttcatgcatggcgtaatgcactgaccggtgcaccgctgaatctgacaccggaacaggttgttgcaattgccagcaataatggtggcaaacaggcactggaaaccgttcagcgtctgctgccggttctgtgtcaggcacatggtctgacccctgaacaggtggtggccattgcaagcaacaatggcggtaaacaagccctggaaacagtgcagcgcctgttaccggtgctgtgccaggcccatggcttaactccggaacaggtggtagcgatcgcatcaaatggtggaggtaaacaggccttagaaaccgtacagcgcttactgccggtgttatgccaggcgcacggcctgacgccagaacaggtagtggcaatcgcctcaaataatggtggaaaacaggcgttagagacagtccagcgcctgctgcctgtattatgtcaagcccatggcctgaccccagagcaagttgttgcgattgcaagtaatggcgggggtaaacaggcacttgagacagttcaacgtttactgcctgtactgtgccaagctcacggtctgactccggaacaagtcgtcgcgattgcgagtcatgatggtggcaaacaagcattagaaacggtgcaacgcctgctgccagttctttgccaggctcacggtttaacccctgagcaggttgtagctattgcgagtaacattggtggtaagcaggcgttggaaactgtgcaaagactgctgcccgtgttgtgccaagcacatggtttaaccccagaacaagtcgtagcaatcgcaagcaacaatggtggcaagcaagcgcttgaaacagtacagcgtttattaccggtactttgtcaggcccacggtcttacaccagaacaagttgtggccatagccagtcatgacggcggaaagcaggctctggaaacggtacaacgtctgttacctgttctgtgtcaagcgcacggattaacacctgaacaagtagttgccattgcgtcacatgatggaggcaagcaggccttggagacagtgcagagattactgccagtgttgtgtcaggctcatggccttacacccgagcaggtcgtggcaattgcatctaatatcggcggtaagcaagctttagagactgttcagagactgcttcctgtcctgtgccaggcacacggacttacgcctgagcaagtggttgcaatcgcctctaataatggtggtaagcaagcactggaaactgtccaacgcttacttccggtgctttgtcaagcacacggcttaacgccagagcaggtcgtcgccatagccagcaatataggtggtaaacaggcccttgaaacggtccaaagacttctgccggtcctttgccaagcgcatgggctgacacctgagcaggtagtcgcgattgcctcaaacattggtgggaagcaggcattagaaacagttcaaagattattaccagtcctgtgtcaggcgcatgggttaaccccagagcaggtagttgcaatagcatccaatatcggcggaaaacaagcgttggaaacggttcagcggttattgcctgttttgtgccaggcgcatggtttgacacccgagcaagtggtagccatagcctcacatgatgggggtaaacaagctttggagacagtacaacggctgcttccagttttatgtcaggcccatggattgacgcctgaacaagttgtcgctatcgcaagtcatgacggtggtaaacaagcgcttgaaaccgttcaacgccttctgcctgtgctttgtcaggcacatggattaacacccgaacaggttgtcgcgatagcttcaaatataggtggtcgtccggcactggaaagcattgttgcacagctgagccgtcctgatccggcactggcagcactgaccaatgatcatctggttgcactggcatgtctgggtggtcgccctgccctggatgcagttaaaaaaggtctgccgcatgcaccggcactgattaaacgtaccaatcgtcgtattccggaacgtaccagccatcgtgttgctagcggcagcggcggcggcagcggcggcgacgccctggacgacttcgacctggacatgctgggcagcgacgccctggacgacttcgacctggacatgctgggcagcgacgccctggacgacttcgacctggacatgctgggcagcgacgccctggacgacttcgacctggacatgctgagcggcggccccaagaagaagcggaaggtgggcagccagtacctgcccgacaccgacgaccggcaccggatcgaggagaagcggaagcggacctacgagaccttcaagagcatcatgaagaaatcccccttcagcggccccaccgacccccggccccccccccggcggatcgccgtgcccagccggagcagcgccagcgtgcccaagcccgccccccagccctaccccttcaccagcagcctgagcaccatcaactacgacgagttccccaccatggtgttccccagcggccagatcagccaggccagcgccctggcccccgcccccccccaggtgctgccccaggcccccgcccccgcccccgcccccgccatggtgagcgccctggcccaggcccccgcccccgtgcccgtgctggcccccggccccccccaggccgtggccccccccgcccccaagcccacccaggccggcgagggcaccctgagcgaggccctgctgcagctgcagttcgacgacgaggacctgggcgccctgctgggcaacagcaccgaccccgccgtgttcaccgacctggccagcgtggacaacagcgagttccagcagctgctgaaccagggcatccccgtggccccccacaccaccgagcccatgctgatggagtaccccgaggccatcacccggctggtgaccggcgcccagcggccccccgaccccgcccccgcccccctgggcgcccccggcctgcccaacggcctgctgagcggcgacgaggacttcagcagcatcgccgacatggacttcagcgccctgctgggcagcggcagcggcagccgggacagccgggagggcatgttcctgcccaagcccgaggccggcagcgccatcagcgacgtgttcgagggccgggaggtgtgccagcccaagcggctccggcccttccacccccccggcagcccctgggccaaccggcccctgcccgccagcctggcccccacccccaccggccccgtgcacgagcccgtgggcagcctgacccccgcccccgtgccccagcccctggaccccgcccccgccgtgacccccgaggccagccacctgctggaggaccccgacgaggagaccagccaggccgtgaaggccctgcgggagatggccgacaccgtgatcccccagaaggaggaggccgccatctgcggccagatggacctgagccacccccccccccggggccacctggacgagctgaccaccaccctggagagcatgaccgaggacctgaacctggacagccccctgacccccgagctgaacgagatcctggacaccttcctgaacgacgagtgcctgctgcacgccatgcacatcagcaccggcctgagcatcttcgacaccagcctgttcagcggcggcaagcggcccgccgccaccaagaaggccggccaggccaagaagaagaagggcagctacccctacgacgtgcccgactacgcctgagcggccgcttaattaagctgccttctgcggggcttgccttctggccatgcccttcttctctcccttgcacctgtacctcttggtctttgaataaagcctgagtaggaagtctagaaaaaaaaaaaaaaaaaaaaaaaaaaaaaaaaaaaaaaaaaaaaaaaaaaaaaaaaaaaaaaaaaaaaaaaaaaaaaaaa

SEQ ID NO: 201 - protein, 802 aa, Artificial Sequence
  source: /note="Description of Artificial Sequence: Synthetic polypeptide"
GSHMVDLRTLGYSQQQQEKIKPKVRSTVAQHHEALVGHGFTHAHIVALSQHPAALGTVAVKYQDMIAALPEATHEAIVGVGKRGAGARALEALLTVAGELRGPPLQLDTGQLLKIAKRGGVTAVEAVHAWRNALTGAPLNLTPEQVVAIASNNGGKQALETVQRLLPVLCQAHGLTPEQVVAIASNNGGKQALETVQRLLPVLCQAHGLTPEQVVAIASNGGGKQALETVQRLLPVLCQAHGLTPEQVVAIASNNGGKQALETVQRLLPVLCQAHGLTPEQVVAIASNGGGKQALETVQRLLPVLCQAHGLTPEQVVAIASHDGGKQALETVQRLLPVLCQAHGLTPEQVVAIASNIGGKQALETVQRLLPVLCQAHGLTPEQVVAIASNNGGKQALETVQRLLPVLCQAHGLTPEQVVAIASHDGGKQALETVQRLLPVLCQAHGLTPEQVVAIASHDGGKQALETVQRLLPVLCQAHGLTPEQVVAIASNIGGKQALETVQRLLPVLCQAHGLTPEQVVAIASNNGGKQALETVQRLLPVLCQAHGLTPEQVVAIASNIGGKQALETVQRLLPVLCQAHGLTPEQVVAIASNIGGKQALETVQRLLPVLCQAHGLTPEQVVAIASNIGGKQALETVQRLLPVLCQAHGLTPEQVVAIASHDGGKQALETVQRLLPVLCQAHGLTPEQVVAIASHDGGKQALETVQRLLPVLCQAHGLTPEQVVAIASNIGGRPALESIVAQLSRPDPALAALTNDHLVALACLGGRPALDAVKKGLPHAPALIKRTNRRIPERTSHRVAS

SEQ ID NO: 202 - protein, 1378 aa, Artificial Sequence
  source: /note="Description of Artificial Sequence: Synthetic polypeptide"
MAPKKKRKVGIHGVPAAGSSGSHMVDLRTLGYSQQQQEKIKPKVRSTVAQHHEALVGHGFTHAHIVALSQHPAALGTVAVKYQDMIAALPEATHEAIVGVGKRGAGARALEALLTVAGELRGPPLQLDTGQLLKIAKRGGVTAVEAVHAWRNALTGAPLNLTPEQVVAIASHDGGKQALETVQRLLPVLCQAHGLTPEQVVAIASNGGGKQALETVQRLLPVLCQAHGLTPEQVVAIASNNGGKQALETVQRLLPVLCQAHGLTPEQVVAIASNIGGKQALETVQRLLPVLCQAHGLTPEQVVAIASNIGGKQALETVQRLLPVLCQAHGLTPEQVVAIASHDGGKQALETVQRLLPVLCQAHGLTPEQVVAIASNIGGKQALETVQRLLPVLCQAHGLTPEQVVAIASNGGGKQALETVQRLLPVLCQAHGLTPEQVVAIASHDGGKQALETVQRLLPVLCQAHGLTPEQVVAIASNNGGKQALETVQRLLPVLCQAHGLTPEQVVAIASNNGGKQALETVQRLLPVLCQAHGLTPEQVVAIASNGGGKQALETVQRLLPVLCQAHGLTPEQVVAIASNNGGKQALETVQRLLPVLCQAHGLTPEQVVAIASNIGGKQALETVQRLLPVLCQAHGLTPEQVVAIASNNGGKQALETVQRLLPVLCQAHGLTPEQVVAIASNGGGKQALETVQRLLPVLCQAHGLTPEQVVAIASNGGGKQALETVQRLLPVLCQAHGLTPEQVVAIASNIGGRPALESIVAQLSRPDPALAALTNDHLVALACLGGRPALDAVKKGLPHAPALIKRTNRRIPERTSHRVASGSGGGSGGDALDDFDLDMLGSDALDDFDLDMLGSDALDDFDLDMLGSDALDDFDLDMLSGGPKKKRKVGSQYLPDTDDRHRIEEKRKRTYETFKSIMKKSPFSGPTDPRPPPRRIAVPSRSSASVPKPAPQPYPFTSSLSTINYDEFPTMVFPSGQISQASALAPAPPQVLPQAPAPAPAPAMVSALAQAPAPVPVLAPGPPQAVAPPAPKPTQAGEGTLSEALLQLQFDDEDLGALLGNSTDPAVFTDLASVDNSEFQQLLNQGIPVAPHTTEPMLMEYPEAITRLVTGAQRPPDPAPAPLGAPGLPNGLLSGDEDFSSIADMDFSALLGSGSGSRDSREGMFLPKPEAGSAISDVFEGREVCQPKRLRPFHPPGSPWANRPLPASLAPTPTGPVHEPVGSLTPAPVPQPLDPAPAVTPEASHLLEDPDEETSQAVKALREMADTVIPQKEEAAICGQMDLSHPPPRGHLDELTTTLESMTEDLNLDSPLTPELNEILDTFLNDECLLHAMHISTGLSIFDTSLFSGGKRPAATKKAGQAKKKKGSYPYDVPDYA

SEQ ID NO: 203 - DNA, 4378 bp, Artificial Sequence
  source: /note="Description of Artificial Sequence: Synthetic polynucleotide"
aggaaataagagagaaaagaagagtaagaagaaatataagagccaccatggcccccaagaagaagcggaaggtgggcatccacggcgtgcccgccgccggcagcagcggatcccatatggttgatctgcgtaccctgggttatagccagcagcagcaagaaaaaatcaaaccgaaagttcgtagcaccgttgcacagcatcatgaagcactggttggtcatggttttacccatgcacatattgttgcactgagccagcatccggcagcactgggcaccgttgcagttaaatatcaggatatgattgcagcactgccggaagcaacccatgaagcaattgttggtgttggtaaacgcggagctggtgcacgtgccctggaagcactgctgaccgttgccggtgaactgcgtggtccgcctctgcagctggataccggtcagctgctgaaaattgcaaaacgtggtggtgttaccgcagttgaagcagttcatgcatggcgtaatgcactgaccggtgcaccgctgaatctgacaccggaacaggttgttgcaattgccagccatgatggtggcaaacaggcactggaaaccgttcagcgtctgctgccggttctgtgtcaggcacatggtctgacccctgaacaggtggtggccattgcaagcaatggtggcggtaaacaagccctggaaacagtgcagcgcctgttaccggtgctgtgccaggcccatggcttaactccggaacaggtggtagcgatcgcatcaaataatggaggtaaacaggccttagaaaccgtacagcgcttactgccggtgttatgccaggcgcacggcctgacgccagaacaggtagtggcaatcgcctcaaacattggtggaaaacaggcgttagagacagtccagcgcctgctgcctgtattatgtcaagcccatggcctgaccccagagcaagttgttgcgattgcaagtaatatcgggggtaaacaggcacttgagacagttcaacgtttactgcctgtactgtgccaagctcacggtctgactccggaacaagtcgtcgcgattgcgagtcatgacggtggcaaacaagcattagaaacggtgcaacgcctgctgccagttctttgccaggctcacggtttaacccctgagcaggttgtagctattgcgagtaatataggtggtaagcaggcgttggaaactgtgcaaagactgctgcccgtgttgtgccaagcacatggtttaaccccagaacaagtcgtagcaatcgcaagcaatggcggtggcaagcaagcgcttgaaacagtacagcgtttattaccggtactttgtcaggcccacggtcttacaccagaacaagttgtggccatagccagtcatgatggcggaaagcaggctctggaaacggtacaacgtctgttacctgttctgtgtcaagcgcacggattaacacctgaacaagtagttgccattgcgtcaaataatggaggcaagcaggccttggagacagtgcagagattactgccagtgttgtgtcaggctcatggccttacacccgagcaggtcgtggcaattgcatctaacaatggcggtaagcaagctttagagactgttcagagactgcttcctgtcctgtgccaggcacacggacttacgcctgagcaagtggttgcaatcgcctctaatgggggtggtaagcaagcactggaaactgtccaacgcttacttccggtgctttgtcaagcacacggcttaacgccagagcaggtcgtcgccatagccagcaataatggtggtaaacaggcccttgaaacggtccaaagacttctgccggtcctttgccaagcgcatgggctgacacctgagcaggtagtcgcgattgcctcaaacattggtgggaagcaggcattagaaacagttcaaagattattaccagtcctgtgtcaggcgcatgggttaaccccagagcaggtagttgcaatagcatccaacaatggcggaaaacaagcgttggaaacggttcagcggttattgcctgttttgtgccaggcgcatggtttgacacccgagcaagtggtagccatagcctcaaacggtgggggtaaacaagctttggagacagtacaacggctgcttccagttttatgtcaggcccatggattgacgcctgaacaagttgtcgctatcgcaagtaatggtggtggtaaacaagcgcttgaaaccgttcaacgccttctgcctgtgctttgtcaggcacatggattaacacccgaacaggttgtcgcgatagcttcaaatatcggtggtcgtccggcactggaaagcattgttgcacagctgagccgtcctgatccggcactggcagcactgaccaatgatcatctggttgcactggcatgtctgggtggtcgccctgccctggatgcagttaaaaaaggtctgccgcatgcaccggcactgattaaacgtaccaatcgtcgtattccggaacgtaccagccatcgtgttgctagcggcagcggcggcggcagcggcggcgacgccctggacgacttcgacctggacatgctgggcagcgacgccctggacgacttcgacctggacatgctgggcagcgacgccctggacgacttcgacctggacatgctgggcagcgacgccctggacgacttcgacctggacatgctgagcggcggccccaagaagaagcggaaggtgggcagccagtacctgcccgacaccgacgaccggcaccggatcgaggagaagcggaagcggacctacgagaccttcaagagcatcatgaagaaatcccccttcagcggccccaccgacccccggccccccccccggcggatcgccgtgcccagccggagcagcgccagcgtgcccaagcccgccccccagccctaccccttcaccagcagcctgagcaccatcaactacgacgagttccccaccatggtgttccccagcggccagatcagccaggccagcgccctggcccccgcccccccccaggtgctgccccaggcccccgcccccgcccccgcccccgccatggtgagcgccctggcccaggcccccgcccccgtgcccgtgctggcccccggccccccccaggccgtggccccccccgcccccaagcccacccaggccggcgagggcaccctgagcgaggccctgctgcagctgcagttcgacgacgaggacctgggcgccctgctgggcaacagcaccgaccccgccgtgttcaccgacctggccagcgtggacaacagcgagttccagcagctgctgaaccagggcatccccgtggccccccacaccaccgagcccatgctgatggagtaccccgaggccatcacccggctggtgaccggcgcccagcggccccccgaccccgcccccgcccccctgggcgcccccggcctgcccaacggcctgctgagcggcgacgaggacttcagcagcatcgccgacatggacttcagcgccctgctgggcagcggcagcggcagccgggacagccgggagggcatgttcctgcccaagcccgaggccggcagcgccatcagcgacgtgttcgagggccgggaggtgtgccagcccaagcggctccggcccttccacccccccggcagcccctgggccaaccggcccctgcccgccagcctggcccccacccccaccggccccgtgcacgagcccgtgggcagcctgacccccgcccccgtgccccagcccctggaccccgcccccgccgtgacccccgaggccagccacctgctggaggaccccgacgaggagaccagccaggccgtgaaggccctgcgggagatggccgacaccgtgatcccccagaaggaggaggccgccatctgcggccagatggacctgagccacccccccccccggggccacctggacgagctgaccaccaccctggagagcatgaccgaggacctgaacctggacagccccctgacccccgagctgaacgagatcctggacaccttcctgaacgacgagtgcctgctgcacgccatgcacatcagcaccggcctgagcatcttcgacaccagcctgttcagcggcggcaagcggcccgccgccaccaagaaggccggccaggccaagaagaagaagggcagctacccctacgacgtgcccgactacgcctgagcggccgcttaattaagctgccttctgcggggcttgccttctggccatgcccttcttctctcccttgcacctgtacctcttggtctttgaataaagcctgagtaggaagtctagaaaaaaaaaaaaaaaaaaaaaaaaaaaaaaaaaaaaaaaaaaaaaaaaaaaaaaaaaaaaaaaaaaaaaaaaaaaaaaaa

SEQ ID NO: 204 - protein, 802 aa, Artificial Sequence
  source: /note="Description of Artificial Sequence: Synthetic polypeptide"
GSHMVDLRTLGYSQQQQEKIKPKVRSTVAQHHEALVGHGFTHAHIVALSQHPAALGTVAVKYQDMIAALPEATHEAIVGVGKRGAGARALEALLTVAGELRGPPLQLDTGQLLKIAKRGGVTAVEAVHAWRNALTGAPLNLTPEQVVAIASHDGGKQALETVQRLLPVLCQAHGLTPEQVVAIASNGGGKQALETVQRLLPVLCQAHGLTPEQVVAIASNNGGKQALETVQRLLPVLCQAHGLTPEQVVAIASNIGGKQALETVQRLLPVLCQAHGLTPEQVVAIASNIGGKQALETVQRLLPVLCQAHGLTPEQVVAIASHDGGKQALETVQRLLPVLCQAHGLTPEQVVAIASNIGGKQALETVQRLLPVLCQAHGLTPEQVVAIASNGGGKQALETVQRLLPVLCQAHGLTPEQVVAIASHDGGKQALETVQRLLPVLCQAHGLTPEQVVAIASNNGGKQALETVQRLLPVLCQAHGLTPEQVVAIASNNGGKQALETVQRLLPVLCQAHGLTPEQVVAIASNGGGKQALETVQRLLPVLCQAHGLTPEQVVAIASNNGGKQALETVQRLLPVLCQAHGLTPEQVVAIASNIGGKQALETVQRLLPVLCQAHGLTPEQVVAIASNNGGKQALETVQRLLPVLCQAHGLTPEQVVAIASNGGGKQALETVQRLLPVLCQAHGLTPEQVVAIASNGGGKQALETVQRLLPVLCQAHGLTPEQVVAIASNIGGRPALESIVAQLSRPDPALAALTNDHLVALACLGGRPALDAVKKGLPHAPALIKRTNRRIPERTSHRVAS

SEQ ID NO: 205 - protein, 1378 aa, Artificial Sequence
  source: /note="Description of Artificial Sequence: Synthetic polypeptide"
MAPKKKRKVGIHGVPAAGSSGSHMVDLRTLGYSQQQQEKIKPKVRSTVAQHHEALVGHGFTHAHIVALSQHPAALGTVAVKYQDMIAALPEATHEAIVGVGKRGAGARALEALLTVAGELRGPPLQLDTGQLLKIAKRGGVTAVEAVHAWRNALTGAPLNLTPEQVVAIASHDGGKQALETVQRLLPVLCQAHGLTPEQVVAIASNGGGKQALETVQRLLPVLCQAHGLTPEQVVAIASNGGGKQALETVQRLLPVLCQAHGLTPEQVVAIASNNGGKQALETVQRLLPVLCQAHGLTPEQVVAIASNNGGKQALETVQRLLPVLCQAHGLTPEQVVAIASNNGGKQALETVQRLLPVLCQAHGLTPEQVVAIASNNGGKQALETVQRLLPVLCQAHGLTPEQVVAIASNGGGKQALETVQRLLPVLCQAHGLTPEQVVAIASNNGGKQALETVQRLLPVLCQAHGLTPEQVVAIASNIGGKQALETVQRLLPVLCQAHGLTPEQVVAIASHDGGKQALETVQRLLPVLCQAHGLTPEQVVAIASNIGGKQALETVQRLLPVLCQAHGLTPEQVVAIASNIGGKQALETVQRLLPVLCQAHGLTPEQVVAIASNGGGKQALETVQRLLPVLCQAHGLTPEQVVAIASNNGGKQALETVQRLLPVLCQAHGLTPEQVVAIASNNGGKQALETVQRLLPVLCQAHGLTPEQVVAIASHDGGKQALETVQRLLPVLCQAHGLTPEQVVAIASNGGGRPALESIVAQLSRPDPALAALTNDHLVALACLGGRPALDAVKKGLPHAPALIKRTNRRIPERTSHRVASGSGGGSGGDALDDFDLDMLGSDALDDFDLDMLGSDALDDFDLDMLGSDALDDFDLDMLSGGPKKKRKVGSQYLPDTDDRHRIEEKRKRTYETFKSIMKKSPFSGPTDPRPPPRRIAVPSRSSASVPKPAPQPYPFTSSLSTINYDEFPTMVFPSGQISQASALAPAPPQVLPQAPAPAPAPAMVSALAQAPAPVPVLAPGPPQAVAPPAPKPTQAGEGTLSEALLQLQFDDEDLGALLGNSTDPAVFTDLASVDNSEFQQLLNQGIPVAPHTTEPMLMEYPEAITRLVTGAQRPPDPAPAPLGAPGLPNGLLSGDEDFSSIADMDFSALLGSGSGSRDSREGMFLPKPEAGSAISDVFEGREVCQPKRLRPFHPPGSPWANRPLPASLAPTPTGPVHEPVGSLTPAPVPQPLDPAPAVTPEASHLLEDPDEETSQAVKALREMADTVIPQKEEAAICGQMDLSHPPPRGHLDELTTTLESMTEDLNLDSPLTPELNEILDTFLNDECLLHAMHISTGLSIFDTSLFSGGKRPAATKKAGQAKKKKGSYPYDVPDYA

SEQ ID NO: 206 - DNA, 4378 bp, Artificial Sequence
  source: /note="Description of Artificial Sequence: Synthetic polynucleotide"
aggaaataagagagaaaagaagagtaagaagaaatataagagccaccatggcccccaagaagaagcggaaggtgggcatccacggcgtgcccgccgccggcagcagcggatcccatatggttgatctgcgtaccctgggttatagccagcagcagcaagaaaaaatcaaaccgaaagttcgtagcaccgttgcacagcatcatgaagcactggttggtcatggttttacccatgcacatattgttgcactgagccagcatccggcagcactgggcaccgttgcagttaaatatcaggatatgattgcagcactgccggaagcaacccatgaagcaattgttggtgttggtaaacgcggagctggtgcacgtgccctggaagcactgctgaccgttgccggtgaactgcgtggtccgcctctgcagctggataccggtcagctgctgaaaattgcaaaacgtggtggtgttaccgcagttgaagcagttcatgcatggcgtaatgcactgaccggtgcaccgctgaatctgacaccggaacaggttgttgcaattgccagccatgatggtggcaaacaggcactggaaaccgttcagcgtctgctgccggttctgtgtcaggcacatggtctgacccctgaacaggtggtggccattgcaagcaatggtggcggtaaacaagccctggaaacagtgcagcgcctgttaccggtgctgtgccaggcccatggcttaactccggaacaggtggtagcgatcgcatcaaatggcggaggtaaacaggccttagaaaccgtacagcgcttactgccggtgttatgccaggcgcacggcctgacgccagaacaggtagtggcaatcgcctcaaataatggtggaaaacaggcgttagagacagtccagcgcctgctgcctgtattatgtcaagcccatggcctgaccccagagcaagttgttgcgattgcaagtaacaatgggggtaaacaggcacttgagacagttcaacgtttactgcctgtactgtgccaagctcacggtctgactccggaacaagtcgtcgcgattgcgagtaataatggtggcaaacaagcattagaaacggtgcaacgcctgctgccagttctttgccaggctcacggtttaacccctgagcaggttgtagctattgcgagtaacaatggtggtaagcaggcgttggaaactgtgcaaagactgctgcccgtgttgtgccaagcacatggtttaaccccagaacaagtcgtagcaatcgcaagcaatgggggtggcaagcaagcgcttgaaacagtacagcgtttattaccggtactttgtcaggcccacggtcttacaccagaacaagttgtggccatagccagtaataatggcggaaagcaggctctggaaacggtacaacgtctgttacctgttctgtgtcaagcgcacggattaacacctgaacaagtagttgccattgcgtcaaacattggaggcaagcaggccttggagacagtgcagagattactgccagtgttgtgtcaggctcatggccttacacccgagcaggtcgtggcaattgcatctcatgacggcggtaagcaagctttagagactgttcagagactgcttcctgtcctgtgccaggcacacggacttacgcctgagcaagtggttgcaatcgcctctaatatcggtggtaagcaagcactggaaactgtccaacgcttacttccggtgctttgtcaagcacacggcttaacgccagagcaggtcgtcgccatagccagcaatataggtggtaaacaggcccttgaaacggtccaaagacttctgccggtcctttgccaagcgcatgggctgacacctgagcaggtagtcgcgattgcctcaaacggtggtgggaagcaggcattagaaacagttcaaagattattaccagtcctgtgtcaggcgcatgggttaaccccagagcaggtagttgcaatagcatccaacaatggcggaaaacaagcgttggaaacggttcagcggttattgcctgttttgtgccaggcgcatggtttgacacccgagcaagtggtagccatagcctcaaataatgggggtaaacaagctttggagacagtacaacggctgcttccagttttatgtcaggcccatggattgacgcctgaacaagttgtcgctatcgcaagtcatgatggtggtaaacaagcgcttgaaaccgttcaacgccttctgcctgtgctttgtcaggcacatggattaacacccgaacaggttgtcgcgatagcttcaaatggtggtggtcgtccggcactggaaagcattgttgcacagctgagccgtcctgatccggcactggcagcactgaccaatgatcatctggttgcactggcatgtctgggtggtcgccctgccctggatgcagttaaaaaaggtctgccgcatgcaccggcactgattaaacgtaccaatcgtcgtattccggaacgtaccagccatcgtgttgctagcggcagcggcggcggcagcggcggcgacgccctggacgacttcgacctggacatgctgggcagcgacgccctggacgacttcgacctggacatgctgggcagcgacgccctggacgacttcgacctggacatgctgggcagcgacgccctggacgacttcgacctggacatgctgagcggcggccccaagaagaagcggaaggtgggcagccagtacctgcccgacaccgacgaccggcaccggatcgaggagaagcggaagcggacctacgagaccttcaagagcatcatgaagaaatcccccttcagcggccccaccgacccccggccccccccccggcggatcgccgtgcccagccggagcagcgccagcgtgcccaagcccgccccccagccctaccccttcaccagcagcctgagcaccatcaactacgacgagttccccaccatggtgttccccagcggccagatcagccaggccagcgccctggcccccgcccccccccaggtgctgccccaggcccccgcccccgcccccgcccccgccatggtgagcgccctggcccaggcccccgcccccgtgcccgtgctggcccccggccccccccaggccgtggccccccccgcccccaagcccacccaggccggcgagggcaccctgagcgaggccctgctgcagctgcagttcgacgacgaggacctgggcgccctgctgggcaacagcaccgaccccgccgtgttcaccgacctggccagcgtggacaacagcgagttccagcagctgctgaaccagggcatccccgtggccccccacaccaccgagcccatgctgatggagtaccccgaggccatcacccggctggtgaccggcgcccagcggccccccgaccccgcccccgcccccctgggcgcccccggcctgcccaacggcctgctgagcggcgacgaggacttcagcagcatcgccgacatggacttcagcgccctgctgggcagcggcagcggcagccgggacagccgggagggcatgttcctgcccaagcccgaggccggcagcgccatcagcgacgtgttcgagggccgggaggtgtgccagcccaagcggctccggcccttccacccccccggcagcccctgggccaaccggcccctgcccgccagcctggcccccacccccaccggccccgtgcacgagcccgtgggcagcctgacccccgcccccgtgccccagcccctggaccccgcccccgccgtgacccccgaggccagccacctgctggaggaccccgacgaggagaccagccaggccgtgaaggccctgcgggagatggccgacaccgtgatcccccagaaggaggaggccgccatctgcggccagatggacctgagccacccccccccccggggccacctggacgagctgaccaccaccctggagagcatgaccgaggacctgaacctggacagccccctgacccccgagctgaacgagatcctggacaccttcctgaacgacgagtgcctgctgcacgccatgcacatcagcaccggcctgagcatcttcgacaccagcctgttcagcggcggcaagcggcccgccgccaccaagaaggccggccaggccaagaagaagaagggcagctacccctacgacgtgcccgactacgcctgagcggccgcttaattaagctgccttctgcggggcttgccttctggccatgcccttcttctctcccttgcacctgtacctcttggtctttgaataaagcctgagtaggaagtctagaaaaaaaaaaaaaaaaaaaaaaaaaaaaaaaaaaaaaaaaaaaaaaaaaaaaaaaaaaaaaaaaaaaaaaaaaaaaaaaa

SEQ ID NO: 207 - protein, 802 aa, Artificial Sequence
  source: /note="Description of Artificial Sequence: Synthetic polypeptide"
GSHMVDLRTLGYSQQQQEKIKPKVRSTVAQHHEALVGHGFTHAHIVALSQHPAALGTVAVKYQDMIAALPEATHEAIVGVGKRGAGARALEALLTVAGELRGPPLQLDTGQLLKIAKRGGVTAVEAVHAWRNALTGAPLNLTPEQVVAIASHDGGKQALETVQRLLPVLCQAHGLTPEQVVAIASNGGGKQALETVQRLLPVLCQAHGLTPEQVVAIASNGGGKQALETVQRLLPVLCQAHGLTPEQVVAIASNNGGKQALETVQRLLPVLCQAHGLTPEQVVAIASNNGGKQALETVQRLLPVLCQAHGLTPEQVVAIASNNGGKQALETVQRLLPVLCQAHGLTPEQVVAIASNNGGKQALETVQRLLPVLCQAHGLTPEQVVAIASNGGGKQALETVQRLLPVLCQAHGLTPEQVVAIASNNGGKQALETVQRLLPVLCQAHGLTPEQVVAIASNIGGKQALETVQRLLPVLCQAHGLTPEQVVAIASHDGGKQALETVQRLLPVLCQAHGLTPEQVVAIASNIGGKQALETVQRLLPVLCQAHGLTPEQVVAIASNIGGKQALETVQRLLPVLCQAHGLTPEQVVAIASNGGGKQALETVQRLLPVLCQAHGLTPEQVVAIASNNGGKQALETVQRLLPVLCQAHGLTPEQVVAIASNNGGKQALETVQRLLPVLCQAHGLTPEQVVAIASHDGGKQALETVQRLLPVLCQAHGLTPEQVVAIASNGGGRPALESIVAQLSRPDPALAALTNDHLVALACLGGRPALDAVKKGLPHAPALIKRTNRRIPERTSHRVAS

SEQ ID NO: 208 - protein, 1378 aa, Artificial Sequence
  source: /note="Description of Artificial Sequence: Synthetic polypeptide"
MAPKKKRKVGIHGVPAAGSSGSHMVDLRTLGYSQQQQEKIKPKVRSTVAQHHEALVGHGFTHAHIVALSQHPAALGTVAVKYQDMIAALPEATHEAIVGVGKRGAGARALEALLTVAGELRGPPLQLDTGQLLKIAKRGGVTAVEAVHAWRNALTGAPLNLTPEQVVAIASNNGGKQALETVQRLLPVLCQAHGLTPEQVVAIASNIGGKQALETVQRLLPVLCQAHGLTPEQVVAIASNIGGKQALETVQRLLPVLCQAHGLTPEQVVAIASNGGGKQALETVQRLLPVLCQAHGLTPEQVVAIASNGGGKQALETVQRLLPVLCQAHGLTPEQVVAIASNIGGKQALETVQRLLPVLCQAHGLTPEQVVAIASNNGGKQALETVQRLLPVLCQAHGLTPEQVVAIASNNGGKQALETVQRLLPVLCQAHGLTPEQVVAIASNNGGKQALETVQRLLPVLCQAHGLTPEQVVAIASNNGGKQALETVQRLLPVLCQAHGLTPEQVVAIASNIGGKQALETVQRLLPVLCQAHGLTPEQVVAIASNGGGKQALETVQRLLPVLCQAHGLTPEQVVAIASHDGGKQALETVQRLLPVLCQAHGLTPEQVVAIASNGGGKQALETVQRLLPVLCQAHGLTPEQVVAIASHDGGKQALETVQRLLPVLCQAHGLTPEQVVAIASNNGGKQALETVQRLLPVLCQAHGLTPEQVVAIASNNGGKQALETVQRLLPVLCQAHGLTPEQVVAIASNIGGRPALESIVAQLSRPDPALAALTNDHLVALACLGGRPALDAVKKGLPHAPALIKRTNRRIPERTSHRVASGSGGGSGGDALDDFDLDMLGSDALDDFDLDMLGSDALDDFDLDMLGSDALDDFDLDMLSGGPKKKRKVGSQYLPDTDDRHRIEEKRKRTYETFKSIMKKSPFSGPTDPRPPPRRIAVPSRSSASVPKPAPQPYPFTSSLSTINYDEFPTMVFPSGQISQASALAPAPPQVLPQAPAPAPAPAMVSALAQAPAPVPVLAPGPPQAVAPPAPKPTQAGEGTLSEALLQLQFDDEDLGALLGNSTDPAVFTDLASVDNSEFQQLLNQGIPVAPHTTEPMLMEYPEAITRLVTGAQRPPDPAPAPLGAPGLPNGLLSGDEDFSSIADMDFSALLGSGSGSRDSREGMFLPKPEAGSAISDVFEGREVCQPKRLRPFHPPGSPWANRPLPASLAPTPTGPVHEPVGSLTPAPVPQPLDPAPAVTPEASHLLEDPDEETSQAVKALREMADTVIPQKEEAAICGQMDLSHPPPRGHLDELTTTLESMTEDLNLDSPLTPELNEILDTFLNDECLLHAMHISTGLSIFDTSLFSGGKRPAATKKAGQAKKKKGSYPYDVPDYA

SEQ ID NO: 209 - DNA, 4378 bp, Artificial Sequence
  source: /note="Description of Artificial Sequence: Synthetic polynucleotide"
aggaaataagagagaaaagaagagtaagaagaaatataagagccaccatggcccccaagaagaagcggaaggtgggcatccacggcgtgcccgccgccggcagcagcggatcccatatggttgatctgcgtaccctgggttatagccagcagcagcaagaaaaaatcaaaccgaaagttcgtagcaccgttgcacagcatcatgaagcactggttggtcatggttttacccatgcacatattgttgcactgagccagcatccggcagcactgggcaccgttgcagttaaatatcaggatatgattgcagcactgccggaagcaacccatgaagcaattgttggtgttggtaaacgcggagctggtgcacgtgccctggaagcactgctgaccgttgccggtgaactgcgtggtccgcctctgcagctggataccggtcagctgctgaaaattgcaaaacgtggtggtgttaccgcagttgaagcagttcatgcatggcgtaatgcactgaccggtgcaccgctgaatctgacaccggaacaggttgttgcaattgccagcaataatggtggcaaacaggcactggaaaccgttcagcgtctgctgccggttctgtgtcaggcacatggtctgacccctgaacaggtggtggccattgcaagcaacattggcggtaaacaagccctggaaacagtgcagcgcctgttaccggtgctgtgccaggcccatggcttaactccggaacaggtggtagcgatcgcatcaaatatcggaggtaaacaggccttagaaaccgtacagcgcttactgccggtgttatgccaggcgcacggcctgacgccagaacaggtagtggcaatcgcctcaaatggtggtggaaaacaggcgttagagacagtccagcgcctgctgcctgtattatgtcaagcccatggcctgaccccagagcaagttgttgcgattgcaagtaatggcgggggtaaacaggcacttgagacagttcaacgtttactgcctgtactgtgccaagctcacggtctgactccggaacaagtcgtcgcgattgcgagtaatataggtggcaaacaagcattagaaacggtgcaacgcctgctgccagttctttgccaggctcacggtttaacccctgagcaggttgtagctattgcgagtaacaatggtggtaagcaggcgttggaaactgtgcaaagactgctgcccgtgttgtgccaagcacatggtttaaccccagaacaagtcgtagcaatcgcaagcaataatggtggcaagcaagcgcttgaaacagtacagcgtttattaccggtactttgtcaggcccacggtcttacaccagaacaagttgtggccatagccagtaacaatggcggaaagcaggctctggaaacggtacaacgtctgttacctgttctgtgtcaagcgcacggattaacacctgaacaagtagttgccattgcgtcaaataatggaggcaagcaggccttggagacagtgcagagattactgccagtgttgtgtcaggctcatggccttacacccgagcaggtcgtggcaattgcatctaacattggcggtaagcaagctttagagactgttcagagactgcttcctgtcctgtgccaggcacacggacttacgcctgagcaagtggttgcaatcgcctctaatgggggtggtaagcaagcactggaaactgtccaacgcttacttccggtgctttgtcaagcacacggcttaacgccagagcaggtcgtcgccatagccagccatgatggtggtaaacaggcccttgaaacggtccaaagacttctgccggtcctttgccaagcgcatgggctgacacctgagcaggtagtcgcgattgcctcaaacggtggtgggaagcaggcattagaaacagttcaaagattattaccagtcctgtgtcaggcgcatgggttaaccccagagcaggtagttgcaatagcatcccatgacggcggaaaacaagcgttggaaacggttcagcggttattgcctgttttgtgccaggcgcatggtttgacacccgagcaagtggtagccatagcctcaaacaatgggggtaaacaagctttggagacagtacaacggctgcttccagttttatgtcaggcccatggattgacgcctgaacaagttgtcgctatcgcaagtaataatggtggtaaacaagcgcttgaaaccgttcaacgccttctgcctgtgctttgtcaggcacatggattaacacccgaacaggttgtcgcgatagcttcaaatatcggtggtcgtccggcactggaaagcattgttgcacagctgagccgtcctgatccggcactggcagcactgaccaatgatcatctggttgcactggcatgtctgggtggtcgccctgccctggatgcagttaaaaaaggtctgccgcatgcaccggcactgattaaacgtaccaatcgtcgtattccggaacgtaccagccatcgtgttgctagcggcagcggcggcggcagcggcggcgacgccctggacgacttcgacctggacatgctgggcagcgacgccctggacgacttcgacctggacatgctgggcagcgacgccctggacgacttcgacctggacatgctgggcagcgacgccctggacgacttcgacctggacatgctgagcggcggccccaagaagaagcggaaggtgggcagccagtacctgcccgacaccgacgaccggcaccggatcgaggagaagcggaagcggacctacgagaccttcaagagcatcatgaagaaatcccccttcagcggccccaccgacccccggccccccccccggcggatcgccgtgcccagccggagcagcgccagcgtgcccaagcccgccccccagccctaccccttcaccagcagcctgagcaccatcaactacgacgagttccccaccatggtgttccccagcggccagatcagccaggccagcgccctggcccccgcccccccccaggtgctgccccaggcccccgcccccgcccccgcccccgccatggtgagcgccctggcccaggcccccgcccccgtgcccgtgctggcccccggccccccccaggccgtggccccccccgcccccaagcccacccaggccggcgagggcaccctgagcgaggccctgctgcagctgcagttcgacgacgaggacctgggcgccctgctgggcaacagcaccgaccccgccgtgttcaccgacctggccagcgtggacaacagcgagttccagcagctgctgaaccagggcatccccgtggccccccacaccaccgagcccatgctgatggagtaccccgaggccatcacccggctggtgaccggcgcccagcggccccccgaccccgcccccgcccccctgggcgcccccggcctgcccaacggcctgctgagcggcgacgaggacttcagcagcatcgccgacatggacttcagcgccctgctgggcagcggcagcggcagccgggacagccgggagggcatgttcctgcccaagcccgaggccggcagcgccatcagcgacgtgttcgagggccgggaggtgtgccagcccaagcggctccggcccttccacccccccggcagcccctgggccaaccggcccctgcccgccagcctggcccccacccccaccggccccgtgcacgagcccgtgggcagcctgacccccgcccccgtgccccagcccctggaccccgcccccgccgtgacccccgaggccagccacctgctggaggaccccgacgaggagaccagccaggccgtgaaggccctgcgggagatggccgacaccgtgatcccccagaaggaggaggccgccatctgcggccagatggacctgagccacccccccccccggggccacctggacgagctgaccaccaccctggagagcatgaccgaggacctgaacctggacagccccctgacccccgagctgaacgagatcctggacaccttcctgaacgacgagtgcctgctgcacgccatgcacatcagcaccggcctgagcatcttcgacaccagcctgttcagcggcggcaagcggcccgccgccaccaagaaggccggccaggccaagaagaagaagggcagctacccctacgacgtgcccgactacgcctgagcggccgcttaattaagctgccttctgcggggcttgccttctggccatgcccttcttctctcccttgcacctgtacctcttggtctttgaataaagcctgagtaggaagtctagaaaaaaaaaaaaaaaaaaaaaaaaaaaaaaaaaaaaaaaaaaaaaaaaaaaaaaaaaaaaaaaaaaaaaaaaaaaaaaaa

SEQ ID NO: 210 - protein, 802 aa, Artificial Sequence
  source: /note="Description of Artificial Sequence: Synthetic polypeptide"
GSHMVDLRTLGYSQQQQEKIKPKVRSTVAQHHEALVGHGFTHAHIVALSQHPAALGTVAVKYQDMIAALPEATHEAIVGVGKRGAGARALEALLTVAGELRGPPLQLDTGQLLKIAKRGGVTAVEAVHAWRNALTGAPLNLTPEQVVAIASNNGGKQALETVQRLLPVLCQAHGLTPEQVVAIASNIGGKQALETVQRLLPVLCQAHGLTPEQVVAIASNIGGKQALETVQRLLPVLCQAHGLTPEQVVAIASNGGGKQALETVQRLLPVLCQAHGLTPEQVVAIASNGGGKQALETVQRLLPVLCQAHGLTPEQVVAIASNIGGKQALETVQRLLPVLCQAHGLTPEQVVAIASNNGGKQALETVQRLLPVLCQAHGLTPEQVVAIASNNGGKQALETVQRLLPVLCQAHGLTPEQVVAIASNNGGKQALETVQRLLPVLCQAHGLTPEQVVAIASNNGGKQALETVQRLLPVLCQAHGLTPEQVVAIASNIGGKQALETVQRLLPVLCQAHGLTPEQVVAIASNGGGKQALETVQRLLPVLCQAHGLTPEQVVAIASHDGGKQALETVQRLLPVLCQAHGLTPEQVVAIASNGGGKQALETVQRLLPVLCQAHGLTPEQVVAIASHDGGKQALETVQRLLPVLCQAHGLTPEQVVAIASNNGGKQALETVQRLLPVLCQAHGLTPEQVVAIASNNGGKQALETVQRLLPVLCQAHGLTPEQVVAIASNIGGRPALESIVAQLSRPDPALAALTNDHLVALACLGGRPALDAVKKGLPHAPALIKRTNRRIPERTSHRVAS

SEQ ID NO: 211 - RNA, 627 nt, Artificial Sequence
  source: /note="Description of Artificial Sequence: Synthetic polynucleotide"
cuggagccgggugagaagccauacaagugcccagaaugcggcaagagcuuuagccgcagcgauaaucugguucgucaucagcgcacgcauacgggugagaaaccguacaaauguccagaaugcggcaaaagcuuuagucgcagcgaucaucugacgaaucaccagcgcacccauaccggcgaaaaaccguacaagugcccggagugcgguaaaagcuucagcgacccgggucaucuggugcgccaccaacgcacgcacaccggugagaaaccauauaaauguccagagugcggcaagaguuuuagccagcgugcccaucuggaacgucaucagcguacccacacgggugaaaaaccauauaagugcccggagugcgguaagaguuuuaguagccgccguacgugccgugcgcaccaacgcacccacaccggugaaaagccauacaaguguccggaaugcggcaagagcuucagccgcagcgacaaacucaccgaacaucaacguacccauacgggcgagaagccguacaaaugcccagaauguggcaaaagcuucagucgcaacgauacgcugaccgagcaucagcguacgcacaccggcgaaaagccaaccggcaagaaaaccagc

SEQ ID NO: 212 - RNA, 627 nt, Artificial Sequence
  source: /note="Description of Artificial Sequence: Synthetic polynucleotide"
cuggaaccgggcgagaaaccguacaagugcccagaaugcgguaaaagcuucagccagagcaguaaucugguucgucaccagcgcacccacacgggugaaaagccauacaaauguccagagugugguaagaguuucaguagcaaaaagcaucuggcggaacaccaacguacgcauacgggugaaaagccguacaaguguccggaauguggcaagagcuuuagcagcaagaaggcgcugaccgaacaucagcguacccauaccggugaaaaaccauacaagugcccggagugcggcaaaaguuucagcgauugucgcgaucuggcccgucaucaacgcacccacaccggcgagaaaccauauaaguguccggagugcgguaaaagcuuuagcgauccgggccaucugguucgccaccaacgcacgcacaccggcgagaaaccguauaagugcccagagugcgguaagaguuuuagccguaacgaugcgcugacggagcaucagcgcacgcacacgggcgagaaaccauauaaaugcccggaaugugguaagagcuucagugacaaaaaggaucugacccgccaucaacguacgcauacgggcgagaagccaaccggcaagaaaaccagc

SEQ ID NO: 213 - RNA, 627 nt, Artificial Sequence
  source: /note="Description of Artificial Sequence: Synthetic polynucleotide"
cucgaaccgggcgagaaaccauauaaguguccggaaugugguaaaaguuuuagccgcagcgauaaucucgugcgucaccagcguacgcauaccggugagaagccauacaaguguccggaguguggcaaaagcuucagucagcuggcgcaucugcgcgcgcaucagcgcacccacaccggugagaaaccguacaaguguccagaaugcggcaaaagcuuuagcgauccgggucaucuggugcgucaucaacguacgcacacgggcgaaaaaccguacaaauguccggagugcggcaagagcuucagccagagcagcaaucugguucgccaccagcguacgcacaccggugaaaagccauacaagugcccggagugcggcaagaguuucagucgcaaggacaaucugaagaaccaucaacgcacccauacgggcgagaagccguacaaauguccggaaugcgguaaaaguuuuagccaagccggucaucuggccagccaucagcguacccauacgggugagaaaccguauaaauguccagaaugugguaagaguuucagcaccagcgguagucugguucgucaucaacgcacgcauacgggugaaaaaccaaccggcaagaaaaccagc

SEQ ID NO: 214 - RNA, 627 nt, Artificial Sequence
  source: /note="Description of Artificial Sequence: Synthetic polynucleotide"
cucgaaccgggcgaaaagccguauaagugcccggaaugcggcaagaguuuuagccagcgcgcccaucuggaacgucaccagcguacccauaccggugaaaagccauauaaaugcccagaaugugguaaaagcuuuagucagcuggcccaucugcgcgcccaccaacguacgcacacgggcgagaagccguacaaaugcccagaaugcgguaaaagcuucagcagcaaaaagcaucuggcggaacaucaacguacccacaccggcgagaaaccauacaagugcccggaaugcgguaaaagcuucagcaccaccggugcgcugacggagcaucagcgcacccacacgggcgaaaaaccguauaaguguccggaguguggcaaaaguuuuaguaccagcggcaaucuggugcgccaucaacguacgcauaccggcgagaagccauauaaauguccagaguguggcaagagcuuuagccaaagcggugaucugcgucgccaccaacgcacgcacaccggcgaaaaaccauacaaauguccggaaugcgguaagaguuucagcacgagccauagucugaccgaacaucaacguacccauacgggugagaaaccaaccggcaagaaaaccagc

SEQ ID NO: 215 - RNA, 627 nt, Artificial Sequence
  source: /note="Description of Artificial Sequence: Synthetic polynucleotide"
cucgaaccgggcgagaaaccauauaaguguccagagugugguaagagcuuuagcaccaguggcaaucugaccgagcaucaacgcacgcauacgggugagaaaccguacaagugcccggaaugcggcaaaaguuucagcgauagcggcaaucugcgugugcaccagcguacgcauacgggcgaaaagccguauaagugcccagaaugcgguaagaguuuuagccacaaaaacgcgcugcagaaccaccagcgcacccacacgggugagaagccauacaaauguccggaaugcggcaaaagcuucagccgcaacgauacgcugacggaacaccaacguacgcauaccggcgaaaagccauacaagugcccggagugcgguaaaagcuuuagccagcgcgcgcaucucgaacgucaucaacguacccauaccggugaaaaaccauauaaaugcccggaaugugguaaaaguuuuagccgcagcgacaaacuggugcgucaucaacgcacccauaccggugaaaagccauauaagugcccggagugugguaaaagcuucagcgauccgggucaucugguucgccaucaacguacgcacaccggcgagaagccaaccggcaagaaaaccagc

SEQ ID NO: 216 - RNA, 627 nt, Artificial Sequence
  source: /note="Description of Artificial Sequence: Synthetic polynucleotide"
cucgaaccgggcgaaaaaccguauaaguguccggagugcggcaagagcuucagcacgagccauagucugaccgaacaccagcgcacccacacgggcgaaaagccguacaaauguccagagugugguaagaguuucagccagcgugccaaucugcgcgcccaccaacguacccacaccggugagaagccguauaagugcccagagugugguaaaagcuucagccgcgccgauaaucugacggagcaccaacgcacccacaccggcgaaaagccauacaagugcccggaguguggcaagagcuuuagcgaacgcagccaucugcgcgaacaccaacguacgcacacgggugagaaaccauacaaauguccagaaugugguaaaaguuuuagcgauccgggcgcgcugguucgccaccagcgcacgcacaccggugaaaagccguauaaauguccagaaugcggcaaaagcuucaguaccagcggucaucugguucgucaucagcguacccauaccggcgagaagccauauaagugcccggaguguggcaaaaguuucagccgcaaugauacgcugaccgagcaucagcguacgcauaccggugaaaaaccaaccggcaagaaaaccagc

SEQ ID NO: 217 - RNA, 627 nt, Artificial Sequence
  source: /note="Description of Artificial Sequence: Synthetic polynucleotide"
cuggaaccgggcgagaagccauacaagugcccagagugcggcaaaagcuucagccgcagcgaccaucugaccaaucaccaacgcacccauaccggugagaagccguacaaaugcccagagugcgguaagagcuuuaguaccaguggcagucugguucgucaucagcgcacgcacacgggcgaaaaaccauacaaaugcccggagugcggcaaaagcuuuagccaagccggucaucuggcgagccaucaacguacgcacaccggcgagaagccguauaaauguccggagugcgguaagagcuuuagccguagcgauaaacugaccgaacaccaacguacgcauacgggcgagaaaccauauaaauguccagaguguggcaagaguuucagcaccagcggcaaucugaccgagcaucaacguacccauaccggugaaaagccauauaaauguccagaaugcgguaagaguuuuagucagagcaguaaucuggugcgccaucagcguacccacacgggugagaaaccauauaaguguccggaaugcggcaagaguuuuagcacccaucuggaucugauccgucaucagcgcacccacaccggugaaaaaccaaccggcaagaaaaccagu

SEQ ID NO: 218 - RNA, 627 nt, Artificial Sequence
  source: /note="Description of Artificial Sequence: Synthetic polynucleotide"
cuggaaccgggcgaaaagccguacaagugcccggaauguggcaaaaguuuuagucgcagcgaucaucugaccacccaucagcguacccauaccggugagaagccauacaaaugcccagaaugugguaagagcuuuagcaccagcggcgagcugguucgucaccagcguacccacaccggcgagaagccguauaaguguccagaaugcgguaaaagcuuuagccgccgcgacgagcugaaugugcaucaacgcacccacacgggcgagaagccauauaagugcccggagugugguaagaguuucaguagcccagcggaucugacccgucaucaacguacgcacacgggcgagaaaccauacaaguguccggagugcggcaaaaguuuuagccgcagugaugaacuggugcgccaccagcgcacccauaccggcgaaaaaccguauaagugcccagagugcgguaagagcuucagccgcagcgacaaacuggugcgucaccagcgcacgcauacgggugagaaaccguacaagugcccggagugcggcaaaagcuucagcaccaccggcgcgcugaccgaacaucaacguacccauacgggugagaaaccaacgggcaaaaagaccagc

SEQ ID NO: 219 - RNA, 660 nt, Artificial Sequence
  source: /note="Description of Artificial Sequence: Synthetic polynucleotide"
cucgaaccgggcgaaaagccauacaaauguccggaguguggcaagaguuucagccaaagcggcaaccucaccgagcaccagcgcacgcacaccggcgagaagccauauaaauguccagaaugcggcaagagcuucagccauaagaaugcgcugcagaaccaucagcgcacccacaccggugagaagccauacaagugcccagagugcggcaaaaguuucagccagaauagcacccucacggagcaucaacgcacgcauacgggugaaaagccguacaaaugcccagaauguggcaagagcuuuagcagcaagaaacaucuggcggagcaucagcguacccacacgggcgaaaagccauacaaauguccggaaugcggcaaaagcuucagcacgaguggcaaucuggugcgccaucaacguacgcacacgggugagaaaccguauaaaugcccagagugugguaaaagcuucagucagagcggccaucugaccgaacaccagcgcacccauacgccaaacccgcaucgccgcaccgauccgagccacaagccguuccaguacaaguguccagagugcgguaaaaguuuuagcgacaagaaggaucugacccgucaccaacguacccauaccggugaaaaaccaacgggcaagaaaaccagc

SEQ ID NO: 220 - RNA, 627 nt, Artificial Sequence
  source: /note="Description of Artificial Sequence: Synthetic polynucleotide"
cuggagcccggcgagaagcccuacaaaugucccgaguguggcaaguccuucucccagaauagcacacugacagaacaccagaggacacacaccggcgagaaaccuuauaagugccccgaaugcggcaaaagcuuuuccgagaggagccaccugagggaacaccagagaacacacaccggagaaaaaccuuacaaaugccccgagugcggaaaguccuucagcagcaagaagcaccuggcugaacaccagagaacccacaccggcgagaagccuuacaagugccccgaauguggcaaaagcuucucuagaaacgacacacucaccgagcaccagagaacccacaccggcgaaaagccuuauaagugucccgaguguggcaagagcuucagcgauuguagagaucuggccagacaccaaaggacccacaccggagaaaaaccuuacaagugccccgaguguggaaagagcuuuagccaaagcggcgaucugaggagacaccagagaacacacaccggcgaaaaacccuauaagugucccgaaugcggaaaauccuucagcaccaaaaacucucugaccgagcaccaaagaacccacaccggcgaaaagccuaccggcaaaaagacaagc

SEQ ID NO: 221 - RNA, 627 nt, Artificial Sequence
  source: /note="Description of Artificial Sequence: Synthetic polynucleotide"
cuggagcccggcgagaaacccuacaagugucccgaguguggcaagagcuuuuccgagagaagccaccugagggaacaccagagaacccacaccggcgagaagccuuacaaaugccccgaauguggaaagagcuuuucuagagccgacaaucugaccgaacaccaaagaacccacaccggcgaaaaacccuauaagugucccgaguguggaaaaagcuucucuagaagcgacaaacucacagagcaccagaggacacacaccggcgagaagcccuacaaaugucccgagugcggcaaaagcuucagcagcaagaagcaccuggccgagcaccaaagaacacacaccggcgaaaaaccuuauaaaugccccgagugcggcaaguccuuuuccaccaagaacucucugacagaacaccaaaggacacacaccggagaaaaacccuacaaaugucccgaauguggcaaauccuucagcgauaagaaggaccucaccagacaccagaggacacacaccggcgaaaaaccuuauaaaugucccgagugcggaaaguccuucuccagcaaaaagcaccucgcugagcaccaaaggacccacaccggcgagaagcccaccggaaaaaagaccagc

SEQ ID NO: 222 - RNA, 627 nt, Artificial Sequence
  source: /note="Description of Artificial Sequence: Synthetic polynucleotide"
cuggagcccggcgaaaagcccuacaaaugucccgaauguggcaagagcuucagcagcaaaaagcaccuggcugaacaccagaggacccacaccggagagaaacccuauaaaugucccgaguguggaaaaagcuucagcacccaccucgaccucauuaggcaccaaagaacccacaccggcgaaaaacccuauaagugucccgaguguggaaaauccuuuucuagaaaggacaaucucaagaaucaccaaagaacacacaccggcgagaaaccuuacaagugucccgagugcggaaaguccuucuccgacuguagagaucuggcuagacaccagagaacccacaccggcgagaagcccuauaagugccccgagugcggcaaguccuucucuagagaggacaaucugcacacacaccagaggacccacaccggcgaaaaaccuuacaaaugccccgaguguggcaagagcuuuagcgaucccggacaccuggugagacaccaaagaacccacaccggcgagaagccuuacaagugucccgaauguggaaaauccuuuagccagcuggcccaccugagggcccaccaaaggacacacaccggcgaaaaacccaccggcaaaaagaccagc

SEQ ID NO: 223 - RNA, 627 nt, Artificial Sequence
  source: /note="Description of Artificial Sequence: Synthetic polynucleotide"
cuggagcccggcgaaaagcccuauaagugccccgagugcggcaagagcuucucuagaagcgacaaacucgugagacaccagagaacacacaccggagagaaaccuuacaagugccccgaguguggcaaguccuucucccaauccggcgaucugaggagacaccagagaacccacaccggcgaaaaacccuacaaaugccccgagugcggaaaguccuuuuccaccuccggcgagcucgugagacaccaaaggacccacaccggcgagaagccuuacaagugccccgagugcggcaaauccuucuccagauccgacaagcucgugaggcaccagaggacacacaccggagagaaaccuuauaagugucccgaauguggaaaguccuucagcgaccccggacaccuggugagacaccagaggacccacaccggcgaaaagccuuauaaaugucccgagugcggaaaaagcuuuucuagaaacgaugcucugacagagcaccaaagaacccacaccggcgaaaaacccuacaagugucccgagugcggaaagagcuucagcagaagcgaccaccugaccaaccaccagagaacacacaccggagaaaaacccaccggcaaaaagaccucc

SEQ ID NO: 224 - RNA, 627 nt, Artificial Sequence
  source: /note="Description of Artificial Sequence: Synthetic polynucleotide"
cuggagcccggcgaaaagcccuacaaaugucccgaaugcggcaaauccuucuccaccuccggccaccucgugagacaccagaggacacacaccggcgagaagccuuauaagugccccgaaugcggcaaaagcuucuccaccaccggcaaucugaccguccaccagagaacacacaccggcgaaaaaccuuauaagugucccgaguguggcaaauccuuuuccaccagcggaucucuggugagacaccaaaggacacacaccggcgaaaaacccuacaaaugccccgaguguggaaaauccuucucuagaagcgacaagcuggugagacaccagaggacccacaccggcgagaaacccuacaagugccccgaauguggcaagagcuucucuagauccgacgagcucgugagacaccaaagaacccacaccggcgaaaagccuuacaaaugucccgagugcggaaagagcuuuagcagaagcgauaagcuggucagacaccaaagaacacacaccggagaaaaacccuauaagugccccgaguguggcaaguccuuuagccagagagcccaccuggagagacaccaaagaacccacaccggcgaaaaacccaccggaaaaaagacaagc

SEQ ID NO: 225 - RNA, 627 nt, Artificial Sequence
  source: /note="Description of Artificial Sequence: Synthetic polynucleotide"
cuggagcccggcgagaagcccuacaaaugucccgaauguggcaagagcuucucuagaaacgacacacugaccgaacaccagagaacacacaccggcgaaaaaccuuauaaaugucccgaguguggaaaauccuucucuagaaaugacgcucucaccgagcaccaaagaacacacaccggcgaaaagccuuacaaaugccccgaauguggaaaguccuucuccaccuccggagagcuggugagacaccagagaacccacaccggcgaaaaacccuacaagugccccgagugcggaaaaagcuucucuagaagcgauaaucuggugagacaccaaaggacacacaccggcgagaagcccuauaagugucccgaaugcggcaaguccuuuuccagaagcgacgaacuggugagacaccagagaacccacaccggagagaagccuuauaagugucccgagugcggaaagagcuuuucuagauccgacaagcucgugagacaccaaaggacccacaccggcgagaaacccuauaaaugucccgaguguggcaaauccuuuucccagagcagcaaccucgugaggcaccagaggacccacaccggcgagaaacccaccggcaaaaagaccagc

SEQ ID NO: 226 - RNA, 627 nt, Artificial Sequence
  source: /note="Description of Artificial Sequence: Synthetic polynucleotide"
uuggaaccgggagagaagccuuauaaguguccggagugugggaagucguucuccaccucgggcaaccucaccgaacaucagcgcacacauacgggggagaaaccuuacaaaugcccggaauguggaaagagcuucuccgauucgggaaaucucagagugcaccaacgcacccacacaggagaaaaaccguauaagugccccgaaugcgggaaaucguucucccacaagaaugcgcugcagaaccaccagaggacacauacuggggagaagcccuacaaguguccugaaugcggaaaguccuucucgcgcaacgauacuuugaccgagcaccagcgcacucacaccggcgaaaagccguacaagugcccagagugcgguaaaagcuucucgcaacgggcccaucuggaacggcaccagcggacucacacuggagaaaagcccuacaagugucccgagugcgggaaguccuuuucccgguccgauaagcucgugcgccaccagagaacccauacuggagagaaaccguacaaauguccagaaugcggcaaauccuucucggacccgggacaccucgugcggcaucaacggacccauaccggggaaaagcccaccggaaagaaaacuagc

SEQ ID NO: 227 - RNA, 627 nt, Artificial Sequence
  source: /note="Description of Artificial Sequence: Synthetic polynucleotide"
cucgaacccggggaaaagccguacaaguguccggagugugggaagucauucuccacuuccgggaaucugaccgagcaucaacgcacccacacuggcgagaagcccuacaaaugcccggagugcggaaaaucguucucggacuccgggaaccuucggguccaccaaaggacucauaccggggagaaaccguacaaaugucccgaaugcgggaagucguucagccauaagaacgcgcugcagaaccaucagaggacccauacuggagaaaagcccuauaaguguccggaaugcggaaagucguucucacgcaacgacacccucaccgaacaccagcgcacucacaccggagagaagccuuacaagugcccggaauguggaaagagcuucagccagcgggcacaucuggaaagacaccagcgaacccacaccggggaaaaaccguauaagugccccgaguguggaaaguccuuuucacgguccgauaagcucgugcgccaccagagaacucacacuggggagaagccguacaagugucccgagugcggcaagagcuucucagauccgggacaccuugugcgacaucaacggacccauaccggagaaaaaccgaccgggaaaaagaccuca

SEQ ID NO: 228 - RNA, 627 nt, Artificial Sequence
  source: /note="Description of Artificial Sequence: Synthetic polynucleotide"
cuggaaccgggggaaaaacccuacaagugcccggaaugcggcaagagcuucucgaccuccgggaaccugaccgagcaccagcgcacccacaccggagagaaaccguacaagugccccgaaugcgggaaaucguucucagacucgggaaaccucagggugcaccagcggacccacacgggggaaaagccguacaaaugcccggagugcgggaagucauucucccacaagaacgcgcugcagaaccaccaaagaacccacaccggcgaaaaaccguacaagugccccgagugcggaaaguccuucucccgcaacgacacccucaccgaacaccaacgcacccacaccggagaaaagcccuacaagugcccggaaugcggaaagagcuucagccagagggcccaccuggaaagacaccagagaacccacaccggcgaaaagccguacaaaugcccggagugcgggaaguccuucagccggucagacaagcugguccgccaccaaaggacccacacaggagaaaagcccuacaagugcccggaaugcggaaaaucguucagcgaccccggacaccugguccggcaccagaggacccacaccggggagaagccgaccggcaaaaagaccuca

SEQ ID NO: 229 - RNA, 627 nt, Artificial Sequence
  source: /note="Description of Artificial Sequence: Synthetic polynucleotide"
cuggaacccggagaaaaacccuacaagugcccagaaugcggcaagagcuucagcaccagcggaaaccugaccgaacaccagcggacgcacacaggggagaaaccguacaaaugcccggagugcggaaagagcuucagcgacagcggcaaccuccgcgugcaccagagaacccacacgggagagaagccguacaagugcccggaaugcggaaaaagcuucagccacaagaacgcgcugcagaaccaccagaggacacacacgggcgagaagcccuacaaaugccccgaaugcgggaaaagcuucagccggaacgacacccucaccgagcaccagcgaacccacaccggagaaaagccguacaagugcccggaaugcggaaaaagcuucagccaacgggcccaccuggaacgccaccaaaggacccacacaggagaaaagcccuacaagugcccagagugcggcaaaagcuucagccggagcgacaagcugguccggcaccagcgcacacacaccggcgaaaagccauacaagugccccgagugcggaaagagcuucagcgacccaggacaccucgugcggcaccaacgcacgcacaccggggaaaaaccgaccggaaaaaagaccagc

SEQ ID NO: 230 - RNA, 627 nt, Artificial Sequence
  source: /note="Description of Artificial Sequence: Synthetic polynucleotide"
cuggaaccuggggagaaacccuauaagugcccggagugcggaaagucauucucaacuagcggaaaccugacagagcaccagaggacccauacuggcgaaaagccauacaaaugccccgaaugcgggaaaagcuucagcgacagcgggaaccugagagugcaccagcggacucauaccggggagaagccuuacaagugccccgaguguggaaaguccuucucccauaagaacgcgcuccagaaccaccagagaacccacaccggagaaaagccguacaagugcccggaaugcggcaaauccuuuucacggaacgacacucucaccgagcaccaacggacgcacaccggagagaagccguacaagugcccugaaugcggaaagagcuuuagccagagggcccaccuggaacggcaucagcgcacucacaccggggaaaagcccuacaagugcccagagugcggcaagagcuucucccggucugacaagcuugugcgccaucagcggacccacacuggagaaaaaccguacaaguguccggaguguggcaaaucguucucagacccgggacaccugguccgacaccaacgcacacacaccggcgaaaagccgaccggcaaaaagaccucg

SEQ ID NO: 231 - RNA, 627 nt, Artificial Sequence
  source: /note="Description of Artificial Sequence: Synthetic polynucleotide"
cuggaacccggggagaagccguacaagugcccagaaugcggaaagagcuucagcaccagcggcaaccucaccgagcaccagagaacccacaccggggagaaaccguacaaaugcccggaaugcggcaagagcuucagcgacagcggaaaccugagagugcaccaacgcacccacacgggagaaaaacccuacaaaugccccgagugcgggaaaagcuucagccacaagaacgcgcugcagaaccaccaaagaacgcacaccggagaaaagccguacaagugcccagaaugcggaaagagcuucagcagaaacgacacccugaccgaacaccagcggacgcacacaggcgaaaaaccauacaagugcccggagugcggcaaaagcuucagccagagagcgcaccuggaaaggcaccagcgcacacacaccggcgaaaagccauacaaaugcccagagugcggaaaaagcuucagccggagcgacaagcugguccgccaccaacggacccacacaggggaaaagcccuacaagugccccgaaugcggcaagagcuucagcgacccgggacaccucgugcggcaccagaggacccacaccggagaaaagccgaccgggaaaaagaccagc

SEQ ID NO: 232 - RNA, 627 nt, Artificial Sequence; identical to SEQ ID NO: 214
  source: /note="Description of Artificial Sequence: Synthetic polynucleotide"

SEQ ID NO: 233 - RNA, 627 nt, Artificial Sequence; identical to SEQ ID NO: 217
  source: /note="Description of Artificial Sequence: Synthetic polynucleotide"

SEQ ID NO: 234 - RNA, 627 nt, Artificial Sequence
  source: /note="Description of Artificial Sequence: Synthetic polynucleotide"
cuggaaccgggggaaaaacccuacaagugcccggaaugcggcaagagcuucucgcgguccgaccaccugaccaaccaccagagaacacacaccggcgagaagccguacaagugccccgagugcgggaagucguucagcaccucaggaucgcugguccgccaccaacggacccacacaggagaaaagcccuacaagugcccggaaugcggaaagagcuucagccaagccgggcaccuggcaucacaccagcgaacccacaccggagaaaaaccguacaaaugcccggagugcggcaaauccuucucgcgcuccgacaagcugaccgaacaccaaaggacacacaccggagagaagcccuacaagugcccggaaugcggaaaaucguucucgaccucggggaaccugaccgagcaccaacgcacccacaccggcgaaaaaccguacaaaugcccggagugcggaaagucguucucacaauccuccaaccugguccggcaccaaagaacgcacacaggggaaaagccguacaagugccccgaaugcgggaaauccuucagcacccaccuggaccucauccggcaccagaggacccacaccggggagaagccgaccggcaaaaagaccuca

SEQ ID NO: 235 - RNA, 627 nt, Artificial Sequence; identical to SEQ ID NO: 215
  source: /note="Description of Artificial Sequence: Synthetic polynucleotide"

SEQ ID NO: 236 - RNA, 627 nt, Artificial Sequence; identical to SEQ ID NO: 228
  source: /note="Description of Artificial Sequence: Synthetic polynucleotide"

SEQ ID NO: 237 - DNA, 627 bp, Artificial Sequence
  source: /note="Description of Artificial Sequence: Synthetic polynucleotide"
ctggaaccgggcgagaagccatacaagtgcccagagtgcggcaaaagcttcagccgcagcgaccatctgaccaatcaccaacgcacccataccggtgagaagccgtacaaatgcccagagtgcggtaagagctttagtaccagtggcagtctggttcgtcatcagcgcacgcacacgggcgaaaaaccatacaaatgcccggagtgcggcaaaagctttagccaagccggtcatctggcgagccatcaacgtacgcacaccggcgagaagccgtataaatgtccggagtgcggtaagagctttagccgtagcgataaactgaccgaacaccaacgtacgcatacgggcgagaaaccatataaatgtccagagtgtggcaagagtttcagcaccagcggcaatctgaccgagcatcaacgtacccataccggtgaaaagccatataaatgtccagaatgcggtaagagttttagtcagagcagtaatctggtgcgccatcagcgtacccacacgggtgagaaaccatataagtgtccggaatgcggcaagagttttagcacccatctggatctgatccgtcatcagcgcacccacaccggtgaaaaaccaaccggcaagaaaaccagt

SEQ ID NO: 238 - RNA, 627 nt, Artificial Sequence; identical to SEQ ID NO: 217
  source: /note="Description of Artificial Sequence: Synthetic polynucleotide"

SEQ ID NO: 239 - DNA, 627 bp, Artificial Sequence
  source: /note="Description of Artificial Sequence: Synthetic polynucleotide"
ctggaaccgggggaaaaaccctacaagtgcccggaatgcggcaagagcttctcgacctccgggaacctgaccgagcaccagcgcacccacaccggagagaaaccgtacaagtgccccgaatgcgggaaatcgttctcagactcgggaaacctcagggtgcaccagcggacccacacgggggaaaagccgtacaaatgcccggagtgcgggaagtcattctcccacaagaacgcgctgcagaaccaccaaagaacccacaccggcgaaaaaccgtacaagtgccccgagtgcggaaagtccttctcccgcaacgacaccctcaccgaacaccaacgcacccacaccggagaaaagccctacaagtgcccggaatgcggaaagagcttcagccagagggcccacctggaaagacaccagagaacccacaccggcgaaaagccgtacaaatgcccggagtgcgggaagtccttcagccggtcagacaagctggtccgccaccaaaggacccacacaggagaaaagccctacaagtgcccggaatgcggaaaatcgttcagcgaccccggacacctggtccggcaccagaggacccacaccggggagaagccgaccggcaaaaagacctca

SEQ ID NO: 240 - RNA, 627 nt, Artificial Sequence; identical to SEQ ID NO: 228
  source: /note="Description of Artificial Sequence: Synthetic polynucleotide"

SEQ ID NO: 241 - DNA, 627 bp, Artificial Sequence; identical to SEQ ID NO: 237
  source: /note="Description of Artificial Sequence: Synthetic polynucleotide"

SEQ ID NO: 242 - RNA, 627 nt, Artificial Sequence; identical to SEQ ID NO: 217
  source: /note="Description of Artificial Sequence: Synthetic polynucleotide"

SEQ ID NO: 243 - DNA, 627 bp, Artificial Sequence; identical to SEQ ID NO: 239
  source: /note="Description of Artificial Sequence: Synthetic polynucleotide"

SEQ ID NO: 244 - RNA, 2406 nt, Artificial Sequence
  source: /note="Description of Artificial Sequence: Synthetic polynucleotide"
ggaucccauaugguugaucugcguacccuggguuauagccagcagcagcaagaaaaaaucaaaccgaaaguucguagcaccguugcacagcaucaugaagcacugguuggucaugguuuuacccaugcacauauuguugcacugagccagcauccggcagcacugggcaccguugcaguuaaauaucaggauaugauugcagcacugccggaagcaacccaugaagcaauuguugguguugguaaacgcggagcuggugcacgugcccuggaagcacugcugaccguugccggugaacugcgugguccgccucugcagcuggauaccggucagcugcugaaaauugcaaaacguggugguguuaccgcaguugaagcaguucaugcauggcguaaugcacugaccggugcaccgcugaaucugacaccggaacagguuguugcaauugccagccaugaugguggcaaacaggcacuggaaaccguucagcgucugcugccgguucugugucaggcacauggucugaccccugaacaggugguggccauugcaagcaauaauggcgguaaacaagcccuggaaacagugcagcgccuguuaccggugcugugccaggcccauggcuuaacuccggaacaggugguagcgaucgcaucaaacaauggagguaaacaggccuuagaaaccguacagcgcuuacugccgguguuaugccaggcgcacggccugacgccagaacagguaguggcaaucgccucacaugacgguggaaaacaggcguuagagacaguccagcgccugcugccuguauuaugucaagcccauggccugaccccagagcaaguuguugcgauugcaaguaauaauggggguaaacaggcacuugagacaguucaacguuuacugccuguacugugccaagcucacggucugacuccggaacaagucgucgcgauugcgaguaauggugguggcaaacaagcauuagaaacggugcaacgccugcugccaguucuuugccaggcucacgguuuaaccccugagcagguuguagcuauugcgaguaacaauggugguaagcaggcguuggaaacugugcaaagacugcugcccguguugugccaagcacaugguuuaaccccagaacaagucguagcaaucgcaagcaauaaugguggcaagcaagcgcuugaaacaguacagcguuuauuaccgguacuuugucaggcccacggucuuacaccagaacaaguuguggccauagccaguaacauuggcggaaagcaggcucuggaaacgguacaacgucuguuaccuguucugugucaagcgcacggauuaacaccugaacaaguaguugccauugcgucaaauaauggaggcaagcaggccuuggagacagugcagagauuacugccaguguugugucaggcucauggccuuacacccgagcaggucguggcaauugcaucuaacaauggcgguaagcaagcuuuagagacuguucagagacugcuuccuguccugugccaggcacacggacuuacgccugagcaagugguugcaaucgccucucaugauggugguaagcaagcacuggaaacuguccaacgcuuacuuccggugcuuugucaagcacacggcuuaacgccagagcaggucgucgccauagccagcaauauaggugguaaacaggcccuugaaacgguccaaagacuucugccgguccuuugccaagcgcaugggcugacaccugagcagguagucgcgauugccucaaauaauggugggaagcaggcauuagaaacaguucaaagauuauuaccaguccugugucaggcgcauggguuaaccccagagcagguaguugcaauagcauccaacaauggcggaaaacaagcguuggaaacgguucagcgguuauugccuguuuugugccaggcgcaugguuugacacccgagcaagugguagccauagccucaaauaauggggguaaacaagcuuuggagacaguacaacggcugcuuccaguuuuaugucaggcccauggauugacgccugaacaaguugucgcuaucgcaaguaauaucggugguaaacaagcgcuugaaaccguucaacgccuucugccugugcuuugucaggcacauggauuaacacccgaacagguugucgcgauagcuucaaacaaugguggucguccggcacuggaaagcauuguugcacagcugagccguccugauccggcacuggcagcacugaccaaugaucaucugguugcacuggcaugucuggguggucgcccugcccuggaugcaguuaaaaaaggucugccgcaugcaccggcacugauuaaacguaccaaucgucguauuccggaacguaccagccaucguguugcuagc

SEQ ID NO: 245 - RNA, 2406 nt, Artificial Sequence
  source: /note="Description of Artificial Sequence: Synthetic polynucleotide"
ggaucccauaugguugaucugcguacccuggguuauagccagcagcagcaagaaaaaaucaaaccgaaaguucguagcaccguugcacagcaucaugaagcacugguuggucaugguuuuacccaugcacauauuguugcacugagccagcauccggcagcacugggcaccguugcaguuaaauaucaggauaugauugcagcacugccggaagcaacccaugaagcaauuguugguguugguaaacgcggagcuggugcacgugcccuggaagcacugcugaccguugccggugaacugcgugguccgccucugcagcuggauaccggucagcugcugaaaauugcaaaacguggugguguuaccgcaguugaagcaguucaugcauggcguaaugcacugaccggugcaccgcugaaucugacaccggaacagguuguugcaauugccagcaauggugguggcaaacaggcacuggaaaccguucagcgucugcugccgguucugugucaggcacauggucugaccccugaacaggugguggccauugcaagcaauggcggcgguaaacaagcccuggaaacagugcagcgccuguuaccggugcugugccaggcccauggcuuaacuccggaacaggugguagcgaucgcaucacaugauggagguaaacaggccuuagaaaccguacagcgcuuacugccgguguuaugccaggcgcacggccugacgccagaacagguaguggcaaucgccucaaauaaugguggaaaacaggcguuagagacaguccagcgccugcugccuguauuaugucaagcccauggccugaccccagagcaaguuguugcgauugcaaguaacaauggggguaaacaggcacuugagacaguucaacguuuacugccuguacugugccaagcucacggucugacuccggaacaagucgucgcgauugcgaguaauaaugguggcaaacaagcauuagaaacggugcaacgccugcugccaguucuuugccaggcucacgguuuaaccccugagcagguuguagcuauugcgaguaacaauggugguaagcaggcguuggaaacugugcaaagacugcugcccguguugugccaagcacaugguuuaaccccagaacaagucguagcaaucgcaagcaauggggguggcaagcaagcgcuugaaacaguacagcguuuauuaccgguacuuugucaggcccacggucuuacaccagaacaaguuguggccauagccaguaauaauggcggaaagcaggcucuggaaacgguacaacgucuguuaccuguucugugucaagcgcacggauuaacaccugaacaaguaguugccauugcgucaaacaauggaggcaagcaggccuuggagacagugcagagauuacugccaguguugugucaggcucauggccuuacacccgagcaggucguggcaauugcaucuaauaauggcgguaagcaagcuuuagagacuguucagagacugcuuccuguccugugccaggcacacggacuuacgccugagcaagugguugcaaucgccucucaugauggugguaagcaagcacuggaaacuguccaacgcuuacuuccggugcuuugucaagcacacggcuuaacgccagagcaggucgucgccauagccagcaacaauggugguaaacaggcccuugaaacgguccaaagacuucugccgguccuuugccaagcgcaugggcugacaccugagcagguagucgcgauugccucacaugacggugggaagcaggcauuagaaacaguucaaagauuauuaccaguccugugucaggcgcauggguuaaccccagagcagguaguugcaauagcaucccaugauggcggaaaacaagcguuggaaacgguucagcgguuauugccuguuuugugccaggcgcaugguuugacacccgagcaagugguagccauagccucacaugacggggguaaacaagcuuuggagacaguacaacggcugcuuccaguuuuaugucaggcccauggauugacgccugaacaaguugucgcuaucgcaaguaacauuggugguaaacaagcgcuugaaaccguucaacgccuucugccugugcuuugucaggcacauggauuaacacccgaacagguugucgcgauagcuucaaacaaugguggucguccggcacuggaaagcauuguugcacagcugagccguccugauccggcacuggcagcacugaccaaugaucaucugguugcacuggcaugucuggguggucgcccugcccuggaugcaguuaaaaaaggucugccgcaugcaccggcacugauuaaacguaccaaucgucguauuccggaacguaccagccaucguguugcuagc

SEQ ID NO: 246 - RNA, 2406 nt, Artificial Sequence
  source: /note="Description of Artificial Sequence: Synthetic polynucleotide"
ggaucccauaugguugaucugcguacccuggguuauagccagcagcagcaagaaaaaaucaaaccgaaaguucguagcaccguugcacagcaucaugaagcacugguuggucaugguuuuacccaugcacauauuguugcacugagccagcauccggcagcacugggcaccguugcaguuaaauaucaggauaugauugcagcacugccggaagcaacccaugaagcaauuguugguguugguaaacgcggagcuggugcacgugcccuggaagcacugcugaccguugccggugaacugcgugguccgccucugcagcuggauaccggucagcugcugaaaauugcaaaacguggugguguuaccgcaguugaagcaguucaugcauggcguaaugcacugaccggugcaccgcugaaucugacaccggaacagguuguugcaauugccagcaauaaugguggcaaacaggcacuggaaaccguucagcgucugcugccgguucugugucaggcacauggucugaccccugaacaggugguggccauugcaagcaaugguggcgguaaacaagcccuggaaacagugcagcgccuguuaccggugcugugccaggcccauggcuuaacuccggaacaggugguagcgaucgcaucaaauggcggagguaaacaggccuuagaaaccguacagcgcuuacugccgguguuaugccaggcgcacggccugacgccagaacagguaguggcaaucgccucaaauggggguggaaaacaggcguuagagacaguccagcgccugcugccuguauuaugucaagcccauggccugaccccagagcaaguuguugcgauugcaaguaacaauggggguaaacaggcacuugagacaguucaacguuuacugccuguacugugccaagcucacggucugacuccggaacaagucgucgcgauugcgaguaacauugguggcaaacaagcauuagaaacggugcaacgccugcugccaguucuuugccaggcucacgguuuaaccccugagcagguuguagcuauugcgaguaauaucggugguaagcaggcguuggaaacugugcaaagacugcugcccguguugugccaagcacaugguuuaaccccagaacaagucguagcaaucgcaagcaauauagguggcaagcaagcgcuugaaacaguacagcguuuauuaccgguacuuugucaggcccacggucuuacaccagaacaaguuguggccauagccaguaauaauggcggaaagcaggcucuggaaacgguacaacgucuguuaccuguucugugucaagcgcacggauuaacaccugaacaaguaguugccauugcgucaaacaauggaggcaagcaggccuuggagacagugcagagauuacugccaguguugugucaggcucauggccuuacacccgagcaggucguggcaauugcaucuaacauuggcgguaagcaagcuuuagagacuguucagagacugcuuccuguccugugccaggcacacggacuuacgccugagcaagugguugcaaucgccucuaauaucggugguaagcaagcacuggaaacuguccaacgcuuacuuccggugcuuugucaagcacacggcuuaacgccagagcaggucgucgccauagccagcaauaauggugguaaacaggcccuugaaacgguccaaagacuucugccgguccuuugccaagcgcaugggcugacaccugagcagguagucgcgauugccucaaacaauggugggaagcaggcauuagaaacaguucaaagauuauuaccaguccugugucaggcgcauggguuaaccccagagcagguaguugcaauagcaucccaugauggcggaaaacaagcguuggaaacgguucagcgguuauugccuguuuugugccaggcgcaugguuugacacccgagcaagugguagccauagccucaaauauaggggguaaacaagcuuuggagacaguacaacggcugcuuccaguuuuaugucaggcccauggauugacgccugaacaaguugucgcuaucgcaaguaauaauggugguaaacaagcgcuugaaaccguucaacgccuucugccugugcuuugucaggcacauggauuaacacccgaacagguugucgcgauagcuucaaacauugguggucguccggcacuggaaagcauuguugcacagcugagccguccugauccggcacuggcagcacugaccaaugaucaucugguugcacuggcaugucuggguggucgcccugcccuggaugcaguuaaaaaaggucugccgcaugcaccggcacugauuaaacguaccaaucgucguauuccggaacguaccagccaucguguugcuagc

SEQ ID NO: 247 - RNA, 2406 nt, Artificial Sequence
  source: /note="Description of Artificial Sequence: Synthetic polynucleotide"
ggaucccauaugguugaucugcguacccuggguuauagccagcagcagcaagaaaaaaucaaaccgaaaguucguagcaccguugcacagcaucaugaagcacugguuggucaugguuuuacccaugcacauauuguugcacugagccagcauccggcagcacugggcaccguugcaguuaaauaucaggauaugauugcagcacugccggaagcaacccaugaagcaauuguugguguugguaaacgcggagcuggugcacgugcccuggaagcacugcugaccguugccggugaacugcgugguccgccucugcagcuggauaccggucagcugcugaaaauugcaaaacguggugguguuaccgcaguugaagcaguucaugcauggcguaaugcacugaccggugcaccgcugaaucugacaccggaacagguuguugcaauugccagccaugaugguggcaaacaggcacuggaaaccguucagcgucugcugccgguucugugucaggcacauggucugaccccugaacaggugguggccauugcaagccaugacggcgguaaacaagcccuggaaacagugcagcgccuguuaccggugcugugccaggcccauggcuuaacuccggaacaggugguagcgaucgcaucaaacauuggagguaaacaggccuuagaaaccguacagcgcuuacugccgguguuaugccaggcgcacggccugacgccagaacagguaguggcaaucgccucaaauaaugguggaaaacaggcguuagagacaguccagcgccugcugccuguauuaugucaagcccauggccugaccccagagcaaguuguugcgauugcaagucaugauggggguaaacaggcacuugagacaguucaacguuuacugccuguacugugccaagcucacggucugacuccggaacaagucgucgcgauugcgaguaauaucgguggcaaacaagcauuagaaacggugcaacgccugcugccaguucuuugccaggcucacgguuuaaccccugagcagguuguagcuauugcgaguaacaauggugguaagcaggcguuggaaacugugcaaagacugcugcccguguugugccaagcacaugguuuaaccccagaacaagucguagcaaucgcaagcaauauagguggcaagcaagcgcuugaaacaguacagcguuuauuaccgguacuuugucaggcccacggucuuacaccagaacaaguuguggccauagccaguaaugguggcggaaagcaggcucuggaaacgguacaacgucuguuaccuguucugugucaagcgcacggauuaacaccugaacaaguaguugccauugcgucacaugacggaggcaagcaggccuuggagacagugcagagauuacugccaguguugugucaggcucauggccuuacacccgagcaggucguggcaauugcaucuaauggcggcgguaagcaagcuuuagagacuguucagagacugcuuccuguccugugccaggcacacggacuuacgccugagcaagugguugcaaucgccucuaaugggggugguaagcaagcacuggaaacuguccaacgcuuacuuccggugcuuugucaagcacacggcuuaacgccagagcaggucgucgccauagccagccaugauggugguaaacaggcccuugaaacgguccaaagacuucugccgguccuuugccaagcgcaugggcugacaccugagcagguagucgcgauugccucacaugacggugggaagcaggcauuagaaacaguucaaagauuauuaccaguccugugucaggcgcauggguuaaccccagagcagguaguugcaauagcaucccaugauggcggaaaacaagcguuggaaacgguucagcgguuauugccuguuuugugccaggcgcaugguuugacacccgagcaagugguagccauagccucaaacauuggggguaaacaagcuuuggagacaguacaacggcugcuuccaguuuuaugucaggcccauggauugacgccugaacaaguugucgcuaucgcaaguaauaauggugguaaacaagcgcuugaaaccguucaacgccuucugccugugcuuugucaggcacauggauuaacacccgaacagguugucgcgauagcuucaaauaucgguggucguccggcacuggaaagcauuguugcacagcugagccguccugauccggcacuggcagcacugaccaaugaucaucugguugcacuggcaugucuggguggucgcccugcccuggaugcaguuaaaaaaggucugccgcaugcaccggcacugauuaaacguaccaaucgucguauuccggaacguaccagccaucguguugcuagc

SEQ ID NO: 248 - RNA, 2406 nt, Artificial Sequence
  source: /note="Description of Artificial Sequence: Synthetic polynucleotide"
ggaucccauaugguugaucugcguacccuggguuauagccagcagcagcaagaaaaaaucaaaccgaaaguucguagcaccguugcacagcaucaugaagcacugguuggucaugguuuuacccaugcacauauuguugcacugagccagcauccggcagcacugggcaccguugcaguuaaauaucaggauaugauugcagcacugccggaagcaacccaugaagcaauuguugguguugguaaacgcggagcuggugcacgugcccuggaagcacugcugaccguugccggugaacugcgugguccgccucugcagcuggauaccggucagcugcugaaaauugcaaaacguggugguguuaccgcaguugaagcaguucaugcauggcguaaugcacugaccggugcaccgcugaaucugacaccggaacagguuguugcaauugccagcaauaaugguggcaaacaggcacuggaaaccguucagcgucugcugccgguucugugucaggcacauggucugaccccugaacaggugguggccauugcaagcaacaauggcgguaaacaagcccuggaaacagugcagcgccuguuaccggugcugugccaggcccauggcuuaacuccggaacaggugguagcgaucgcaucaaauaauggagguaaacaggccuuagaaaccguacagcgcuuacugccgguguuaugccaggcgcacggccugacgccagaacagguaguggcaaucgccucaaacaaugguggaaaacaggcguuagagacaguccagcgccugcugccuguauuaugucaagcccauggccugaccccagagcaaguuguugcgauugcaaguaauaauggggguaaacaggcacuugagacaguucaacguuuacugccuguacugugccaagcucacggucugacuccggaacaagucgucgcgauugcgaguaacauugguggcaaacaagcauuagaaacggugcaacgccugcugccaguucuuugccaggcucacgguuuaaccccugagcagguuguagcuauugcgagucaugauggugguaagcaggcguuggaaacugugcaaagacugcugcccguguugugccaagcacaugguuuaaccccagaacaagucguagcaaucgcaagccaugacgguggcaagcaagcgcuugaaacaguacagcguuuauuaccgguacuuugucaggcccacggucuuacaccagaacaaguuguggccauagccaguaacaauggcggaaagcaggcucuggaaacgguacaacgucuguuaccuguucugugucaagcgcacggauuaacaccugaacaaguaguugccauugcgucaaauaucggaggcaagcaggccuuggagacagugcagagauuacugccaguguugugucaggcucauggccuuacacccgagcaggucguggcaauugcaucuaaugguggcgguaagcaagcuuuagagacuguucagagacugcuuccuguccugugccaggcacacggacuuacgccugagcaagugguugcaaucgccucuaauggcggugguaagcaagcacuggaaacuguccaacgcuuacuuccggugcuuugucaagcacacggcuuaacgccagagcaggucgucgccauagccagcaauauaggugguaaacaggcccuugaaacgguccaaagacuucugccgguccuuugccaagcgcaugggcugacaccugagcagguagucgcgauugccucaaacauuggugggaagcaggcauuagaaacaguucaaagauuauuaccaguccugugucaggcgcauggguuaaccccagagcagguaguugcaauagcaucccaugauggcggaaaacaagcguuggaaacgguucagcgguuauugccuguuuugugccaggcgcaugguuugacacccgagcaagugguagccauagccucacaugacggggguaaacaagcuuuggagacaguacaacggcugcuuccaguuuuaugucaggcccauggauugacgccugaacaaguugucgcuaucgcaaguaauaucggugguaaacaagcgcuugaaaccguucaacgccuucugccugugcuuugucaggcacauggauuaacacccgaacagguugucgcgauagcuucaaauggggguggucguccggcacuggaaagcauuguugcacagcugagccguccugauccggcacuggcagcacugaccaaugaucaucugguugcacuggcaugucuggguggucgcccugcccuggaugcaguuaaaaaaggucugccgcaugcaccggcacugauuaaacguaccaaucgucguauuccggaacguaccagccaucguguugcuagc

SEQ ID NO: 249 - RNA, 2406 nt, Artificial Sequence
  source: /note="Description of Artificial Sequence: Synthetic polynucleotide"
ggaucccauaugguugaucugcguacccuggguuauagccagcagcagcaagaaaaaaucaaaccgaaaguucguagcaccguugcacagcaucaugaagcacugguuggucaugguuuuacccaugcacauauuguugcacugagccagcauccggcagcacugggcaccguugcaguuaaauaucaggauaugauugcagcacugccggaagcaacccaugaagcaauuguugguguugguaaacgcggagcuggugcacgugcccuggaagcacugcugaccguugccggugaacugcgugguccgccucugcagcuggauaccggucagcugcugaaaauugcaaaacguggugguguuaccgcaguugaagcaguucaugcauggcguaaugcacugaccggugcaccgcugaaucugacaccggaacagguuguugcaauugccagcaauaaugguggcaaacaggcacuggaaaccguucagcgucugcugccgguucugugucaggcacauggucugaccccugaacaggugguggccauugcaagcaacaauggcgguaaacaagcccuggaaacagugcagcgccuguuaccggugcugugccaggcccauggcuuaacuccggaacaggugguagcgaucgcaucaaaugguggagguaaacaggccuuagaaaccguacagcgcuuacugccgguguuaugccaggcgcacggccugacgccagaacagguaguggcaaucgccucaaauaaugguggaaaacaggcguuagagacaguccagcgccugcugccuguauuaugucaagcccauggccugaccccagagcaaguuguugcgauugcaaguaauggcggggguaaacaggcacuugagacaguucaacguuuacugccuguacugugccaagcucacggucugacuccggaacaagucgucgcgauugcgagucaugaugguggcaaacaagcauuagaaacggugcaacgccugcugccaguucuuugccaggcucacgguuuaaccccugagcagguuguagcuauugcgaguaacauuggugguaagcaggcguuggaaacugugcaaagacugcugcccguguugugccaagcacaugguuuaaccccagaacaagucguagcaaucgcaagcaacaaugguggcaagcaagcgcuugaaacaguacagcguuuauuaccgguacuuugucaggcccacggucuuacaccagaacaaguuguggccauagccagucaugacggcggaaagcaggcucuggaaacgguacaacgucuguuaccuguucugugucaagcgcacggauuaacaccugaacaaguaguugccauugcgucacaugauggaggcaagcaggccuuggagacagugcagagauuacugccaguguugugucaggcucauggccuuacacccgagcaggucguggcaauugcaucuaauaucggcgguaagcaagcuuuagagacuguucagagacugcuuccuguccugugccaggcacacggacuuacgccugagcaagugguugcaaucgccucuaauaauggugguaagcaagcacuggaaacuguccaacgcuuacuuccggugcuuugucaagcacacggcuuaacgccagagcaggucgucgccauagccagcaauauaggugguaaacaggcccuugaaacgguccaaagacuucugccgguccuuugccaagcgcaugggcugacaccugagcagguagucgcgauugccucaaacauuggugggaagcaggcauuagaaacaguucaaagauuauuaccaguccugugucaggcgcauggguuaaccccagagcagguaguugcaauagcauccaauaucggcggaaaacaagcguuggaaacgguucagcgguuauugccuguuuugugccaggcgcaugguuugacacccgagcaagugguagccauagccucacaugauggggguaaacaagcuuuggagacaguacaacggcugcuuccaguuuuaugucaggcccauggauugacgccugaacaaguugucgcuaucgcaagucaugacggugguaaacaagcgcuugaaaccguucaacgccuucugccugugcuuugucaggcacauggauuaacacccgaacagguugucgcgauagcuucaaauauagguggucguccggcacuggaaagcauuguugcacagcugagccguccugauccggcacuggcagcacugaccaaugaucaucugguugcacuggcaugucuggguggucgcccugcccuggaugcaguuaaaaaaggucugccgcaugcaccggcacugauuaaacguaccaaucgucguauuccggaacguaccagccaucguguugcuagc

SEQ ID NO: 250 - RNA, 2406 nt, Artificial Sequence
  source: /note="Description of Artificial Sequence: Synthetic polynucleotide"
ggaucccauaugguugaucugcguacccuggguuauagccagcagcagcaagaaaaaaucaaaccgaaaguucguagcaccguugcacagcaucaugaagcacugguuggucaugguuuuacccaugcacauauuguugcacugagccagcauccggcagcacugggcaccguugcaguuaaauaucaggauaugauugcagcacugccggaagcaacccaugaagcaauuguugguguugguaaacgcggagcuggugcacgugcccuggaagcacugcugaccguugccggugaacugcgugguccgccucugcagcuggauaccggucagcugcugaaaauugcaaaacguggugguguuaccgcaguugaagcaguucaugcauggcguaaugcacugaccggugcaccgcugaaucugacaccggaacagguuguugcaauugccagccaugaugguggcaaacaggcacuggaaaccguucagcgucugcugccgguucugugucaggcacauggucugaccccugaacaggugguggccauugcaagcaaugguggcgguaaacaagcccuggaaacagugcagcgccuguuaccggugcugugccaggcccauggcuuaacuccggaacaggugguagcgaucgcaucaaauaauggagguaaacaggccuuagaaaccguacagcgcuuacugccgguguuaugccaggcgcacggccugacgccagaacagguaguggcaaucgccucaaacauugguggaaaacaggcguuagagacaguccagcgccugcugccuguauuaugucaagcccauggccugaccccagagcaaguuguugcgauugcaaguaauaucggggguaaacaggcacuugagacaguucaacguuuacugccuguacugugccaagcucacggucugacuccggaacaagucgucgcgauugcgagucaugacgguggcaaacaagcauuagaaacggugcaacgccugcugccaguucuuugccaggcucacgguuuaaccccugagcagguuguagcuauugcgaguaauauaggugguaagcaggcguuggaaacugugcaaagacugcugcccguguugugccaagcacaugguuuaaccccagaacaagucguagcaaucgcaagcaauggcgguggcaagcaagcgcuugaaacaguacagcguuuauuaccgguacuuugucaggcccacggucuuacaccagaacaaguuguggccauagccagucaugauggcggaaagcaggcucuggaaacgguacaacgucuguuaccuguucugugucaagcgcacggauuaacaccugaacaaguaguugccauugcgucaaauaauggaggcaagcaggccuuggagacagugcagagauuacugccaguguugugucaggcucauggccuuacacccgagcaggucguggcaauugcaucuaacaauggcgguaagcaagcuuuagagacuguucagagacugcuuccuguccugugccaggcacacggacuuacgccugagcaagugguugcaaucgccucuaaugggggugguaagcaagcacuggaaacuguccaacgcuuacuuccggugcuuugucaagcacacggcuuaacgccagagcaggucgucgccauagccagcaauaauggugguaaacaggcccuugaaacgguccaaagacuucugccgguccuuugccaagcgcaugggcugacaccugagcagguagucgcgauugccucaaacauuggugggaagcaggcauuagaaacaguucaaagauuauuaccaguccugugucaggcgcauggguuaaccccagagcagguaguugcaauagcauccaacaauggcggaaaacaagcguuggaaacgguucagcgguuauugccuguuuugugccaggcgcaugguuugacacccgagcaagugguagccauagccucaaacgguggggguaaacaagcuuuggagacaguacaacggcugcuuccaguuuuaugucaggcccauggauugacgccugaacaaguugucgcuaucgcaaguaaugguggugguaaacaagcgcuugaaaccguucaacgccuucugccugugcuuugucaggcacauggauuaacacccgaacagguugucgcgauagcuucaaauaucgguggucguccggcacuggaaagcauuguugcacagcugagccguccugauccggcacuggcagcacugaccaaugaucaucugguugcacuggcaugucuggguggucgcccugcccuggaugcaguuaaaaaaggucugccgcaugcaccggcacugauuaaacguaccaaucgucguauuccggaacguaccagccaucguguugcuagc

SEQ ID NO: 251 - RNA, 2406 nt, Artificial Sequence
  source: /note="Description of Artificial Sequence: Synthetic polynucleotide"
ggaucccauaugguugaucugcguacccuggguuauagccagcagcagcaagaaaaaaucaaaccgaaaguucguagcaccguugcacagcaucaugaagcacugguuggucaugguuuuacccaugcacauauuguugcacugagccagcauccggcagcacugggcaccguugcaguuaaauaucaggauaugauugcagcacugccggaagcaacccaugaagcaauuguugguguugguaaacgcggagcuggugcacgugcccuggaagcacugcugaccguugccggugaacugcgugguccgccucugcagcuggauaccggucagcugcugaaaauugcaaaacguggugguguuaccgcaguugaagcaguucaugcauggcguaaugcacugaccggugcaccgcugaaucugacaccggaacagguuguugcaauugccagccaugaugguggcaaacaggcacuggaaaccguucagcgucugcugccgguucugugucaggcacauggucugaccccugaacaggugguggccauugcaagcaaugguggcgguaaacaagcccuggaaacagugcagcgccuguuaccggugcugugccaggcccauggcuuaacuccggaacaggugguagcgaucgcaucaaauggcggagguaaacaggccuuagaaaccguacagcgcuuacugccgguguuaugccaggcgcacggccugacgccagaacagguaguggcaaucgccucaaauaaugguggaaaacaggcguuagagacaguccagcgccugcugccuguauuaugucaagcccauggccugaccccagagcaaguuguugcgauugcaaguaacaauggggguaaacaggcacuugagacaguucaacguuuacugccuguacugugccaagcucacggucugacuccggaacaagucgucgcgauugcgaguaauaaugguggcaaacaagcauuagaaacggugcaacgccugcugccaguucuuugccaggcucacgguuuaaccccugagcagguuguagcuauugcgaguaacaauggugguaagcaggcguuggaaacugugcaaagacugcugcccguguugugccaagcacaugguuuaaccccagaacaagucguagcaaucgcaagcaauggggguggcaagcaagcgcuugaaacaguacagcguuuauuaccgguacuuugucaggcccacggucuuacaccagaacaaguuguggccauagccaguaauaauggcggaaagcaggcucuggaaacgguacaacgucuguuaccuguucugugucaagcgcacggauuaacaccugaacaaguaguugccauugcgucaaacauuggaggcaagcaggccuuggagacagugcagagauuacugccaguguugugucaggcucauggccuuacacccgagcaggucguggcaauugcaucucaugacggcgguaagcaagcuuuagagacuguucagagacugcuuccuguccugugccaggcacacggacuuacgccugagcaagugguugcaaucgccucuaauaucggugguaagcaagcacuggaaacuguccaacgcuuacuuccggugcuuugucaagcacacggcuuaacgccagagcaggucgucgccauagccagcaauauaggugguaaacaggcccuugaaacgguccaaagacuucugccgguccuuugccaagcgcaugggcugacaccugagcagguagucgcgauugccucaaacgguggugggaagcaggcauuagaaacaguucaaagauuauuaccaguccugugucaggcgcauggguuaaccccagagcagguaguugcaauagcauccaacaauggcggaaaacaagcguuggaaacgguucagcgguuauugccuguuuugugccaggcgcaugguuugacacccgagcaagugguagccauagccucaaauaauggggguaaacaagcuuuggagacaguacaacggcugcuuccaguuuuaugucaggcccauggauugacgccugaacaaguugucgcuaucgcaagucaugauggugguaaacaagcgcuugaaaccguucaacgccuucugccugugcuuugucaggcacauggauuaacacccgaacagguugucgcgauagcuucaaauggugguggucguccggcacuggaaagcauuguugcacagcugagccguccugauccggcacuggcagcacugaccaaugaucaucugguugcacuggcaugucuggguggucgcccugcccuggaugcaguuaaaaaaggucugccgcaugcaccggcacugauuaaacguaccaaucgucguauuccggaacguaccagccaucguguugcuagc

SEQ ID NO: 252 - RNA, 2406 nt, Artificial Sequence
  source: /note="Description of Artificial Sequence: Synthetic polynucleotide"
ggaucccauaugguugaucugcguacccuggguuauagccagcagcagcaagaaaaaaucaaaccgaaaguucguagcaccguugcacagcaucaugaagcacugguuggucaugguuuuacccaugcacauauuguugcacugagccagcauccggcagcacugggcaccguugcaguuaaauaucaggauaugauugcagcacugccggaagcaacccaugaagcaauuguugguguugguaaacgcggagcuggugcacgugcccuggaagcacugcugaccguugccggugaacugcgugguccgccucugcagcuggauaccggucagcugcugaaaauugcaaaacguggugguguuaccgcaguugaagcaguucaugcauggcguaaugcacugaccggugcaccgcugaaucugacaccggaacagguuguugcaauugccagcaauaaugguggcaaacaggcacuggaaaccguucagcgucugcugccgguucugugucaggcacauggucugaccccugaacaggugguggccauugcaagcaacauuggcgguaaacaagcccuggaaacagugcagcgccuguuaccggugcugugccaggcccauggcuuaacuccggaacaggugguagcgaucgcaucaaauaucggagguaaacaggccuuagaaaccguacagcgcuuacugccgguguuaugccaggcgcacggccugacgccagaacagguaguggcaaucgccucaaauggugguggaaaacaggcguuagagacaguccagcgccugcugccuguauuaugucaagcccauggccugaccccagagcaaguuguugcgauugcaaguaauggcggggguaaacaggcacuugagacaguucaacguuuacugccuguacugugccaagcucacggucugacuccggaacaagucgucgcgauugcgaguaauauagguggcaaacaagcauuagaaacggugcaacgccugcugccaguucuuugccaggcucacgguuuaaccccugagcagguuguagcuauugcgaguaacaauggugguaagcaggcguuggaaacugugcaaagacugcugcccguguugugccaagcacaugguuuaaccccagaacaagucguagcaaucgcaagcaauaaugguggcaagcaagcgcuugaaacaguacagcguuuauuaccgguacuuugucaggcccacggucuuacaccagaacaaguuguggccauagccaguaacaauggcggaaagcaggcucuggaaacgguacaacgucuguuaccuguucugugucaagcgcacggauuaacaccugaacaaguaguugccauugcgucaaauaauggaggcaagcaggccuuggagacagugcagagauuacugccaguguugugucaggcucauggccuuacacccgagcaggucguggcaauugcaucuaacauuggcgguaagcaagcuuuagagacuguucagagacugcuuccuguccugugccaggcacacggacuuacgccugagcaagugguugcaaucgccucuaaugggggugguaagcaagcacuggaaacuguccaacgcuuacuuccggugcuuugucaagcacacggcuuaacgccagagcaggucgucgccauagccagccaugauggugguaaacaggcccuugaaacgguccaaagacuucugccgguccuuugccaagcgcaugggcugacaccugagcagguagucgcgauugccucaaacgguggugggaagcaggcauuagaaacaguucaaagauuauuaccaguccugugucaggcgcauggguuaaccccagagcagguaguugcaauagcaucccaugacggcggaaaacaagcguuggaaacgguucagcgguuauugccuguuuugugccaggcgcaugguuugacacccgagcaagugguagccauagccucaaacaauggggguaaacaagcuuuggagacaguacaacggcugcuuccaguuuuaugucaggcccauggauugacgccugaacaaguugucgcuaucgcaaguaauaauggugguaaacaagcgcuugaaaccguucaacgccuucugccugugcuuugucaggcacauggauuaacacccgaacagguugucgcgauagcuucaaauaucgguggucguccggcacuggaaagcauuguugcacagcugagccguccugauccggcacuggcagcacugaccaaugaucaucugguugcacuggcaugucuggguggucgcccugcccuggaugcaguuaaaaaaggucugccgcaugcaccggcacugauuaaacguaccaaucgucguauuccggaacguaccagccaucguguugcuagc

SEQ ID NO: 253-299 - skipped (47 entries)

SEQ ID NO: 300 - RNA, 4101 nt, Artificial Sequence
  source: /note="Description of Artificial Sequence: Synthetic polynucleotide"
gacaagaaguacagcaucggccuggccaucggcaccaacagcgugggcugggccgugaucaccgacgaguacaaggugcccagcaagaaguucaaggugcugggcaacaccgaccggcacagcaucaagaagaaccugaucggcgcccugcuguucgacagcggcgagaccgccgaggccacccggcugaagcggaccgcccggcggcgguacacccggcggaagaaccggaucugcuaccugcaggagaucuucagcaacgagauggccaagguggacgacagcuucuuccaccggcuggaggagagcuuccugguggaggaggacaagaagcacgagcggcaccccaucuucggcaacaucguggacgagguggccuaccacgagaaguaccccaccaucuaccaccugcggaagaagcugguggacagcaccgacaaggccgaccugcggcugaucuaccuggcccuggcccacaugaucaaguuccggggccacuuccugaucgagggcgaccugaaccccgacaacagcgacguggacaagcuguucauccagcuggugcagaccuacaaccagcuguucgaggagaaccccaucaacgccagcggcguggacgccaaggccauccugagcgcccggcugagcaagagccggcggcuggagaaccugaucgcccagcugcccggcgagaagaagaacggccuguucggcaaccugaucgcccugagccugggccugacccccaacuucaagagcaacuucgaccuggccgaggacgccaagcugcagcugagcaaggacaccuacgacgacgaccuggacaaccugcuggcccagaucggcgaccaguacgccgaccuguuccuggccgccaagaaccugagcgacgccauccugcugagcgacauccugcgggugaacaccgagaucaccaaggccccccugagcgccagcaugaucaagcgguacgacgagcaccaccaggaccugacccugcugaaggcccuggugcggcagcagcugcccgagaaguacaaggagaucuucuucgaccagagcaagaacggcuacgccggcuacaucgacggcggcgccagccaggaggaguucuacaaguucaucaagcccauccuggagaagauggacggcaccgaggagcugcuggugaagcugaaccgggaggaccugcugcggaagcagcggaccuucgacaacggcagcaucccccaccagauccaccugggcgagcugcacgccauccugcggcggcaggaggacuucuaccccuuccugaaggacaaccgggagaagaucgagaagauccugaccuuccggauccccuacuacgugggcccccuggcccggggcaacagccgguucgccuggaugacccggaaauccgaggagaccaucacccccuggaacuucgaggaggugguggacaagggcgccagcgcccagagcuucaucgagcggaugaccaacuucgacaagaaccugcccaacgagaaggugcugcccaagcacagccugcuguacgaguacuucaccguguacaacgagcugaccaaggugaaguacgugaccgagggcaugcggaagcccgccuuccugagcggcgagcagaagaaggccaucguggaccugcuguucaagaccaaccggaaggugaccgugaagcagcugaaggaggacuacuucaagaagaucgagugcuucgacagcguggagaucagcggcguggaggaccgguucaacgccagccugggcaccuaccacgaccugcugaagaucaucaaggacaaggacuuccuggacaacgaggagaacgaggacauccuggaggacaucgugcugacccugacccuguucgaggaccgggagaugaucgaggagcggcugaaaaccuacgcccaccuguucgacgacaaggugaugaagcagcugaagcggcggcgguacaccggcuggggccggcugagccggaagcugaucaacggcauccgggacaagcagagcggcaagaccauccuggacuuccugaaauccgacggcuucgccaaccggaacuucaugcagcugauccacgacgacagccugaccuucaaggaggacauccagaaggcccaggugagcggccagggcgacagccugcacgagcacaucgccaaccuggccggcagccccgccaucaagaagggcauccugcagaccgugaaggugguggacgagcuggugaaggugaugggccggcacaagcccgagaacaucgugaucgagauggcccgggagaaccagaccacccagaagggccagaagaacagccgggagcggaugaagcggaucgaggagggcaucaaggagcugggcagccagauccugaaggagcaccccguggagaacacccagcugcagaacgagaagcuguaccuguacuaccugcagaacggccgggacauguacguggaccaggagcuggacaucaaccggcugagcgacuacgacguggccgccaucgugccccagagcuuccugaaggacgacagcaucgacaacaaggugcugacccggagcgacaaggcccggggcaagagcgacaacgugcccagcgaggagguggugaagaagaugaagaacuacuggcggcagcugcugaacgccaagcugaucacccagcggaaguucgacaaccugaccaaggccgagcggggcggccugagcgagcuggacaaggccggcuucaucaagcggcagcugguggagacccggcagaucaccaagcacguggcccagauccuggacagccggaugaacaccaaguacgacgagaacgacaagcugauccgggaggugaaggugaucacccugaaauccaagcuggugagcgacuuccggaaggacuuccaguucuacaaggugcgggagaucaacaacuaccaccacgcccacgacgccuaccugaacgccguggugggcaccgcccugaucaagaaguaccccaagcuggagagcgaguucguguacggcgacuacaagguguacgacgugcggaagaugaucgccaagagcgagcaggagaucggcaaggccaccgccaaguacuucuucuacagcaacaucaugaacuucuucaagaccgagaucacccuggccaacggcgagauccggaagcggccccugaucgagaccaacggcgagaccggcgagaucgugugggacaagggccgggacuucgccaccgugcggaaggugcugagcaugccccaggugaacaucgugaagaaaaccgaggugcagaccggcggcuucagcaaggagagcauccugcccaagcggaacagcgacaagcugaucgcccggaagaaggacugggaccccaagaaguacggcggcuucgacagccccaccguggccuacagcgugcuggugguggccaagguggagaagggcaagagcaagaagcugaaauccgugaaggagcugcugggcaucaccaucauggagcggagcagcuucgagaagaaccccaucgacuuccuggaggccaagggcuacaaggaggugaagaaggaccugaucaucaagcugcccaaguacagccuguucgagcuggagaacggccggaagcggaugcuggccagcgccggcgagcugcagaagggcaacgagcuggcccugcccagcaaguacgugaacuuccuguaccuggccagccacuacgagaagcugaagggcagccccgaggacaacgagcagaagcagcuguucguggagcagcacaagcacuaccuggacgagaucaucgagcagaucagcgaguucagcaagcgggugauccuggccgacgccaaccuggacaaggugcugagcgccuacaacaagcaccgggacaagcccauccgggagcaggccgagaacaucauccaccuguucacccugaccaaccugggcgcccccgccgccuucaaguacuucgacaccaccaucgaccggaagcgguacaccagcaccaaggaggugcuggacgccacccugauccaccagagcaucaccggccuguacgagacccggaucgaccugagccagcugggcggcgac

SEQ ID NO: 301 - protein, 789 aa, Artificial Sequence; identical to SEQ ID NO: 116
  source: /note="Description of Artificial Sequence: Synthetic polypeptide"

SEQ ID NO: 302 - protein, 789 aa, Artificial Sequence; identical to SEQ ID NO: 124
  source: /note="Description of Artificial Sequence: Synthetic polypeptide"

SEQ ID NO: 303 - protein, 789 aa, Artificial Sequence; identical to SEQ ID NO: 136
  source: /note="Description of Artificial Sequence: Synthetic polypeptide"

SEQ ID NO: 304 - protein, 789 aa, Artificial Sequence; identical to SEQ ID NO: 152
  source: /note="Description of Artificial Sequence: Synthetic polypeptide"

SEQ ID NO: 305 - protein, 789 aa, Artificial Sequence; identical to SEQ ID NO: 156
  source: /note="Description of Artificial Sequence: Synthetic polypeptide"

SEQ ID NO: 306 - protein, 1614 aa, Artificial Sequence; identical to SEQ ID NO: 176
  source: /note="Description of Artificial Sequence: Synthetic polypeptide"

SEQ ID NO: 307 - protein, 1714 aa, Artificial Sequence
  source: /note="Description of Artificial Sequence: Synthetic polypeptide"
MAPKKKRKVGIHGVPAAGSSGSSGSLEPGEKPYKCPECGKSFSTSGNLTEHQRTHTGEKPYKCPECGKSFSDSGNLRVHQRTHTGEKPYKCPECGKSFSHKNALQNHQRTHTGEKPYKCPECGKSFSRNDTLTEHQRTHTGEKPYKCPECGKSFSQRAHLERHQRTHTGEKPYKCPECGKSFSRSDKLVRHQRTHTGEKPYKCPECGKSFSDPGHLVRHQRTHTGEKPTGKKTSASGSGGGSGGDALDDFDLDMLGSDALDDFDLDMLGSDALDDFDLDMLGSDALDDFDLDMLSGGPKKKRKVGSQYLPDTDDRHRIEEKRKRTYETFKSIMKKSPFSGPTDPRPPPRRIAVPSRSSASVPKPAPQPYPFTSSLSTINYDEFPTMVFPSGQISQASALAPAPPQVLPQAPAPAPAPAMVSALAQAPAPVPVLAPGPPQAVAFPPAPKPTQAGEGTLSEALLQLQFDDEDLGALLGNSTDPAVFTDLASVDNSEFQQLLNQGIPVAPHTTEPMLMEYPEAITRLVTGAQRPPDPAPAPLGAPGLPNGLLSGDEDFSSIADMDFSALLGSGSGSRDSREGMFLPKPEAGSAISDVFEGREVCQPKRLRPFHPPGSPWANRPLPASLAPTPTGPVHEPVGSLTPAPVPQPLDPAPAVTPEASHLLEDPDEETSQAVKALREMADTVIPQKEEAAICGQMDLSHPPPRGHLDELTTTLESMTEDLNLDSPLTPELNEILDTFLNDECLLHAMHISTGLSIFDTSLFSGGKRPAATKKAGQAKKKKGSYPYDVPDYAATNFSLLKQAGDVEENPGPTSAGKLGSGEGRGSLLTCGDVEENPGPLEGSSGSGSLEPGEKPYKCPECGKSFSRSDHLTNHQRTHTGEKPYKCPECGKSFSTSGSLVRHQRTHTGEKPYKCPECGKSFSQAGHLASHQRTHTGEKPYKCPECGKSFSRSDKLTEHQRTHTGEKPYKCPECGKSFSTSGNLTEHQRTHTGEKPYKCPECGKSFSQSSNLVRHQRTHTGEKPYKCPECGKSFSTHLDLIRHQRTHTGEKPTGKKTSASGSGGGSGGIFKPEELRQALMPTLEALYRQDPESLPFRQPVDPQLLGIPDYFDIVKSPMDLSTIKRKLDTGQYQEPWQYVDDIWLMFNNAWLYNRKTSRVYKYCSKLSEVFEQEIDPVMQSLGYCCGRKLEFSPQTLCCYGKQLCTIPRDATYYSYQNRYHFCEKCFNEIQGESVSLGDDPSQPQTTINKEQFSKRKNDTLDPELFVECTECGRKMHQICVLHHEIIWPAGFVCDGCLKKSARTRKENKFSAKRLPSTRLGTFLENRVNDFLRRQNHPESGEVTVRVVHASDKTVEVKPGMKARFVDSGEMAESFPYRTKALFAFEEIDGVDLCFFGMHVQEYGSDCPPPNQRRVYISYLDSVHFFRPKCLRTAVYHEILIGYLEYVKKLGYTTGHIWACPPSEGDDYIFHCHPPDQKIPKPKRLQEWYKKMLDKAVSERIVHDYKDIFKQATEDRLTSAKELPYFEGDFWPNVLEESIKELEQEEEERKREENTSNESTDVTKGDSKNAKKKNNKKTSKNKSSLSRGNKKKPGMPNVSNDLSQKLYATMEKHKEVFFVIRLIAGPAANSLPPIVDPDPLIPCDLMDGRDAFLTLARDKHLEFSSLRRAQWSTMCMLVELHTQSQDSGGKRPAATKKAGQAKKKKGSYPYDVPDYA

SEQ ID NO: 308 - protein, 1708 aa, Artificial Sequence; identical to SEQ ID NO: 182
  source: /note="Description of Artificial Sequence: Synthetic polypeptide"

SEQ ID NO: 309 - protein, 7 aa, Artificial Sequence
  source: /note="Description of Artificial Sequence: Synthetic peptide"
LEPGEKP

SEQ ID NO: 310 - protein, 6 aa, Artificial Sequence
  source: /note="Description of Artificial Sequence: Synthetic peptide"
TGKKTS

SEQ ID NO: 311 - protein, 12 aa, Artificial Sequence
  source: /note="Description of Artificial Sequence: Synthetic peptide"
THPRAPIPKPFQ

SEQ ID NO: 312 - protein, 16 aa, Artificial Sequence
  source: /note="Description of Artificial Sequence: Synthetic peptide"
TPNPHRRTDPSHKPFQ

SEQ ID NO: 313 - protein, 209 aa, Artificial Sequence
  source: /note="Description of Artificial Sequence: Synthetic polypeptide"
  MOD_RES (1)..(9): Any amino acid
  MOD_RES (11)..(12): Any amino acid
  MOD_RES (14)..(18): Any amino acid
  MOD_RES (27)..(29): Any amino acid
  MOD_RES (31)..(37): Any amino acid
  MOD_RES (39)..(40): Any amino acid
  MOD_RES (42)..(46): Any amino acid
  MOD_RES (55)..(57): Any amino acid
  MOD_RES (59)..(65): Any amino acid
  MOD_RES (67)..(68): Any amino acid
  MOD_RES (70)..(74): Any amino acid
  MOD_RES (83)..(85): Any amino acid
  MOD_RES (87)..(93): Any amino acid
  MOD_RES (95)..(96): Any amino acid
  MOD_RES (98)..(102): Any amino acid
  MOD_RES (111)..(113): Any amino acid
  MOD_RES (115)..(121): Any amino acid
  MOD_RES (123)..(124): Any amino acid
  MOD_RES (126)..(130): Any amino acid
  MOD_RES (139)..(141): Any amino acid
  MOD_RES (143)..(149): Any amino acid
  MOD_RES (151)..(152): Any amino acid
  MOD_RES (154)..(158): Any amino acid
  MOD_RES (167)..(169): Any amino acid
  MOD_RES (171)..(177): Any amino acid
  MOD_RES (179)..(180): Any amino acid
  MOD_RES (182)..(186): Any amino acid
  MOD_RES (195)..(197): Any amino acid
  MOD_RES (199)..(209): Any amino acid
XXXXXXXXXCXXCXXXXXRSDNLVRHXXXHXXXXXXXCXXCXXXXXRSDHLTNHXXXHXXXXXXXCXXCXXXXXDPGHLVRHXXXHXXXXXXXCXXCXXXXXQRAHLERHXXXHXXXXXXXCXXCXXXXXSRRTCRAHXXXHXXXXXXXCXXCXXXXXRSDKLTEHXXXHXXXXXXXCXXCXXXXXRNDTLTEHXXXHXXXXXXXXXXX

SEQ ID NO: 314 - protein, 209 aa, Artificial Sequence
  source: /note="Description of Artificial Sequence: Synthetic polypeptide"
  MOD_RES (1)..(9): Any amino acid
  MOD_RES (11)..(12): Any amino acid
  MOD_RES (14)..(18): Any amino acid
  MOD_RES (27)..(29): Any amino acid
  MOD_RES (31)..(37): Any amino acid
  MOD_RES (39)..(40): Any amino acid
  MOD_RES (42)..(46): Any amino acid
  MOD_RES (55)..(57): Any amino acid
  MOD_RES (59)..(65): Any amino acid
  MOD_RES (67)..(68): Any amino acid
  MOD_RES (70)..(74): Any amino acid
  MOD_RES (83)..(85): Any amino acid
  MOD_RES (87)..(93): Any amino acid
  MOD_RES (95)..(96): Any amino acid
  MOD_RES (98)..(102): Any amino acid
  MOD_RES (111)..(113): Any amino acid
  MOD_RES (115)..(121): Any amino acid
  MOD_RES (123)..(124): Any amino acid
  MOD_RES (126)..(130): Any amino acid
  MOD_RES (139)..(141): Any amino acid
  MOD_RES (143)..(149): Any amino acid
  MOD_RES (151)..(152): Any amino acid
  MOD_RES (154)..(158): Any amino acid
  MOD_RES (167)..(169): Any amino acid
  MOD_RES (171)..(177): Any amino acid
  MOD_RES (179)..(180): Any amino acid
  MOD_RES (182)..(186): Any amino acid
  MOD_RES (195)..(197): Any amino acid
  MOD_RES (199)..(209): Any amino acid
XXXXXXXXXCXXCXXXXXQSSNLVRHXXXHXXXXXXXCXXCXXXXXSKKHLAEHXXXHXXXXXXXCXXCXXXXXSKKALTEHXXXHXXXXXXXCXXCXXXXXDCRDLARHXXXHXXXXXXXCXXCXXXXXDPGHLVRHXXXHXXXXXXXCXXCXXXXXRNDALTEHXXXHXXXXXXXCXXCXXXXXDKKDLTRHXXXHXXXXXXXXXXX

SEQ ID NO: 315 - protein, 209 aa, Artificial Sequence
  source: /note="Description of Artificial Sequence: Synthetic polypeptide"
  MOD_RES (1)..(9): Any amino acid
  MOD_RES (11)..(12): Any amino acid
  MOD_RES (14)..(18): Any amino acid
  MOD_RES (27)..(29): Any amino acid
  MOD_RES (31)..(37): Any amino acid
  MOD_RES (39)..(40): Any amino acid
  MOD_RES (42)..(46): Any amino acid
  MOD_RES (55)..(57): Any amino acid
  MOD_RES (59)..(65): Any amino acid
  MOD_RES (67)..(68): Any amino acid
  MOD_RES (70)..(74): Any amino acid
  MOD_RES (83)..(85): Any amino acid
  MOD_RES (87)..(93): Any amino acid
  MOD_RES (95)..(96): Any amino acid
  MOD_RES (98)..(102): Any amino acid
  MOD_RES (111)..(113): Any amino acid
  MOD_RES (115)..(121): Any amino acid
  MOD_RES (123)..(124): Any amino acid
  MOD_RES (126)..(130): Any amino acid
  MOD_RES (139)..(141): Any amino acid
  MOD_RES (143)..(149): Any amino acid
  MOD_RES (151)..(152): Any amino acid
  MOD_RES (154)..(158): Any amino acid
  MOD_RES (167)..(169): Any amino acid
  MOD_RES (171)..(177): Any amino acid
  MOD_RES (179)..(180): Any amino acid
  MOD_RES (182)..(186): Any amino acid
  MOD_RES (195)..(197): Any amino acid
  MOD_RES (199)..(209): Any amino acid
XXXXXXXXXCXXCXXXXXRSDNLVRHXXXHXXXXXXXCXXCXXXXXQLAHLRAHXXXHXXXXXXXCXXCXXXXXDPGHLVRHXXXHXXXXXXXCXXCXXXXXQSSNLVRHXXXHXXXXXXXCXXCXXXXXRKDNLKNHXXXHXXXXXXXCXXCXXXXXQAGHLASHXXXHXXXXXXXCXXCXXXXXTSGSLVRHXXXHXXXXXXXXXXX

SEQ ID NO: 316 - protein, 209 aa, Artificial Sequence
  source: /note="Description of Artificial Sequence: Synthetic polypeptide"
  MOD_RES (1)..(9): Any amino acid
  MOD_RES (11)..(12): Any amino acid
  MOD_RES (14)..(18): Any amino acid
  MOD_RES (27)..(29): Any amino acid
  MOD_RES (31)..(37): Any amino acid
  MOD_RES (39)..(40): Any amino acid
  MOD_RES (42)..(46): Any amino acid
  MOD_RES (55)..(57): Any amino acid
  MOD_RES (59)..(65): Any amino acid
  MOD_RES (67)..(68): Any amino acid
  MOD_RES (70)..(74): Any amino acid
  MOD_RES (83)..(85): Any amino acid
  MOD_RES (87)..(93): Any amino acid
  MOD_RES (95)..(96): Any amino acid
  MOD_RES (98)..(102): Any amino acid
  MOD_RES (111)..(113): Any amino acid
  MOD_RES (115)..(121): Any amino acid
  MOD_RES (123)..(124): Any amino acid
  MOD_RES (126)..(130): Any amino acid
  MOD_RES (139)..(141): Any amino acid
  MOD_RES (143)..(149): Any amino acid
  MOD_RES (151)..(152): Any amino acid
  MOD_RES (154)..(158): Any amino acid
  MOD_RES (167)..(169): Any amino acid
  MOD_RES (171)..(177): Any amino acid
  MOD_RES (179)..(180): Any amino acid
  MOD_RES (182)..(186): Any amino acid
  MOD_RES (195)..(197): Any amino acid
  MOD_RES (199)..(209): Any amino acid
XXXXXXXXXCXXCXXXXXQRAHLERHXXXHXXXXXXXCXXCXXXXXQLAHLRAHXXXHXXXXXXXCXXCXXXXXSKKHLAEHXXXHXXXXXXXCXXCXXXXXTTGALTEHXXXHXXXXXXXCXXCXXXXXTSGNLVRHXXXHXXXXXXXCXXCXXXXXQSGDLRRHXXXHXXXXXXXCXXCXXXXXTSHSLTEHXXXHXXXXXXXXXXX

SEQ ID NO: 317 - protein, 209 aa, Artificial Sequence
  source: /note="Description of Artificial Sequence: Synthetic polypeptide"
  MOD_RES (1)..(9): Any amino acid
  MOD_RES (11)..(12): Any amino acid
  MOD_RES (14)..(18): Any amino acid
  MOD_RES (27)..(29): Any amino acid
  MOD_RES (31)..(37): Any amino acid
  MOD_RES (39)..(40): Any amino acid
  MOD_RES (42)..(46): Any amino acid
  MOD_RES (55)..(57): Any amino acid
  MOD_RES (59)..(65): Any amino acid
  MOD_RES (67)..(68): Any amino acid
  MOD_RES (70)..(74): Any amino acid
  MOD_RES (83)..(85): Any amino acid
  MOD_RES (87)..(93): Any amino acid
  MOD_RES (95)..(96): Any amino acid
  MOD_RES (98)..(102): Any amino acid
  MOD_RES (111)..(113): Any amino acid
  MOD_RES (115)..(121): Any amino acid
  MOD_RES (123)..(124): Any amino acid
  MOD_RES (126)..(130): Any amino acid
  MOD_RES (139)..(141): Any amino acid
  MOD_RES (143)..(149): Any amino acid
  MOD_RES (151)..(152): Any amino acid
  MOD_RES (154)..(158): Any amino acid
  MOD_RES (167)..(169): Any amino acid
  MOD_RES (171)..(177): Any amino acid
  MOD_RES (179)..(180): Any amino acid
  MOD_RES (182)..(186): Any amino acid
  MOD_RES (195)..(197): Any amino acid
  MOD_RES (199)..(209): Any amino acid
XXXXXXXXXCXXCXXXXXTSGNLTEHXXXHXXXXXXXCXXCXXXXXDSGNLRVHXXXHXXXXXXXCXXCXXXXXHKNALQNHXXXHXXXXXXXCXXCXXXXXRNDTLTEHXXXHXXXXXXXCXXCXXXXXQRAHLERHXXXHXXXXXXXCXXCXXXXXRSDKLVRHXXXHXXXXXXXCXXCXXXXXDPGHLVRHXXXHXXXXXXXXXXX

SEQ ID NO: 318 - protein, 209 aa, Artificial Sequence
  source: /note="Description of Artificial Sequence: Synthetic polypeptide"
  MOD_RES (1)..(9): Any amino acid
  MOD_RES (11)..(12): Any amino acid
  MOD_RES (14)..(18): Any amino acid
  MOD_RES (27)..(29): Any amino acid
  MOD_RES (31)..(37): Any amino acid
  MOD_RES (39)..(40): Any amino acid
  MOD_RES (42)..(46): Any amino acid
  MOD_RES (55)..(57): Any amino acid
  MOD_RES (59)..(65): Any amino acid
  MOD_RES (67)..(68): Any amino acid
  MOD_RES (70)..(74): Any amino acid
  MOD_RES (83)..(85): Any amino acid
  MOD_RES (87)..(93): Any amino acid
  MOD_RES (95)..(96): Any amino acid
  MOD_RES (98)..(102): Any amino acid
  MOD_RES (111)..(113): Any amino acid
  MOD_RES (115)..(121): Any amino acid
  MOD_RES (123)..(124): Any amino acid
  MOD_RES (126)..(130): Any amino acid
  MOD_RES (139)..(141): Any amino acid
  MOD_RES (143)..(149): Any amino acid
  MOD_RES (151)..(152): Any amino acid
  MOD_RES (154)..(158): Any amino acid
  MOD_RES (167)..(169): Any amino acid
  MOD_RES (171)..(177): Any amino acid
  MOD_RES (179)..(180): Any amino acid
  MOD_RES (182)..(186): Any amino acid
  MOD_RES (195)..(197): Any amino acid
  MOD_RES (199)..(209): Any amino acid
XXXXXXXXXCXXCXXXXXTSHSLTEHXXXHXXXXXXXCXXCXXXXXQRANLRAHXXXHXXXXXXXCXXCXXXXXRADNLTEHXXXHXXXXXXXCXXCXXXXXERSHLREHXXXHXXXXXXXCXXCXXXXXDPGALVRHXXXHXXXXXXXCXXCXXXXXTSGHLVRHXXXHXXXXXXXCXXCXXXXXRNDTLTEHXXXHXXXXXXXXXXX

SEQ ID NO: 319 - protein, 209 aa, Artificial Sequence
  source: /note="Description of Artificial Sequence: Synthetic polypeptide"
  MOD_RES (1)..(9): Any amino acid
  MOD_RES (11)..(12): Any amino acid
  MOD_RES (14)..(18): Any amino acid
  MOD_RES (27)..(29): Any amino acid
  MOD_RES (31)..(37): Any amino acid
  MOD_RES (39)..(40): Any amino acid
  MOD_RES (42)..(46): Any amino acid
  MOD_RES (55)..(57): Any amino acid
  MOD_RES (59)..(65): Any amino acid
  MOD_RES (67)..(68): Any amino acid
  MOD_RES (70)..(74): Any amino acid
  MOD_RES (83)..(85): Any amino acid
  MOD_RES (87)..(93): Any amino acid
  MOD_RES (95)..(96): Any amino acid
  MOD_RES (98)..(102): Any amino acid
  MOD_RES (111)..(113): Any amino acid
  MOD_RES (115)..(121): Any amino acid
  MOD_RES (123)..(124): Any amino acid
  MOD_RES (126)..(130): Any amino acid
  MOD_RES (139)..(141): Any amino acid
  MOD_RES (143)..(149): Any amino acid
  MOD_RES (151)..(152): Any amino acid
  MOD_RES (154)..(158): Any amino acid
  MOD_RES (167)..(169): Any amino acid
  MOD_RES (171)..(177): Any amino acid
  MOD_RES (179)..(180): Any amino acid
  MOD_RES (182)..(186): Any amino acid
  MOD_RES (195)..(197): Any amino acid
  MOD_RES (199)..(209): Any amino acid
XXXXXXXXXCXXCXXXXXRSDHLTNHXXXHXXXXXXXCXXCXXXXXTSGSLVRHXXXHXXXXXXXCXXCXXXXXQAGHLASHXXXHXXXXXXXCXXCXXXXXRSDKLTEHXXXHXXXXXXXCXXCXXXXXTSGNLTEHXXXHXXXXXXXCXXCXXXXXQSSNLVRHXXXHXXXXXXXCXXCXXXXXTHLDLIRHXXXHXXXXXXXXXXX

SEQ ID NO: 320 - protein, 209 aa, Artificial Sequence
  source: /note="Description of Artificial Sequence: Synthetic polypeptide"
  MOD_RES (1)..(9): Any amino acid
  MOD_RES (11)..(12): Any amino acid
  MOD_RES (14)..(18): Any amino acid
  MOD_RES (27)..(29): Any amino acid
  MOD_RES (31)..(37): Any amino acid
  MOD_RES (39)..(40): Any amino acid
  MOD_RES (42)..(46): Any amino acid
  MOD_RES (55)..(57): Any amino acid
  MOD_RES (59)..(65): Any amino acid
  MOD_RES (67)..(68): Any amino acid
  MOD_RES (70)..(74): Any amino acid
  MOD_RES (83)..(85): Any amino acid
  MOD_RES (87)..(93): Any amino acid
  MOD_RES (95)..(96): Any amino acid
  MOD_RES (98)..(102): Any amino acid
  MOD_RES (111)..(113): Any amino acid
  MOD_RES (115)..(121): Any amino acid
  MOD_RES (123)..(124): Any amino acid
  MOD_RES (126)..(130): Any amino acid
  MOD_RES (139)..(141): Any amino acid
  MOD_RES (143)..(149): Any amino acid
  MOD_RES (151)..(152): Any amino acid
  MOD_RES (154)..(158): Any amino acid
  MOD_RES (167)..(169): Any amino acid
  MOD_RES (171)..(177): Any amino acid
  MOD_RES (179)..(180): Any amino acid
  MOD_RES (182)..(186): Any amino acid
  MOD_RES (195)..(197): Any amino acid
  MOD_RES (199)..(209): Any amino acid
XXXXXXXXXCXXCXXXXXRSDHLTTHXXXHXXXXXXXCXXCXXXXXTSGELVRHXXXHXXXXXXXCXXCXXXXXRRDELNVHXXXHXXXXXXXCXXCXXXXXSPADLTRHXXXHXXXXXXXCXXCXXXXXRSDELVRHXXXHXXXXXXXCXXCXXXXXRSDKLVRHXXXHXXXXXXXCXXCXXXXXTTGALTEHXXXHXXXXXXXXXXX

SEQ ID NO: 321 - protein, 220 aa, Artificial Sequence
  source: /note="Description of Artificial Sequence: Synthetic polypeptide"
  MOD_RES (1)..(9): Any amino acid
  MOD_RES (11)..(12): Any amino acid
  MOD_RES (14)..(18): Any amino acid
  MOD_RES (27)..(29): Any amino acid
  MOD_RES (31)..(37): Any amino acid
  MOD_RES (39)..(40): Any amino acid
  MOD_RES (42)..(46): Any amino acid
  MOD_RES (55)..(57): Any amino acid
  MOD_RES (59)..(65): Any amino acid
  MOD_RES (67)..(68): Any amino acid
  MOD_RES (70)..(74): Any amino acid
  MOD_RES (83)..(85): Any amino acid
  MOD_RES (87)..(93): Any amino acid
  MOD_RES (95)..(96): Any amino acid
  MOD_RES (98)..(102): Any amino acid
  MOD_RES (111)..(113): Any amino acid
  MOD_RES (115)..(121): Any amino acid
  MOD_RES (123)..(124): Any amino acid
  MOD_RES (126)..(130): Any amino acid
  MOD_RES (139)..(141): Any amino acid
  MOD_RES (143)..(149): Any amino acid
  MOD_RES (151)..(152): Any amino acid
  MOD_RES (154)..(158): Any amino acid
  MOD_RES (167)..(169): Any amino acid
  MOD_RES (171)..(188): Any amino acid
  MOD_RES (190)..(191): Any amino acid
  MOD_RES (193)..(197): Any amino acid
  MOD_RES (206)..(208): Any amino acid
  MOD_RES (210)..(220): Any amino acid
XXXXXXXXXCXXCXXXXXQSGNLTEHXXXHXXXXXXXCXXCXXXXXHKNALQNHXXXHXXXXXXXCXXCXXXXXQNSTLTEHXXXHXXXXXXXCXXCXXXXXSKKHLAEHXXXHXXXXXXXCXXCXXXXXTSGNLVRHXXXHXXXXXXXCXXCXXXXXQSGHLTEHXXXHXXXXXXXXXXXXXXXXXXCXXCXXXXXDKKDLTRHXXXHXXXXXXXXXXX

SEQ ID NO: 322 - protein, 209 aa, Artificial Sequence
  source: /note="Description of Artificial Sequence: Synthetic polypeptide"
  MOD_RES (1)..(9): Any amino acid
  MOD_RES (11)..(12): Any amino acid
  MOD_RES (14)..(18): Any amino acid
  MOD_RES (27)..(29): Any amino acid
  MOD_RES (31)..(37): Any amino acid
  MOD_RES (39)..(40): Any amino acid
  MOD_RES (42)..(46): Any amino acid
  MOD_RES (55)..(57): Any amino acid
  MOD_RES (59)..(65): Any amino acid
  MOD_RES (67)..(68): Any amino acid
  MOD_RES (70)..(74): Any amino acid
  MOD_RES (83)..(85): Any amino acid
  MOD_RES (87)..(93): Any amino acid
  MOD_RES (95)..(96): Any amino acid
  MOD_RES (98)..(102): Any amino acid
  MOD_RES (111)..(113): Any amino acid
  MOD_RES (115)..(121): Any amino acid
  MOD_RES (123)..(124): Any amino acid
  MOD_RES (126)..(130): Any amino acid
  MOD_RES (139)..(141): Any amino acid
  MOD_RES (143)..(149): Any amino acid
  MOD_RES (151)..(152): Any amino acid
  MOD_RES (154)..(158): Any amino acid
  MOD_RES (167)..(169): Any amino acid
  MOD_RES (171)..(177): Any amino acid
  MOD_RES (179)..(180): Any amino acid
  MOD_RES (182)..(186): Any amino acid
  MOD_RES (195)..(197): Any amino acid
  MOD_RES (199)..(209): Any amino acid
XXXXXXXXXCXXCXXXXXQNSTLTEHXXXHXXXXXXXCXXCXXXXXERSHLREHXXXHXXXXXXXCXXCXXXXXSKKHLAEHXXXHXXXXXXXCXXCXXXXXRNDTLTEHXXXHXXXXXXXCXXCXXXXXDCRDLARHXXXHXXXXXXXCXXCXXXXXQSGDLRRHXXXHXXXXXXXCXXCXXXXXTKNSLTEHXXXHXXXXXXXXXXX

SEQ ID NO: 323 - protein, 209 aa, Artificial Sequence
  source: /note="Description of Artificial Sequence: Synthetic polypeptide"
  MOD_RES (1)..(9): Any amino acid
  MOD_RES (11)..(12): Any amino acid
  MOD_RES (14)..(18): Any amino acid
  MOD_RES (27)..(29): Any amino acid
  MOD_RES (31)..(37): Any amino acid
  MOD_RES (39)..(40): Any amino acid
  MOD_RES (42)..(46): Any amino acid
  MOD_RES (55)..(57): Any amino acid
  MOD_RES (59)..(65): Any amino acid
  MOD_RES (67)..(68): Any amino acid
  MOD_RES (70)..(74): Any amino acid
  MOD_RES (83)..(85): Any amino acid
  MOD_RES (87)..(93): Any amino acid
  MOD_RES (95)..(96): Any amino acid
  MOD_RES (98)..(102): Any amino acid
  MOD_RES (111)..(113): Any amino acid
  MOD_RES (115)..(121): Any amino acid
  MOD_RES (123)..(124): Any amino acid
  MOD_RES (126)..(130): Any amino acid
  MOD_RES (139)..(141): Any amino acid
  MOD_RES (143)..(149): Any amino acid
  MOD_RES (151)..(152): Any amino acid
  MOD_RES (154)..(158): Any amino acid
  MOD_RES (167)..(169): Any amino acid
  MOD_RES (171)..(177): Any amino acid
  MOD_RES (179)..(180): Any amino acid
  MOD_RES (182)..(186): Any amino acid
  MOD_RES (195)..(197): Any amino acid
  MOD_RES (199)..(209): Any amino acid
XXXXXXXXXCXXCXXXXXERSHLREHXXXHXXXXXXXCXXCXXXXXRADNLTEHXXXHXXXXXXXCXXCXXXXXRSDKLTEHXXXHXXXXXXXCXXCXXXXXSKKHLAEHXXXHXXXXXXXCXXCXXXXXTKNSLTEHXXXHXXXXXXXCXXCXXXXXDKKDLTRHXXXHXXXXXXXCXXCXXXXXSKKHLAEHXXXHXXXXXXXXXXX

SEQ ID NO: 324 - protein, 209 aa, Artificial Sequence
  source: /note="Description of Artificial Sequence: Synthetic polypeptide"
  MOD_RES (1)..(9): Any amino acid
  MOD_RES (11)..(12): Any amino acid
  MOD_RES (14)..(18): Any amino acid
  MOD_RES (27)..(29): Any amino acid
  MOD_RES (31)..(37): Any amino acid
  MOD_RES (39)..(40): Any amino acid
  MOD_RES (42)..(46): Any amino acid
  MOD_RES (55)..(57): Any amino acid
  MOD_RES (59)..(65): Any amino acid
  MOD_RES (67)..(68): Any amino acid
  MOD_RES (70)..(74): Any amino acid
  MOD_RES (83)..(85): Any amino acid
  MOD_RES (87)..(93): Any amino acid
  MOD_RES (95)..(96): Any amino acid
  MOD_RES (98)..(102): Any amino acid
  MOD_RES (111)..(113): Any amino acid
  MOD_RES (115)..(121): Any amino acid
  MOD_RES (123)..(124): Any amino acid
  MOD_RES (126)..(130): Any amino acid
  MOD_RES (139)..(141): Any amino acid
  MOD_RES (143)..(149): Any amino acid
  MOD_RES (151)..(152): Any amino acid
  MOD_RES (154)..(158): Any amino acid
  MOD_RES (167)..(169): Any amino acid
  MOD_RES (171)..(177): Any amino acid
  MOD_RES (179)..(180): Any amino acid
  MOD_RES (182)..(186): Any amino acid
  MOD_RES (195)..(197): Any amino acid
  MOD_RES (199)..(209): Any amino acid
XXXXXXXXXCXXCXXXXXSKKHLAEHXXXHXXXXXXXCXXCXXXXXTHLDLIRHXXXHXXXXXXXCXXCXXXXXRKDNLKNHXXXHXXXXXXXCXXCXXXXXDCRDLARHXXXHXXXXXXXCXXCXXXXXREDNLHTHXXXHXXXXXXXCXXCXXXXXDPGHLVRHXXXHXXXXXXXCXXCXXXXXQLAHLRAHXXXHXXXXXXXXXXX

SEQ ID NO: 325 - protein, 209 aa, Artificial Sequence
  source: /note="Description of Artificial Sequence: Synthetic polypeptide"
  MOD_RES (1)..(9): Any amino acid
  MOD_RES (11)..(12): Any amino acid
  MOD_RES (14)..(18): Any amino acid
  MOD_RES (27)..(29): Any amino acid
  MOD_RES (31)..(37): Any amino acid
  MOD_RES (39)..(40): Any amino acid
  MOD_RES (42)..(46): Any amino acid
  MOD_RES (55)..(57): Any amino acid
  MOD_RES (59)..(65): Any amino acid
  MOD_RES (67)..(68): Any amino acid
  MOD_RES (70)..(74): Any amino acid
  MOD_RES (83)..(85): Any amino acid
  MOD_RES (87)..(93): Any amino acid
  MOD_RES (95)..(96): Any amino acid
  MOD_RES (98)..(102): Any amino acid
  MOD_RES (111)..(113): Any amino acid
  MOD_RES (115)..(121): Any amino acid
  MOD_RES (123)..(124): Any amino acid
  MOD_RES (126)..(130): Any amino acid
  MOD_RES (139)..(141): Any amino acid
  MOD_RES (143)..(149): Any amino acid
  MOD_RES (151)..(152): Any amino acid
  MOD_RES (154)..(158): Any amino acid
  MOD_RES (167)..(169): Any amino acid
  MOD_RES (171)..(177): Any amino acid
  MOD_RES (179)..(180): Any amino acid
  MOD_RES (182)..(186): Any amino acid
  MOD_RES (195)..(197): Any amino acid
  MOD_RES (199)..(209): Any amino acid
XXXXXXXXXCXXCXXXXXRSDKLVRHXXXHXXXXXXXCXXCXXXXXQSGDLRRHXXXHXXXXXXXCXXCXXXXXTSGELVRHXXXHXXXXXXXCXXCXXXXXRSDKLVRHXXXHXXXXXXXCXXCXXXXXDPGHLVRHXXXHXXXXXXXCXXCXXXXXRNDALTEHXXXHXXXXXXXCXXCXXXXXRSDHLTNHXXXHXXXXXXXXXXX

SEQ ID NO: 326 - protein, 209 aa, Artificial Sequence
  source: /note="Description of Artificial Sequence: Synthetic polypeptide"
  MOD_RES (1)..(9): Any amino acid
  MOD_RES (11)..(12): Any amino acid
  MOD_RES (14)..(18): Any amino acid
  MOD_RES (27)..(29): Any amino acid
  MOD_RES (31)..(37): Any amino acid
  MOD_RES (39)..(40): Any amino acid
  MOD_RES (42)..(46): Any amino acid
  MOD_RES (55)..(57): Any amino acid
  MOD_RES (59)..(65): Any amino acid
  MOD_RES (67)..(68): Any amino acid
  MOD_RES (70)..(74): Any amino acid
  MOD_RES (83)..(85): Any amino acid
  MOD_RES (87)..(93): Any amino acid
  MOD_RES (95)..(96): Any amino acid
  MOD_RES (98)..(102): Any amino acid
  MOD_RES (111)..(113): Any amino acid
  MOD_RES (115)..(121): Any amino acid
  MOD_RES (123)..(124): Any amino acid
  MOD_RES (126)..(130): Any amino acid
  MOD_RES (139)..(141): Any amino acid
  MOD_RES (143)..(149): Any amino acid
  MOD_RES (151)..(152): Any amino acid
  MOD_RES (154)..(158): Any amino acid
  MOD_RES (167)..(169): Any amino acid
  MOD_RES (171)..(177): Any amino acid
  MOD_RES (179)..(180): Any amino acid
  MOD_RES (182)..(186): Any amino acid
  MOD_RES (195)..(197): Any amino acid
  MOD_RES (199)..(209): Any amino acid
XXXXXXXXXCXXCXXXXXTSGHLVRHXXXHXXXXXXXCXXCXXXXXTTGNLTVHXXXHXXXXXXXCXXCXXXXXTSGSLVRHXXXHXXXXXXXCXXCXXXXXRSDKLVRHXXXHXXXXXXXCXXCXXXXXRSDELVRHXXXHXXXXXXXCXXCXXXXXRSDKLVRHXXXHXXXXXXXCXXCXXXXXQRAHLERHXXXHXXXXXXXXXXX

SEQ ID NO: 327 - protein, 209 aa, Artificial Sequence
  source: /note="Description of Artificial Sequence: Synthetic polypeptide"
  MOD_RES (1)..(9): Any amino acid
  MOD_RES (11)..(12): Any amino acid
  MOD_RES (14)..(18): Any amino acid
  MOD_RES (27)..(29): Any amino acid
  MOD_RES (31)..(37): Any amino acid
  MOD_RES (39)..(40): Any amino acid
  MOD_RES (42)..(46): Any amino acid
  MOD_RES (55)..(57): Any amino acid
  MOD_RES (59)..(65): Any amino acid
  MOD_RES (67)..(68): Any amino acid
  MOD_RES (70)..(74): Any amino acid
  MOD_RES (83)..(85): Any amino acid
  MOD_RES (87)..(93): Any amino acid
  MOD_RES (95)..(96): Any amino acid
  MOD_RES (98)..(102): Any amino acid
  MOD_RES (111)..(113): Any amino acid
  MOD_RES (115)..(121): Any amino acid
  MOD_RES (123)..(124): Any amino acid
  MOD_RES (126)..(130): Any amino acid
  MOD_RES (139)..(141): Any amino acid
  MOD_RES (143)..(149): Any amino acid
  MOD_RES (151)..(152): Any amino acid
  MOD_RES (154)..(158): Any amino acid
  MOD_RES (167)..(169): Any amino acid
  MOD_RES (171)..(177): Any amino acid
  MOD_RES (179)..(180): Any amino acid
  MOD_RES (182)..(186): Any amino acid
  MOD_RES (195)..(197): Any amino acid
  MOD_RES (199)..(209): Any amino acid
XXXXXXXXXCXXCXXXXXRNDTLTEHXXXHXXXXXXXCXXCXXXXXRNDALTEHXXXHXXXXXXXCXXCXXXXXTSGELVRHXXXHXXXXXXXCXXCXXXXXRSDNLVRHXXXHXXXXXXXCXXCXXXXXRSDELVRHXXXHXXXXXXXCXXCXXXXXRSDKLVRHXXXHXXXXXXXCXXCXXXXXQSSNLVRHXXXHXXXXXXXXXXX

SEQ ID NO: 328 - protein, 11 aa, Herpes simplex virus
DALDDFDLDML

SEQ ID NO: 329 - DNA, 20 bp, Artificial Sequence
  source: /note="Description of Artificial Sequence: Synthetic oligonucleotide"
atgcccccagctctccggct

SEQ ID NO: 330 - DNA, 20 bp, Artificial Sequence
  source: /note="Description of Artificial Sequence: Synthetic oligonucleotide"
cagcgtgaacgcgcccctcg

SEQ ID NO: 331 - DNA, 20 bp, Artificial Sequence
  source: /note="Description of Artificial Sequence: Synthetic oligonucleotide"
cttacggtaagtggggctgg

SEQ ID NO: 332 - DNA, 20 bp, Artificial Sequence
  source: /note="Description of Artificial Sequence: Synthetic oligonucleotide"
cccgtaagaaacacacgggg

SEQ ID NO: 333 - DNA, 20 bp, Artificial Sequence
  source: /note="Description of Artificial Sequence: Synthetic oligonucleotide"
attgaattaggggatctcgg

SEQ ID NO: 334 - DNA, 20 bp, Artificial Sequence
  source: /note="Description of Artificial Sequence: Synthetic oligonucleotide"
gacttggggtgacaatggct

SEQ ID NO: 335 - DNA, 20 bp, Artificial Sequence
  source: /note="Description of Artificial Sequence: Synthetic oligonucleotide"
agccggagagctgggggcat

SEQ ID NO: 336 - DNA, 20 bp, Artificial Sequence
  source: /note="Description of Artificial Sequence: Synthetic oligonucleotide"
cgaggggcgcgttcacgctg

SEQ ID NO: 337 - DNA, 20 bp, Artificial Sequence
  source: /note="Description of Artificial Sequence: Synthetic oligonucleotide"
ccagccccacttaccgtaag

SEQ ID NO: 338 - DNA, 20 bp, Artificial Sequence
  source: /note="Description of Artificial Sequence: Synthetic oligonucleotide"
ccccgtgtgtttcttacggg

SEQ ID NO: 339 - DNA, 20 bp, Artificial Sequence
  source: /note="Description of Artificial Sequence: Synthetic oligonucleotide"
ccgagatcccctaattcaat

SEQ ID NO: 340 - DNA, 20 bp, Artificial Sequence
  source: /note="Description of Artificial Sequence: Synthetic oligonucleotide"
agccattgtcaccccaagtc

SEQ ID NO: 341 - RNA, 47 nt, Artificial Sequence
  source: /note="Description of Artificial Sequence: Synthetic oligonucleotide"
aggaaauaagagagaaaagaagaguaagaagaaauauaagagccacc

SEQ ID NO: 342 - RNA, 57 nt, Artificial Sequence
  source: /note="Description of Artificial Sequence: Synthetic oligonucleotide"
cucucccuugcaccuguaccucuuggucuuugaauaaagccugaguaggaagucuag

SEQ ID NO: 343 - RNA, 78 nt, Artificial Sequence
  source: /note="Description of Artificial Sequence: Synthetic oligonucleotide"
aaaaaaaaaaaaaaaaaaaaaaaaaaaaaaaaaaaaaaaaaaaaaaaaaaaaaaaaaaaaaaaaaaaaaaaaaaaaaa

SEQ ID NO: 344 - DNA, 20 bp, Homo sapiens
ccctcacccccaccccctcc

SEQ ID NO: 345 - DNA, 20 bp, Homo sapiens
tccgggagggggtgggggtg

SEQ ID NO: 346 - DNA, 20 bp, Homo sapiens
ccgggagggggtgggggtga

SEQ ID NO: 347 - DNA, 20 bp, Homo sapiens
ggggtgggggtgagggaaac

SEQ ID NO: 348 - DNA, 20 bp, Homo sapiens
agggaaacaggagaatgtga

SEQ ID NO: 349 - DNA, 20 bp, Homo sapiens
gggaaacaggagaatgtgat

SEQ ID NO: 350 - DNA, 20 bp, Homo sapiens
tgtgatgggaaaatccgaga

SEQ ID NO: 351 - DNA, 20 bp, Homo sapiens
ggcccaggctggctccatct

SEQ ID NO: 352 - DNA, 20 bp, Homo sapiens
aatccgagatggagccagcc

SEQ ID NO: 353 - DNA, 20 bp, Homo sapiens
atccgagatggagccagcct

SEQ ID NO: 354 - DNA, 20 bp, Homo sapiens
ccagtgtttctggcccaggc

SEQ ID NO: 355 - DNA, 20 bp, Homo sapiens
gctcccagtgtttctggccc

SEQ ID NO: 356 - DNA, 20 bp, Homo sapiens
cccacagctcccagtgtttc

SEQ ID NO: 357 - DNA, 20 bp, Homo sapiens
ccagcctgggccagaaacac

SEQ ID NO: 358 - DNA, 20 bp, Homo sapiens
cagcctgggccagaaacact

SEQ ID NO: 359 - DNA, 20 bp, Homo sapiens
gccagaaacactgggagctg

SEQ ID NO: 360 - DNA, 20 bp, Homo sapiens
ccagaaacactgggagctgt

SEQ ID NO: 361 - DNA, 20 bp, Homo sapiens
acactgggagctgtgggaga

SEQ ID NO: 362 - DNA, 20 bp, Homo sapiens
gggagctgtgggagacggag

SEQ ID NO: 363 - DNA, 20 bp, Homo sapiens
ggagctgtgggagacggaga

SEQ ID NO: 364 - DNA, 20 bp, Homo sapiens
gagctgtgggagacggagag

SEQ ID NO: 365 - DNA, 20 bp, Homo sapiens
tgtgggagacggagaggggc

SEQ ID NO: 366 - DNA, 20 bp, Homo sapiens
gtgggagacggagaggggca

SEQ ID NO: 367 - DNA, 20 bp, Homo sapiens
ggagacggagaggggcaggg

SEQ ID NO: 368 - DNA, 20 bp, Homo sapiens
gagacggagaggggcagggt

SEQ ID NO: 369 - DNA, 20 bp, Homo sapiens
gaggggcagggtgggatcac

SEQ ID NO: 370 - DNA, 20 bp, Homo sapiens
aggggcagggtgggatcaca

SEQ ID NO: 371 - DNA, 20 bp, Homo sapiens
agggtgggatcacagggagc

SEQ ID NO: 372 - DNA, 20 bp, Homo sapiens
gggatcacagggagcaggag

SEQ ID NO: 373 - DNA, 20 bp, Homo sapiens
ggatcacagggagcaggagc

SEQ ID NO: 374 - DNA, 20 bp, Homo sapiens
gatcacagggagcaggagcg

SEQ ID NO: 375 - DNA, 20 bp, Homo sapiens
agggagcaggagcggggaat

SEQ ID NO: 376 - DNA, 20 bp, Homo sapiens
gagcaggagcggggaattgg

SEQ ID NO: 377 - DNA, 20 bp, Homo sapiens
cggggaattggaggtgaatc

SEQ ID NO: 378 - DNA, 20 bp, Homo sapiens
aatggactggaagtttggga

SEQ ID NO: 379 - DNA, 20 bp, Homo sapiens
gaatggactggaagtttggg

SEQ ID NO: 380 - DNA, 20 bp, Homo sapiens
gcagaatggactggaagttt

SEQ ID NO: 381 - DNA, 20 bp, Homo sapiens
agcagaatggactggaagtt

SEQ ID NO: 382 - DNA, 20 bp, Homo sapiens
cccctgggagcagaatggac

SEQ ID NO: 383 - DNA, 20 bp, Homo sapiens
cggttcccctgggagcagaa

SEQ ID NO: 384 - DNA, 20 bp, Homo sapiens
ttccagtccattctgctccc

SEQ ID NO: 385 - DNA, 20 bp, Homo sapiens
tccagtccattctgctccca

SEQ ID NO: 386 - DNA, 20 bp, Homo sapiens
ccagtccattctgctcccag

SEQ ID NO: 387 - DNA, 20 bp, Homo sapiens
cgcagtttcccggttcccct

SEQ ID NO: 388 - DNA, 20 bp, Homo sapiens
ccgcagtttcccggttcccc

SEQ ID NO: 389 - DNA, 20 bp, Homo sapiens
cattctgctcccaggggaac

SEQ ID NO: 390 - DNA, 20 bp, Homo sapiens
attctgctcccaggggaacc

SEQ ID NO: 391 - DNA, 20 bp, Homo sapiens
ccagttcccccgcagtttcc

SEQ ID NO: 392 - DNA, 20 bp, Homo sapiens
ccaggggaaccgggaaactg

SEQ ID NO: 393 - DNA, 20 bp, Homo sapiens
caggggaaccgggaaactgc

SEQ ID NO: 394 - DNA, 20 bp, Homo sapiens
aggggaaccgggaaactgcg

SEQ ID NO: 395 - DNA, 20 bp, Homo sapiens
ggggaaccgggaaactgcgg

SEQ ID NO: 396 - DNA, 20 bp, Homo sapiens
ccgggaaactgcgggggaac

SEQ ID NO: 397 - DNA, 20 bp, Homo sapiens
gaaactgcgggggaactgga

SEQ ID NO: 398 - DNA, 20 bp, Homo sapiens
aaactgcgggggaactggaa

SEQ ID NO: 399 - DNA, 20 bp, Homo sapiens
ggaagggagctcccagaaca

SEQ ID NO: 400 - DNA, 20 bp, Homo sapiens
atcttctggatccttgttct

SEQ ID NO: 401 - DNA, 20 bp, Homo sapiens
aatcttctggatccttgttc

SEQ ID NO: 402 - DNA, 20 bp, Homo sapiens
agaacaaggatccagaagat

SEQ ID NO: 403 - DNA, 20 bp, Homo sapiens
ggccccagatgccaatcttc

SEQ ID NO: 404 - DNA, 20 bp, Homo sapiens
ggatccagaagattggcatc

SEQ ID NO: 405 - DNA, 20 bp, Homo sapiens
gatccagaagattggcatct

SEQ ID NO: 406 - DNA, 20 bp, Homo sapiens
atccagaagattggcatctg

SEQ ID NO: 407 - DNA, 20 bp, Homo sapiens
gaagattggcatctggggcc

SEQ ID NO: 408 - DNA, 20 bp, Homo sapiens
aagattggcatctggggcct

SEQ ID NO: 409 - DNA, 20 bp, Homo sapiens
gatttagaaacctaaatccc

SEQ ID NO: 410 - DNA, 20 bp, Homo sapiens
gcatctggggcctgggattt

SEQ ID NO: 411 - DNA, 20 bp, Homo sapiens
ggatttaggtttctaaatcg

SEQ ID NO: 412 - DNA, 20 bp, Homo sapiens
gatttaggtttctaaatcgt

SEQ ID NO: 413 - DNA, 20 bp, Homo sapiens
ggtttctaaatcgtgggcca

SEQ ID NO: 414 - DNA, 20 bp, Homo sapiens
gtttctaaatcgtgggccat

SEQ ID NO: 415 - DNA, 20 bp, Homo sapiens
tttctaaatcgtgggccatg

SEQ ID NO: 416 - DNA, 20 bp, Homo sapiens
gcagagataaggctgcccca

SEQ ID NO: 417 - DNA, 20 bp, Homo sapiens
tcaatgcttttgcagagata

SEQ ID NO: 418 - DNA, 20 bp, Homo sapiens
ttatctctgcaaaagcattg

SEQ ID NO: 419 - DNA, 20 bp, Homo sapiens
tatctctgcaaaagcattga

SEQ ID NO: 420 - DNA, 20 bp, Homo sapiens
gagggtagaagtcaatgatt

SEQ ID NO: 421 - DNA, 20 bp, Homo sapiens
agggtagaagtcaatgattt

SEQ ID NO: 422 - DNA, 20 bp, Homo sapiens
atttgggaagttattgaatt

SEQ ID NO: 423 - DNA, 20 bp, Homo sapiens
tttgggaagttattgaatta

SEQ ID NO: 424 - DNA, 20 bp, Homo sapiens
ttgggaagttattgaattag

SEQ ID NO: 425 - DNA, 20 bp, Homo sapiens
gttattgaattaggggatct

SEQ ID NO: 426 - DNA, 20 bp, Homo sapiens
aattaggggatctcggaggt

SEQ ID NO: 427 - DNA, 20 bp, Homo sapiens
gcattctaactgatactatc

SEQ ID NO: 428 - DNA, 20 bp, Homo sapiens
atcagttagaatgcctgact

SEQ ID NO: 429 - DNA, 20 bp, Homo sapiens
tcagttagaatgcctgactt

SEQ ID NO: 430 - DNA, 20 bp, Homo sapiens
cagttagaatgcctgacttg

SEQ ID NO: 431 - DNA, 20 bp, Homo sapiens
tgcctgacttggggtgacaa

SEQ ID NO: 432 - DNA, 20 bp, Homo sapiens
ttggggtgacaatggcttgg

SEQ ID NO: 433 - DNA, 20 bp, Homo sapiens
tggggtgacaatggcttgga

SEQ ID NO: 434 - DNA, 20 bp, Homo sapiens
ggggtgacaatggcttggag

SEQ ID NO: 435 - DNA, 20 bp, Homo sapiens
gtgacaatggcttggagggg

SEQ ID NO: 436 - DNA, 20 bp, Homo sapiens
tgacaatggcttggaggggt

SEQ ID NO: 437 - DNA, 20 bp, Homo sapiens
ttggaggggtgggtgagtca

SEQ ID NO: 438 - DNA, 20 bp, Homo sapiens
tggaggggtgggtgagtcaa

SEQ ID NO: 439 - DNA, 20 bp, Homo sapiens
aggcaggcatcatgactcac

SEQ ID NO: 440 - DNA, 20 bp, Homo sapiens
aaggcaggcatcatgactca

SEQ ID NO: 441 - DNA, 20 bp, Homo sapiens
agttatcaattgtacaaggc

SEQ ID NO: 442 - DNA, 20 bp, Homo sapiens
gttcagttatcaattgtaca

SEQ ID NO: 443 - DNA, 20 bp, Homo sapiens
tacaattgataactgaacat

SEQ ID NO: 444 - DNA, 20 bp, Homo sapiens
taactgaacatcggtgagtt

SEQ ID NO: 445 - DNA, 20 bp, Homo sapiens
ggtgctaattacaactgctg

SEQ ID NO: 446 - DNA, 20 bp, Homo sapiens
gggtgctaattacaactgct

SEQ ID NO: 447 - DNA, 20 bp, Homo sapiens
ggggtgctaattacaactgc

SEQ ID NO: 448 - DNA, 20 bp, Homo sapiens
agcagttgtaattagcaccc

SEQ ID NO: 449 - DNA, 20 bp, Homo sapiens
gcagttgtaattagcacccc

SEQ ID NO: 450 - DNA, 20 bp, Homo sapiens
ttggtttctggctgacaccc

SEQ ID NO: 451 - DNA, 20 bp, Homo sapiens
gttggtttctggctgacacc

SEQ ID NO: 452 - DNA, 20 bp, Homo sapiens
tttggctgtttgttggtttc

SEQ ID NO: 453 - DNA, 20 bp, Homo sapiens
gcagggatttggctgtttgt

SEQ ID NO: 454 - DNA, 20 bp, Homo sapiens
tgggcggggctgcagggatt

SEQ ID NO: 455 - DNA, 20 bp, Homo sapiens
ataggctgggcggggctgca

SEQ ID NO: 456 - DNA, 20 bp, Homo sapiens
gataggctgggcggggctgc

SEQ ID NO: 457 - DNA, 20 bp, Homo sapiens
gccggtggataggctgggcg

SEQ ID NO: 458 - DNA, 20 bp, Homo sapiens
cgccggtggataggctgggc

SEQ ID NO: 459 - DNA, 20 bp, Homo sapiens
ccgccggtggataggctggg

SEQ ID NO: 460 - DNA, 20 bp, Homo sapiens
cccccgccggtggataggct

SEQ ID NO: 461 - DNA, 20 bp, Homo sapiens
tcccccgccggtggataggc

SEQ ID NO: 462 - DNA, 20 bp, Homo sapiens
gccccgcccagcctatccac

SEQ ID NO: 463 - DNA, 20 bp, Homo sapiens
tcggtcccccgccggtggat

SEQ ID NO: 464 - DNA, 20 bp, Homo sapiens
ccgcccagcctatccaccgg

SEQ ID NO: 465 - DNA, 20 bp, Homo sapiens
cgcccagcctatccaccggc

SEQ ID NO: 466 - DNA, 20 bp, Homo sapiens
gcccagcctatccaccggcg

SEQ ID NO: 467 - DNA, 20 bp, Homo sapiens
gttaatcggtcccccgccgg

SEQ ID NO: 468 - DNA, 20 bp, Homo sapiens
cccagcctatccaccggcgg

SEQ ID NO: 469 - DNA, 20 bp, Homo sapiens
ggtgggggttaatggttaat

SEQ ID NO: 470 - DNA, 20 bp, Homo sapiens
cggggaggggtgggggttaa

SEQ ID NO: 471 - DNA, 20 bp, Homo sapiens
gctctgccggggaggggtgg

SEQ ID NO: 472 - DNA, 20 bp, Homo sapiens
ggctctgccggggaggggtg

SEQ ID NO: 473 - DNA, 20 bp, Homo sapiens
aggctctgccggggaggggt

SEQ ID NO: 474 - DNA, 20 bp, Homo sapiens
gaggctctgccggggagggg

SEQ ID NO: 475 - DNA, 20 bp, Homo sapiens
cattaacccccacccctccc

SEQ ID NO: 476 - DNA, 20 bp, Homo sapiens
gtggaggctctgccggggag

SEQ ID NO: 477 - DNA, 20 bp, Homo sapiens
ggtggaggctctgccgggga

SEQ ID NO: 478 - DNA, 20 bp, Homo sapiens
gggtggaggctctgccgggg

SEQ ID NO: 479 - DNA, 20 bp, Homo sapiens
aaggggtggaggctctgccg

SEQ ID NO: 480 - DNA, 20 bp, Homo sapiens
gaaggggtggaggctctgcc

SEQ ID NO: 481 - DNA, 20 bp, Homo sapiens
tgaaggggtggaggctctgc

SEQ ID NO: 482 - DNA, 20 bp, Homo sapiens
tagcctctgtgaaggggtgg

SEQ ID NO: 483 - DNA, 20 bp, Homo sapiens
gcctagcctctgtgaagggg

SEQ ID NO: 484 - DNA, 20 bp, Homo sapiens
ttggcctagcctctgtgaag

SEQ ID NO: 485 - DNA, 20 bp, Homo sapiens
cttggcctagcctctgtgaa

SEQ ID NO: 486 - DNA, 20 bp, Homo sapiens
gagcctccaccccttcacag

SEQ ID NO: 487 - DNA, 20 bp, Homo sapiens
tcttggcctagcctctgtga

SEQ ID NO: 488 - DNA, 20 bp, Homo sapiens
tccaccccttcacagaggct

SEQ ID NO: 489 - DNA, 20 bp, Homo sapiens
ggaagatctgctgggagtct

SEQ ID NO: 490 - DNA, 20 bp, Homo sapiens
cgtcctctgggaagatctgc

SEQ ID NO: 491 - DNA, 20 bp, Homo sapiens
ctcccagcagatcttcccag

SEQ ID NO: 492 - DNA, 20 bp, Homo sapiens
cagcagatcttcccagagga

SEQ ID NO: 493 - DNA, 20 bp, Homo sapiens
ttcctttcaaaccgtcctct

SEQ ID NO: 494 - DNA, 20 bp, Homo sapiens
cttcctttcaaaccgtcctc

SEQ ID NO: 495 - DNA, 20 bp, Homo sapiens
ttcccagaggacggtttgaa

SEQ ID NO: 496 - DNA, 20 bp, Homo sapiens
cagaggacggtttgaaagga

SEQ ID NO: 497 - DNA, 20 bp, Homo sapiens
gtttgaaaggaaggcagaga

SEQ ID NO: 498 - DNA, 20 bp, Homo sapiens
aaggaaggcagagagggcac

SEQ ID NO: 499 - DNA, 20 bp, Homo sapiens
aggaaggcagagagggcact

SEQ ID NO: 500 - DNA, 20 bp, Homo sapiens
aaggcagagagggcactggg

SEQ ID NO: 501 - DNA, 20 bp, Homo sapiens
gcagagagggcactgggagg

SEQ ID NO: 502 - DNA, 20 bp, Homo sapiens
agggcactgggaggaggcag

SEQ ID NO: 503 - DNA, 20 bp, Homo sapiens
gggcactgggaggaggcagt

SEQ ID NO: 504 - DNA, 20 bp, Homo sapiens
cactgggaggaggcagtggg

SEQ ID NO: 505 - DNA, 20 bp, Homo sapiens
actgggaggaggcagtggga

SEQ ID NO: 506 - DNA, 20 bp, Homo sapiens
gggaggaggcagtgggaggg

SEQ ID NO: 507 - DNA, 20 bp, Homo sapiens
aggaggcagtgggagggcgg

SEQ ID NO: 508 - DNA, 20 bp, Homo sapiens
ggaggcagtgggagggcgga

SEQ ID NO: 509 - DNA, 20 bp, Homo sapiens
ggcagtgggagggcggaggg

SEQ ID NO: 510 - DNA, 20 bp, Homo sapiens
gcagtgggagggcggagggc

SEQ ID NO: 511 - DNA, 20 bp, Homo sapiens
cagtgggagggcggagggcg

SEQ ID NO: 512 - DNA, 20 bp, Homo sapiens
agtgggagggcggagggcgg

SEQ ID NO: 513 - DNA, 20 bp, Homo sapiens
gggcggagggcgggggcctt

SEQ ID NO: 514 - DNA, 20 bp, Homo sapiens
ggcggagggcgggggccttc

SEQ ID NO: 515 - DNA, 20 bp, Homo sapiens
gcggagggcgggggccttcg

SEQ ID NO: 516 - DNA, 20 bp, Homo sapiens
gagggcgggggccttcgggg

SEQ ID NO: 517 - DNA, 20 bp, Homo sapiens
agggcgggggccttcggggt

SEQ ID NO: 518 - DNA, 20 bp, Homo sapiens
ggccttcggggtgggcgccc

SEQ ID NO: 519 - DNA, 20 bp, Homo sapiens
gccttcggggtgggcgccca

SEQ ID NO: 520 - DNA, 20 bp, Homo sapiens
cggggtgggcgcccagggta

SEQ ID NO: 521 - DNA, 20 bp, Homo sapiens
gcggccacctgccctaccct

SEQ ID NO: 522 - DNA, 20 bp, Homo sapiens
cgcggccacctgccctaccc

SEQ ID NO: 523 - DNA, 20 bp, Homo sapiens
gtgggcgcccagggtagggc

SEQ ID NO: 524 - DNA, 20 bp, Homo sapiens
ggcgcccagggtagggcagg

SEQ ID NO: 525 - DNA, 20 bp, Homo sapiens
cagggtagggcaggtggccg

SEQ ID NO: 526 - DNA, 20 bp, Homo sapiens
tagggcaggtggccgcggcg

SEQ ID NO: 527 - DNA, 20 bp, Homo sapiens
ggcaggtggccgcggcgtgg

SEQ ID NO: 528 - DNA, 20 bp, Homo sapiens
ggtggccgcggcgtggaggc

SEQ ID NO: 529 - DNA, 20 bp, Homo sapiens
gtggccgcggcgtggaggca

SEQ ID NO: 530 - DNA, 20 bp, Homo sapiens
gtccatgtcgacgagggttt

SEQ ID NO: 531 - DNA, 20 bp, Homo sapiens
ggccatgtccatgtcgacga

SEQ ID NO: 532 - DNA, 20 bp, Homo sapiens
cggccatgtccatgtcgacg

SEQ ID NO: 533 - DNA, 20 bp, Homo sapiens
ctccaaaaccctcgtcgaca

SEQ ID NO: 534 - DNA, 20 bp, Homo sapiens
aaccctcgtcgacatggaca

SEQ ID NO: 535 - DNA, 20 bp, Homo sapiens
gtccagtgcagcactgtagt

SEQ ID NO: 536 - DNA, 20 bp, Homo sapiens
ggccgactacagtgctgcac

SEQ ID NO: 537 - DNA, 20 bp, Homo sapiens
attccagggtggtgtaggct

SEQ ID NO: 538 - DNA, 20 bp, Homo sapiens
aattccagggtggtgtaggc

SEQ ID NO: 539 - DNA, 20 bp, Homo sapiens
ctcaaattccagggtggtgt

SEQ ID NO: 540 - DNA, 20 bp, Homo sapiens
ggacccagcctacaccaccc

SEQ ID NO: 541 - DNA, 20 bp, Homo sapiens
cacattctcaaattccaggg

SEQ ID NO: 542 - DNA, 20 bp, Homo sapiens
ctgcacattctcaaattcca

SEQ ID NO: 543 - DNA, 20 bp, Homo sapiens
cctgcacattctcaaattcc

SEQ ID NO: 544 - DNA, 20 bp, Homo sapiens
cctggaatttgagaatgtgc

SEQ ID NO: 545 - DNA, 20 bp, Homo sapiens
gaatgtgcaggtgttgacga

SEQ ID NO: 546 - DNA, 20 bp, Homo sapiens
aatgtgcaggtgttgacgat

SEQ ID NO: 547 - DNA, 20 bp, Homo sapiens
caggtgttgacgatgggcaa

SEQ ID NO: 548 - DNA, 20 bp, Homo sapiens
tgttgacgatgggcaatggt

SEQ ID NO: 549 - DNA, 20 bp, Homo sapiens
tgacgatgggcaatggtagg

SEQ ID NO: 550 - DNA, 20 bp, Homo sapiens
gacgatgggcaatggtaggt

SEQ ID NO: 551 - DNA, 20 bp, Homo sapiens
acgatgggcaatggtaggtg

SEQ ID NO: 552 - DNA, 20 bp, Homo sapiens
cgatgggcaatggtaggtgg

SEQ ID NO: 553 - DNA, 20 bp, Homo sapiens
aggtgggggcagatgtgccc

SEQ ID NO: 554 - DNA, 20 bp, Homo sapiens
ctgcccccactggcacacct

SEQ ID NO: 555 - DNA, 20 bp, Homo sapiens
cctgcccccactggcacacc

SEQ ID NO: 556 - DNA, 20 bp, Homo sapiens
gatgtgcccaggtgtgccag

SEQ ID NO: 557 - DNA, 20 bp, Homo sapiens
atgtgcccaggtgtgccagt

SEQ ID NO: 558 - DNA, 20 bp, Homo sapiens
tgtgcccaggtgtgccagtg

SEQ ID NO: 559 - DNA, 20 bp, Homo sapiens
gtgcccaggtgtgccagtgg

SEQ ID NO: 560 - DNA, 20 bp, Homo sapiens
ccaggcacacctgcccccac

SEQ ID NO: 561 - DNA, 20 bp, Homo sapiens
ccaggtgtgccagtgggggc

SEQ ID NO: 562 - DNA, 20 bp, Homo sapiens
ccagtgggggcaggtgtgcc

SEQ ID NO: 563 - DNA, 20 bp, Homo sapiens
cagtgggggcaggtgtgcct

SEQ ID NO: 564 - DNA, 20 bp, Homo sapiens
gggcaggtgtgcctgggtcc

SEQ ID NO: 565 - DNA, 20 bp, Homo sapiens
aaagatctgctcctggaccc

SEQ ID NO: 566 - DNA, 20 bp, Homo sapiens
gagtgccaaagatctgctcc

SEQ ID NO: 567 - DNA, 20 bp, Homo sapiens
tgggtccaggagcagatctt

SEQ ID NO: 568 - DNA, 20 bp, Homo sapiens
agatctttggcactcaactt

SEQ ID NO: 569 - DNA, 20 bp, Homo sapiens
gatctttggcactcaacttt

SEQ ID NO: 570 - DNA, 20 bp, Homo sapiens
atctttggcactcaactttg

SEQ ID NO: 571 - DNA, 20 bp, Homo sapiens
tttggcactcaactttgggg

SEQ ID NO: 572 - DNA, 20 bp, Homo sapiens
ttggcactcaactttggggt

SEQ ID NO: 573 - DNA, 20 bp, Homo sapiens
gcactcaactttggggtggg

SEQ ID NO: 574 - DNA, 20 bp, Homo sapiens
gggaggagaatgatacaaaa

SEQ ID NO: 575 - DNA, 20 bp, Homo sapiens
ggagaatgatacaaaatggt

SEQ ID NO: 576 - DNA, 20 bp, Homo sapiens
aatgatacaaaatggtaggt

SEQ ID NO: 577 - DNA, 20 bp, Homo sapiens
aaatggtaggttggtcctac

SEQ ID NO: 578 - DNA, 20 bp, Homo sapiens
caacacctgtgctggcctgt

SEQ ID NO: 579 - DNA, 20 bp, Homo sapiens
ttggtcctacaggccagcac

SEQ ID NO: 580 - DNA, 20 bp, Homo sapiens
tcacttggcaacacctgtgc

SEQ ID NO: 581 - DNA, 20 bp, Homo sapiens
ctgggcacatgggcttcact

SEQ ID NO: 582 - DNA, 20 bp, Homo sapiens
atcactgtgcctgggcacat

SEQ ID NO: 583 - DNA, 20 bp, Homo sapiens
gatcactgtgcctgggcaca

SEQ ID NO: 584 - DNA, 20 bp, Homo sapiens
caagtgaagcccatgtgccc

SEQ ID NO: 585 - DNA, 20 bp, Homo sapiens
tgcctgtgatcactgtgcct

SEQ ID NO: 586 - DNA, 20 bp, Homo sapiens
atgcctgtgatcactgtgcc

SEQ ID NO: 587 - DNA, 20 bp, Homo sapiens
tgcccaggcacagtgatcac

SEQ ID NO: 588 - DNA, 20 bp, Homo sapiens
cacagtgatcacaggcattc

SEQ ID NO: 589 - DNA, 20 bp, Homo sapiens
acagtgatcacaggcattct

SEQ ID NO: 590 - DNA, 20 bp, Homo sapiens
atcacaggcattctgggtga

SEQ ID NO: 591 - DNA, 20 bp, Homo sapiens
tcacaggcattctgggtgaa

SEQ ID NO: 592 - DNA, 20 bp, Homo sapiens
caggcattctgggtgaaggg

SEQ ID NO: 593 - DNA, 20 bp, Homo sapiens
tgggtgaagggaggcctgca

SEQ ID NO: 594 - DNA, 20 bp, Homo sapiens
gggtgaagggaggcctgcaa

SEQ ID NO: 595 - DNA, 20 bp, Homo sapiens
tgctggaaattggcccttgc

SEQ ID NO: 596 - DNA, 100 bp, Artificial Sequence
  source: /note="Description of Artificial Sequence: Synthetic polynucleotide"
ccctcacccccaccccctccgttttagagctagaaatagcaagttaaaataaggctagtccgttatcaacttgaaaaagtggcaccgagtcggtgctttt

SEQ ID NO: 597 - DNA, 100 bp, Artificial Sequence
  source: /note="Description of Artificial Sequence: Synthetic polynucleotide"
tccgggagggggtgggggtggttttagagctagaaatagcaagttaaaataaggctagtccgttatcaacttgaaaaagtggcaccgagtcggtgctttt

SEQ ID NO: 598 - DNA, 100 bp, Artificial Sequence
  source: /note="Description of Artificial Sequence: Synthetic polynucleotide"
ccgggagggggtgggggtgagttttagagctagaaatagcaagttaaaataaggctagtccgttatcaacttgaaaaagtggcaccgagtcggtgctttt

SEQ ID NO: 599 - DNA, 100 bp, Artificial Sequence
  source: /note="Description of Artificial Sequence: Synthetic polynucleotide"
ggggtgggggtgagggaaacgttttagagctagaaatagcaagttaaaataaggctagtccgttatcaacttgaaaaagtggcaccgagtcggtgctttt

SEQ ID NO: 600 - DNA, 100 bp, Artificial Sequence
  source: /note="Description of Artificial Sequence: Synthetic polynucleotide"
agggaaacaggagaatgtgagttttagagctagaaatagcaagttaaaataaggctagtccgttatcaacttgaaaaagtggcaccgagtcggtgctttt

SEQ ID NO: 601 - DNA, 100 bp, Artificial Sequence
  source: /note="Description of Artificial Sequence: Synthetic polynucleotide"
gggaaacaggagaatgtgatgttttagagctagaaatagcaagttaaaataaggctagtccgttatcaacttgaaaaagtggcaccgagtcggtgctttt

SEQ ID NO: 602 - DNA, 100 bp, Artificial Sequence
  source: /note="Description of Artificial Sequence: Synthetic polynucleotide"
tgtgatgggaaaatccgagagttttagagctagaaatagcaagttaaaataaggctagtccgttatcaacttgaaaaagtggcaccgagtcggtgctttt

SEQ ID NO: 603 - DNA, 100 bp, Artificial Sequence
  source: /note="Description of Artificial Sequence: Synthetic polynucleotide"
ggcccaggctggctccatctgttttagagctagaaatagcaagttaaaataaggctagtccgttatcaacttgaaaaagtggcaccgagtcggtgctttt

SEQ ID NO: 604 - DNA, 100 bp, Artificial Sequence
  source: /note="Description of Artificial Sequence: Synthetic polynucleotide"
aatccgagatggagccagccgttttagagctagaaatagcaagttaaaataaggctagtccgttatcaacttgaaaaagtggcaccgagtcggtgctttt

SEQ ID NO: 605 - DNA, 100 bp, Artificial Sequence
  source: /note="Description of Artificial Sequence: Synthetic polynucleotide"
atccgagatggagccagcctgttttagagctagaaatagcaagttaaaataaggctagtccgttatcaacttgaaaaagtggcaccgagtcggtgctttt

SEQ ID NO: 606 - DNA, 100 bp, Artificial Sequence
  source: /note="Description of Artificial Sequence: Synthetic polynucleotide"
ccagtgtttctggcccaggcgttttagagctagaaatagcaagttaaaataaggctagtccgttatcaacttgaaaaagtggcaccgagtcggtgctttt

SEQ ID NO: 607 - DNA, 100 bp, Artificial Sequence
  source: /note="Description of Artificial Sequence: Synthetic polynucleotide"
gctcccagtgtttctggcccgttttagagctagaaatagcaagttaaaataaggctagtccgttatcaacttgaaaaagtggcaccgagtcggtgctttt

SEQ ID NO: 608 - DNA, 100 bp, Artificial Sequence
  source: /note="Description of Artificial Sequence: Synthetic polynucleotide"
cccacagctcccagtgtttcgttttagagctagaaatagcaagttaaaataaggctagtccgttatcaacttgaaaaagtggcaccgagtcggtgctttt

SEQ ID NO: 609 - DNA, 100 bp, Artificial Sequence
  source: /note="Description of Artificial Sequence: Synthetic polynucleotide"
ccagcctgggccagaaacacgttttagagctagaaatagcaagttaaaataaggctagtccgttatcaacttgaaaaagtggcaccgagtcggtgctttt

SEQ ID NO: 610 - DNA, 100 bp, Artificial Sequence
  source: /note="Description of Artificial Sequence: Synthetic polynucleotide"
cagcctgggccagaaacactgttttagagctagaaatagcaagttaaaataaggctagtccgttatcaacttgaaaaagtggcaccgagtcggtgctttt

SEQ ID NO: 611 - DNA, 100 bp, Artificial Sequence
  source: /note="Description of Artificial Sequence: Synthetic polynucleotide"
gccagaaacactgggagctggttttagagctagaaatagcaagttaaaataaggctagtccgttatcaacttgaaaaagtggcaccgagtcggtgctttt

SEQ ID NO: 612 - DNA, 100 bp, Artificial Sequence
  source: /note="Description of Artificial Sequence: Synthetic polynucleotide"
ccagaaacactgggagctgtgttttagagctagaaatagcaagttaaaataaggctagtccgttatcaacttgaaaaagtggcaccgagtcggtgctttt

SEQ ID NO: 613 - DNA, 100 bp, Artificial Sequence
  source: /note="Description of Artificial Sequence: Synthetic polynucleotide"
acactgggagctgtgggagagttttagagctagaaatagcaagttaaaataaggctagtccgttatcaacttgaaaaagtggcaccgagtcggtgctttt

SEQ ID NO: 614 - DNA, 100 bp, Artificial Sequence
  source: /note="Description of Artificial Sequence: Synthetic polynucleotide"
gggagctgtgggagacggaggttttagagctagaaatagcaagttaaaataaggctagtccgttatcaacttgaaaaagtggcaccgagtcggtgctttt

SEQ ID NO: 615 - DNA, 100 bp, Artificial Sequence
  source: /note="Description of Artificial Sequence: Synthetic polynucleotide"
ggagctgtgggagacggagagttttagagctagaaatagcaagttaaaataaggctagtccgttatcaacttgaaaaagtggcaccgagtcggtgctttt

SEQ ID NO: 616 - DNA, 100 bp, Artificial Sequence
  source: /note="Description of Artificial Sequence: Synthetic polynucleotide"
gagctgtgggagacggagaggttttagagctagaaatagcaagttaaaataaggctagtccgttatcaacttgaaaaagtggcaccgagtcggtgctttt

SEQ ID NO: 617 - DNA, 100 bp, Artificial Sequence
  source: /note="Description of Artificial Sequence: Synthetic polynucleotide"
tgtgggagacggagaggggcgttttagagctagaaatagcaagttaaaataaggctagtccgttatcaacttgaaaaagtggcaccgagtcggtgctttt

SEQ ID NO: 618 - DNA, 100 bp, Artificial Sequence
  source: /note="Description of Artificial Sequence: Synthetic polynucleotide"
gtgggagacggagaggggcagttttagagctagaaatagcaagttaaaataaggctagtccgttatcaacttgaaaaagtggcaccgagtcggtgctttt

SEQ ID NO: 619 - DNA, 100 bp, Artificial Sequence
  source: /note="Description of Artificial Sequence: Synthetic polynucleotide"
ggagacggagaggggcaggggttttagagctagaaatagcaagttaaaataaggctagtccgttatcaacttgaaaaagtggcaccgagtcggtgctttt

SEQ ID NO: 620 - DNA, 100 bp, Artificial Sequence
  source: /note="Description of Artificial Sequence: Synthetic polynucleotide"
gagacggagaggggcagggtgttttagagctagaaatagcaagttaaaataaggctagtccgttatcaacttgaaaaagtggcaccgagtcggtgctttt

SEQ ID NO: 621 - DNA, 100 bp, Artificial Sequence
  source: /note="Description of Artificial Sequence: Synthetic polynucleotide"
gaggggcagggtgggatcacgttttagagctagaaatagcaagttaaaataaggctagtccgttatcaacttgaaaaagtggcaccgagtcggtgctttt

SEQ ID NO: 622 - DNA, 100 bp, Artificial Sequence
  source: /note="Description of Artificial Sequence: Synthetic polynucleotide"
aggggcagggtgggatcacagttttagagctagaaatagcaagttaaaataaggctagtccgttatcaacttgaaaaagtggcaccgagtcggtgctttt

SEQ ID NO: 623 - DNA, 100 bp, Artificial Sequence
  source: /note="Description of Artificial Sequence: Synthetic polynucleotide"
agggtgggatcacagggagcgttttagagctagaaatagcaagttaaaataaggctagtccgttatcaacttgaaaaagtggcaccgagtcggtgctttt

SEQ ID NO: 624 - DNA, 100 bp, Artificial Sequence
  source: /note="Description of Artificial Sequence: Synthetic polynucleotide"
gggatcacagggagcaggaggttttagagctagaaatagcaagttaaaataaggctagtccgttatcaacttgaaaaagtggcaccgagtcggtgctttt

SEQ ID NO: 625 - DNA, 100 bp, Artificial Sequence
  source: /note="Description of Artificial Sequence: Synthetic polynucleotide"
ggatcacagggagcaggagcgttttagagctagaaatagcaagttaaaataaggctagtccgttatcaacttgaaaaagtggcaccgagtcggtgctttt

SEQ ID NO: 626 - DNA, 100 bp, Artificial Sequence
  source: /note="Description of Artificial Sequence: Synthetic polynucleotide"
gatcacagggagcaggagcggttttagagctagaaatagcaagttaaaataaggctagtccgttatcaacttgaaaaagtggcaccgagtcggtgctttt

SEQ ID NO: 627 - DNA, 100 bp, Artificial Sequence
  source: /note="Description of Artificial Sequence: Synthetic polynucleotide"
agggagcaggagcggggaatgttttagagctagaaatagcaagttaaaataaggctagtccgttatcaacttgaaaaagtggcaccgagtcggtgctttt

SEQ ID NO: 628 - DNA, 100 bp, Artificial Sequence
  source: /note="Description of Artificial Sequence: Synthetic polynucleotide"
gagcaggagcggggaattgggttttagagctagaaatagcaagttaaaataaggctagtccgttatcaacttgaaaaagtggcaccgagtcggtgctttt

SEQ ID NO: 629 - DNA, 100 bp, Artificial Sequence
  source: /note="Description of Artificial Sequence: Synthetic polynucleotide"
cggggaattggaggtgaatcgttttagagctagaaatagcaagttaaaataaggctagtccgttatcaacttgaaaaagtggcaccgagtcggtgctttt

SEQ ID NO: 630 - DNA, 100 bp, Artificial Sequence
  source: /note="Description of Artificial Sequence: Synthetic polynucleotide"
aatggactggaagtttgggagttttagagctagaaatagcaagttaaaataaggctagtccgttatcaacttgaaaaagtggcaccgagtcggtgctttt

SEQ ID NO: 631 - DNA, 100 bp, Artificial Sequence
  source: /note="Description of Artificial Sequence: Synthetic polynucleotide"
gaatggactggaagtttggggttttagagctagaaatagcaagttaaaataaggctagtccgttatcaacttgaaaaagtggcaccgagtcggtgctttt

SEQ ID NO: 632 - DNA, 100 bp, Artificial Sequence
  source: /note="Description of Artificial Sequence: Synthetic polynucleotide"
gcagaatggactggaagtttgttttagagctagaaatagcaagttaaaataaggctagtccgttatcaacttgaaaaagtggcaccgagtcggtgctttt

SEQ ID NO: 633 - DNA, 100 bp, Artificial Sequence
  source: /note="Description of Artificial Sequence: Synthetic polynucleotide"
agcagaatggactggaagttgttttagagctagaaatagcaagttaaaataaggctagtccgttatcaacttgaaaaagtggcaccgagtcggtgctttt

SEQ ID NO: 634 - DNA, 100 bp, Artificial Sequence
  source: /note="Description of Artificial Sequence: Synthetic polynucleotide"
cccctgggagcagaatggacgttttagagctagaaatagcaagttaaaataaggctagtccgttatcaacttgaaaaagtggcaccgagtcggtgctttt

SEQ ID NO: 635 - DNA, 100 bp, Artificial Sequence
  source: /note="Description of Artificial Sequence: Synthetic polynucleotide"
cggttcccctgggagcagaagttttagagctagaaatagcaagttaaaataaggctagtccgttatcaacttgaaaaagtggcaccgagtcggtgctttt

SEQ ID NO: 636 - DNA, 100 bp, Artificial Sequence
  source: /note="Description of Artificial Sequence: Synthetic polynucleotide"
ttccagtccattctgctcccgttttagagctagaaatagcaagttaaaataaggctagtccgttatcaacttgaaaaagtggcaccgagtcggtgctttt

SEQ ID NO: 637 - DNA, 100 bp, Artificial Sequence
  source: /note="Description of Artificial Sequence: Synthetic polynucleotide"
tccagtccattctgctcccagttttagagctagaaatagcaagttaaaataaggctagtccgttatcaacttgaaaaagtggcaccgagtcggtgctttt

SEQ ID NO: 638 - DNA, 100 bp, Artificial Sequence
  source: /note="Description of Artificial Sequence: Synthetic polynucleotide"
ccagtccattctgctcccaggttttagagctagaaatagcaagttaaaataaggctagtccgttatcaacttgaaaaagtggcaccgagtcggtgctttt

SEQ ID NO: 639 - DNA, 100 bp, Artificial Sequence
  source: /note="Description of Artificial Sequence: Synthetic polynucleotide"
cgcagtttcccggttcccctgttttagagctagaaatagcaagttaaaataaggctagtccgttatcaacttgaaaaagtggcaccgagtcggtgctttt

SEQ ID NO: 640 - DNA, 100 bp, Artificial Sequence
  source: /note="Description of Artificial Sequence: Synthetic polynucleotide"
ccgcagtttcccggttccccgttttagagctagaaatagcaagttaaaataaggctagtccgttatcaacttgaaaaagtggcaccgagtcggtgctttt

SEQ ID NO: 641 - DNA, 100 bp, Artificial Sequence
  source: /note="Description of Artificial Sequence: Synthetic polynucleotide"
cattctgctcccaggggaacgttttagagctagaaatagcaagttaaaataaggctagtccgttatcaacttgaaaaagtggcaccgagtcggtgctttt

SEQ ID NO: 642 - DNA, 100 bp, Artificial Sequence
  source: /note="Description of Artificial Sequence: Synthetic polynucleotide"
attctgctcccaggggaaccgttttagagctagaaatagcaagttaaaataaggctagtccgttatcaacttgaaaaagtggcaccgagtcggtgctttt

SEQ ID NO: 643 - DNA, 100 bp, Artificial Sequence
  source: /note="Description of Artificial Sequence: Synthetic polynucleotide"
ccagttcccccgcagtttccgttttagagctagaaatagcaagttaaaataaggctagtccgttatcaacttgaaaaagtggcaccgagtcggtgctttt

SEQ ID NO: 644 - DNA, 100 bp, Artificial Sequence
  source: /note="Description of Artificial Sequence: Synthetic polynucleotide"
ccaggggaaccgggaaactggttttagagctagaaatagcaagttaaaataaggctagtccgttatcaacttgaaaaagtggcaccgagtcggtgctttt

SEQ ID NO: 645 - DNA, 100 bp, Artificial Sequence
  source: /note="Description of Artificial Sequence: Synthetic polynucleotide"
caggggaaccgggaaactgcgttttagagctagaaatagcaagttaaaataaggctagtccgttatcaacttgaaaaagtggcaccgagtcggtgctttt

SEQ ID NO: 646 - DNA, 100 bp, Artificial Sequence
  source: /note="Description of Artificial Sequence: Synthetic polynucleotide"
aggggaaccgggaaactgcggttttagagctagaaatagcaagttaaaataaggctagtccgttatcaacttgaaaaagtggcaccgagtcggtgctttt

SEQ ID NO: 647 - DNA, 100 bp, Artificial Sequence
  source: /note="Description of Artificial Sequence: Synthetic polynucleotide"
ggggaaccgggaaactgcgggttttagagctagaaatagcaagttaaaataaggctagtccgttatcaacttgaaaaagtggcaccgagtcggtgctttt

SEQ ID NO: 648 - DNA, 100 bp, Artificial Sequence
  source: /note="Description of Artificial Sequence: Synthetic polynucleotide"
ccgggaaactgcgggggaacgttttagagctagaaatagcaagttaaaataaggctagtccgttatcaacttgaaaaagtggcaccgagtcggtgctttt

SEQ ID NO: 649 - DNA, 100 bp, Artificial Sequence
  source: /note="Description of Artificial Sequence: Synthetic polynucleotide"
gaaactgcgggggaactggagttttagagctagaaatagcaagttaaaataaggctagtccgttatcaacttgaaaaagtggcaccgagtcggtgctttt

SEQ ID NO: 650 - DNA, 100 bp, Artificial Sequence
  source: /note="Description of Artificial Sequence: Synthetic polynucleotide"
aaactgcgggggaactggaagttttagagctagaaatagcaagttaaaataaggctagtccgttatcaacttgaaaaagtggcaccgagtcggtgctttt

SEQ ID NO: 651 - DNA, 100 bp, Artificial Sequence
  source: /note="Description of Artificial Sequence: Synthetic polynucleotide"
ggaagggagctcccagaacagttttagagctagaaatagcaagttaaaataaggctagtccgttatcaacttgaaaaagtggcaccgagtcggtgctttt

SEQ ID NO: 652 - DNA, 100 bp, Artificial Sequence
  source: /note="Description of Artificial Sequence: Synthetic polynucleotide"
atcttctggatccttgttctgttttagagctagaaatagcaagttaaaataaggctagtccgttatcaacttgaaaaagtggcaccgagtcggtgctttt

SEQ ID NO: 653 - DNA, 100 bp, Artificial Sequence
  source: /note="Description of Artificial Sequence: Synthetic polynucleotide"
aatcttctggatccttgttcgttttagagctagaaatagcaagttaaaataaggctagtccgttatcaacttgaaaaagtggcaccgagtcggtgctttt

SEQ ID NO: 654 - DNA, 100 bp, Artificial Sequence
  source: /note="Description of Artificial Sequence: Synthetic polynucleotide"
agaacaaggatccagaagatgttttagagctagaaatagcaagttaaaataaggctagtccgttatcaacttgaaaaagtggcaccgagtcggtgctttt

SEQ ID NO: 655 - DNA, 100 bp, Artificial Sequence
  source: /note="Description of Artificial Sequence: Synthetic polynucleotide"
ggccccagatgccaatcttcgttttagagctagaaatagcaagttaaaataaggctagtccgttatcaacttgaaaaagtggcaccgagtcggtgctttt

SEQ ID NO: 656 - DNA, 100 bp, Artificial Sequence
  source: /note="Description of Artificial Sequence: Synthetic polynucleotide"
ggatccagaagattggcatcgttttagagctagaaatagcaagttaaaataaggctagtccgttatcaacttgaaaaagtggcaccgagtcggtgctttt

SEQ ID NO: 657 - DNA, 100 bp, Artificial Sequence
  source: /note="Description of Artificial Sequence: Synthetic polynucleotide"
gatccagaagattggcatctgttttagagctagaaatagcaagttaaaataaggctagtccgttatcaacttgaaaaagtggcaccgagtcggtgctttt

SEQ ID NO: 658 - DNA, 100 bp, Artificial Sequence
  source: /note="Description of Artificial Sequence: Synthetic polynucleotide"
atccagaagattggcatctggttttagagctagaaatagcaagttaaaataaggctagtccgttatcaacttgaaaaagtggcaccgagtcggtgctttt

SEQ ID NO: 659 - DNA, 100 bp, Artificial Sequence
  source: /note="Description of Artificial Sequence: Synthetic polynucleotide"
gaagattggcatctggggccgttttagagctagaaatagcaagttaaaataaggctagtccgttatcaacttgaaaaagtggcaccgagtcggtgctttt

SEQ ID NO: 660 - DNA, 100 bp, Artificial Sequence
  source: /note="Description of Artificial Sequence: Synthetic polynucleotide"
aagattggcatctggggcctgttttagagctagaaatagcaagttaaaataaggctagtccgttatcaacttgaaaaagtggcaccgagtcggtgctttt

SEQ ID NO: 661 - DNA, 100 bp, Artificial Sequence
  source: /note="Description of Artificial Sequence: Synthetic polynucleotide"
gatttagaaacctaaatcccgttttagagctagaaatagcaagttaaaataaggctagtccgttatcaacttgaaaaagtggcaccgagtcggtgctttt

SEQ ID NO: 662 - DNA, 100 bp, Artificial Sequence
  source: /note="Description of Artificial Sequence: Synthetic polynucleotide"
gcatctggggcctgggatttgttttagagctagaaatagcaagttaaaataaggctagtccgttatcaacttgaaaaagtggcaccgagtcggtgctttt

SEQ ID NO: 663 - DNA, 100 bp, Artificial Sequence
  source: /note="Description of Artificial Sequence: Synthetic polynucleotide"
ggatttaggtttctaaatcggttttagagctagaaatagcaagttaaaataaggctagtccgttatcaacttgaaaaagtggcaccgagtcggtgctttt

SEQ ID NO: 664 - DNA, 100 bp, Artificial Sequence
  source: /note="Description of Artificial Sequence: Synthetic polynucleotide"
gatttaggtttctaaatcgtgttttagagctagaaatagcaagttaaaataaggctagtccgttatcaacttgaaaaagtggcaccgagtcggtgctttt

SEQ ID NO: 665 - DNA, 100 bp, Artificial Sequence
  source: /note="Description of Artificial Sequence: Synthetic polynucleotide"
ggtttctaaatcgtgggccagttttagagctagaaatagcaagttaaaataaggctagtccgttatcaacttgaaaaagtggcaccgagtcggtgctttt

SEQ ID NO: 666 - DNA, 100 bp, Artificial Sequence
  source: /note="Description of Artificial Sequence: Synthetic polynucleotide"
gtttctaaatcgtgggccatgttttagagctagaaatagcaagttaaaataaggctagtccgttatcaacttgaaaaagtggcaccgagtcggtgctttt

SEQ ID NO: 667 - DNA, 100 bp, Artificial Sequence
  source: /note="Description of Artificial Sequence: Synthetic polynucleotide"
tttctaaatcgtgggccatggttttagagctagaaatagcaagttaaaataaggctagtccgttatcaacttgaaaaagtggcaccgagtcggtgctttt

SEQ ID NO: 668 - DNA, 100 bp, Artificial Sequence
  source: /note="Description of Artificial Sequence: Synthetic polynucleotide"
gcagagataaggctgccccagttttagagctagaaatagcaagttaaaataaggctagtccgttatcaacttgaaaaagtggcaccgagtcggtgctttt

SEQ ID NO: 669 - DNA, 100 bp, Artificial Sequence
  source: /note="Description of Artificial Sequence: Synthetic polynucleotide"
tcaatgcttttgcagagatagttttagagctagaaatagcaagttaaaataaggctagtccgttatcaacttgaaaaagtggcaccgagtcggtgctttt

SEQ ID NO: 670 - DNA, 100 bp, Artificial Sequence
  source: /note="Description of Artificial Sequence: Synthetic polynucleotide"
ttatctctgcaaaagcattggttttagagctagaaatagcaagttaaaataaggctagtccgttatcaacttgaaaaagtggcaccgagtcggtgctttt

SEQ ID NO: 671 - DNA, 100 bp, Artificial Sequence
  source: /note="Description of Artificial Sequence: Synthetic polynucleotide"
tatctctgcaaaagcattgagttttagagctagaaatagcaagttaaaataaggctagtccgttatcaacttgaaaaagtggcaccgagtcggtgctttt

SEQ ID NO: 672 - DNA, 100 bp, Artificial Sequence
  source: /note="Description of Artificial Sequence: Synthetic polynucleotide"
gagggtagaagtcaatgattgttttagagctagaaatagcaagttaaaataaggctagtccgttatcaacttgaaaaagtggcaccgagtcggtgctttt

SEQ ID NO: 673 - DNA, 100 bp, Artificial Sequence
  source: /note="Description of Artificial Sequence: Synthetic polynucleotide"
agggtagaagtcaatgatttgttttagagctagaaatagcaagttaaaataaggctagtccgttatcaacttgaaaaagtggcaccgagtcggtgctttt

SEQ ID NO: 674 - DNA, 100 bp, Artificial Sequence
  source: /note="Description of Artificial Sequence: Synthetic polynucleotide"
atttgggaagttattgaattgttttagagctagaaatagcaagttaaaataaggctagtccgttatcaacttgaaaaagtggcaccgagtcggtgctttt

SEQ ID NO: 675 - DNA, 100 bp, Artificial Sequence
  source: /note="Description of Artificial Sequence: Synthetic polynucleotide"
tttgggaagttattgaattagttttagagctagaaatagcaagttaaaataaggctagtccgttatcaacttgaaaaagtggcaccgagtcggtgctttt

SEQ ID NO: 676 - DNA, 100 bp, Artificial Sequence
  source: /note="Description of Artificial Sequence: Synthetic polynucleotide"
ttgggaagttattgaattaggttttagagctagaaatagcaagttaaaataaggctagtccgttatcaacttgaaaaagtggcaccgagtcggtgctttt

SEQ ID NO: 677 - DNA, 100 bp, Artificial Sequence
  source: /note="Description of Artificial Sequence: Synthetic polynucleotide"
gttattgaattaggggatctgttttagagctagaaatagcaagttaaaataaggctagtccgttatcaacttgaaaaagtggcaccgagtcggtgctttt

SEQ ID NO: 678 - DNA, 100 bp, Artificial Sequence
  source: /note="Description of Artificial Sequence: Synthetic polynucleotide"
attgaattaggggatctcgggttttagagctagaaatagcaagttaaaataaggctagtccgttatcaacttgaaaaagtggcaccgagtcggtgctttt

SEQ ID NO: 679 - DNA, 100 bp, Artificial Sequence
  source: /note="Description of Artificial Sequence: Synthetic polynucleotide"
aattaggggatctcggaggtgttttagagctagaaatagcaagttaaaataaggctagtccgttatcaacttgaaaaagtggcaccgagtcggtgctttt

SEQ ID NO: 680 - DNA, 100 bp, Artificial Sequence
  source: /note="Description of Artificial Sequence: Synthetic polynucleotide"
gcattctaactgatactatcgttttagagctagaaatagcaagttaaaataaggctagtccgttatcaacttgaaaaagtggcaccgagtcggtgctttt

SEQ ID NO: 681 - DNA, 100 bp, Artificial Sequence
  source: /note="Description of Artificial Sequence: Synthetic polynucleotide"
atcagttagaatgcctgactgttttagagctagaaatagcaagttaaaataaggctagtccgttatcaacttgaaaaagtggcaccgagtcggtgctttt

SEQ ID NO: 682 - DNA, 100 bp, Artificial Sequence
  source: /note="Description of Artificial Sequence: Synthetic polynucleotide"
tcagttagaatgcctgacttgttttagagctagaaatagcaagttaaaataaggctagtccgttatcaacttgaaaaagtggcaccgagtcggtgctttt

SEQ ID NO: 683 - DNA, 100 bp, Artificial Sequence
  source: /note="Description of Artificial Sequence: Synthetic polynucleotide"
cagttagaatgcctgacttggttttagagctagaaatagcaagttaaaataaggctagtccgttatcaacttgaaaaagtggcaccgagtcggtgctttt

SEQ ID NO: 684 - DNA, 100 bp, Artificial Sequence
  source: /note="Description of Artificial Sequence: Synthetic polynucleotide"
agccattgtcaccccaagtcgttttagagctagaaatagcaagttaaaataaggctagtccgttatcaacttgaaaaagtggcaccgagtcggtgctttt

SEQ ID NO: 685 - DNA, 100 bp, Artificial Sequence
  source: /note="Description of Artificial Sequence: Synthetic polynucleotide"
tgcctgacttggggtgacaagttttagagctagaaatagcaagttaaaataaggctagtccgttatcaacttgaaaaagtggcaccgagtcggtgctttt

SEQ ID NO: 686 - DNA, 100 bp, Artificial Sequence
  source: /note="Description of Artificial Sequence: Synthetic polynucleotide"
gacttggggtgacaatggctgttttagagctagaaatagcaagttaaaataaggctagtccgttatcaacttgaaaaagtggcaccgagtcggtgctttt

SEQ ID NO: 687 - DNA, 100 bp, Artificial Sequence
  source: /note="Description of Artificial Sequence: Synthetic polynucleotide"
ttggggtgacaatggcttgggttttagagctagaaatagcaagttaaaataaggctagtccgttatcaacttgaaaaagtggcaccgagtcggtgctttt

SEQ ID NO: 688 - DNA, 100 bp, Artificial Sequence
  source: /note="Description of Artificial Sequence: Synthetic polynucleotide"
tggggtgacaatggcttggagttttagagctagaaatagcaagttaaaataaggctagtccgttatcaacttgaaaaagtggcaccgagtcggtgctttt

SEQ ID NO: 689 - DNA, 100 bp, Artificial Sequence
  source: /note="Description of Artificial Sequence: Synthetic polynucleotide"
ggggtgacaatggcttggaggttttagagctagaaatagcaagttaaaataaggctagtccgttatcaacttgaaaaagtggcaccgagtcggtgctttt

SEQ ID NO: 690 - DNA, 100 bp, Artificial Sequence
  source: /note="Description of Artificial Sequence: Synthetic polynucleotide"
gtgacaatggcttggagggggttttagagctagaaatagcaagttaaaataaggctagtccgttatcaacttgaaaaagtggcaccgagtcggtgctttt

SEQ ID NO: 691 - DNA, 100 bp, Artificial Sequence
  source: /note="Description of Artificial Sequence: Synthetic polynucleotide"
tgacaatggcttggaggggtgttttagagctagaaatagcaagttaaaataaggctagtccgttatcaacttgaaaaagtggcaccgagtcggtgctttt

SEQ ID NO: 692 - DNA, 100 bp, Artificial Sequence
  source: /note="Description of Artificial Sequence: Synthetic polynucleotide"
ttggaggggtgggtgagtcagttttagagctagaaatagcaagttaaaataaggctagtccgttatcaacttgaaaaagtggcaccgagtcggtgctttt

SEQ ID NO: 693 - DNA, 100 bp, Artificial Sequence
  source: /note="Description of Artificial Sequence: Synthetic polynucleotide"
tggaggggtgggtgagtcaagttttagagctagaaatagcaagttaaaataaggctagtccgttatcaacttgaaaaagtggcaccgagtcggtgctttt

SEQ ID NO: 694 - DNA, 100 bp, Artificial Sequence
  source: /note="Description of Artificial Sequence: Synthetic polynucleotide"
aggcaggcatcatgactcacgttttagagctagaaatagcaagttaaaataaggctagtccgttatcaacttgaaaaagtggcaccgagtcggtgctttt

SEQ ID NO: 695 - DNA, 100 bp, Artificial Sequence
  source: /note="Description of Artificial Sequence: Synthetic polynucleotide"
aaggcaggcatcatgactcagttttagagctagaaatagcaagttaaaataaggctagtccgttatcaacttgaaaaagtggcaccgagtcggtgctttt

SEQ ID NO: 696 - DNA, 100 bp, Artificial Sequence
  source: /note="Description of Artificial Sequence: Synthetic polynucleotide"
agttatcaattgtacaaggcgttttagagctagaaatagcaagttaaaataaggctagtccgttatcaacttgaaaaagtggcaccgagtcggtgctttt

SEQ ID NO: 697 - DNA, 100 bp, Artificial Sequence
  source: /note="Description of Artificial Sequence: Synthetic polynucleotide"
gttcagttatcaattgtacagttttagagctagaaatagcaagttaaaataaggctagtccgttatcaacttgaaaaagtggcaccgagtcggtgctttt

SEQ ID NO: 698 - DNA, 100 bp, Artificial Sequence
  source: /note="Description of Artificial Sequence: Synthetic polynucleotide"
tacaattgataactgaacatgttttagagctagaaatagcaagttaaaataaggctagtccgttatcaacttgaaaaagtggcaccgagtcggtgctttt

SEQ ID NO: 699 - DNA, 100 bp, Artificial Sequence
  source: /note="Description of Artificial Sequence: Synthetic polynucleotide"
taactgaacatcggtgagttgttttagagctagaaatagcaagttaaaataaggctagtccgttatcaacttgaaaaagtggcaccgagtcggtgctttt

SEQ ID NO: 700 - DNA, 100 bp, Artificial Sequence
  source: /note="Description of Artificial Sequence: Synthetic polynucleotide"
aactgaacatcggtgagttagttttagagctagaaatagcaagttaaaataaggctagtccgttatcaacttgaaaaagtggcaccgagtcggtgctttt

SEQ ID NO: 701 - DNA, 100 bp, Artificial Sequence
  source: /note="Description of Artificial Sequence: Synthetic polynucleotide"
ggtgctaattacaactgctggttttagagctagaaatagcaagttaaaataaggctagtccgttatcaacttgaaaaagtggcaccgagtcggtgctttt

SEQ ID NO: 702 - DNA, 100 bp, Artificial Sequence
  source: /note="Description of Artificial Sequence: Synthetic polynucleotide"
gggtgctaattacaactgctgttttagagctagaaatagcaagttaaaataaggctagtccgttatcaacttgaaaaagtggcaccgagtcggtgctttt

SEQ ID NO: 703 - DNA, 100 bp, Artificial Sequence
  source: /note="Description of Artificial Sequence: Synthetic polynucleotide"
ggggtgctaattacaactgcgttttagagctagaaatagcaagttaaaataaggctagtccgttatcaacttgaaaaagtggcaccgagtcggtgctttt

SEQ ID NO: 704 - DNA, 100 bp, Artificial Sequence
  source: /note="Description of Artificial Sequence: Synthetic polynucleotide"
agcagttgtaattagcacccgttttagagctagaaatagcaagttaaaataaggctagtccgttatcaacttgaaaaagtggcaccgagtcggtgctttt

SEQ ID NO: 705 - DNA, 100 bp, Artificial Sequence
  source: /note="Description of Artificial Sequence: Synthetic polynucleotide"
gcagttgtaattagcaccccgttttagagctagaaatagcaagttaaaataaggctagtccgttatcaacttgaaaaagtggcaccgagtcggtgctttt

SEQ ID NO: 706 - DNA, 100 bp, Artificial Sequence
  source: /note="Description of Artificial Sequence: Synthetic polynucleotide"
tggtttctggctgacacccggttttagagctagaaatagcaagttaaaataaggctagtccgttatcaacttgaaaaagtggcaccgagtcggtgctttt

SEQ ID NO: 707 - DNA, 100 bp, Artificial Sequence
  source: /note="Description of Artificial Sequence: Synthetic polynucleotide"
ttggtttctggctgacacccgttttagagctagaaatagcaagttaaaataaggctagtccgttatcaacttgaaaaagtggcaccgagtcggtgctttt

SEQ ID NO: 708 - DNA, 100 bp, Artificial Sequence
  source: /note="Description of Artificial Sequence: Synthetic polynucleotide"
gttggtttctggctgacaccgttttagagctagaaatagcaagttaaaataaggctagtccgttatcaacttgaaaaagtggcaccgagtcggtgctttt

SEQ ID NO: 709 - DNA, 100 bp, Artificial Sequence
  source: /note="Description of Artificial Sequence: Synthetic polynucleotide"
tttggctgtttgttggtttcgttttagagctagaaatagcaagttaaaataaggctagtccgttatcaacttgaaaaagtggcaccgagtcggtgctttt

SEQ ID NO: 710 - DNA, 100 bp, Artificial Sequence
  source: /note="Description of Artificial Sequence: Synthetic polynucleotide"
gcagggatttggctgtttgtgttttagagctagaaatagcaagttaaaataaggctagtccgttatcaacttgaaaaagtggcaccgagtcggtgctttt

SEQ ID NO: 711 - DNA, 100 bp, Artificial Sequence
  source: /note="Description of Artificial Sequence: Synthetic polynucleotide"
tgggcggggctgcagggattgttttagagctagaaatagcaagttaaaataaggctagtccgttatcaacttgaaaaagtggcaccgagtcggtgctttt

SEQ ID NO: 712 - DNA, 100 bp, Artificial Sequence
  source: /note="Description of Artificial Sequence: Synthetic polynucleotide"
ataggctgggcggggctgcagttttagagctagaaatagcaagttaaaataaggctagtccgttatcaacttgaaaaagtggcaccgagtcggtgctttt

SEQ ID NO: 713 - DNA, 100 bp, Artificial Sequence
  source: /note="Description of Artificial Sequence: Synthetic polynucleotide"
gataggctgggcggggctgcgttttagagctagaaatagcaagttaaaataaggctagtccgttatcaacttgaaaaagtggcaccgagtcggtgctttt

SEQ ID NO: 714 - DNA, 100 bp, Artificial Sequence
  source: /note="Description of Artificial Sequence: Synthetic polynucleotide"
gccggtggataggctgggcggttttagagctagaaatagcaagttaaaataaggctagtccgttatcaacttgaaaaagtggcaccgagtcggtgctttt

SEQ ID NO: 715 - DNA, 100 bp, Artificial Sequence
  source: /note="Description of Artificial Sequence: Synthetic polynucleotide"
cgccggtggataggctgggcgttttagagctagaaatagcaagttaaaataaggctagtccgttatcaacttgaaaaagtggcaccgagtcggtgctttt

SEQ ID NO: 716 - DNA, 100 bp, Artificial Sequence
  source: /note="Description of Artificial Sequence: Synthetic polynucleotide"
ccgccggtggataggctggggttttagagctagaaatagcaagttaaaataaggctagtccgttatcaacttgaaaaagtggcaccgagtcggtgctttt

SEQ ID NO: 717 - DNA, 100 bp, Artificial Sequence
  source: /note="Description of Artificial Sequence: Synthetic polynucleotide"
cccccgccggtggataggctgttttagagctagaaatagcaagttaaaataaggctagtccgttatcaacttgaaaaagtggcaccgagtcggtgctttt

SEQ ID NO: 718 - DNA, 100 bp, Artificial Sequence
  source: /note="Description of Artificial Sequence: Synthetic polynucleotide"
tcccccgccggtggataggcgttttagagctagaaatagcaagttaaaataaggctagtccgttatcaacttgaaaaagtggcaccgagtcggtgctttt

SEQ ID NO: 719 - DNA, 100 bp, Artificial Sequence
  source: /note="Description of Artificial Sequence: Synthetic polynucleotide"
gccccgcccagcctatccacgttttagagctagaaatagcaagttaaaataaggctagtccgttatcaacttgaaaaagtggcaccgagtcggtgctttt

SEQ ID NO: 720 - DNA, 100 bp, Artificial Sequence
  source: /note="Description of Artificial Sequence: Synthetic polynucleotide"
tcggtcccccgccggtggatgttttagagctagaaatagcaagttaaaataaggctagtccgttatcaacttgaaaaagtggcaccgagtcggtgctttt

SEQ ID NO: 721 - DNA, 100 bp, Artificial Sequence
  source: /note="Description of Artificial Sequence: Synthetic polynucleotide"
ccgcccagcctatccaccgggttttagagctagaaatagcaagttaaaataaggctagtccgttatcaacttgaaaaagtggcaccgagtcggtgctttt

SEQ ID NO: 722 - DNA, 100 bp, Artificial Sequence
  source: /note="Description of Artificial Sequence: Synthetic polynucleotide"
cgcccagcctatccaccggcgttttagagctagaaatagcaagttaaaataaggctagtccgttatcaacttgaaaaagtggcaccgagtcggtgctttt

SEQ ID NO: 723 - DNA, 100 bp, Artificial Sequence
  source: /note="Description of Artificial Sequence: Synthetic polynucleotide"
gcccagcctatccaccggcggttttagagctagaaatagcaagttaaaataaggctagtccgttatcaacttgaaaaagtggcaccgagtcggtgctttt

SEQ ID NO: 724 - DNA, 100 bp, Artificial Sequence
  source: /note="Description of Artificial Sequence: Synthetic polynucleotide"
gttaatcggtcccccgccgggttttagagctagaaatagcaagttaaaataaggctagtccgttatcaacttgaaaaagtggcaccgagtcggtgctttt

SEQ ID NO: 725 - DNA, 100 bp, Artificial Sequence
  source: /note="Description of Artificial Sequence: Synthetic polynucleotide"
cccagcctatccaccggcgggttttagagctagaaatagcaagttaaaataaggctagtccgttatcaacttgaaaaagtggcaccgagtcggtgctttt

SEQ ID NO: 726 - DNA, 100 bp, Artificial Sequence
  source: /note="Description of Artificial Sequence: Synthetic polynucleotide"
atggttaatcggtcccccgcgttttagagctagaaatagcaagttaaaataaggctagtccgttatcaacttgaaaaagtggcaccgagtcggtgctttt

SEQ ID NO: 727 - DNA, 100 bp, Artificial Sequence
  source: /note="Description of Artificial Sequence: Synthetic polynucleotide"
ggtgggggttaatggttaatgttttagagctagaaatagcaagttaaaataaggctagtccgttatcaacttgaaaaagtggcaccgagtcggtgctttt

SEQ ID NO: 728 - DNA, 100 bp, Artificial Sequence
  source: /note="Description of Artificial Sequence: Synthetic polynucleotide"
cggggaggggtgggggttaagttttagagctagaaatagcaagttaaaataaggctagtccgttatcaacttgaaaaagtggcaccgagtcggtgctttt

SEQ ID NO: 729 - DNA, 100 bp, Artificial Sequence
  source: /note="Description of Artificial Sequence: Synthetic polynucleotide"
gctctgccggggaggggtgggttttagagctagaaatagcaagttaaaataaggctagtccgttatcaacttgaaaaagtggcaccgagtcggtgctttt

SEQ ID NO: 730 - DNA, 100 bp, Artificial Sequence
  source: /note="Description of Artificial Sequence: Synthetic polynucleotide"
ggctctgccggggaggggtggttttagagctagaaatagcaagttaaaataaggctagtccgttatcaacttgaaaaagtggcaccgagtcggtgctttt

SEQ ID NO: 731 - DNA, 100 bp, Artificial Sequence
  source: /note="Description of Artificial Sequence: Synthetic polynucleotide"
aggctctgccggggaggggtgttttagagctagaaatagcaagttaaaataaggctagtccgttatcaacttgaaaaagtggcaccgagtcggtgctttt

SEQ ID NO: 732 - DNA, 100 bp, Artificial Sequence
  source: /note="Description of Artificial Sequence: Synthetic polynucleotide"
gaggctctgccggggagggggttttagagctagaaatagcaagttaaaataaggctagtccgttatcaacttgaaaaagtggcaccgagtcggtgctttt

SEQ ID NO: 733 - DNA, 100 bp, Artificial Sequence
  source: /note="Description of Artificial Sequence: Synthetic polynucleotide"
cattaacccccacccctcccgttttagagctagaaatagcaagttaaaataaggctagtccgttatcaacttgaaaaagtggcaccgagtcggtgctttt

SEQ ID NO: 734 - DNA, 100 bp, Artificial Sequence
  source: /note="Description of Artificial Sequence: Synthetic polynucleotide"
gtggaggctctgccggggaggttttagagctagaaatagcaagttaaaataaggctagtccgttatcaacttgaaaaagtggcaccgagtcggtgctttt

SEQ ID NO: 735 - DNA, 100 bp, Artificial Sequence
  source: /note="Description of Artificial Sequence: Synthetic polynucleotide"
ggtggaggctctgccggggagttttagagctagaaatagcaagttaaaataaggctagtccgttatcaacttgaaaaagtggcaccgagtcggtgctttt

SEQ ID NO: 736 - DNA, 100 bp, Artificial Sequence
  source: /note="Description of Artificial Sequence: Synthetic polynucleotide"
gggtggaggctctgccgggggttttagagctagaaatagcaagttaaaataaggctagtccgttatcaacttgaaaaagtggcaccgagtcggtgctttt

SEQ ID NO: 737 - DNA, 100 bp, Artificial Sequence
  source: /note="Description of Artificial Sequence: Synthetic polynucleotide"
aaggggtggaggctctgccggttttagagctagaaatagcaagttaaaataaggctagtccgttatcaacttgaaaaagtggcaccgagtcggtgctttt

SEQ ID NO: 738 - DNA, 100 bp, Artificial Sequence
  source: /note="Description of Artificial Sequence: Synthetic polynucleotide"
gaaggggtggaggctctgccgttttagagctagaaatagcaagttaaaataaggctagtccgttatcaacttgaaaaagtggcaccgagtcggtgctttt

SEQ ID NO: 739 - DNA, 100 bp, Artificial Sequence
  source: /note="Description of Artificial Sequence: Synthetic polynucleotide"
tgaaggggtggaggctctgcgttttagagctagaaatagcaagttaaaataaggctagtccgttatcaacttgaaaaagtggcaccgagtcggtgctttt

SEQ ID NO: 740 - DNA, 100 bp, Artificial Sequence
  source: /note="Description of Artificial Sequence: Synthetic polynucleotide"
tagcctctgtgaaggggtgggttttagagctagaaatagcaagttaaaataaggctagtccgttatcaacttgaaaaagtggcaccgagtcggtgctttt

SEQ ID NO: 741 - DNA, 100 bp, Artificial Sequence
  source: /note="Description of Artificial Sequence: Synthetic polynucleotide"
gcctagcctctgtgaagggggttttagagctagaaatagcaagttaaaataaggctagtccgttatcaacttgaaaaagtggcaccgagtcggtgctttt

SEQ ID NO: 742 - DNA, 100 bp, Artificial Sequence
  source: /note="Description of Artificial Sequence: Synthetic polynucleotide"
ttggcctagcctctgtgaaggttttagagctagaaatagcaagttaaaataaggctagtccgttatcaacttgaaaaagtggcaccgagtcggtgctttt

SEQ ID NO: 743 - DNA, 100 bp, Artificial Sequence
  source: /note="Description of Artificial Sequence: Synthetic polynucleotide"
cttggcctagcctctgtgaagttttagagctagaaatagcaagttaaaataaggctagtccgttatcaacttgaaaaagtggcaccgagtcggtgctttt

SEQ ID NO: 744 - DNA, 100 bp, Artificial Sequence
  source: /note="Description of Artificial Sequence: Synthetic polynucleotide"
gagcctccaccccttcacaggttttagagctagaaatagcaagttaaaataaggctagtccgttatcaacttgaaaaagtggcaccgagtcggtgctttt

SEQ ID NO: 745 - DNA, 100 bp, Artificial Sequence
  source: /note="Description of Artificial Sequence: Synthetic polynucleotide"
tcttggcctagcctctgtgagttttagagctagaaatagcaagttaaaataaggctagtccgttatcaacttgaaaaagtggcaccgagtcggtgctttt

SEQ ID NO: 746 - DNA, 100 bp, Artificial Sequence
  source: /note="Description of Artificial Sequence: Synthetic polynucleotide"
tccaccccttcacagaggctgttttagagctagaaatagcaagttaaaataaggctagtccgttatcaacttgaaaaagtggcaccgagtcggtgctttt

SEQ ID NO: 747 - DNA, 100 bp, Artificial Sequence
  source: /note="Description of Artificial Sequence: Synthetic polynucleotide"
ggaagatctgctgggagtctgttttagagctagaaatagcaagttaaaataaggctagtccgttatcaacttgaaaaagtggcaccgagtcggtgctttt

SEQ ID NO: 748 - DNA, 100 bp, Artificial Sequence
  source: /note="Description of Artificial Sequence: Synthetic polynucleotide"
gtcctctgggaagatctgctgttttagagctagaaatagcaagttaaaataaggctagtccgttatcaacttgaaaaagtggcaccgagtcggtgctttt

SEQ ID NO: 749 - DNA, 100 bp, Artificial Sequence
  source: /note="Description of Artificial Sequence: Synthetic polynucleotide"
cgtcctctgggaagatctgcgttttagagctagaaatagcaagttaaaataaggctagtccgttatcaacttgaaaaagtggcaccgagtcggtgctttt

SEQ ID NO: 750 - DNA, 100 bp, Artificial Sequence
  source: /note="Description of Artificial Sequence: Synthetic polynucleotide"
ctcccagcagatcttcccaggttttagagctagaaatagcaagttaaaataaggctagtccgttatcaacttgaaaaagtggcaccgagtcggtgctttt

SEQ ID NO: 751 - DNA, 100 bp, Artificial Sequence
  source: /note="Description of Artificial Sequence: Synthetic polynucleotide"
cagcagatcttcccagaggagttttagagctagaaatagcaagttaaaataaggctagtccgttatcaacttgaaaaagtggcaccgagtcggtgctttt

SEQ ID NO: 752 - DNA, 100 bp, Artificial Sequence
  source: /note="Description of Artificial Sequence: Synthetic polynucleotide"
ttcctttcaaaccgtcctctgttttagagctagaaatagcaagttaaaataaggctagtccgttatcaacttgaaaaagtggcaccgagtcggtgctttt

SEQ ID NO: 753 - DNA, 100 bp, Artificial Sequence
  source: /note="Description of Artificial Sequence: Synthetic polynucleotide"
cttcctttcaaaccgtcctcgttttagagctagaaatagcaagttaaaataaggctagtccgttatcaacttgaaaaagtggcaccgagtcggtgctttt

SEQ ID NO: 754 - DNA, 100 bp, Artificial Sequence
  source: /note="Description of Artificial Sequence: Synthetic polynucleotide"
ttcccagaggacggtttgaagttttagagctagaaatagcaagttaaaataaggctagtccgttatcaacttgaaaaagtggcaccgagtcggtgctttt

SEQ ID NO: 755 - DNA, 100 bp, Artificial Sequence
  source: /note="Description of Artificial Sequence: Synthetic polynucleotide"
cagaggacggtttgaaaggagttttagagctagaaatagcaagttaaaataaggctagtccgttatcaacttgaaaaagtggcaccgagtcggtgctttt

SEQ ID NO: 756 - DNA, 100 bp, Artificial Sequence
  source: /note="Description of Artificial Sequence: Synthetic polynucleotide"
ggtttgaaaggaaggcagaggttttagagctagaaatagcaagttaaaataaggctagtccgttatcaacttgaaaaagtggcaccgagtcggtgctttt

SEQ ID NO: 757 - DNA, 100 bp, Artificial Sequence
  source: /note="Description of Artificial Sequence: Synthetic polynucleotide"
gtttgaaaggaaggcagagagttttagagctagaaatagcaagttaaaataaggctagtccgttatcaacttgaaaaagtggcaccgagtcggtgctttt

SEQ ID NO: 758 - DNA, 100 bp, Artificial Sequence
  source: /note="Description of Artificial Sequence: Synthetic polynucleotide"
aaggaaggcagagagggcacgttttagagctagaaatagcaagttaaaataaggctagtccgttatcaacttgaaaaagtggcaccgagtcggtgctttt

SEQ ID NO: 759 - DNA, 100 bp, Artificial Sequence
  source: /note="Description of Artificial Sequence: Synthetic polynucleotide"
aggaaggcagagagggcactgttttagagctagaaatagcaagttaaaataaggctagtccgttatcaacttgaaaaagtggcaccgagtcggtgctttt

SEQ ID NO: 760 - DNA, 100 bp, Artificial Sequence
  source: /note="Description of Artificial Sequence: Synthetic polynucleotide"
aaggcagagagggcactggggttttagagctagaaatagcaagttaaaataaggctagtccgttatcaacttgaaaaagtggcaccgagtcggtgctttt

SEQ ID NO: 761 - DNA, 100 bp, Artificial Sequence
  source: /note="Description of Artificial Sequence: Synthetic polynucleotide"
gcagagagggcactgggagggttttagagctagaaatagcaagttaaaataaggctagtccgttatcaacttgaaaaagtggcaccgagtcggtgctttt

SEQ ID NO: 762 - DNA, 100 bp, Artificial Sequence
  source: /note="Description of Artificial Sequence: Synthetic polynucleotide"
agggcactgggaggaggcaggttttagagctagaaatagcaagttaaaataaggctagtccgttatcaacttgaaaaagtggcaccgagtcggtgctttt

SEQ ID NO: 763 - DNA, 100 bp, Artificial Sequence
  source: /note="Description of Artificial Sequence: Synthetic polynucleotide"
gggcactgggaggaggcagtgttttagagctagaaatagcaagttaaaataaggctagtccgttatcaacttgaaaaagtggcaccgagtcggtgctttt

SEQ ID NO: 764 - DNA, 100 bp, Artificial Sequence
  source: /note="Description of Artificial Sequence: Synthetic polynucleotide"
cactgggaggaggcagtggggttttagagctagaaatagcaagttaaaataaggctagtccgttatcaacttgaaaaagtggcaccgagtcggtgctttt

SEQ ID NO: 765 - DNA, 100 bp, Artificial Sequence
  source: /note="Description of Artificial Sequence: Synthetic polynucleotide"
actgggaggaggcagtgggagttttagagctagaaatagcaagttaaaataaggctagtccgttatcaacttgaaaaagtggcaccgagtcggtgctttt

SEQ ID NO: 766 - DNA, 100 bp, Artificial Sequence
  source: /note="Description of Artificial Sequence: Synthetic polynucleotide"
gggaggaggcagtgggaggggttttagagctagaaatagcaagttaaaataaggctagtccgttatcaacttgaaaaagtggcaccgagtcggtgctttt

SEQ ID NO: 767 - DNA, 100 bp, Artificial Sequence
  source: /note="Description of Artificial Sequence: Synthetic polynucleotide"
aggaggcagtgggagggcgggttttagagctagaaatagcaagttaaaataaggctagtccgttatcaacttgaaaaagtggcaccgagtcggtgctttt

SEQ ID NO: 768 - DNA, 100 bp, Artificial Sequence
  source: /note="Description of Artificial Sequence: Synthetic polynucleotide"
ggaggcagtgggagggcggagttttagagctagaaatagcaagttaaaataaggctagtccgttatcaacttgaaaaagtggcaccgagtcggtgctttt

SEQ ID NO: 769 - DNA, 100 bp, Artificial Sequence
  source: /note="Description of Artificial Sequence: Synthetic polynucleotide"
ggcagtgggagggcggaggggttttagagctagaaatagcaagttaaaataaggctagtccgttatcaacttgaaaaagtggcaccgagtcggtgctttt

SEQ ID NO: 770 - DNA, 100 bp, Artificial Sequence
  source: /note="Description of Artificial Sequence: Synthetic polynucleotide"
gcagtgggagggcggagggcgttttagagctagaaatagcaagttaaaataaggctagtccgttatcaacttgaaaaagtggcaccgagtcggtgctttt

SEQ ID NO: 771 - DNA, 100 bp, Artificial Sequence
  source: /note="Description of Artificial Sequence: Synthetic polynucleotide"
cagtgggagggcggagggcggttttagagctagaaatagcaagttaaaataaggctagtccgttatcaacttgaaaaagtggcaccgagtcggtgctttt

SEQ ID NO: 772 - DNA, 100 bp, Artificial Sequence
  source: /note="Description of Artificial Sequence: Synthetic polynucleotide"
agtgggagggcggagggcgggttttagagctagaaatagcaagttaaaataaggctagtccgttatcaacttgaaaaagtggcaccgagtcggtgctttt

SEQ ID NO: 773 - DNA, 100 bp, Artificial Sequence
  source: /note="Description of Artificial Sequence: Synthetic polynucleotide"
gggcggagggcgggggccttgttttagagctagaaatagcaagttaaaataaggctagtccgttatcaacttgaaaaagtggcaccgagtcggtgctttt

SEQ ID NO: 774 - DNA, 100 bp, Artificial Sequence
  source: /note="Description of Artificial Sequence: Synthetic polynucleotide"
ggcggagggcgggggccttcgttttagagctagaaatagcaagttaaaataaggctagtccgttatcaacttgaaaaagtggcaccgagtcggtgctttt

SEQ ID NO: 775 - DNA, 100 bp, Artificial Sequence
  source: /note="Description of Artificial Sequence: Synthetic polynucleotide"
gcggagggcgggggccttcggttttagagctagaaatagcaagttaaaataaggctagtccgttatcaacttgaaaaagtggcaccgagtcggtgctttt

SEQ ID NO: 776 - DNA, 100 bp, Artificial Sequence
  source: /note="Description of Artificial Sequence: Synthetic polynucleotide"
gagggcgggggccttcgggggttttagagctagaaatagcaagttaaaataaggctagtccgttatcaacttgaaaaagtggcaccgagtcggtgctttt

SEQ ID NO: 777 - DNA, 100 bp, Artificial Sequence
  source: /note="Description of Artificial Sequence: Synthetic polynucleotide"
accctgggcgcccaccccgagttttagagctagaaatagcaagttaaaataaggctagtccgttatcaacttgaaaaagtggcaccgagtcggtgctttt

SEQ ID NO: 778 - DNA, 100 bp, Artificial Sequence
  source: /note="Description of Artificial Sequence: Synthetic polynucleotide"
agggcgggggccttcggggtgttttagagctagaaatagcaagttaaaataaggctagtccgttatcaacttgaaaaagtggcaccgagtcggtgctttt

SEQ ID NO: 779 - DNA, 100 bp, Artificial Sequence
  source: /note="Description of Artificial Sequence: Synthetic polynucleotide"
ggccttcggggtgggcgcccgttttagagctagaaatagcaagttaaaataaggctagtccgttatcaacttgaaaaagtggcaccgagtcggtgctttt

SEQ ID NO: 780 - DNA, 100 bp, Artificial Sequence
  source: /note="Description of Artificial Sequence: Synthetic polynucleotide"
gccttcggggtgggcgcccagttttagagctagaaatagcaagttaaaataaggctagtccgttatcaacttgaaaaagtggcaccgagtcggtgctttt

SEQ ID NO: 781 - DNA, 100 bp, Artificial Sequence
  source: /note="Description of Artificial Sequence: Synthetic polynucleotide"
tcggggtgggcgcccagggtgttttagagctagaaatagcaagttaaaataaggctagtccgttatcaacttgaaaaagtggcaccgagtcggtgctttt

SEQ ID NO: 782 - DNA, 100 bp, Artificial Sequence
  source: /note="Description of Artificial Sequence: Synthetic polynucleotide"
cggggtgggcgcccagggtagttttagagctagaaatagcaagttaaaataaggctagtccgttatcaacttgaaaaagtggcaccgagtcggtgctttt

SEQ ID NO: 783 - DNA, 100 bp, Artificial Sequence
  source: /note="Description of Artificial Sequence: Synthetic polynucleotide"
gcggccacctgccctaccctgttttagagctagaaatagcaagttaaaataaggctagtccgttatcaacttgaaaaagtggcaccgagtcggtgctttt

SEQ ID NO: 784 - DNA, 100 bp, Artificial Sequence
  source: /note="Description of Artificial Sequence: Synthetic polynucleotide"
cgcggccacctgccctacccgttttagagctagaaatagcaagttaaaataaggctagtccgttatcaacttgaaaaagtggcaccgagtcggtgctttt

SEQ ID NO: 785 - DNA, 100 bp, Artificial Sequence
  source: /note="Description of Artificial Sequence: Synthetic polynucleotide"
gtgggcgcccagggtagggcgttttagagctagaaatagcaagttaaaataaggctagtccgttatcaacttgaaaaagtggcaccgagtcggtgctttt

SEQ ID NO: 786 - DNA, 100 bp, Artificial Sequence
  source: /note="Description of Artificial Sequence: Synthetic polynucleotide"
ggcgcccagggtagggcagggttttagagctagaaatagcaagttaaaataaggctagtccgttatcaacttgaaaaagtggcaccgagtcggtgctttt

SEQ ID NO: 787 - DNA, 100 bp, Artificial Sequence
  source: /note="Description of Artificial Sequence: Synthetic polynucleotide"
cagggtagggcaggtggccggttttagagctagaaatagcaagttaaaataaggctagtccgttatcaacttgaaaaagtggcaccgagtcggtgctttt

SEQ ID NO: 788 - DNA, 100 bp, Artificial Sequence
  source: /note="Description of Artificial Sequence: Synthetic polynucleotide"
tagggcaggtggccgcggcggttttagagctagaaatagcaagttaaaataaggctagtccgttatcaacttgaaaaagtggcaccgagtcggtgctttt

SEQ ID NO: 789 - DNA, 100 bp, Artificial Sequence
  source: /note="Description of Artificial Sequence: Synthetic polynucleotide"
ttctccctgcctccacgccggttttagagctagaaatagcaagttaaaataaggctagtccgttatcaacttgaaaaagtggcaccgagtcggtgctttt

SEQ ID NO: 790 - DNA, 100 bp, Artificial Sequence
  source: /note="Description of Artificial Sequence: Synthetic polynucleotide"
ggcaggtggccgcggcgtgggttttagagctagaaatagcaagttaaaataaggctagtccgttatcaacttgaaaaagtggcaccgagtcggtgctttt

SEQ ID NO: 791 - DNA, 100 bp, Artificial Sequence
  source: /note="Description of Artificial Sequence: Synthetic polynucleotide"
ggtggccgcggcgtggaggcgttttagagctagaaatagcaagttaaaataaggctagtccgttatcaacttgaaaaagtggcaccgagtcggtgctttt

SEQ ID NO: 792 - DNA, 100 bp, Artificial Sequence
  source: /note="Description of Artificial Sequence: Synthetic polynucleotide"
gtggccgcggcgtggaggcagttttagagctagaaatagcaagttaaaataaggctagtccgttatcaacttgaaaaagtggcaccgagtcggtgctttt

SEQ ID NO: 793 - DNA, 100 bp, Artificial Sequence
  source: /note="Description of Artificial Sequence: Synthetic polynucleotide"
gtccatgtcgacgagggtttgttttagagctagaaatagcaagttaaaataaggctagtccgttatcaacttgaaaaagtggcaccgagtcggtgctttt

SEQ ID NO: 794 - DNA, 100 bp, Artificial Sequence
  source: /note="Description of Artificial Sequence: Synthetic polynucleotide"
ggccatgtccatgtcgacgagttttagagctagaaatagcaagttaaaataaggctagtccgttatcaacttgaaaaagtggcaccgagtcggtgctttt

SEQ ID NO: 795 - DNA, 100 bp, Artificial Sequence
  source: /note="Description of Artificial Sequence: Synthetic polynucleotide"
cggccatgtccatgtcgacggttttagagctagaaatagcaagttaaaataaggctagtccgttatcaacttgaaaaagtggcaccgagtcggtgctttt

SEQ ID NO: 796 - DNA, 100 bp, Artificial Sequence
  source: /note="Description of Artificial Sequence: Synthetic polynucleotide"
ctccaaaaccctcgtcgacagttttagagctagaaatagcaagttaaaataaggctagtccgttatcaacttgaaaaagtggcaccgagtcggtgctttt

SEQ ID NO: 797 - DNA, 100 bp, Artificial Sequence
  source: /note="Description of Artificial Sequence: Synthetic polynucleotide"
aaccctcgtcgacatggacagttttagagctagaaatagcaagttaaaataaggctagtccgttatcaacttgaaaaagtggcaccgagtcggtgctttt

SEQ ID NO: 798 - DNA, 100 bp, Artificial Sequence
  source: /note="Description of Artificial Sequence: Synthetic polynucleotide"
gtccagtgcagcactgtagtgttttagagctagaaatagcaagttaaaataaggctagtccgttatcaacttgaaaaagtggcaccgagtcggtgctttt

SEQ ID NO: 799 - DNA, 100 bp, Artificial Sequence
  source: /note="Description of Artificial Sequence: Synthetic polynucleotide"
ggccgactacagtgctgcacgttttagagctagaaatagcaagttaaaataaggctagtccgttatcaacttgaaaaagtggcaccgagtcggtgctttt

SEQ ID NO: 800 - DNA, 100 bp, Artificial Sequence
  source: /note="Description of Artificial Sequence: Synthetic polynucleotide"
attccagggtggtgtaggctgttttagagctagaaatagcaagttaaaataaggctagtccgttatcaacttgaaaaagtggcaccgagtcggtgctttt

SEQ ID NO: 801 - DNA, 100 bp, Artificial Sequence
  source: /note="Description of Artificial Sequence: Synthetic polynucleotide"
aattccagggtggtgtaggcgttttagagctagaaatagcaagttaaaataaggctagtccgttatcaacttgaaaaagtggcaccgagtcggtgctttt

SEQ ID NO: 802 - DNA, 100 bp, Artificial Sequence
  source: /note="Description of Artificial Sequence: Synthetic polynucleotide"
ctcaaattccagggtggtgtgttttagagctagaaatagcaagttaaaataaggctagtccgttatcaacttgaaaaagtggcaccgagtcggtgctttt

SEQ ID NO: 803 - DNA, 100 bp, Artificial Sequence
  source: /note="Description of Artificial Sequence: Synthetic polynucleotide"
ggacccagcctacaccacccgttttagagctagaaatagcaagttaaaataaggctagtccgttatcaacttgaaaaagtggcaccgagtcggtgctttt

SEQ ID NO: 804 - DNA, 100 bp, Artificial Sequence
  source: /note="Description of Artificial Sequence: Synthetic polynucleotide"
cacattctcaaattccaggggttttagagctagaaatagcaagttaaaataaggctagtccgttatcaacttgaaaaagtggcaccgagtcggtgctttt

SEQ ID NO: 805 - DNA, 100 bp, Artificial Sequence
  source: /note="Description of Artificial Sequence: Synthetic polynucleotide"
ctgcacattctcaaattccagttttagagctagaaatagcaagttaaaataaggctagtccgttatcaacttgaaaaagtggcaccgagtcggtgctttt

SEQ ID NO: 806 - DNA, 100 bp, Artificial Sequence
  source: /note="Description of Artificial Sequence: Synthetic polynucleotide"
cctgcacattctcaaattccgttttagagctagaaatagcaagttaaaataaggctagtccgttatcaacttgaaaaagtggcaccgagtcggtgctttt

SEQ ID NO: 807 - DNA, 100 bp, Artificial Sequence
  source: /note="Description of Artificial Sequence: Synthetic polynucleotide"
cctggaatttgagaatgtgcgttttagagctagaaatagcaagttaaaataaggctagtccgttatcaacttgaaaaagtggcaccgagtcggtgctttt

SEQ ID NO: 808 - DNA, 100 bp, Artificial Sequence
  source: /note="Description of Artificial Sequence: Synthetic polynucleotide"
gaatgtgcaggtgttgacgagttttagagctagaaatagcaagttaaaataaggctagtccgttatcaacttgaaaaagtggcaccgagtcggtgctttt

SEQ ID NO: 809 - DNA, 100 bp, Artificial Sequence
  source: /note="Description of Artificial Sequence: Synthetic polynucleotide"
aatgtgcaggtgttgacgatgttttagagctagaaatagcaagttaaaataaggctagtccgttatcaacttgaaaaagtggcaccgagtcggtgctttt

SEQ ID NO: 810 - DNA, 100 bp, Artificial Sequence
  source: /note="Description of Artificial Sequence: Synthetic polynucleotide"
caggtgttgacgatgggcaagttttagagctagaaatagcaagttaaaataaggctagtccgttatcaacttgaaaaagtggcaccgagtcggtgctttt

SEQ ID NO: 811 - DNA, 100 bp, Artificial Sequence
  source: /note="Description of Artificial Sequence: Synthetic polynucleotide"
tgttgacgatgggcaatggtgttttagagctagaaatagcaagttaaaataaggctagtccgttatcaacttgaaaaagtggcaccgagtcggtgctttt

SEQ ID NO: 812 - DNA, 100 bp, Artificial Sequence
  source: /note="Description of Artificial Sequence: Synthetic polynucleotide"
tgacgatgggcaatggtagggttttagagctagaaatagcaagttaaaataaggctagtccgttatcaacttgaaaaagtggcaccgagtcggtgctttt

SEQ ID NO: 813 - DNA, 100 bp, Artificial Sequence
  source: /note="Description of Artificial Sequence: Synthetic polynucleotide"
gacgatgggcaatggtaggtgttttagagctagaaatagcaagttaaaataaggctagtccgttatcaacttgaaaaagtggcaccgagtcggtgctttt

SEQ ID NO: 814 - DNA, 100 bp, Artificial Sequence
  source: /note="Description of Artificial Sequence: Synthetic polynucleotide"
acgatgggcaatggtaggtggttttagagctagaaatagcaagttaaaataaggctagtccgttatcaacttgaaaaagtggcaccgagtcggtgctttt

SEQ ID NO: 815 - DNA, 100 bp, Artificial Sequence
  source: /note="Description of Artificial Sequence: Synthetic polynucleotide"
cgatgggcaatggtaggtgggttttagagctagaaatagcaagttaaaataaggctagtccgttatcaacttgaaaaagtggcaccgagtcggtgctttt

SEQ ID NO: 816 - DNA, 100 bp, Artificial Sequence
  source: /note="Description of Artificial Sequence: Synthetic polynucleotide"
aggtgggggcagatgtgcccgttttagagctagaaatagcaagttaaaataaggctagtccgttatcaacttgaaaaagtggcaccgagtcggtgctttt

SEQ ID NO: 817 - DNA, 100 bp, Artificial Sequence
  source: /note="Description of Artificial Sequence: Synthetic polynucleotide"
ctgcccccactggcacacctgttttagagctagaaatagcaagttaaaataaggctagtccgttatcaacttgaaaaagtggcaccgagtcggtgctttt

SEQ ID NO: 818 - DNA, 100 bp, Artificial Sequence
  source: /note="Description of Artificial Sequence: Synthetic polynucleotide"
cctgcccccactggcacaccgttttagagctagaaatagcaagttaaaataaggctagtccgttatcaacttgaaaaagtggcaccgagtcggtgctttt

SEQ ID NO: 819 - DNA, 100 bp, Artificial Sequence
  source: /note="Description of Artificial Sequence: Synthetic polynucleotide"
gatgtgcccaggtgtgccaggttttagagctagaaatagcaagttaaaataaggctagtccgttatcaacttgaaaaagtggcaccgagtcggtgctttt

SEQ ID NO: 820 - DNA, 100 bp, Artificial Sequence
  source: /note="Description of Artificial Sequence: Synthetic polynucleotide"
atgtgcccaggtgtgccagtgttttagagctagaaatagcaagttaaaataaggctagtccgttatcaacttgaaaaagtggcaccgagtcggtgctttt

SEQ ID NO: 821 - DNA, 100 bp, Artificial Sequence
  source: /note="Description of Artificial Sequence: Synthetic polynucleotide"
tgtgcccaggtgtgccagtggttttagagctagaaatagcaagttaaaataaggctagtccgttatcaacttgaaaaagtggcaccgagtcggtgctttt

SEQ ID NO: 822 - DNA, 100 bp, Artificial Sequence
  source: /note="Description of Artificial Sequence: Synthetic polynucleotide"
gtgcccaggtgtgccagtgggttttagagctagaaatagcaagttaaaataaggctagtccgttatcaacttgaaaaagtggcaccgagtcggtgctttt

SEQ ID NO: 823 - DNA, 100 bp, Artificial Sequence
  source: /note="Description of Artificial Sequence: Synthetic polynucleotide"
ccaggcacacctgcccccacgttttagagctagaaatagcaagttaaaataaggctagtccgttatcaacttgaaaaagtggcaccgagtcggtgctttt

SEQ ID NO: 824 - DNA, 100 bp, Artificial Sequence
  source: /note="Description of Artificial Sequence: Synthetic polynucleotide"
ccaggtgtgccagtgggggcgttttagagctagaaatagcaagttaaaataaggctagtccgttatcaacttgaaaaagtggcaccgagtcggtgctttt

SEQ ID NO: 825 - DNA, 100 bp, Artificial Sequence
  source: /note="Description of Artificial Sequence: Synthetic polynucleotide"
ccagtgggggcaggtgtgccgttttagagctagaaatagcaagttaaaataaggctagtccgttatcaacttgaaaaagtggcaccgagtcggtgctttt

SEQ ID NO: 826 - DNA, 100 bp, Artificial Sequence
  source: /note="Description of Artificial Sequence: Synthetic polynucleotide"
cagtgggggcaggtgtgcctgttttagagctagaaatagcaagttaaaataaggctagtccgttatcaacttgaaaaagtggcaccgagtcggtgctttt

SEQ ID NO: 827 - DNA, 100 bp, Artificial Sequence
  source: /note="Description of Artificial Sequence: Synthetic polynucleotide"
gggcaggtgtgcctgggtccgttttagagctagaaatagcaagttaaaataaggctagtccgttatcaacttgaaaaagtggcaccgagtcggtgctttt

SEQ ID NO: 828 - DNA, 100 bp, Artificial Sequence
  source: /note="Description of Artificial Sequence: Synthetic polynucleotide"
aaagatctgctcctggacccgttttagagctagaaatagcaagttaaaataaggctagtccgttatcaacttgaaaaagtggcaccgagtcggtgctttt

SEQ ID NO: 829 - DNA, 100 bp, Artificial Sequence
  source: /note="Description of Artificial Sequence: Synthetic polynucleotide"
gagtgccaaagatctgctccgttttagagctagaaatagcaagttaaaataaggctagtccgttatcaacttgaaaaagtggcaccgagtcggtgctttt

SEQ ID NO: 830 - DNA, 100 bp, Artificial Sequence
  source: /note="Description of Artificial Sequence: Synthetic polynucleotide"
tgggtccaggagcagatcttgttttagagctagaaatagcaagttaaaataaggctagtccgttatcaacttgaaaaagtggcaccgagtcggtgctttt

SEQ ID NO: 831 - DNA, 100 bp, Artificial Sequence
  source: /note="Description of Artificial Sequence: Synthetic polynucleotide"
agatctttggcactcaacttgttttagagctagaaatagcaagttaaaataaggctagtccgttatcaacttgaaaaagtggcaccgagtcggtgctttt

SEQ ID NO: 832 - DNA, 100 bp, Artificial Sequence
  source: /note="Description of Artificial Sequence: Synthetic polynucleotide"
gatctttggcactcaactttgttttagagctagaaatagcaagttaaaataaggctagtccgttatcaacttgaaaaagtggcaccgagtcggtgctttt

SEQ ID NO: 833 - DNA, 100 bp, Artificial Sequence
  source: /note="Description of Artificial Sequence: Synthetic polynucleotide"
atctttggcactcaactttggttttagagctagaaatagcaagttaaaataaggctagtccgttatcaacttgaaaaagtggcaccgagtcggtgctttt

SEQ ID NO: 834 - DNA, 100 bp, Artificial Sequence
  source: /note="Description of Artificial Sequence: Synthetic polynucleotide"
tttggcactcaactttgggggttttagagctagaaatagcaagttaaaataaggctagtccgttatcaacttgaaaaagtggcaccgagtcggtgctttt

SEQ ID NO: 835 - DNA, 100 bp, Artificial Sequence
  source: /note="Description of Artificial Sequence: Synthetic polynucleotide"
ttggcactcaactttggggtgttttagagctagaaatagcaagttaaaataaggctagtccgttatcaacttgaaaaagtggcaccgagtcggtgctttt

SEQ ID NO: 836 - DNA, 100 bp, Artificial Sequence
  source: /note="Description of Artificial Sequence: Synthetic polynucleotide"
gcactcaactttggggtggggttttagagctagaaatagcaagttaaaataaggctagtccgttatcaacttgaaaaagtggcaccgagtcggtgctttt

SEQ ID NO: 837 - DNA, 100 bp, Artificial Sequence
  source: /note="Description of Artificial Sequence: Synthetic polynucleotide"
gggaggagaatgatacaaaagttttagagctagaaatagcaagttaaaataaggctagtccgttatcaacttgaaaaagtggcaccgagtcggtgctttt

SEQ ID NO: 838 - DNA, 100 bp, Artificial Sequence
  source: /note="Description of Artificial Sequence: Synthetic polynucleotide"
ggagaatgatacaaaatggtgttttagagctagaaatagcaagttaaaataaggctagtccgttatcaacttgaaaaagtggcaccgagtcggtgctttt

SEQ ID NO: 839 - DNA, 100 bp, Artificial Sequence
  source: /note="Description of Artificial Sequence: Synthetic polynucleotide"
aatgatacaaaatggtaggtgttttagagctagaaatagcaagttaaaataaggctagtccgttatcaacttgaaaaagtggcaccgagtcggtgctttt

SEQ ID NO: 840 - DNA, 100 bp, Artificial Sequence
  source: /note="Description of Artificial Sequence: Synthetic polynucleotide"
aaatggtaggttggtcctacgttttagagctagaaatagcaagttaaaataaggctagtccgttatcaacttgaaaaagtggcaccgagtcggtgctttt

SEQ ID NO: 841 - DNA, 100 bp, Artificial Sequence
  source: /note="Description of Artificial Sequence: Synthetic polynucleotide"
caacacctgtgctggcctgtgttttagagctagaaatagcaagttaaaataaggctagtccgttatcaacttgaaaaagtggcaccgagtcggtgctttt

SEQ ID NO: 842 - DNA, 100 bp, Artificial Sequence
  source: /note="Description of Artificial Sequence: Synthetic polynucleotide"
ttggtcctacaggccagcacgttttagagctagaaatagcaagttaaaataaggctagtccgttatcaacttgaaaaagtggcaccgagtcggtgctttt

SEQ ID NO: 843 - DNA, 100 bp, Artificial Sequence
  source: /note="Description of Artificial Sequence: Synthetic polynucleotide"
tcacttggcaacacctgtgcgttttagagctagaaatagcaagttaaaataaggctagtccgttatcaacttgaaaaagtggcaccgagtcggtgctttt

SEQ ID NO: 844 - DNA, 100 bp, Artificial Sequence
  source: /note="Description of Artificial Sequence: Synthetic polynucleotide"
ctgggcacatgggcttcactgttttagagctagaaatagcaagttaaaataaggctagtccgttatcaacttgaaaaagtggcaccgagtcggtgctttt

SEQ ID NO: 845 - DNA, 100 bp, Artificial Sequence
  source: /note="Description of Artificial Sequence: Synthetic polynucleotide"
atcactgtgcctgggcacatgttttagagctagaaatagcaagttaaaataaggctagtccgttatcaacttgaaaaagtggcaccgagtcggtgctttt

SEQ ID NO: 846 - DNA, 100 bp, Artificial Sequence
  source: /note="Description of Artificial Sequence: Synthetic polynucleotide"
gatcactgtgcctgggcacagttttagagctagaaatagcaagttaaaataaggctagtccgttatcaacttgaaaaagtggcaccgagtcggtgctttt

SEQ ID NO: 847 - DNA, 100 bp, Artificial Sequence
  source: /note="Description of Artificial Sequence: Synthetic polynucleotide"
caagtgaagcccatgtgcccgttttagagctagaaatagcaagttaaaataaggctagtccgttatcaacttgaaaaagtggcaccgagtcggtgctttt

SEQ ID NO: 848 - DNA, 100 bp, Artificial Sequence
  source: /note="Description of Artificial Sequence: Synthetic polynucleotide"
tgcctgtgatcactgtgcctgttttagagctagaaatagcaagttaaaataaggctagtccgttatcaacttgaaaaagtggcaccgagtcggtgctttt

SEQ ID NO: 849 - DNA, 100 bp, Artificial Sequence
  source: /note="Description of Artificial Sequence: Synthetic polynucleotide"
atgcctgtgatcactgtgccgttttagagctagaaatagcaagttaaaataaggctagtccgttatcaacttgaaaaagtggcaccgagtcggtgctttt

SEQ ID NO: 850 - DNA, 100 bp, Artificial Sequence
  source: /note="Description of Artificial Sequence: Synthetic polynucleotide"
tgcccaggcacagtgatcacgttttagagctagaaatagcaagttaaaataaggctagtccgttatcaacttgaaaaagtggcaccgagtcggtgctttt

SEQ ID NO: 851 - DNA, 100 bp, Artificial Sequence
  source: /note="Description of Artificial Sequence: Synthetic polynucleotide"
cacagtgatcacaggcattcgttttagagctagaaatagcaagttaaaataaggctagtccgttatcaacttgaaaaagtggcaccgagtcggtgctttt

SEQ ID NO: 852 - DNA, 100 bp, Artificial Sequence
  source: /note="Description of Artificial Sequence: Synthetic polynucleotide"
acagtgatcacaggcattctgttttagagctagaaatagcaagttaaaataaggctagtccgttatcaacttgaaaaagtggcaccgagtcggtgctttt

SEQ ID NO: 853 - DNA, 100 bp, Artificial Sequence
  source: /note="Description of Artificial Sequence: Synthetic polynucleotide"
atcacaggcattctgggtgagttttagagctagaaatagcaagttaaaataaggctagtccgttatcaacttgaaaaagtggcaccgagtcggtgctttt

SEQ ID NO: 854 - DNA, 100 bp, Artificial Sequence
  source: /note="Description of Artificial Sequence: Synthetic polynucleotide"
tcacaggcattctgggtgaagttttagagctagaaatagcaagttaaaataaggctagtccgttatcaacttgaaaaagtggcaccgagtcggtgctttt

SEQ ID NO: 855 - DNA, 100 bp, Artificial Sequence
  source: /note="Description of Artificial Sequence: Synthetic polynucleotide"
caggcattctgggtgaaggggttttagagctagaaatagcaagttaaaataaggctagtccgttatcaacttgaaaaagtggcaccgagtcggtgctttt

SEQ ID NO: 856 - DNA, 100 bp, Artificial Sequence
  source: /note="Description of Artificial Sequence: Synthetic polynucleotide"
tgggtgaagggaggcctgcagttttagagctagaaatagcaagttaaaataaggctagtccgttatcaacttgaaaaagtggcaccgagtcggtgctttt

SEQ ID NO: 857 - DNA, 100 bp, Artificial Sequence
  source: /note="Description of Artificial Sequence: Synthetic polynucleotide"
gggtgaagggaggcctgcaagttttagagctagaaatagcaagttaaaataaggctagtccgttatcaacttgaaaaagtggcaccgagtcggtgctttt

SEQ ID NO: 858 - DNA, 100 bp, Artificial Sequence
  source: /note="Description of Artificial Sequence: Synthetic polynucleotide"
tgctggaaattggcccttgcgttttagagctagaaatagcaagttaaaataaggctagtccgttatcaacttgaaaaagtggcaccgagtcggtgctttt

SEQ ID NO: 859 - DNA, 1176 bp, Homo sapiens
ctccgggagggggtgggggtgagggaaacaggagaatgtgatgggaaaatccgagatggagccagcctgggccagaaacactgggagctgtgggagacggagaggggcagggtgggatcacagggagcaggagcggggaattggaggtgaatctggccctcccaaacttccagtccattctgctcccaggggaaccgggaaactgcgggggaactggaagggagctcccagaacaaggatccagaagattggcatctggggcctgggatttaggtttctaaatcgtgggccatggggcagccttatctctgcaaaagcattgagggtagaagtcaatgatttgggaagttattgaattaggggatctcggaggtaggctgtcagtgcctgatagtatcagttagaatgcctgacttggggtgacaatggcttggaggggtgggtgagtcaagggtcaaatgagtgcccgtgagtcatgatgcctgccttgtacaattgataactgaacatcggtgagttagggccccagcagttgtaattagcaccccgggtgtcagccagaaaccaacaaacagccaaatccctgcagccccgcccagcctatccaccggcgggggaccgattaaccattaacccccacccctccccggcagagcctccaccccttcacagaggctaggccaagactcccagcagatcttcccagaggacggtttgaaaggaaggcagagagggcactgggaggaggcagtgggagggcggagggcgggggccttcggggtgggcgcccagggtagggcaggtggccgcggcgtggaggcagggagaatgcgactctccaaaaccctcgtcgacatggacatggccgactacagtgctgcactggacccagcctacaccaccctggaatttgagaatgtgcaggtgttgacgatgggcaatggtaggtgggggcagatgtgcccaggtgtgccagtgggggcaggtgtgcctgggtccaggagcagatctttggcactcaactttggggtgggaggagaatgatacaaaatggtaggttggtcctacaggccagcacaggtgttgccaagtgaagcccatgtgcccaggcacagtgatcacaggcattctgggtgaagggaggcctgcaagggccaatttccagcaaaagtcgat

SEQ ID NO: 860 - DNA, 1176 bp, Homo sapiens
atcgacttttgctggaaattggcccttgcaggcctcccttcacccagaatgcctgtgatcactgtgcctgggcacatgggcttcacttggcaacacctgtgctggcctgtaggaccaacctaccattttgtatcattctcctcccaccccaaagttgagtgccaaagatctgctcctggacccaggcacacctgcccccactggcacacctgggcacatctgcccccacctaccattgcccatcgtcaacacctgcacattctcaaattccagggtggtgtaggctgggtccagtgcagcactgtagtcggccatgtccatgtcgacgagggttttggagagtcgcattctccctgcctccacgccgcggccacctgccctaccctgggcgcccaccccgaaggcccccgccctccgccctcccactgcctcctcccagtgccctctctgccttcctttcaaaccgtcctctgggaagatctgctgggagtcttggcctagcctctgtgaaggggtggaggctctgccggggaggggtgggggttaatggttaatcggtcccccgccggtggataggctgggcggggctgcagggatttggctgtttgttggtttctggctgacacccggggtgctaattacaactgctggggccctaactcaccgatgttcagttatcaattgtacaaggcaggcatcatgactcacgggcactcatttgacccttgactcacccacccctccaagccattgtcaccccaagtcaggcattctaactgatactatcaggcactgacagcctacctccgagatcccctaattcaataacttcccaaatcattgacttctaccctcaatgcttttgcagagataaggctgccccatggcccacgatttagaaacctaaatcccaggccccagatgccaatcttctggatccttgttctgggagctcccttccagttcccccgcagtttcccggttcccctgggagcagaatggactggaagtttgggagggccagattcacctccaattccccgctcctgctccctgtgatcccaccctgcccctctccgtctcccacagctcccagtgtttctggcccaggctggctccatctcggattttcccatcacattctcctgtttccctcacccccaccccctcccggag

SEQ ID NO: 861 - DNA, 21 bp, Homo sapiens
agatggagccagcctgggcca

SEQ ID NO: 862 - DNA, 21 bp, Homo sapiens
cagcctgggccagaaacactg

SEQ ID NO: 863 - DNA, 21 bp, Homo sapiens
agccagcctgggccagaaaca

SEQ ID NO: 864 - DNA, 21 bp, Homo sapiens
tggagccagcctgggccagaa

SEQ ID NO: 865 - DNA, 21 bp, Homo sapiens
ccgagatggagccagcctggg

SEQ ID NO: 866 - DNA, 21 bp, Homo sapiens
aatccgagatggagccagcct

SEQ ID NO: 867 - DNA, 21 bp, Homo sapiens
aggagaatgtgatgggaaaat

SEQ ID NO: 868 - DNA, 21 bp, Homo sapiens
aacaggagaatgtgatgggaa

SEQ ID NO: 869 - DNA, 21 bp, Homo sapiens
tgatgggaaaatccgagatgg

SEQ ID NO: 870 - DNA, 21 bp, Homo sapiens
gaaaatccgagatggagccag

SEQ ID NO: 871 - DNA, 21 bp, Homo sapiens
tgggaaaatccgagatggagc

SEQ ID NO: 872 - DNA, 21 bp, Homo sapiens
cctgggccagaaacactggga

SEQ ID NO: 873 - DNA, 21 bp, Homo sapiens
ccagaaacactgggagctgtg

SEQ ID NO: 874 - DNA, 21 bp, Homo sapiens
gggccagaaacactgggagct

SEQ ID NO: 875 - DNA, 21 bp, Homo sapiens
gagggaaacaggagaatgtga

SEQ ID NO: 876 - DNA, 21 bp, Homo sapiens
ggaaacaggagaatgtgatgg

SEQ ID NO: 877 - DNA, 21 bp, Homo sapiens
atgtgatgggaaaatccgaga

SEQ ID NO: 878 - DNA, 21 bp, Homo sapiens
agaatgtgatgggaaaatccg

SEQ ID NO: 879 - DNA, 21 bp, Homo sapiens
gaaacactgggagctgtggga

SEQ ID NO: 880 - DNA, 21 bp, Homo sapiens
gtgggagacggagaggggcag

SEQ ID NO: 881 - DNA, 21 bp, Homo sapiens
acactgggagctgtgggagac

SEQ ID NO: 882 - DNA, 21 bp, Homo sapiens
gctgtgggagacggagagggg

SEQ ID NO: 883 - DNA, 21 bp, Homo sapiens
ctgggagctgtgggagacgga

SEQ ID NO: 884 - DNA, 21 bp, Homo sapiens
ggagctgtgggagacggagag

SEQ ID NO: 885 - DNA, 21 bp, Homo sapiens
gggggtgagggaaacaggaga

SEQ ID NO: 886 - DNA, 21 bp, Homo sapiens
gacggagaggggcagggtggg

SEQ ID NO: 887 - DNA, 21 bp, Homo sapiens
ggtgagggaaacaggagaatg

SEQ ID NO: 888 - DNA, 21 bp, Homo sapiens
ggagacggagaggggcagggt

SEQ ID NO: 889 - DNA, 21 bp, Homo sapiens
gggggtgggggtgagggaaac

SEQ ID NO: 890 - DNA, 21 bp, Homo sapiens
ggtgggggtgagggaaacagg

SEQ ID NO: 891 - DNA, 21 bp, Homo sapiens
ggagggggtgggggtgaggga

SEQ ID NO: 892 - DNA, 21 bp, Homo sapiens
ccgggagggggtgggggtgag

SEQ ID NO: 893 - DNA, 21 bp, Homo sapiens
cgggagggggtgggggtgagg

SEQ ID NO: 894 - DNA, 21 bp, Homo sapiens
gagggggtgggggtgagggaa

SEQ ID NO: 895 - DNA, 21 bp, Homo sapiens
ggggtgggggtgagggaaaca

SEQ ID NO: 896 - DNA, 21 bp, Homo sapiens
gtgggggtgagggaaacagga

SEQ ID NO: 897 - DNA, 21 bp, Homo sapiens
ggggtgagggaaacaggagaa

SEQ ID NO: 898 - DNA, 21 bp, Homo sapiens
gggtgagggaaacaggagaat

SEQ ID NO: 899 - DNA, 21 bp, Homo sapiens
gggtgggggtgagggaaacag

SEQ ID NO: 900 - DNA, 21 bp, Homo sapiens
tgagggaaacaggagaatgtg

SEQ ID NO: 901 - DNA, 21 bp, Homo sapiens
tgggggtgagggaaacaggag

SEQ ID NO: 902 - DNA, 21 bp, Homo sapiens
gggagggggtgggggtgaggg

SEQ ID NO: 903 - DNA, 21 bp, Homo sapiens
agggggtgggggtgagggaaa

SEQ ID NO: 904 - DNA, 21 bp, Homo sapiens
gggaaacaggagaatgtgatg

SEQ ID NO: 905 - DNA, 21 bp, Homo sapiens
aaacaggagaatgtgatggga

SEQ ID NO: 906 - DNA, 21 bp, Homo sapiens
caggagaatgtgatgggaaaa

SEQ ID NO: 907 - DNA, 21 bp, Homo sapiens
ggccagaaacactgggagctg

SEQ ID NO: 908 - DNA, 21 bp, Homo sapiens
ctgggccagaaacactgggag

SEQ ID NO: 909 - DNA, 21 bp, Homo sapiens
aaacactgggagctgtgggag

SEQ ID NO: 910 - DNA, 21 bp, Homo sapiens
gccagcctgggccagaaacac

SEQ ID NO: 911 - DNA, 21 bp, Homo sapiens
agcctgggccagaaacactgg

SEQ ID NO: 912 - DNA, 21 bp, Homo sapiens
cagaaacactgggagctgtgg

SEQ ID NO: 913 - DNA, 21 bp, Homo sapiens
gatggagccagcctgggccag

SEQ ID NO: 914 - DNA, 21 bp, Homo sapiens
ggagccagcctgggccagaaa

SEQ ID NO: 915 - DNA, 21 bp, Homo sapiens
tgggagctgtgggagacggag

SEQ ID NO: 916 - DNA, 21 bp, Homo sapiens
gagctgtgggagacggagagg

SEQ ID NO: 917 - DNA, 21 bp, Homo sapiens
ctgtgggagacggagaggggc

SEQ ID NO: 918 - DNA, 21 bp, Homo sapiens
gagacggagaggggcagggtg

SEQ ID NO: 919 - DNA, 21 bp, Homo sapiens
tgggagacggagaggggcagg

SEQ ID NO: 920 - DNA, 21 bp, Homo sapiens
cactgggagctgtgggagacg

SEQ ID NO: 921 - DNA, 21 bp, Homo sapiens
acggagaggggcagggtggga

SEQ ID NO: 922 - DNA, 21 bp, Homo sapiens
cgagatggagccagcctgggc

SEQ ID NO: 923 - DNA, 21 bp, Homo sapiens
gcctgggccagaaacactggg

SEQ ID NO: 924 - DNA, 21 bp, Homo sapiens
ccagcctgggccagaaacact

SEQ ID NO: 925 - DNA, 21 bp, Homo sapiens
tgggccagaaacactgggagc

SEQ ID NO: 926 - DNA, 21 bp, Homo sapiens
gagccagcctgggccagaaac

SEQ ID NO: 927 - DNA, 21 bp, Homo sapiens
atggagccagcctgggccaga

SEQ ID NO: 928 - DNA, 21 bp, Homo sapiens
gagatggagccagcctgggcc

SEQ ID NO: 929 - DNA, 21 bp, Homo sapiens
gggagacggagaggggcaggg

SEQ ID NO: 930 - DNA, 21 bp, Homo sapiens
agacggagaggggcagggtgg

SEQ ID NO: 931 - DNA, 21 bp, Homo sapiens
cggagaggggcagggtgggat

SEQ ID NO: 932 - DNA, 21 bp, Homo sapiens
agaggggcagggtgggatcac

SEQ ID NO: 933 - DNA, 21 bp, Homo sapiens
gatcacagggagcaggagcgg

SEQ ID NO: 934 - DNA, 21 bp, Homo sapiens
ggggcagggtgggatcacagg

SEQ ID NO: 935 - DNA, 21 bp, Homo sapiens
gggtgggatcacagggagcag

SEQ ID NO: 936 - DNA, 21 bp, Homo sapiens
tgggatcacagggagcaggag

SEQ ID NO: 937 - DNA, 21 bp, Homo sapiens
gcagggtgggatcacagggag

SEQ ID NO: 938 - DNA, 21 bp, Homo sapiens
agggagcaggagcggggaatt

SEQ ID NO: 939 - DNA, 21 bp, Homo sapiens
cacagggagcaggagcgggga

SEQ ID NO: 940 - DNA, 21 bp, Homo sapiens
gagcaggagcggggaattgga

SEQ ID NO: 941 - DNA, 21 bp, Homo sapiens
caggagcggggaattggaggt

SEQ ID NO: 942 - DNA, 21 bp, Homo sapiens
gagcggggaattggaggtgaa

SEQ ID NO: 943 - DNA, 21 bp, Homo sapiens
acagggagcaggagcggggaa

SEQ ID NO: 944 - DNA, 21 bp, Homo sapiens
gcaggagcggggaattggagg

SEQ ID NO: 945 - DNA, 21 bp, Homo sapiens
ggagcggggaattggaggtga

SEQ ID NO: 946 - DNA, 21 bp, Homo sapiens
cagggagcaggagcggggaat

SEQ ID NO: 947 - DNA, 21 bp, Homo sapiens
ggagcaggagcggggaattgg

SEQ ID NO: 948 - DNA, 21 bp, Homo sapiens
ggccctcccaaacttccagtc

SEQ ID NO: 949 - DNA, 21 bp, Homo sapiens
cctcccaaacttccagtccat

SEQ ID NO: 950 - DNA, 21 bp, Homo sapiens
gggaaactgcgggggaactgg

SEQ ID NO: 951 - DNA, 21 bp, Homo sapiens
accgggaaactgcgggggaac

SEQ ID NO: 952 - DNA, 21 bp, Homo sapiens
aaactgcgggggaactggaag

SEQ ID NO: 953 - DNA, 21 bp, Homo sapiens
ggaaccgggaaactgcggggg

SEQ ID NO: 954 - DNA, 21 bp, Homo sapiens
aggggaaccgggaaactgcgg

SEQ ID NO: 955 - DNA, 21 bp, Homo sapiens
ctgcgggggaactggaaggga

SEQ ID NO: 956 - DNA, 21 bp, Homo sapiens
cgggggaactggaagggagct

SEQ ID NO: 957 - DNA, 21 bp, Homo sapiens
cccaggggaaccgggaaactg

SEQ ID NO: 958 - DNA, 21 bp, Homo sapiens
gctcccaggggaaccgggaaa

SEQ ID NO: 959 - DNA, 21 bp, Homo sapiens
gggaactggaagggagctccc

SEQ ID NO: 960 - DNA, 21 bp, Homo sapiens
aactggaagggagctcccaga

SEQ ID NO: 961 - DNA, 21 bp, Homo sapiens
tggaagggagctcccagaaca

SEQ ID NO: 962 - DNA, 21 bp, Homo sapiens
aagggagctcccagaacaagg

SEQ ID NO: 963 - DNA, 21 bp, Homo sapiens
caggggaaccgggaaactgcg

SEQ ID NO: 964 - DNA, 21 bp, Homo sapiens
gggaaccgggaaactgcgggg

SEQ ID NO: 965 - DNA, 21 bp, Homo sapiens
aaccgggaaactgcgggggaa

SEQ ID NO: 966 - DNA, 21 bp, Homo sapiens
gcgggggaactggaagggagc

SEQ ID NO: 967 - DNA, 21 bp, Homo sapiens
actgcgggggaactggaaggg

SEQ ID NO: 968 - DNA, 21 bp, Homo sapiens
cgggaaactgcgggggaactg

SEQ ID NO: 969 - DNA, 21 bp, Homo sapiens
gaaactgcgggggaactggaa

SEQ ID NO: 970 - DNA, 21 bp, Homo sapiens
catctggggcctgggatttag

SEQ ID NO: 971 - DNA, 21 bp, Homo sapiens
gattggcatctggggcctggg

SEQ ID NO: 972 - DNA, 21 bp, Homo sapiens
tggcatctggggcctgggatt

SEQ ID NO: 973 - DNA, 21 bp, Homo sapiens
cagaacaaggatccagaagat

SEQ ID NO: 974 - DNA, 21 bp, Homo sapiens
gaagattggcatctggggcct

SEQ ID NO: 975 - DNA, 21 bp, Homo sapiens
aacaaggatccagaagattgg

SEQ ID NO: 976 - DNA, 21 bp, Homo sapiens
ccagaagattggcatctgggg

SEQ ID NO: 977 - DNA, 21 bp, Homo sapiens
gatccagaagattggcatctg

SEQ ID NO: 978 - DNA, 21 bp, Homo sapiens
aaggatccagaagattggcat

SEQ ID NO: 979 - DNA, 21 bp, Homo sapiens
ctggggcctgggatttaggtt

SEQ ID NO: 980 - DNA, 21 bp, Homo sapiens
ctaaatcgtgggccatggggc

SEQ ID NO: 981 - DNA, 21 bp, Homo sapiens
aatcgtgggccatggggcagc

SEQ ID NO: 982 - DNA, 21 bp, Homo sapiens
cgtgggccatggggcagcctt

SEQ ID NO: 983 - DNA, 21 bp, Homo sapiens
ctgcaaaagcattgagggtag

SEQ ID NO: 984 - DNA, 21 bp, Homo sapiens
caaaagcattgagggtagaag

SEQ ID NO: 985 - DNA, 21 bp, Homo sapiens
aaaagcattgagggtagaagt

SEQ ID NO: 986 - DNA, 21 bp, Homo sapiens
attgagggtagaagtcaatga

SEQ ID NO: 987 - DNA, 21 bp, Homo sapiens
agcattgagggtagaagtcaa

SEQ ID NO: 988 - DNA, 21 bp, Homo sapiens
atgatttgggaagttattgaa

SEQ ID NO: 989 - DNA, 21 bp, Homo sapiens
taggctgtcagtgcctgatag

SEQ ID NO: 990 - DNA, 21 bp, Homo sapiens
aggtaggctgtcagtgcctga

SEQ ID NO: 991 - DNA, 21 bp, Homo sapiens
cggaggtaggctgtcagtgcc

SEQ ID NO: 992 - DNA, 21 bp, Homo sapiens
tagaatgcctgacttggggtg

SEQ ID NO: 993 - DNA, 21 bp, Homo sapiens
aatgcctgacttggggtgaca

SEQ ID NO: 994 - DNA, 21 bp, Homo sapiens
agttagaatgcctgacttggg

SEQ ID NO: 995 - DNA, 21 bp, Homo sapiens
gcctgacttggggtgacaatg

SEQ ID NO: 996 - DNA, 21 bp, Homo sapiens
ggggtgacaatggcttggagg

SEQ ID NO: 997 - DNA, 21 bp, Homo sapiens
tgacttggggtgacaatggct

SEQ ID NO: 998 - DNA, 21 bp, Homo sapiens
gcttggaggggtgggtgagtc

SEQ ID NO: 999 - DNA, 21 bp, Homo sapiens
tggaggggtgggtgagtcaag

SEQ ID NO: 1000 - DNA, 21 bp, Homo sapiens
gtgacaatggcttggaggggt

SEQ ID NO: 1001 - DNA, 21 bp, Homo sapiens
atggcttggaggggtgggtga

SEQ ID NO: 1002 - DNA, 21 bp, Homo sapiens
acaatggcttggaggggtggg

SEQ ID NO: 1003 - DNA, 21 bp, Homo sapiens
gggtgagtcaagggtcaaatg

SEQ ID NO: 1004 - DNA, 21 bp, Homo sapiens
ggtcaaatgagtgcccgtgag

SEQ ID NO: 1005 - DNA, 21 bp, Homo sapiens
tgagtcaagggtcaaatgagt

SEQ ID NO: 1006 - DNA, 21 bp, Homo sapiens
gtcaagggtcaaatgagtgcc

SEQ ID NO: 1007 - DNA, 21 bp, Homo sapiens
aagggtcaaatgagtgcccgt

SEQ ID NO: 1008 - DNA, 21 bp, Homo sapiens
aggggtgggtgagtcaagggt

SEQ ID NO: 1009 - DNA, 21 bp, Homo sapiens
ggtgggtgagtcaagggtcaa

SEQ ID NO: 1010 - DNA, 21 bp, Homo sapiens
ctgacttggggtgacaatggc

SEQ ID NO: 1011 - DNA, 21 bp, Homo sapiens
gggtgacaatggcttggaggg

SEQ ID NO: 1012 - DNA, 21 bp, Homo sapiens
tgacaatggcttggaggggtg

SEQ ID NO: 1013 - DNA, 21 bp, Homo sapiens
tggcttggaggggtgggtgag

SEQ ID NO: 1014 - DNA, 21 bp, Homo sapiens
caatggcttggaggggtgggt

SEQ ID NO: 1015 - DNA, 21 bp, Homo sapiens
gaggggtgggtgagtcaaggg

SEQ ID NO: 1016 - DNA, 21 bp, Homo sapiens
agggtcaaatgagtgcccgtg

SEQ ID NO: 1017 - DNA, 21 bp, Homo sapiens
gtcaaatgagtgcccgtgagt

SEQ ID NO: 1018 - DNA, 21 bp, Homo sapiens
aaatgagtgcccgtgagtcat

SEQ ID NO: 1019 - DNA, 21 bp, Homo sapiens
tgagtgcccgtgagtcatgat

SEQ ID NO: 1020 - DNA, 21 bp, Homo sapiens
gtgcccgtgagtcatgatgcc

SEQ ID NO: 1021 - DNA, 21 bp, Homo sapiens
ccgtgagtcatgatgcctgcc

SEQ ID NO: 1022 - DNA, 21 bp, Homo sapiens
gtcagccagaaaccaacaaac

SEQ ID NO: 1023 - DNA, 21 bp, Homo sapiens
agccagaaaccaacaaacagc

SEQ ID NO: 1024 - DNA, 21 bp, Homo sapiens
cagaaaccaacaaacagccaa

SEQ ID NO: 1025 - DNA, 21 bp, Homo sapiens
gccccagcagttgtaattagc

SEQ ID NO: 1026 - DNA, 21 bp, Homo sapiens
cggtgagttagggccccagca

SEQ ID NO: 1027 - DNA, 21 bp, Homo sapiens
ggtgtcagccagaaaccaaca

SEQ ID NO: 1028 - DNA, 21 bp, Homo sapiens
agggccccagcagttgtaatt

SEQ ID NO: 1029 - DNA, 21 bp, Homo sapiens
ccagcagttgtaattagcacc

SEQ ID NO: 1030 - DNA, 21 bp, Homo sapiens
ataactgaacatcggtgagtt

SEQ ID NO: 1031 - DNA, 21 bp, Homo sapiens
catcggtgagttagggcccca

SEQ ID NO: 1032 - DNA, 21 bp, Homo sapiens
gaacatcggtgagttagggcc

SEQ ID NO: 1033 - DNA, 21 bp, Homo sapiens
accccgggtgtcagccagaaa

SEQ ID NO: 1034 - DNA, 21 bp, Homo sapiens
agcaccccgggtgtcagccag

SEQ ID NO: 1035 - DNA, 21 bp, Homo sapiens
gcagttgtaattagcaccccg

SEQ ID NO: 1036 - DNA, 21 bp, Homo sapiens
attagcaccccgggtgtcagc

SEQ ID NO: 1037 - DNA, 21 bp, Homo sapiens
gtaattagcaccccgggtgtc

SEQ ID NO: 1038 - DNA, 21 bp, Homo sapiens
tgagttagggccccagcagtt

SEQ ID NO: 1039 - DNA, 21 bp, Homo sapiens
gttagggccccagcagttgta

SEQ ID NO: 1040 - DNA, 21 bp, Homo sapiens
gttgtaattagcaccccgggt

SEQ ID NO: 1041 - DNA, 21 bp, Homo sapiens
gtgagttagggccccagcagt

SEQ ID NO: 1042 - DNA, 21 bp, Homo sapiens
cagccagaaaccaacaaacag

SEQ ID NO: 1043 - DNA, 21 bp, Homo sapiens
gaaaccaacaaacagccaaat

SEQ ID NO: 1044 - DNA, 21 bp, Homo sapiens
ccagaaaccaacaaacagcca

SEQ ID NO: 1045 - DNA, 21 bp, Homo sapiens
accaacaaacagccaaatccc

SEQ ID NO: 1046 - DNA, 21 bp, Homo sapiens
gccagaaaccaacaaacagcc

SEQ ID NO: 1047 - DNA, 21 bp, Homo sapiens
agaaaccaacaaacagccaaa

SEQ ID NO: 1048 - DNA, 21 bp, Homo sapiens
accggcgggggaccgattaac

SEQ ID NO: 1049 - DNA, 21 bp, Homo sapiens
acccccacccctccccggcag

SEQ ID NO: 1050 - DNA, 21 bp, Homo sapiens
cacagaggctaggccaagact

SEQ ID NO: 1051 - DNA, 21 bp, Homo sapiens
cttcacagaggctaggccaag

SEQ ID NO: 1052 - DNA, 21 bp, Homo sapiens
taggccaagactcccagcaga

SEQ ID NO: 1053 - DNA, 21 bp, Homo sapiens
ggctaggccaagactcccagc

SEQ ID NO: 1054 - DNA, 21 bp, Homo sapiens
ccccttcacagaggctaggcc

SEQ ID NO: 1055 - DNA, 21 bp, Homo sapiens
ccaccccttcacagaggctag

SEQ ID NO: 1056 - DNA, 21 bp, Homo sapiens
cctccaccccttcacagaggc

SEQ ID NO: 1057 - DNA, 21 bp, Homo sapiens
gcagagcctccaccccttcac

SEQ ID NO: 1058 - DNA, 21 bp, Homo sapiens
gagcctccaccccttcacaga

SEQ ID NO: 1059 - DNA, 21 bp, Homo sapiens
ccggcagagcctccacccctt

SEQ ID NO: 1060 - DNA, 21 bp, Homo sapiens
gcagatcttcccagaggacgg

SEQ ID NO: 1061 - DNA, 21 bp, Homo sapiens
ggcagagagggcactgggagg

SEQ ID NO: 1062 - DNA, 21 bp, Homo sapiens
gaaggcagagagggcactggg

SEQ ID NO: 1063 - DNA, 21 bp, Homo sapiens
gagggcactgggaggaggcag

SEQ ID NO: 1064 - DNA, 21 bp, Homo sapiens
agagagggcactgggaggagg

SEQ ID NO: 1065 - DNA, 21 bp, Homo sapiens
gggaggaggcagtgggagggc

SEQ ID NO: 1066 - DNA, 21 bp, Homo sapiens
ggcactgggaggaggcagtgg

SEQ ID NO: 1067 - DNA, 21 bp, Homo sapiens
gagggcggagggcgggggcct

SEQ ID NO: 1068 - DNA, 21 bp, Homo sapiens
actgggaggaggcagtgggag

SEQ ID NO: 1069 - DNA, 21 bp, Homo sapiens
tgaaaggaaggcagagagggc

SEQ ID NO: 1070 - DNA, 21 bp, Homo sapiens
aaggaaggcagagagggcact

SEQ ID NO: 1071 - DNA, 21 bp, Homo sapiens
tgggagggcggagggcggggg

SEQ ID NO: 1072 - DNA, 21 bp, Homo sapiens
cagtgggagggcggagggcgg

SEQ ID NO: 1073 - DNA, 21 bp, Homo sapiens
aggcagtgggagggcggaggg

SEQ ID NO: 1074 - DNA, 21 bp, Homo sapiens
aggaggcagtgggagggcgga

SEQ ID NO: 1075 - DNA, 21 bp, Homo sapiens
acggtttgaaaggaaggcaga

SEQ ID NO: 1076 - DNA, 21 bp, Homo sapiens
aggacggtttgaaaggaaggc

SEQ ID NO: 1077 - DNA, 21 bp, Homo sapiens
cagaggacggtttgaaaggaa

SEQ ID NO: 1078 - DNA, 21 bp, Homo sapiens
gggcgcccagggtagggcagg

SEQ ID NO: 1079 - DNA, 21 bp, Homo sapiens
cgcccagggtagggcaggtgg

SEQ ID NO: 1080 - DNA, 21 bp, Homo sapiens
gggagggcggagggcgggggc

SEQ ID NO: 1081 - DNA, 21 bp, Homo sapiens
cggcgtggaggcagggagaat

SEQ ID NO: 1082 - DNA, 21 bp, Homo sapiens
aggaaggcagagagggcactg

SEQ ID NO: 1083 - DNA, 21 bp, Homo sapiens
tagggcaggtggccgcggcgt

SEQ ID NO: 1084 - DNA, 21 bp, Homo sapiens
gggtagggcaggtggccgcgg

SEQ ID NO: 1085 - DNA, 21 bp, Homo sapiens
ccagggtagggcaggtggccg

SEQ ID NO: 1086 - DNA, 21 bp, Homo sapiens
gcggagggcgggggccttcgg

SEQ ID NO: 1087 - DNA, 21 bp, Homo sapiens
gaaaggaaggcagagagggca

SEQ ID NO: 1088 - DNA, 21 bp, Homo sapiens
ggcagtgggagggcggagggc

SEQ ID NO: 1089 - DNA, 21 bp, Homo sapiens
agtgggagggcggagggcggg

SEQ ID NO: 1090 - DNA, 21 bp, Homo sapiens
agggcggagggcgggggcctt

SEQ ID NO: 1091 - DNA, 21 bp, Homo sapiens
aaggcagagagggcactggga

SEQ ID NO: 1092 - DNA, 21 bp, Homo sapiens
cgtggaggcagggagaatgcg

SEQ ID NO: 1093 - DNA, 21 bp, Homo sapiens
gcagagagggcactgggagga

SEQ ID NO: 1094 - DNA, 21 bp, Homo sapiens
gagagggcactgggaggaggc

SEQ ID NO: 1095 - DNA, 21 bp, Homo sapiens
aggtggccgcggcgtggaggc

SEQ ID NO: 1096 - DNA, 21 bp, Homo sapiens
tggccgcggcgtggaggcagg

SEQ ID NO: 1097 - DNA, 21 bp, Homo sapiens
ggcaggtggccgcggcgtgga

SEQ ID NO: 1098 - DNA, 21 bp, Homo sapiens
ggaggcagggagaatgcgact

SEQ ID NO: 1099 - DNA, 21 bp, Homo sapiens
gcactgggaggaggcagtggg

SEQ ID NO: 1100 - DNA, 21 bp, Homo sapiens
ggaggcagtgggagggcggag

SEQ ID NO: 1101 - DNA, 21 bp, Homo sapiens
agggcactgggaggaggcagt

SEQ ID NO: 1102 - DNA, 21 bp, Homo sapiens
ctgggaggaggcagtgggagg

SEQ ID NO: 1103 - DNA, 21 bp, Homo sapiens
ggtgggcgcccagggtagggc

SEQ ID NO: 1104 - DNA, 21 bp, Homo sapiens
cggggtgggcgcccagggtag

SEQ ID NO: 1105 - DNA, 21 bp, Homo sapiens
ggcgggggccttcggggtggg

SEQ ID NO: 1106 - DNA, 21 bp, Homo sapiens
gagggcgggggccttcggggt

SEQ ID NO: 1107 - DNA, 21 bp, Homo sapiens
gggggccttcggggtgggcgc

SEQ ID NO: 1108 - DNA, 21 bp, Homo sapiens
ggaggaggcagtgggagggcg

SEQ ID NO: 1109 - DNA, 21 bp, Homo sapiens
ggccttcggggtgggcgccca

SEQ ID NO: 1110 - DNA, 21 bp, Homo sapiens
cttcggggtgggcgcccaggg

SEQ ID NO: 1111 - DNA, 21 bp, Homo sapiens
cagagagggcactgggaggag

SEQ ID NO: 1112 - DNA, 21 bp, Homo sapiens
agagggcactgggaggaggca

SEQ ID NO: 1113 - DNA, 21 bp, Homo sapiens
gggcactgggaggaggcagtg

SEQ ID NO: 1114 - DNA, 21 bp, Homo sapiens
aggcagagagggcactgggag

SEQ ID NO: 1115 - DNA, 21 bp, Homo sapiens
gaggaggcagtgggagggcgg

SEQ ID NO: 1116 - DNA, 21 bp, Homo sapiens
tgggaggaggcagtgggaggg

SEQ ID NO: 1117 - DNA, 21 bp, Homo sapiens
gaggcagtgggagggcggagg

SEQ ID NO: 1118 - DNA, 21 bp, Homo sapiens
cactgggaggaggcagtggga

SEQ ID NO: 1119 - DNA, 21 bp, Homo sapiens
aaaggaaggcagagagggcac

SEQ ID NO: 1120 - DNA, 21 bp, Homo sapiens
ggaaggcagagagggcactgg

SEQ ID NO: 1121 - DNA, 21 bp, Homo sapiens
gtgggagggcggagggcgggg

SEQ ID NO: 1122 - DNA, 21 bp, Homo sapiens
gcagtgggagggcggagggcg

SEQ ID NO: 1123 - DNA, 21 bp, Homo sapiens
ggagggcggagggcgggggcc

SEQ ID NO: 1124 - DNA, 21 bp, Homo sapiens
cgcggcgtggaggcagggaga

SEQ ID NO: 1125 - DNA, 21 bp, Homo sapiens
ggccgcggcgtggaggcaggg

SEQ ID NO: 1126 - DNA, 21 bp, Homo sapiens
ggcgtggaggcagggagaatg

SEQ ID NO: 1127 - DNA, 21 bp, Homo sapiens
gtggaggcagggagaatgcga

SEQ ID NO: 1128 - DNA, 21 bp, Homo sapiens
ggggtgggcgcccagggtagg

SEQ ID NO: 1129 - DNA, 21 bp, Homo sapiens
gtgggcgcccagggtagggca

SEQ ID NO: 1130 - DNA, 21 bp, Homo sapiens
gcaggtggccgcggcgtggag

SEQ ID NO: 1131 - DNA, 21 bp, Homo sapiens
ggtggccgcggcgtggaggca

SEQ ID NO: 1132 - DNA, 21 bp, Homo sapiens
agggcaggtggccgcggcgtg

SEQ ID NO: 1133 - DNA, 21 bp, Homo sapiens
gcccagggtagggcaggtggc

SEQ ID NO: 1134 - DNA, 21 bp, Homo sapiens
ggcgcccagggtagggcaggt

SEQ ID NO: 1135 - DNA, 21 bp, Homo sapiens
cagggtagggcaggtggccgc

SEQ ID NO: 1136 - DNA, 21 bp, Homo sapiens
ggtagggcaggtggccgcggc

SEQ ID NO: 1137 - DNA, 21 bp, Homo sapiens
agggtagggcaggtggccgcg

SEQ ID NO: 1138 - DNA, 21 bp, Homo sapiens
cccagggtagggcaggtggcc

SEQ ID NO: 1139 - DNA, 21 bp, Homo sapiens
gtagggcaggtggccgcggcg

SEQ ID NO: 1140 - DNA, 21 bp, Homo sapiens
gggcaggtggccgcggcgtgg

SEQ ID NO: 1141 - DNA, 21 bp, Homo sapiens
gtggccgcggcgtggaggcag

SEQ ID NO: 1142 - DNA, 21 bp, Homo sapiens
caggtggccgcggcgtggagg

SEQ ID NO: 1143 - DNA, 21 bp, Homo sapiens
gcgcccagggtagggcaggtg

SEQ ID NO: 1144 - DNA, 21 bp, Homo sapiens
gggtgggcgcccagggtaggg

SEQ ID NO: 1145 - DNA, 21 bp, Homo sapiens
tgggcgcccagggtagggcag

SEQ ID NO: 1146 - DNA, 21 bp, Homo sapiens
gcggcgtggaggcagggagaa

SEQ ID NO: 1147 - DNA, 21 bp, Homo sapiens
gccgcggcgtggaggcaggga

SEQ ID NO: 1148 - DNA, 21 bp, Homo sapiens
aaccctcgtcgacatggacat

SEQ ID NO: 1149 - DNA, 21 bp, Homo sapiens
cctcgtcgacatggacatggc

SEQ ID NO: 1150 - DNA, 21 bp, Homo sapiens
catggacatggccgactacag

SEQ ID NO: 1151 - DNA, 21 bp, Homo sapiens
caaaaccctcgtcgacatgga

SEQ ID NO: 1152 - DNA, 21 bp, Homo sapiens
cgtcgacatggacatggccga

SEQ ID NO: 1153 - DNA, 21 bp, Homo sapiens
cgacatggacatggccgacta

SEQ ID NO: 1154 - DNA, 21 bp, Homo sapiens
gtcgacatggacatggccgac

SEQ ID NO: 1155 - DNA, 21 bp, Homo sapiens
gtgctgcactggacccagcct

SEQ ID NO: 1156 - DNA, 21 bp, Homo sapiens
acagtgctgcactggacccag

SEQ ID NO: 1157 - DNA, 21 bp, Homo sapiens
ctgcactggacccagcctaca

SEQ ID NO: 1158 - DNA, 21 bp, Homo sapiens
cactggacccagcctacacca

SEQ ID NO: 1159 - DNA, 21 bp, Homo sapiens
actacagtgctgcactggacc

SEQ ID NO: 1160 - DNA, 21 bp, Homo sapiens
acatggccgactacagtgctg

SEQ ID NO: 1161 - DNA, 21 bp, Homo sapiens
tggacatggccgactacagtg

SEQ ID NO: 1162 - DNA, 21 bp, Homo sapiens
cagcctacaccaccctggaat

SEQ ID NO: 1163 - DNA, 21 bp, Homo sapiens
acatggacatggccgactaca

SEQ ID NO: 1164 - DNA, 21 bp, Homo sapiens
tggacccagcctacaccaccc

SEQ ID NO: 1165 - DNA, 21 bp, Homo sapiens
acccagcctacaccaccctgg

SEQ ID NO: 1166 - DNA, 21 bp, Homo sapiens
ccgactacagtgctgcactgg

SEQ ID NO: 1167 - DNA, 21 bp, Homo sapiens
tggccgactacagtgctgcac

SEQ ID NO: 1168 - DNA, 21 bp, Homo sapiens
agtgctgcactggacccagcc

SEQ ID NO: 1169 - DNA, 21 bp, Homo sapiens
ctacaccaccctggaatttga

SEQ ID NO: 1170 - DNA, 21 bp, Homo sapiens
agcctacaccaccctggaatt

SEQ ID NO: 1171 - DNA, 21 bp, Homo sapiens
caccaccctggaatttgagaa

SEQ ID NO: 1172 - DNA, 21 bp, Homo sapiens
ggacccagcctacaccaccct

SEQ ID NO: 1173 - DNA, 21 bp, Homo sapiens
cccagcctacaccaccctgga

SEQ ID NO: 1174 - DNA, 21 bp, Homo sapiens
actggacccagcctacaccac

SEQ ID NO: 1175 - DNA, 21 bp, Homo sapiens
tggtaggtgggggcagatgtg

SEQ ID NO: 1176 - DNA, 21 bp, Homo sapiens
taggtgggggcagatgtgccc

SEQ ID NO: 1177 - DNA, 21 bp, Homo sapiens
gatgggcaatggtaggtgggg

SEQ ID NO: 1178 - DNA, 21 bp, Homo sapiens
gggcaatggtaggtgggggca

SEQ ID NO: 1179 - DNA, 21 bp, Homo sapiens
caatggtaggtgggggcagat

SEQ ID NO: 1180 - DNA, 21 bp, Homo sapiens
gtgggggcagatgtgcccagg

SEQ ID NO: 1181 - DNA, 21 bp, Homo sapiens
gacgatgggcaatggtaggtg

SEQ ID NO: 1182 - DNA, 21 bp, Homo sapiens
gttgacgatgggcaatggtag

SEQ ID NO: 1183 - DNA, 21 bp, Homo sapiens
gcaggtgttgacgatgggcaa

SEQ ID NO: 1184 - DNA, 21 bp, Homo sapiens
ggtgttgacgatgggcaatgg

SEQ ID NO: 1185 - DNA, 21 bp, Homo sapiens
gcaatggtaggtgggggcaga

SEQ ID NO: 1186 - DNA, 21 bp, Homo sapiens
tgggcaatggtaggtgggggc

SEQ ID NO: 1187 - DNA, 21 bp, Homo sapiens
tgacgatgggcaatggtaggt

SEQ ID NO: 1188 - DNA, 21 bp, Homo sapiens
cgatgggcaatggtaggtggg

SEQ ID NO: 1189 - DNA, 21 bp, Homo sapiens
ggcaatggtaggtgggggcag

SEQ ID NO: 1190 - DNA, 21 bp, Homo sapiens
atgggcaatggtaggtggggg

SEQ ID NO: 1191 - DNA, 21 bp, Homo sapiens
aatggtaggtgggggcagatg

SEQ ID NO: 1192 - DNA, 21 bp, Homo sapiens
acgatgggcaatggtaggtgg

SEQ ID NO: 1193 - DNA, 21 bp, Homo sapiens
gtgggggcaggtgtgcctggg

SEQ ID NO: 1194 - DNA, 21 bp, Homo sapiens
ccagtgggggcaggtgtgcct

SEQ ID NO: 1195 - DNA, 21 bp, Homo sapiens
gtgccagtgggggcaggtgtg

SEQ ID NO: 1196 - DNA, 21 bp, Homo sapiens
ccaggtgtgccagtgggggca

SEQ ID NO: 1197 - DNA, 21 bp, Homo sapiens
ggtgtgccagtgggggcaggt

SEQ ID NO: 1198 - DNA, 21 bp, Homo sapiens
ccaggagcagatctttggcac

SEQ ID NO: 1199 - DNA, 21 bp, Homo sapiens
ctgggtccaggagcagatctt

SEQ ID NO: 1200 - DNA, 21 bp, Homo sapiens
ggtccaggagcagatctttgg

SEQ ID NO: 1201 - DNA, 21 bp, Homo sapiens
gggaggagaatgatacaaaat

SEQ ID NO: 1202 - DNA, 21 bp, Homo sapiens
tggggtgggaggagaatgata

SEQ ID NO: 1203 - DNA, 21 bp, Homo sapiens
ctttggggtgggaggagaatg

SEQ ID NO: 1204 - DNA, 21 bp, Homo sapiens
ggcactcaactttggggtggg

SEQ ID NO: 1205 - DNA, 21 bp, Homo sapiens
aggagaatgatacaaaatggt

SEQ ID NO: 1206 - DNA, 21 bp, Homo sapiens
agaatgatacaaaatggtagg

SEQ ID NO: 1207 - DNA, 21 bp, Homo sapiens
ggtgggaggagaatgatacaa

SEQ ID NO: 1208 - DNA, 21 bp, Homo sapiens
caactttggggtgggaggaga

SEQ ID NO: 1209 - DNA, 21 bp, Homo sapiens
actcaactttggggtgggagg

SEQ ID NO: 1210 - DNA, 21 bp, Homo sapiens
gggtgggaggagaatgataca

SEQ ID NO: 1211 - DNA, 21 bp, Homo sapiens
gagaatgatacaaaatggtag

SEQ ID NO: 1212 - DNA, 21 bp, Homo sapiens
tgggaggagaatgatacaaaa

SEQ ID NO: 1213 - DNA, 21 bp, Homo sapiens
gaggagaatgatacaaaatgg

SEQ ID NO: 1214 - DNA, 21 bp, Homo sapiens
aatgatacaaaatggtaggtt

SEQ ID NO: 1215 - DNA, 21 bp, Homo sapiens
ggtcctacaggccagcacagg

SEQ ID NO: 1216 - DNA, 21 bp, Homo sapiens
taggttggtcctacaggccag

SEQ ID NO: 1217 - DNA, 21 bp, Homo sapiens
tggtaggttggtcctacaggc

SEQ ID NO: 1218 - DNA, 21 bp, Homo sapiens
aaatggtaggttggtcctaca

SEQ ID NO: 1219 - DNA, 21 bp, Homo sapiens
acaaaatggtaggttggtcct

SEQ ID NO: 1220 - DNA, 21 bp, Homo sapiens
gatacaaaatggtaggttggt

SEQ ID NO: 1221 - DNA, 21 bp, Homo sapiens
gttggtcctacaggccagcac

SEQ ID NO: 1222 - DNA, 21 bp, Homo sapiens
gtcctacaggccagcacaggt

SEQ ID NO: 1223 - DNA, 21 bp, Homo sapiens
caggccagcacaggtgttgcc

SEQ ID NO: 1224 - DNA, 21 bp, Homo sapiens
ctacaggccagcacaggtgtt

SEQ ID NO: 1225 - DNA, 21 bp, Homo sapiens
ggtgttgccaagtgaagccca

SEQ ID NO: 1226 - DNA, 21 bp, Homo sapiens
agcacaggtgttgccaagtga

SEQ ID NO: 1227 - DNA, 21 bp, Homo sapiens
acaggtgttgccaagtgaagc

SEQ ID NO: 1228 - DNA, 21 bp, Homo sapiens
gccagcacaggtgttgccaag

SEQ ID NO: 1229 - DNA, 21 bp, Homo sapiens
aggcacagtgatcacaggcat

SEQ ID NO: 1230 - DNA, 21 bp, Homo sapiens
ccaagtgaagcccatgtgccc

SEQ ID NO: 1231 - DNA, 21 bp, Homo sapiens
gaagcccatgtgcccaggcac

SEQ ID NO: 1232 - DNA, 21 bp, Homo sapiens
agtgaagcccatgtgcccagg

SEQ ID NO: 1233 - DNA, 21 bp, Homo sapiens
gtgcccaggcacagtgatcac

SEQ ID NO: 1234 - DNA, 21 bp, Homo sapiens
gcccatgtgcccaggcacagt

SEQ ID NO: 1235 - DNA, 21 bp, Homo sapiens
catgtgcccaggcacagtgat

SEQ ID NO: 1236 - DNA, 21 bp, Homo sapiens
cccaggcacagtgatcacagg

SEQ ID NO: 1237 - DNA, 21 bp, Homo sapiens
gggaggcctgcaagggccaat

SEQ ID NO: 1238 - DNA, 21 bp, Homo sapiens
gaagggaggcctgcaagggcc

SEQ ID NO: 1239 - DNA, 21 bp, Homo sapiens
acaggcattctgggtgaaggg

SEQ ID NO: 1240 - DNA, 21 bp, Homo sapiens
ctgggtgaagggaggcctgca

SEQ ID NO: 1241 - DNA, 21 bp, Homo sapiens
attctgggtgaagggaggcct

SEQ ID NO: 1242 - DNA, 21 bp, Homo sapiens
ggcattctgggtgaagggagg

SEQ ID NO: 1243 - DNA, 21 bp, Homo sapiens
ggtgaagggaggcctgcaagg

SEQ ID NO: 1244 - DNA, 21 bp, Homo sapiens
ggaggcctgcaagggccaatt

SEQ ID NO: 1245 - DNA, 21 bp, Homo sapiens
gtgaagggaggcctgcaaggg

SEQ ID NO: 1246 - DNA, 21 bp, Homo sapiens
tgggtgaagggaggcctgcaa

SEQ ID NO: 1247 - DNA, 21 bp, Homo sapiens
aagggaggcctgcaagggcca

SEQ ID NO: 1248 - DNA, 21 bp, Homo sapiens
actgtgcctgggcacatgggc

SEQ ID NO: 1249 - DNA, 21 bp, Homo sapiens
gcctgggcacatgggcttcac

SEQ ID NO: 1250 - DNA, 21 bp, Homo sapiens
gctggcctgtaggaccaacct

SEQ ID NO: 1251 - DNA, 21 bp, Homo sapiens
ggcctgtaggaccaacctacc

SEQ ID NO: 1252 - DNA, 21 bp, Homo sapiens
ctgtaggaccaacctaccatt

SEQ ID NO: 1253 - DNA, 21 bp, Homo sapiens
ccaccccaaagttgagtgcca

SEQ ID NO: 1254 - DNA, 21 bp, Homo sapiens
ccccaaagttgagtgccaaag

SEQ ID NO: 1255 - DNA, 21 bp, Homo sapiens
gctcctggacccaggcacacc

SEQ ID NO: 1256 - DNA, 21 bp, Homo sapiens
ctggacccaggcacacctgcc

SEQ ID NO: 1257 - DNA, 21 bp, Homo sapiens
gcccccactggcacacctggg

SEQ ID NO: 1258 - DNA, 21 bp, Homo sapiens
cctgcccccactggcacacct

SEQ ID NO: 1259 - DNA, 21 bp, Homo sapiens
ggcacacctgcccccactggc

SEQ ID NO: 1260 - DNA, 21 bp, Homo sapiens
acacctgcccccactggcaca

SEQ ID NO: 1261 - DNA, 21 bp, Homo sapiens
ccaggcacacctgcccccact

SEQ ID NO: 1262 - DNA, 21 bp, Homo sapiens
cccactggcacacctgggcac

SEQ ID NO: 1263 - DNA, 21 bp, Homo sapiens
gacccaggcacacctgccccc

SEQ ID NO: 1264 - DNA, 21 bp, Homo sapiens
ccactggcacacctgggcaca

SEQ ID NO: 1265 - DNA, 21 bp, Homo sapiens
gcacacctgcccccactggca

SEQ ID NO: 1266 - DNA, 21 bp, Homo sapiens
ctgcccccactggcacacctg

SEQ ID NO: 1267 - DNA, 21 bp, Homo sapiens
cccccactggcacacctgggc

SEQ ID NO: 1268 - DNA, 21 bp, Homo sapiens
caggcacacctgcccccactg

SEQ ID NO: 1269 - DNA, 21 bp, Homo sapiens
tggacccaggcacacctgccc

SEQ ID NO: 1270 - DNA, 21 bp, Homo sapiens
acccaggcacacctgccccca

SEQ ID NO: 1271 - DNA, 21 bp, Homo sapiens
cacctgcccccactggcacac

SEQ ID NO: 1272 - DNA, 21 bp, Homo sapiens
ccacctaccattgcccatcgt

SEQ ID NO: 1273 - DNA, 21 bp, Homo sapiens
tggcacacctgggcacatctg

SEQ ID NO: 1274 - DNA, 21 bp, Homo sapiens
cactggcacacctgggcacat

SEQ ID NO: 1275 - DNA, 21 bp, Homo sapiens
ctgcccccacctaccattgcc

SEQ ID NO: 1276 - DNA, 21 bp, Homo sapiens
tgggcacatctgcccccacct

SEQ ID NO: 1277 - DNA, 21 bp, Homo sapiens
acctgggcacatctgccccca

SEQ ID NO: 1278 - DNA, 21 bp, Homo sapiens
gcacatctgcccccacctacc

SEQ ID NO: 1279 - DNA, 21 bp, Homo sapiens
cctaccattgcccatcgtcaa

SEQ ID NO: 1280 - DNA, 21 bp, Homo sapiens
catctgcccccacctaccatt

SEQ ID NO: 1281 - DNA, 21 bp, Homo sapiens
ccccactggcacacctgggca

SEQ ID NO: 1282 - DNA, 21 bp, Homo sapiens
cccccacctaccattgcccat

SEQ ID NO: 1283 - DNA, 21 bp, Homo sapiens
cacacctgggcacatctgccc

SEQ ID NO: 1284 - DNA, 21 bp, Homo sapiens
attgcccatcgtcaacacctg

SEQ ID NO: 1285 - DNA, 21 bp, Homo sapiens
catcgtcaacacctgcacatt

SEQ ID NO: 1286 - DNA, 21 bp, Homo sapiens
accattgcccatcgtcaacac

SEQ ID NO: 1287 - DNA, 21 bp, Homo sapiens
gcccatcgtcaacacctgcac

SEQ ID NO: 1288 - DNA, 21 bp, Homo sapiens
cagggtggtgtaggctgggtc

SEQ ID NO: 1289 - DNA, 21 bp, Homo sapiens
ggtggtgtaggctgggtccag

SEQ ID NO: 1290 - DNA, 21 bp, Homo sapiens
aggctgggtccagtgcagcac

SEQ ID NO: 1291 - DNA, 21 bp, Homo sapiens
agcactgtagtcggccatgtc

SEQ ID NO: 1292 - DNA, 21 bp, Homo sapiens
actgtagtcggccatgtccat

SEQ ID NO: 1293 - DNA, 21 bp, Homo sapiens
gtagtcggccatgtccatgtc

SEQ ID NO: 1294 - DNA, 21 bp, Homo sapiens
gtcggccatgtccatgtcgac

SEQ ID NO: 1295 - DNA, 21 bp, Homo sapiens
ggccatgtccatgtcgacgag

SEQ ID NO: 1296 - DNA, 21 bp, Homo sapiens
catgtccatgtcgacgagggt

SEQ ID NO: 1297 - DNA, 21 bp, Homo sapiens
ctgcctccacgccgcggccac

SEQ ID NO: 1298 - DNA, 21 bp, Homo sapiens
cctccacgccgcggccacctg

SEQ ID NO: 1299 - DNA, 21 bp, Homo sapiens
ccacgccgcggccacctgccc

SEQ ID NO: 1300 - DNA, 21 bp, Homo sapiens
cggccacctgccctaccctgg

SEQ ID NO: 1301 - DNA, 21 bp, Homo sapiens
acgccgcggccacctgcccta

SEQ ID NO: 1302 - DNA, 21 bp, Homo sapiens
ccgcggccacctgccctaccc

SEQ ID NO: 1303 - DNA, 21 bp, Homo sapiens
ccacctgccctaccctgggcg

SEQ ID NO: 1304 - DNA, 21 bp, Homo sapiens
cctgccctaccctgggcgccc

SEQ ID NO: 1305 - DNA, 21 bp, Homo sapiens
gccctaccctgggcgcccacc

SEQ ID NO: 1306 - DNA, 21 bp, Homo sapiens
ccctgggcgcccaccccgaag

SEQ ID NO: 1307 - DNA, 21 bp, Homo sapiens
tgggcgcccaccccgaaggcc

SEQ ID NO: 1308 - DNA, 21 bp, Homo sapiens
ctaccctgggcgcccaccccg

SEQ ID NO: 1309 - DNA, 21 bp, Homo sapiens
cccaccccgaaggcccccgcc

SEQ ID NO: 1310 - DNA, 21 bp, Homo sapiens
gcgcccaccccgaaggccccc

SEQ ID NO: 1311 - DNA, 21 bp, Homo sapiens
cctaccctgggcgcccacccc

SEQ ID NO: 1312 - DNA, 21 bp, Homo sapiens
ctgggcgcccaccccgaaggc

SEQ ID NO: 1313 - DNA, 21 bp, Homo sapiens
ggcgcccaccccgaaggcccc

SEQ ID NO: 1314 - DNA, 21 bp, Homo sapiens
caccccgaaggcccccgccct

SEQ ID NO: 1315 - DNA, 21 bp, Homo sapiens
gcccaccccgaaggcccccgc

SEQ ID NO: 1316 - DNA, 21 bp, Homo sapiens
cccgaaggcccccgccctccg

SEQ ID NO: 1317 - DNA, 21 bp, Homo sapiens
gaaggcccccgccctccgccc

SEQ ID NO: 1318 - DNA, 21 bp, Homo sapiens
cctgggcgcccaccccgaagg

SEQ ID NO: 1319 - DNA, 21 bp, Homo sapiens
gggcgcccaccccgaaggccc

SEQ ID NO: 1320 - DNA, 21 bp, Homo sapiens
cgcccaccccgaaggcccccg

SEQ ID NO: 1321 - DNA, 21 bp, Homo sapiens
ccaccccgaaggcccccgccc

SEQ ID NO: 1322 - DNA, 21 bp, Homo sapiens
ccactgcctcctcccagtgcc

SEQ ID NO: 1323 - DNA, 21 bp, Homo sapiens
tgggaagatctgctgggagtc

SEQ ID NO: 1324 - DNA, 21 bp, Homo sapiens
gctgggagtcttggcctagcc

SEQ ID NO: 1325 - DNA, 21 bp, Homo sapiens
gcctagcctctgtgaaggggt

SEQ ID NO: 1326 - DNA, 21 bp, Homo sapiens
tagcctctgtgaaggggtgga

SEQ ID NO: 1327 - DNA, 21 bp, Homo sapiens
cctctgtgaaggggtggaggc

SEQ ID NO: 1328 - DNA, 21 bp, Homo sapiens
ggggtggaggctctgccgggg

SEQ ID NO: 1329 - DNA, 21 bp, Homo sapiens
gtggaggctctgccggggagg

SEQ ID NO: 1330 - DNA, 21 bp, Homo sapiens
gaggctctgccggggaggggt

SEQ ID NO: 1331 - DNA, 21 bp, Homo sapiens
gctctgccggggaggggtggg

SEQ ID NO: 1332 - DNA, 21 bp, Homo sapiens
ctgccggggaggggtgggggt

SEQ ID NO: 1333 - DNA, 21 bp, Homo sapiens
cggggaggggtgggggttaat

SEQ ID NO: 1334 - DNA, 21 bp, Homo sapiens
ggcggggctgcagggatttgg

SEQ ID NO: 1335 - DNA, 21 bp, Homo sapiens
ctgggcggggctgcagggatt

SEQ ID NO: 1336 - DNA, 21 bp, Homo sapiens
ggggctgcagggatttggctg

SEQ ID NO: 1337 - DNA, 21 bp, Homo sapiens
gtggataggctgggcggggct

SEQ ID NO: 1338 - DNA, 21 bp, Homo sapiens
gataggctgggcggggctgca

SEQ ID NO: 1339 - DNA, 21 bp, Homo sapiens
ccggtggataggctgggcggg

SEQ ID NO: 1340 - DNA, 21 bp, Homo sapiens
ccgccggtggataggctgggc

SEQ ID NO: 1341 - DNA, 21 bp, Homo sapiens
cccccgccggtggataggctg

SEQ ID NO: 1342 - DNA, 21 bp, Homo sapiens
ggtcccccgccggtggatagg

SEQ ID NO: 1343 - DNA, 21 bp, Homo sapiens
ataggctgggcggggctgcag

SEQ ID NO: 1344 - DNA, 21 bp, Homo sapiens
cggtggataggctgggcgggg

SEQ ID NO: 1345 - DNA, 21 bp, Homo sapiens
tggataggctgggcggggctg

SEQ ID NO: 1346 - DNA, 21 bp, Homo sapiens
cgccggtggataggctgggcg

SEQ ID NO: 1347 - DNA, 21 bp, Homo sapiens
gtcccccgccggtggataggc

SEQ ID NO: 1348 - DNA, 21 bp, Homo sapiens
ccccgccggtggataggctgg

SEQ ID NO: 1349 - DNA, 21 bp, Homo sapiens
ggctgggcggggctgcaggga

SEQ ID NO: 1350 - DNA, 21 bp, Homo sapiens
ggtggataggctgggcggggc

SEQ ID NO: 1351 - DNA, 21 bp, Homo sapiens
gccggtggataggctgggcgg

SEQ ID NO: 1352 - DNA, 21 bp, Homo sapiens
cccgccggtggataggctggg

SEQ ID NO: 1353 - DNA, 21 bp, Homo sapiens
gctgacacccggggtgctaat

SEQ ID NO: 1354 - DNA, 21 bp, Homo sapiens
ctggctgacacccggggtgct

SEQ ID NO: 1355 - DNA, 21 bp, Homo sapiens
acaactgctggggccctaact

SEQ ID NO: 1356 - DNA, 21 bp, Homo sapiens
ctaattacaactgctggggcc

SEQ ID NO: 1357 - DNA, 21 bp, Homo sapiens
attacaactgctggggcccta

SEQ ID NO: 1358 - DNA, 21 bp, Homo sapiens
gtgctaattacaactgctggg

SEQ ID NO: 1359 - DNA, 21 bp, Homo sapiens
ggggtgctaattacaactgct

SEQ ID NO: 1360 - DNA, 21 bp, Homo sapiens
actgctggggccctaactcac

SEQ ID NO: 1361 - DNA, 21 bp, Homo sapiens
cccggggtgctaattacaact

SEQ ID NO: 1362 - DNA, 21 bp, Homo sapiens
tggctgacacccggggtgcta

SEQ ID NO: 1363 - DNA, 21 bp, Homo sapiens
acacccggggtgctaattaca

SEQ ID NO: 1364 - DNA, 21 bp, Homo sapiens
ctgacacccggggtgctaatt

SEQ ID NO: 1365 - DNA, 21 bp, Homo sapiens
gctggggccctaactcaccga

SEQ ID NO: 1366 - DNA, 21 bp, Homo sapiens
attgtacaaggcaggcatcat

SEQ ID NO: 1367 - DNA, 21 bp, Homo sapiens
gtacaaggcaggcatcatgac

SEQ ID NO: 1368 - DNA, 21 bp, Homo sapiens
attgtcaccccaagtcaggca

SEQ ID NO: 1369 - DNA, 21 bp, Homo sapiens
gccattgtcaccccaagtcag

SEQ ID NO: 1370 - DNA, 21 bp, Homo sapiens
caagccattgtcaccccaagt

SEQ ID NO: 1371 - DNA, 21 bp, Homo sapiens
ggcactgacagcctacctccg

SEQ ID NO: 1372 - DNA, 21 bp, Homo sapiens
actgacagcctacctccgaga

SEQ ID NO: 1373 - DNA, 21 bp, Homo sapiens
ccaaatcattgacttctaccc

SEQ ID NO: 1374 - DNA, 21 bp, Homo sapiens
gcagagataaggctgccccat

SEQ ID NO: 1375 - DNA, 21 bp, Homo sapiens
gagataaggctgccccatggc

SEQ ID NO: 1376 - DNA, 21 bp, Homo sapiens
ataaggctgccccatggccca

SEQ ID NO: 1377 - DNA, 21 bp, Homo sapiens
aggctgccccatggcccacga

SEQ ID NO: 1378 - DNA, 21 bp, Homo sapiens
agagataaggctgccccatgg

SEQ ID NO: 1379 - DNA, 21 bp, Homo sapiens
cccacgatttagaaacctaaa

SEQ ID NO: 1380 - DNA, 21 bp, Homo sapiens
tggcccacgatttagaaacct

SEQ ID NO: 1381 - DNA, 21 bp, Homo sapiens
ccatggcccacgatttagaaa

SEQ ID NO: 1382 - DNA, 21 bp, Homo sapiens
gccccatggcccacgatttag

SEQ ID NO: 1383 - DNA, 21 bp, Homo sapiens
gataaggctgccccatggccc

SEQ ID NO: 1384 - DNA, 21 bp, Homo sapiens
gctgccccatggcccacgatt

SEQ ID NO: 1385 - DNA, 21 bp, Homo sapiens
aaggctgccccatggcccacg

SEQ ID NO: 1386 - DNA, 21 bp, Homo sapiens
agaaacctaaatcccaggccc

SEQ ID NO: 1387 - DNA, 21 bp, Homo sapiens
aacctaaatcccaggccccag

SEQ ID NO: 1388 - DNA, 21 bp, Homo sapiens
ctaaatcccaggccccagatg

SEQ ID NO: 1389 - DNA, 21 bp, Homo sapiens
aatcccaggccccagatgcca

SEQ ID NO: 1390 - DNA, 21 bp, Homo sapiens
caggccccagatgccaatctt

SEQ ID NO: 1391 - DNA, 21 bp, Homo sapiens
gatgccaatcttctggatcct

SEQ ID NO: 1392 - DNA, 21 bp, Homo sapiens
gccccagatgccaatcttctg

SEQ ID NO: 1393 - DNA, 21 bp, Homo sapiens
ccagatgccaatcttctggat

SEQ ID NO: 1394 - DNA, 21 bp, Homo sapiens
ctgggagcagaatggactgga

SEQ ID NO: 1395 - DNA, 21 bp, Homo sapiens
cccctgggagcagaatggact

SEQ ID NO: 1396 - DNA, 21 bp, Homo sapiens
ggagcagaatggactggaagt

SEQ ID NO: 1397 - DNA, 21 bp, Homo sapiens
gttcccctgggagcagaatgg

SEQ ID NO: 1398 - DNA, 21 bp, Homo sapiens
ccggttcccctgggagcagaa

SEQ ID NO: 1399 - DNA, 21 bp, Homo sapiens
tgggagcagaatggactggaa

SEQ ID NO: 1400 - DNA, 21 bp, Homo sapiens
ccctgggagcagaatggactg

SEQ ID NO: 1401 - DNA, 21 bp, Homo sapiens
ctggaagtttgggagggccag

SEQ ID NO: 1402 - DNA, 21 bp, Homo sapiens
gaagtttgggagggccagatt

SEQ ID NO: 1403 - DNA, 21 bp, Homo sapiens
gtttgggagggccagattcac

SEQ ID NO: 1404 - DNA, 21 bp, Homo sapiens
gagcagaatggactggaagtt

SEQ ID NO: 1405 - DNA, 21 bp, Homo sapiens
aatggactggaagtttgggag

SEQ ID NO: 1406 - DNA, 21 bp, Homo sapiens
ggactggaagtttgggagggc

SEQ ID NO: 1407 - DNA, 21 bp, Homo sapiens
cagaatggactggaagtttgg

SEQ ID NO: 1408 - DNA, 21 bp, Homo sapiens
cctgggagcagaatggactgg

SEQ ID NO: 1409 - DNA, 21 bp, Homo sapiens
gggagcagaatggactggaag

SEQ ID NO: 1410 - protein, 209 aa, Artificial Sequence
  source: /note="Description of Artificial Sequence: Synthetic polypeptide"
LEPGEKPYKCPECGKSFSTSHSLTEHQRTHTGEKPYKCPECGKSFSRSDKLVRHQRTHTGEKPYKCPECGKSFSTKNSLTEHQRTHTGEKPYKCPECGKSFSRADNLTEHQRTHTGEKPYKCPECGKSFSERSHLREHQRTHTGEKPYKCPECGKSFSRSDHLTTHQRTHTGEKPYKCPECGKSFSQLAHLRAHQRTHTGEKPTGKKTS

SEQ ID NO: 1411 - protein, 209 aa, Artificial Sequence
  source: /note="Description of Artificial Sequence: Synthetic polypeptide"
LEPGEKPYKCPECGKSFSRNDALTEHQRTHTGEKPYKCPECGKSFSSPADLTRHQRTHTGEKPYKCPECGKSFSQSSNLVRHQRTHTGEKPYKCPECGKSFSTSHSLTEHQRTHTGEKPYKCPECGKSFSRSDKLVRHQRTHTGEKPYKCPECGKSFSTKNSLTEHQRTHTGEKPYKCPECGKSFSRADNLTEHQRTHTGEKPTGKKTS

SEQ ID NO: 1412 - protein, 209 aa, Artificial Sequence
  source: /note="Description of Artificial Sequence: Synthetic polypeptide"
LEPGEKPYKCPECGKSFSSPADLTRHQRTHTGEKPYKCPECGKSFSQSSNLVRHQRTHTGEKPYKCPECGKSFSTSHSLTEHQRTHTGEKPYKCPECGKSFSRSDKLVRHQRTHTGEKPYKCPECGKSFSTKNSLTEHQRTHTGEKPYKCPECGKSFSRADNLTEHQRTHTGEKPYKCPECGKSFSERSHLREHQRTHTGEKPTGKKTS

SEQ ID NO: 1413 - protein, 209 aa, Artificial Sequence
  source: /note="Description of Artificial Sequence: Synthetic polypeptide"
LEPGEKPYKCPECGKSFSQSSNLVRHQRTHTGEKPYKCPECGKSFSTSHSLTEHQRTHTGEKPYKCPECGKSFSRSDKLVRHQRTHTGEKPYKCPECGKSFSTKNSLTEHQRTHTGEKPYKCPECGKSFSRADNLTEHQRTHTGEKPYKCPECGKSFSERSHLREHQRTHTGEKPYKCPECGKSFSRSDHLTTHQRTHTGEKPTGKKTS

SEQ ID NO: 1414 - protein, 209 aa, Artificial Sequence
  source: /note="Description of Artificial Sequence: Synthetic polypeptide"
LEPGEKPYKCPECGKSFSRSDKLVRHQRTHTGEKPYKCPECGKSFSTKNSLTEHQRTHTGEKPYKCPECGKSFSRADNLTEHQRTHTGEKPYKCPECGKSFSERSHLREHQRTHTGEKPYKCPECGKSFSRSDHLTTHQRTHTGEKPYKCPECGKSFSQLAHLRAHQRTHTGEKPYKCPECGKSFSRNDTLTEHQRTHTGEKPTGKKTS

SEQ ID NO: 1415 - protein, 209 aa, Artificial Sequence
  source: /note="Description of Artificial Sequence: Synthetic polypeptide"
LEPGEKPYKCPECGKSFSTKNSLTEHQRTHTGEKPYKCPECGKSFSRADNLTEHQRTHTGEKPYKCPECGKSFSERSHLREHQRTHTGEKPYKCPECGKSFSRSDHLTTHQRTHTGEKPYKCPECGKSFSQLAHLRAHQRTHTGEKPYKCPECGKSFSRNDTLTEHQRTHTGEKPYKCPECGKSFSTTGNLTVHQRTHTGEKPTGKKTS

SEQ ID NO: 1416 - protein, 209 aa, Artificial Sequence
  source: /note="Description of Artificial Sequence: Synthetic polypeptide"
LEPGEKPYKCPECGKSFSTTGNLTVHQRTHTGEKPYKCPECGKSFSQSSNLVRHQRTHTGEKPYKCPECGKSFSRSDHLTTHQRTHTGEKPYKCPECGKSFSQAGHLASHQRTHTGEKPYKCPECGKSFSRRDELNVHQRTHTGEKPYKCPECGKSFSQLAHLRAHQRTHTGEKPYKCPECGKSFSRSDHLTNHQRTHTGEKPTGKKTS

SEQ ID NO: 1417 - protein, 209 aa, Artificial Sequence
  source: /note="Description of Artificial Sequence: Synthetic polypeptide"
LEPGEKPYKCPECGKSFSQSSNLVRHQRTHTGEKPYKCPECGKSFSRSDHLTTHQRTHTGEKPYKCPECGKSFSQAGHLASHQRTHTGEKPYKCPECGKSFSRRDELNVHQRTHTGEKPYKCPECGKSFSQLAHLRAHQRTHTGEKPYKCPECGKSFSRSDHLTNHQRTHTGEKPYKCPECGKSFSDSGNLRVHQRTHTGEKPTGKKTS

SEQ ID NO: 1418 - protein, 209 aa, Artificial Sequence
  source: /note="Description of Artificial Sequence: Synthetic polypeptide"
LEPGEKPYKCPECGKSFSRSDHLTTHQRTHTGEKPYKCPECGKSFSQLAHLRAHQRTHTGEKPYKCPECGKSFSRNDTLTEHQRTHTGEKPYKCPECGKSFSTTGNLTVHQRTHTGEKPYKCPECGKSFSQSSNLVRHQRTHTGEKPYKCPECGKSFSRSDHLTTHQRTHTGEKPYKCPECGKSFSQAGHLASHQRTHTGEKPTGKKTS

SEQ ID NO: 1419 - protein, 209 aa, Artificial Sequence
  source: /note="Description of Artificial Sequence: Synthetic polypeptide"
LEPGEKPYKCPECGKSFSRADNLTEHQRTHTGEKPYKCPECGKSFSERSHLREHQRTHTGEKPYKCPECGKSFSRSDHLTTHQRTHTGEKPYKCPECGKSFSQLAHLRAHQRTHTGEKPYKCPECGKSFSRNDTLTEHQRTHTGEKPYKCPECGKSFSTTGNLTVHQRTHTGEKPYKCPECGKSFSQSSNLVRHQRTHTGEKPTGKKTS

SEQ ID NO: 1420 - protein, 209 aa, Artificial Sequence
  source: /note="Description of Artificial Sequence: Synthetic polypeptide"
LEPGEKPYKCPECGKSFSERSHLREHQRTHTGEKPYKCPECGKSFSRSDHLTTHQRTHTGEKPYKCPECGKSFSQLAHLRAHQRTHTGEKPYKCPECGKSFSRNDTLTEHQRTHTGEKPYKCPECGKSFSTTGNLTVHQRTHTGEKPYKCPECGKSFSQSSNLVRHQRTHTGEKPYKCPECGKSFSRSDHLTTHQRTHTGEKPTGKKTS

SEQ ID NO: 1421 - protein, 209 aa, Artificial Sequence
  source: /note="Description of Artificial Sequence: Synthetic polypeptide"
LEPGEKPYKCPECGKSFSQRAHLERHQRTHTGEKPYKCPECGKSFSRNDALTEHQRTHTGEKPYKCPECGKSFSSPADLTRHQRTHTGEKPYKCPECGKSFSQSSNLVRHQRTHTGEKPYKCPECGKSFSTSHSLTEHQRTHTGEKPYKCPECGKSFSRSDKLVRHQRTHTGEKPYKCPECGKSFSTKNSLTEHQRTHTGEKPTGKKTS

SEQ ID NO: 1422 - protein, 209 aa, Artificial Sequence
  source: /note="Description of Artificial Sequence: Synthetic polypeptide"
LEPGEKPYKCPECGKSFSRSDELVRHQRTHTGEKPYKCPECGKSFSTSGELVRHQRTHTGEKPYKCPECGKSFSQRAHLERHQRTHTGEKPYKCPECGKSFSRNDALTEHQRTHTGEKPYKCPECGKSFSSPADLTRHQRTHTGEKPYKCPECGKSFSQSSNLVRHQRTHTGEKPYKCPECGKSFSTSHSLTEHQRTHTGEKPTGKKTS

SEQ ID NO: 1423 - protein, 209 aa, Artificial Sequence
  source: /note="Description of Artificial Sequence: Synthetic polypeptide"
LEPGEKPYKCPECGKSFSTSGELVRHQRTHTGEKPYKCPECGKSFSQRAHLERHQRTHTGEKPYKCPECGKSFSRNDALTEHQRTHTGEKPYKCPECGKSFSSPADLTRHQRTHTGEKPYKCPECGKSFSQSSNLVRHQRTHTGEKPYKCPECGKSFSTSHSLTEHQRTHTGEKPYKCPECGKSFSRSDKLVRHQRTHTGEKPTGKKTS

SEQ ID NO: 1424 - protein, 209 aa, Artificial Sequence
  source: /note="Description of Artificial Sequence: Synthetic polypeptide"
LEPGEKPYKCPECGKSFSQAGHLASHQRTHTGEKPYKCPECGKSFSRRDELNVHQRTHTGEKPYKCPECGKSFSQLAHLRAHQRTHTGEKPYKCPECGKSFSRSDHLTNHQRTHTGEKPYKCPECGKSFSDSGNLRVHQRTHTGEKPYKCPECGKSFSQRAHLERHQRTHTGEKPYKCPECGKSFSRSDNLVRHQRTHTGEKPTGKKTS

SEQ ID NO: 1425 - protein, 209 aa, Artificial Sequence
  source: /note="Description of Artificial Sequence: Synthetic polypeptide"
LEPGEKPYKCPECGKSFSRSDHLTTHQRTHTGEKPYKCPECGKSFSQAGHLASHQRTHTGEKPYKCPECGKSFSRRDELNVHQRTHTGEKPYKCPECGKSFSQLAHLRAHQRTHTGEKPYKCPECGKSFSRSDHLTNHQRTHTGEKPYKCPECGKSFSDSGNLRVHQRTHTGEKPYKCPECGKSFSQRAHLERHQRTHTGEKPTGKKTS

SEQ ID NO: 1426 - protein, 209 aa, Artificial Sequence
  source: /note="Description of Artificial Sequence: Synthetic polypeptide"
LEPGEKPYKCPECGKSFSQLAHLRAHQRTHTGEKPYKCPECGKSFSRNDTLTEHQRTHTGEKPYKCPECGKSFSTTGNLTVHQRTHTGEKPYKCPECGKSFSQSSNLVRHQRTHTGEKPYKCPECGKSFSRSDHLTTHQRTHTGEKPYKCPECGKSFSQAGHLASHQRTHTGEKPYKCPECGKSFSRRDELNVHQRTHTGEKPTGKKTS

SEQ ID NO: 1427 - protein, 209 aa, Artificial Sequence
  source: /note="Description of Artificial Sequence: Synthetic polypeptide"
LEPGEKPYKCPECGKSFSRNDTLTEHQRTHTGEKPYKCPECGKSFSTTGNLTVHQRTHTGEKPYKCPECGKSFSQSSNLVRHQRTHTGEKPYKCPECGKSFSRSDHLTTHQRTHTGEKPYKCPECGKSFSQAGHLASHQRTHTGEKPYKCPECGKSFSRRDELNVHQRTHTGEKPYKCPECGKSFSQLAHLRAHQRTHTGEKPTGKKTS

SEQ ID NO: 1428 - protein, 209 aa, Artificial Sequence
  source: /note="Description of Artificial Sequence: Synthetic polypeptide"
LEPGEKPYKCPECGKSFSQRAHLERHQRTHTGEKPYKCPECGKSFSRSDELVRHQRTHTGEKPYKCPECGKSFSTSGELVRHQRTHTGEKPYKCPECGKSFSQRAHLERHQRTHTGEKPYKCPECGKSFSRNDALTEHQRTHTGEKPYKCPECGKSFSSPADLTRHQRTHTGEKPYKCPECGKSFSQSSNLVRHQRTHTGEKPTGKKTS

SEQ ID NO: 1429 - protein, 209 aa, Artificial Sequence
  source: /note="Description of Artificial Sequence: Synthetic polypeptide"
LEPGEKPYKCPECGKSFSRADNLTEHQRTHTGEKPYKCPECGKSFSRSDKLVRHQRTHTGEKPYKCPECGKSFSRSDNLVRHQRTHTGEKPYKCPECGKSFSQRAHLERHQRTHTGEKPYKCPECGKSFSDPGNLVRHQRTHTGEKPYKCPECGKSFSQRAHLERHQRTHTGEKPYKCPECGKSFSRSDELVRHQRTHTGEKPTGKKTS

SEQ ID NO: 1430 - protein, 209 aa, Artificial Sequence
  source: /note="Description of Artificial Sequence: Synthetic polypeptide"
LEPGEKPYKCPECGKSFSDPGNLVRHQRTHTGEKPYKCPECGKSFSQRAHLERHQRTHTGEKPYKCPECGKSFSRSDELVRHQRTHTGEKPYKCPECGKSFSTSGELVRHQRTHTGEKPYKCPECGKSFSQRAHLERHQRTHTGEKPYKCPECGKSFSRNDALTEHQRTHTGEKPYKCPECGKSFSSPADLTRHQRTHTGEKPTGKKTS

SEQ ID NO: 1431 - protein, 209 aa, Artificial Sequence
  source: /note="Description of Artificial Sequence: Synthetic polypeptide"
LEPGEKPYKCPECGKSFSRSDKLVRHQRTHTGEKPYKCPECGKSFSRSDNLVRHQRTHTGEKPYKCPECGKSFSQRAHLERHQRTHTGEKPYKCPECGKSFSDPGNLVRHQRTHTGEKPYKCPECGKSFSQRAHLERHQRTHTGEKPYKCPECGKSFSRSDELVRHQRTHTGEKPYKCPECGKSFSTSGELVRHQRTHTGEKPTGKKTS

SEQ ID NO: 1432 - protein, 209 aa, Artificial Sequence
  source: /note="Description of Artificial Sequence: Synthetic polypeptide"
LEPGEKPYKCPECGKSFSQRAHLERHQRTHTGEKPYKCPECGKSFSDPGNLVRHQRTHTGEKPYKCPECGKSFSQRAHLERHQRTHTGEKPYKCPECGKSFSRSDELVRHQRTHTGEKPYKCPECGKSFSTSGELVRHQRTHTGEKPYKCPECGKSFSQRAHLERHQRTHTGEKPYKCPECGKSFSRNDALTEHQRTHTGEKPTGKKTS

SEQ ID NO: 1433 - protein, 209 aa, Artificial Sequence
  source: /note="Description of Artificial Sequence: Synthetic polypeptide"
LEPGEKPYKCPECGKSFSRSDNLVRHQRTHTGEKPYKCPECGKSFSQRAHLERHQRTHTGEKPYKCPECGKSFSDPGNLVRHQRTHTGEKPYKCPECGKSFSQRAHLERHQRTHTGEKPYKCPECGKSFSRSDELVRHQRTHTGEKPYKCPECGKSFSTSGELVRHQRTHTGEKPYKCPECGKSFSQRAHLERHQRTHTGEKPTGKKTS

SEQ ID NO: 1434 - protein, 209 aa, Artificial Sequence
  source: /note="Description of Artificial Sequence: Synthetic polypeptide"
LEPGEKPYKCPECGKSFSQLAHLRAHQRTHTGEKPYKCPECGKSFSRSDHLTNHQRTHTGEKPYKCPECGKSFSDSGNLRVHQRTHTGEKPYKCPECGKSFSQRAHLERHQRTHTGEKPYKCPECGKSFSRSDNLVRHQRTHTGEKPYKCPECGKSFSTSGHLVRHQRTHTGEKPYKCPECGKSFSRSDKLVRHQRTHTGEKPTGKKTS

SEQ ID NO: 1435 - protein, 209 aa, Artificial Sequence
  source: /note="Description of Artificial Sequence: Synthetic polypeptide"
LEPGEKPYKCPECGKSFSRSDKLVRHQRTHTGEKPYKCPECGKSFSTSGHLVRHQRTHTGEKPYKCPECGKSFSRADNLTEHQRTHTGEKPYKCPECGKSFSRSDKLVRHQRTHTGEKPYKCPECGKSFSRSDNLVRHQRTHTGEKPYKCPECGKSFSQRAHLERHQRTHTGEKPYKCPECGKSFSDPGNLVRHQRTHTGEKPTGKKTS

SEQ ID NO: 1436 - protein, 209 aa, Artificial Sequence
  source: /note="Description of Artificial Sequence: Synthetic polypeptide"
LEPGEKPYKCPECGKSFSRRDELNVHQRTHTGEKPYKCPECGKSFSQLAHLRAHQRTHTGEKPYKCPECGKSFSRSDHLTNHQRTHTGEKPYKCPECGKSFSDSGNLRVHQRTHTGEKPYKCPECGKSFSQRAHLERHQRTHTGEKPYKCPECGKSFSRSDNLVRHQRTHTGEKPYKCPECGKSFSTSGHLVRHQRTHTGEKPTGKKTS

SEQ ID NO: 1437 - protein, 209 aa, Artificial Sequence
  source: /note="Description of Artificial Sequence: Synthetic polypeptide"
LEPGEKPYKCPECGKSFSTSGHLVRHQRTHTGEKPYKCPECGKSFSRADNLTEHQRTHTGEKPYKCPECGKSFSRSDKLVRHQRTHTGEKPYKCPECGKSFSRSDNLVRHQRTHTGEKPYKCPECGKSFSQRAHLERHQRTHTGEKPYKCPECGKSFSDPGNLVRHQRTHTGEKPYKCPECGKSFSQRAHLERHQRTHTGEKPTGKKTS

SEQ ID NO: 1438 - protein, 209 aa, Artificial Sequence
  source: /note="Description of Artificial Sequence: Synthetic polypeptide"
LEPGEKPYKCPECGKSFSDSGNLRVHQRTHTGEKPYKCPECGKSFSQRAHLERHQRTHTGEKPYKCPECGKSFSRSDNLVRHQRTHTGEKPYKCPECGKSFSTSGHLVRHQRTHTGEKPYKCPECGKSFSRSDKLVRHQRTHTGEKPYKCPECGKSFSTSGHLVRHQRTHTGEKPYKCPECGKSFSRSDKLVRHQRTHTGEKPTGKKTS

SEQ ID NO: 1439 - protein, 209 aa, Artificial Sequence
  source: /note="Description of Artificial Sequence: Synthetic polypeptide"
LEPGEKPYKCPECGKSFSRSDHLTNHQRTHTGEKPYKCPECGKSFSDSGNLRVHQRTHTGEKPYKCPECGKSFSQRAHLERHQRTHTGEKPYKCPECGKSFSRSDNLVRHQRTHTGEKPYKCPECGKSFSTSGHLVRHQRTHTGEKPYKCPECGKSFSRSDKLVRHQRTHTGEKPYKCPECGKSFSTSGHLVRHQRTHTGEKPTGKKTS

SEQ ID NO: 1440 - protein, 209 aa, Artificial Sequence
  source: /note="Description of Artificial Sequence: Synthetic polypeptide"
LEPGEKPYKCPECGKSFSQRAHLERHQRTHTGEKPYKCPECGKSFSRSDNLVRHQRTHTGEKPYKCPECGKSFSTSGHLVRHQRTHTGEKPYKCPECGKSFSRSDKLVRHQRTHTGEKPYKCPECGKSFSTSGHLVRHQRTHTGEKPYKCPECGKSFSRSDKLVRHQRTHTGEKPYKCPECGKSFSQRAHLERHQRTHTGEKPTGKKTS

SEQ ID NO: 1441 - protein, 209 aa, Artificial Sequence
  source: /note="Description of Artificial Sequence: Synthetic polypeptide"
LEPGEKPYKCPECGKSFSRSDNLVRHQRTHTGEKPYKCPECGKSFSTSGHLVRHQRTHTGEKPYKCPECGKSFSRSDKLVRHQRTHTGEKPYKCPECGKSFSTSGHLVRHQRTHTGEKPYKCPECGKSFSRSDKLVRHQRTHTGEKPYKCPECGKSFSQRAHLERHQRTHTGEKPYKCPECGKSFSRNDTLTEHQRTHTGEKPTGKKTS

SEQ ID NO: 1442 - protein, 209 aa, Artificial Sequence
  source: /note="Description of Artificial Sequence: Synthetic polypeptide"
LEPGEKPYKCPECGKSFSRSDHLTNHQRTHTGEKPYKCPECGKSFSRSDELVRHQRTHTGEKPYKCPECGKSFSRSDKLVRHQRTHTGEKPYKCPECGKSFSRSDELVRHQRTHTGEKPYKCPECGKSFSRSDKLVRHQRTHTGEKPYKCPECGKSFSRSDNLVRHQRTHTGEKPYKCPECGKSFSRSDKLTEHQRTHTGEKPTGKKTS

SEQ ID NO: 1443 - protein, 209 aa, Artificial Sequence
  source: /note="Description of Artificial Sequence: Synthetic polypeptide"
LEPGEKPYKCPECGKSFSQSSNLVRHQRTHTGEKPYKCPECGKSFSRSDHLTNHQRTHTGEKPYKCPECGKSFSRSDELVRHQRTHTGEKPYKCPECGKSFSRSDKLVRHQRTHTGEKPYKCPECGKSFSRSDELVRHQRTHTGEKPYKCPECGKSFSRSDKLVRHQRTHTGEKPYKCPECGKSFSRSDNLVRHQRTHTGEKPTGKKTS

SEQ ID NO: 1444 - protein, 209 aa, Artificial Sequence
  source: /note="Description of Artificial Sequence: Synthetic polypeptide"
LEPGEKPYKCPECGKSFSSPADLTRHQRTHTGEKPYKCPECGKSFSQSSNLVRHQRTHTGEKPYKCPECGKSFSRSDHLTNHQRTHTGEKPYKCPECGKSFSRSDELVRHQRTHTGEKPYKCPECGKSFSRSDKLVRHQRTHTGEKPYKCPECGKSFSRSDELVRHQRTHTGEKPYKCPECGKSFSRSDKLVRHQRTHTGEKPTGKKTS

SEQ ID NO: 1445 - protein, 209 aa, Artificial Sequence
  source: /note="Description of Artificial Sequence: Synthetic polypeptide"
LEPGEKPYKCPECGKSFSQRAHLERHQRTHTGEKPYKCPECGKSFSSPADLTRHQRTHTGEKPYKCPECGKSFSQSSNLVRHQRTHTGEKPYKCPECGKSFSRSDHLTNHQRTHTGEKPYKCPECGKSFSRSDELVRHQRTHTGEKPYKCPECGKSFSRSDKLVRHQRTHTGEKPYKCPECGKSFSRSDELVRHQRTHTGEKPTGKKTS

SEQ ID NO: 1446 - protein, 209 aa, Artificial Sequence
  source: /note="Description of Artificial Sequence: Synthetic polypeptide"
LEPGEKPYKCPECGKSFSQSSNLVRHQRTHTGEKPYKCPECGKSFSQRAHLERHQRTHTGEKPYKCPECGKSFSSPADLTRHQRTHTGEKPYKCPECGKSFSQSSNLVRHQRTHTGEKPYKCPECGKSFSRSDHLTNHQRTHTGEKPYKCPECGKSFSRSDELVRHQRTHTGEKPYKCPECGKSFSRSDKLVRHQRTHTGEKPTGKKTS

SEQ ID NO: 1447 - protein, 209 aa, Artificial Sequence
  source: /note="Description of Artificial Sequence: Synthetic polypeptide"
LEPGEKPYKCPECGKSFSTTGNLTVHQRTHTGEKPYKCPECGKSFSRSDNLVRHQRTHTGEKPYKCPECGKSFSRADNLTEHQRTHTGEKPYKCPECGKSFSQRANLRAHQRTHTGEKPYKCPECGKSFSRSDKLVRHQRTHTGEKPYKCPECGKSFSQAGHLASHQRTHTGEKPYKCPECGKSFSRSDKLVRHQRTHTGEKPTGKKTS

SEQ ID NO: 1448 - protein, 209 aa, Artificial Sequence
  source: /note="Description of Artificial Sequence: Synthetic polypeptide"
LEPGEKPYKCPECGKSFSRADNLTEHQRTHTGEKPYKCPECGKSFSQRANLRAHQRTHTGEKPYKCPECGKSFSRSDKLVRHQRTHTGEKPYKCPECGKSFSQAGHLASHQRTHTGEKPYKCPECGKSFSRSDKLVRHQRTHTGEKPYKCPECGKSFSRSDHLTTHQRTHTGEKPYKCPECGKSFSRSDKLVRHQRTHTGEKPTGKKTS

SEQ ID NO: 1449 - protein, 209 aa, Artificial Sequence
  source: /note="Description of Artificial Sequence: Synthetic polypeptide"
LEPGEKPYKCPECGKSFSRSDELVRHQRTHTGEKPYKCPECGKSFSTTGNLTVHQRTHTGEKPYKCPECGKSFSRSDNLVRHQRTHTGEKPYKCPECGKSFSRADNLTEHQRTHTGEKPYKCPECGKSFSQRANLRAHQRTHTGEKPYKCPECGKSFSRSDKLVRHQRTHTGEKPYKCPECGKSFSQAGHLASHQRTHTGEKPTGKKTS

SEQ ID NO: 1450 - protein, 209 aa, Artificial Sequence
  source: /note="Description of Artificial Sequence: Synthetic polypeptide"
LEPGEKPYKCPECGKSFSRSDNLVRHQRTHTGEKPYKCPECGKSFSRADNLTEHQRTHTGEKPYKCPECGKSFSQRANLRAHQRTHTGEKPYKCPECGKSFSRSDKLVRHQRTHTGEKPYKCPECGKSFSQAGHLASHQRTHTGEKPYKCPECGKSFSRSDKLVRHQRTHTGEKPYKCPECGKSFSRSDHLTTHQRTHTGEKPTGKKTS

SEQ ID NO: 1451 - protein, 209 aa, Artificial Sequence
  source: /note="Description of Artificial Sequence: Synthetic polypeptide"
LEPGEKPYKCPECGKSFSRSDKLVRHQRTHTGEKPYKCPECGKSFSQAGHLASHQRTHTGEKPYKCPECGKSFSRSDKLVRHQRTHTGEKPYKCPECGKSFSRSDHLTTHQRTHTGEKPYKCPECGKSFSRSDKLVRHQRTHTGEKPYKCPECGKSFSRSDHLTNHQRTHTGEKPYKCPECGKSFSRSDKLVRHQRTHTGEKPTGKKTS

SEQ ID NO: 1452 - protein, 209 aa, Artificial Sequence
  source: /note="Description of Artificial Sequence: Synthetic polypeptide"
LEPGEKPYKCPECGKSFSQRANLRAHQRTHTGEKPYKCPECGKSFSRSDKLVRHQRTHTGEKPYKCPECGKSFSQAGHLASHQRTHTGEKPYKCPECGKSFSRSDKLVRHQRTHTGEKPYKCPECGKSFSRSDHLTTHQRTHTGEKPYKCPECGKSFSRSDKLVRHQRTHTGEKPYKCPECGKSFSRSDHLTNHQRTHTGEKPTGKKTS

SEQ ID NO: 1453 - protein, 209 aa, Artificial Sequence
  source: /note="Description of Artificial Sequence: Synthetic polypeptide"
LEPGEKPYKCPECGKSFSRRDELNVHQRTHTGEKPYKCPECGKSFSRSDELVRHQRTHTGEKPYKCPECGKSFSTTGNLTVHQRTHTGEKPYKCPECGKSFSRSDNLVRHQRTHTGEKPYKCPECGKSFSRADNLTEHQRTHTGEKPYKCPECGKSFSQRANLRAHQRTHTGEKPYKCPECGKSFSRSDKLVRHQRTHTGEKPTGKKTS

SEQ ID NO: 1454 - protein, 209 aa, Artificial Sequence
  source: /note="Description of Artificial Sequence: Synthetic polypeptide"
LEPGEKPYKCPECGKSFSQRAHLERHQRTHTGEKPYKCPECGKSFSRRDELNVHQRTHTGEKPYKCPECGKSFSRSDELVRHQRTHTGEKPYKCPECGKSFSTTGNLTVHQRTHTGEKPYKCPECGKSFSRSDNLVRHQRTHTGEKPYKCPECGKSFSRADNLTEHQRTHTGEKPYKCPECGKSFSQRANLRAHQRTHTGEKPTGKKTS

SEQ ID NO: 1455 - protein, 209 aa, Artificial Sequence
  source: /note="Description of Artificial Sequence: Synthetic polypeptide"
LEPGEKPYKCPECGKSFSQRANLRAHQRTHTGEKPYKCPECGKSFSQRAHLERHQRTHTGEKPYKCPECGKSFSRRDELNVHQRTHTGEKPYKCPECGKSFSRSDELVRHQRTHTGEKPYKCPECGKSFSTTGNLTVHQRTHTGEKPYKCPECGKSFSRSDNLVRHQRTHTGEKPYKCPECGKSFSRADNLTEHQRTHTGEKPTGKKTS

SEQ ID NO: 1456 - protein, 209 aa, Artificial Sequence
  source: /note="Description of Artificial Sequence: Synthetic polypeptide"
LEPGEKPYKCPECGKSFSRNDALTEHQRTHTGEKPYKCPECGKSFSRSDNLVRHQRTHTGEKPYKCPECGKSFSRSDHLTTHQRTHTGEKPYKCPECGKSFSSKKALTEHQRTHTGEKPYKCPECGKSFSQRANLRAHQRTHTGEKPYKCPECGKSFSRADNLTEHQRTHTGEKPYKCPECGKSFSDPGHLVRHQRTHTGEKPTGKKTS

SEQ ID NO: 1457 - protein, 209 aa, Artificial Sequence
  source: /note="Description of Artificial Sequence: Synthetic polypeptide"
LEPGEKPYKCPECGKSFSRSDNLVRHQRTHTGEKPYKCPECGKSFSRSDHLTTHQRTHTGEKPYKCPECGKSFSSKKALTEHQRTHTGEKPYKCPECGKSFSQRANLRAHQRTHTGEKPYKCPECGKSFSRADNLTEHQRTHTGEKPYKCPECGKSFSDPGHLVRHQRTHTGEKPYKCPECGKSFSRNDALTEHQRTHTGEKPTGKKTS

SEQ ID NO: 1458 - protein, 209 aa, Artificial Sequence
  source: /note="Description of Artificial Sequence: Synthetic polypeptide"
LEPGEKPYKCPECGKSFSRSDNLVRHQRTHTGEKPYKCPECGKSFSRSDHLTTHQRTHTGEKPYKCPECGKSFSRNDALTEHQRTHTGEKPYKCPECGKSFSRSDNLVRHQRTHTGEKPYKCPECGKSFSRSDHLTTHQRTHTGEKPYKCPECGKSFSSKKALTEHQRTHTGEKPYKCPECGKSFSQRANLRAHQRTHTGEKPTGKKTS

SEQ ID NO: 1459 - protein, 209 aa, Artificial Sequence
  source: /note="Description of Artificial Sequence: Synthetic polypeptide"
LEPGEKPYKCPECGKSFSSKKALTEHQRTHTGEKPYKCPECGKSFSQRANLRAHQRTHTGEKPYKCPECGKSFSRADNLTEHQRTHTGEKPYKCPECGKSFSDPGHLVRHQRTHTGEKPYKCPECGKSFSRNDALTEHQRTHTGEKPYKCPECGKSFSERSHLREHQRTHTGEKPYKCPECGKSFSDCRDLARHQRTHTGEKPTGKKTS

SEQ ID NO: 1460 - protein, 209 aa, Artificial Sequence
  source: /note="Description of Artificial Sequence: Synthetic polypeptide"
LEPGEKPYKCPECGKSFSRSDHLTTHQRTHTGEKPYKCPECGKSFSSKKALTEHQRTHTGEKPYKCPECGKSFSQRANLRAHQRTHTGEKPYKCPECGKSFSRADNLTEHQRTHTGEKPYKCPECGKSFSDPGHLVRHQRTHTGEKPYKCPECGKSFSRNDALTEHQRTHTGEKPYKCPECGKSFSERSHLREHQRTHTGEKPTGKKTS

SEQ ID NO: 1461 - protein, 209 aa, Artificial Sequence
  source: /note="Description of Artificial Sequence: Synthetic polypeptide"
LEPGEKPYKCPECGKSFSRSDHLTTHQRTHTGEKPYKCPECGKSFSRNDALTEHQRTHTGEKPYKCPECGKSFSRSDNLVRHQRTHTGEKPYKCPECGKSFSRSDHLTTHQRTHTGEKPYKCPECGKSFSSKKALTEHQRTHTGEKPYKCPECGKSFSQRANLRAHQRTHTGEKPYKCPECGKSFSRADNLTEHQRTHTGEKPTGKKTS

SEQ ID NO: 1462 - protein, 209 aa, Artificial Sequence
  source: /note="Description of Artificial Sequence: Synthetic polypeptide"
LEPGEKPYKCPECGKSFSRADNLTEHQRTHTGEKPYKCPECGKSFSDPGHLVRHQRTHTGEKPYKCPECGKSFSRNDALTEHQRTHTGEKPYKCPECGKSFSERSHLREHQRTHTGEKPYKCPECGKSFSDCRDLARHQRTHTGEKPYKCPECGKSFSQRAHLERHQRTHTGEKPYKCPECGKSFSTSGNLVRHQRTHTGEKPTGKKTS

SEQ ID NO: 1463 - protein, 209 aa, Artificial Sequence
  source: /note="Description of Artificial Sequence: Synthetic polypeptide"
LEPGEKPYKCPECGKSFSQRANLRAHQRTHTGEKPYKCPECGKSFSRADNLTEHQRTHTGEKPYKCPECGKSFSDPGHLVRHQRTHTGEKPYKCPECGKSFSRNDALTEHQRTHTGEKPYKCPECGKSFSERSHLREHQRTHTGEKPYKCPECGKSFSDCRDLARHQRTHTGEKPYKCPECGKSFSQRAHLERHQRTHTGEKPTGKKTS

SEQ ID NO: 1464 - protein, 209 aa, Artificial Sequence
  source: /note="Description of Artificial Sequence: Synthetic polypeptide"
LEPGEKPYKCPECGKSFSRSDNLVRHQRTHTGEKPYKCPECGKSFSRTDTLRDHQRTHTGEKPYKCPECGKSFSRSDNLVRHQRTHTGEKPYKCPECGKSFSRSDHLTTHQRTHTGEKPYKCPECGKSFSRNDALTEHQRTHTGEKPYKCPECGKSFSRSDNLVRHQRTHTGEKPYKCPECGKSFSRSDHLTTHQRTHTGEKPTGKKTS

SEQ ID NO: 1465 - protein, 209 aa, Artificial Sequence
  source: /note="Description of Artificial Sequence: Synthetic polypeptide"
LEPGEKPYKCPECGKSFSRSDHLTNHQRTHTGEKPYKCPECGKSFSRSDNLVRHQRTHTGEKPYKCPECGKSFSRTDTLRDHQRTHTGEKPYKCPECGKSFSRSDNLVRHQRTHTGEKPYKCPECGKSFSRSDHLTTHQRTHTGEKPYKCPECGKSFSRNDALTEHQRTHTGEKPYKCPECGKSFSRSDNLVRHQRTHTGEKPTGKKTS

SEQ ID NO: 1466 - protein, 209 aa, Artificial Sequence
  source: /note="Description of Artificial Sequence: Synthetic polypeptide"
LEPGEKPYKCPECGKSFSDPGHLVRHQRTHTGEKPYKCPECGKSFSRSDHLTNHQRTHTGEKPYKCPECGKSFSRSDNLVRHQRTHTGEKPYKCPECGKSFSRTDTLRDHQRTHTGEKPYKCPECGKSFSRSDNLVRHQRTHTGEKPYKCPECGKSFSRSDHLTTHQRTHTGEKPYKCPECGKSFSRNDALTEHQRTHTGEKPTGKKTS

SEQ ID NO: 1467 - protein, 209 aa, Artificial Sequence
  source: /note="Description of Artificial Sequence: Synthetic polypeptide"
LEPGEKPYKCPECGKSFSRSDELVRHQRTHTGEKPYKCPECGKSFSRSDHLTNHQRTHTGEKPYKCPECGKSFSDPGHLVRHQRTHTGEKPYKCPECGKSFSRSDHLTNHQRTHTGEKPYKCPECGKSFSRSDNLVRHQRTHTGEKPYKCPECGKSFSRTDTLRDHQRTHTGEKPYKCPECGKSFSRSDNLVRHQRTHTGEKPTGKKTS

SEQ ID NO: 1468 - protein, 209 aa, Artificial Sequence
  source: /note="Description of Artificial Sequence: Synthetic polypeptide"
LEPGEKPYKCPECGKSFSRSDHLTNHQRTHTGEKPYKCPECGKSFSDPGHLVRHQRTHTGEKPYKCPECGKSFSRSDHLTNHQRTHTGEKPYKCPECGKSFSRSDNLVRHQRTHTGEKPYKCPECGKSFSRTDTLRDHQRTHTGEKPYKCPECGKSFSRSDNLVRHQRTHTGEKPYKCPECGKSFSRSDHLTTHQRTHTGEKPTGKKTS

SEQ ID NO: 1469 - protein, 209 aa, Artificial Sequence
  source: /note="Description of Artificial Sequence: Synthetic polypeptide"
LEPGEKPYKCPECGKSFSRTDTLRDHQRTHTGEKPYKCPECGKSFSRSDNLVRHQRTHTGEKPYKCPECGKSFSRSDHLTTHQRTHTGEKPYKCPECGKSFSRNDALTEHQRTHTGEKPYKCPECGKSFSRSDNLVRHQRTHTGEKPYKCPECGKSFSRSDHLTTHQRTHTGEKPYKCPECGKSFSSKKALTEHQRTHTGEKPTGKKTS

SEQ ID NO: 1470 - protein, 209 aa, Artificial Sequence
  source: /note="Description of Artificial Sequence: Synthetic polypeptide"
LEPGEKPYKCPECGKSFSQRAHLERHQRTHTGEKPYKCPECGKSFSRSDELVRHQRTHTGEKPYKCPECGKSFSRSDHLTNHQRTHTGEKPYKCPECGKSFSDPGHLVRHQRTHTGEKPYKCPECGKSFSRSDHLTNHQRTHTGEKPYKCPECGKSFSRSDNLVRHQRTHTGEKPYKCPECGKSFSRTDTLRDHQRTHTGEKPTGKKTS

SEQ ID NO: 1471 - protein, 209 aa, Artificial Sequence
  source: /note="Description of Artificial Sequence: Synthetic polypeptide"
LEPGEKPYKCPECGKSFSDPGHLVRHQRTHTGEKPYKCPECGKSFSRNDALTEHQRTHTGEKPYKCPECGKSFSERSHLREHQRTHTGEKPYKCPECGKSFSDCRDLARHQRTHTGEKPYKCPECGKSFSQRAHLERHQRTHTGEKPYKCPECGKSFSTSGNLVRHQRTHTGEKPYKCPECGKSFSQSGHLTEHQRTHTGEKPTGKKTS

SEQ ID NO: 1472 - protein, 209 aa, Artificial Sequence
  source: /note="Description of Artificial Sequence: Synthetic polypeptide"
LEPGEKPYKCPECGKSFSRSDKLVRHQRTHTGEKPYKCPECGKSFSTHLDLIRHQRTHTGEKPYKCPECGKSFSDSGNLRVHQRTHTGEKPYKCPECGKSFSQLAHLRAHQRTHTGEKPYKCPECGKSFSDCRDLARHQRTHTGEKPYKCPECGKSFSRSDHLTTHQRTHTGEKPYKCPECGKSFSDCRDLARHQRTHTGEKPTGKKTS

SEQ ID NO: 1473 - protein, 209 aa, Artificial Sequence
  source: /note="Description of Artificial Sequence: Synthetic polypeptide"
LEPGEKPYKCPECGKSFSTHLDLIRHQRTHTGEKPYKCPECGKSFSDSGNLRVHQRTHTGEKPYKCPECGKSFSQLAHLRAHQRTHTGEKPYKCPECGKSFSDCRDLARHQRTHTGEKPYKCPECGKSFSRSDHLTTHQRTHTGEKPYKCPECGKSFSDCRDLARHQRTHTGEKPYKCPECGKSFSTSHSLTEHQRTHTGEKPTGKKTS

SEQ ID NO: 1474 - protein, 209 aa, Artificial Sequence
  source: /note="Description of Artificial Sequence: Synthetic polypeptide"
LEPGEKPYKCPECGKSFSERSHLREHQRTHTGEKPYKCPECGKSFSRSDKLVRHQRTHTGEKPYKCPECGKSFSTHLDLIRHQRTHTGEKPYKCPECGKSFSDSGNLRVHQRTHTGEKPYKCPECGKSFSQLAHLRAHQRTHTGEKPYKCPECGKSFSDCRDLARHQRTHTGEKPYKCPECGKSFSRSDHLTTHQRTHTGEKPTGKKTS

SEQ ID NO: 1475 - protein, 209 aa, Artificial Sequence
  source: /note="Description of Artificial Sequence: Synthetic polypeptide"
LEPGEKPYKCPECGKSFSDSGNLRVHQRTHTGEKPYKCPECGKSFSQLAHLRAHQRTHTGEKPYKCPECGKSFSDCRDLARHQRTHTGEKPYKCPECGKSFSRSDHLTTHQRTHTGEKPYKCPECGKSFSDCRDLARHQRTHTGEKPYKCPECGKSFSTSHSLTEHQRTHTGEKPYKCPECGKSFSRSDNLVRHQRTHTGEKPTGKKTS

SEQ ID NO: 1476 - protein, 209 aa, Artificial Sequence
  source: /note="Description of Artificial Sequence: Synthetic polypeptide"
LEPGEKPYKCPECGKSFSQLAHLRAHQRTHTGEKPYKCPECGKSFSDCRDLARHQRTHTGEKPYKCPECGKSFSRSDHLTTHQRTHTGEKPYKCPECGKSFSDCRDLARHQRTHTGEKPYKCPECGKSFSTSHSLTEHQRTHTGEKPYKCPECGKSFSRSDNLVRHQRTHTGEKPYKCPECGKSFSRRDELNVHQRTHTGEKPTGKKTS

SEQ ID NO: 1477 - protein, 209 aa, Artificial Sequence
  source: /note="Description of Artificial Sequence: Synthetic polypeptide"
LEPGEKPYKCPECGKSFSDCRDLARHQRTHTGEKPYKCPECGKSFSRSDHLTTHQRTHTGEKPYKCPECGKSFSDCRDLARHQRTHTGEKPYKCPECGKSFSTSHSLTEHQRTHTGEKPYKCPECGKSFSRSDNLVRHQRTHTGEKPYKCPECGKSFSRRDELNVHQRTHTGEKPYKCPECGKSFSRSDNLVRHQRTHTGEKPTGKKTS

SEQ ID NO: 1478 - protein, 209 aa, Artificial Sequence
  source: /note="Description of Artificial Sequence: Synthetic polypeptide"
LEPGEKPYKCPECGKSFSRSDKLVRHQRTHTGEKPYKCPECGKSFSQSGDLRRHQRTHTGEKPYKCPECGKSFSRSDKLVRHQRTHTGEKPYKCPECGKSFSQLAHLRAHQRTHTGEKPYKCPECGKSFSRSDKLTEHQRTHTGEKPYKCPECGKSFSQLAHLRAHQRTHTGEKPYKCPECGKSFSRSDKLVRHQRTHTGEKPTGKKTS

SEQ ID NO: 1479 - protein, 209 aa, Artificial Sequence
  source: /note="Description of Artificial Sequence: Synthetic polypeptide"
LEPGEKPYKCPECGKSFSRSDHLTTHQRTHTGEKPYKCPECGKSFSRSDKLVRHQRTHTGEKPYKCPECGKSFSQSGDLRRHQRTHTGEKPYKCPECGKSFSRSDKLVRHQRTHTGEKPYKCPECGKSFSQLAHLRAHQRTHTGEKPYKCPECGKSFSRSDKLTEHQRTHTGEKPYKCPECGKSFSQLAHLRAHQRTHTGEKPTGKKTS

SEQ ID NO: 1480 - protein, 209 aa, Artificial Sequence
  source: /note="Description of Artificial Sequence: Synthetic polypeptide"
LEPGEKPYKCPECGKSFSTSGNLVRHQRTHTGEKPYKCPECGKSFSRSDHLTTHQRTHTGEKPYKCPECGKSFSRSDKLVRHQRTHTGEKPYKCPECGKSFSQSGDLRRHQRTHTGEKPYKCPECGKSFSRSDKLVRHQRTHTGEKPYKCPECGKSFSQLAHLRAHQRTHTGEKPYKCPECGKSFSRSDKLTEHQRTHTGEKPTGKKTS

SEQ ID NO: 1481 - protein, 209 aa, Artificial Sequence
  source: /note="Description of Artificial Sequence: Synthetic polypeptide"
LEPGEKPYKCPECGKSFSSKKALTEHQRTHTGEKPYKCPECGKSFSTSGNLVRHQRTHTGEKPYKCPECGKSFSRSDHLTTHQRTHTGEKPYKCPECGKSFSRSDKLVRHQRTHTGEKPYKCPECGKSFSQSGDLRRHQRTHTGEKPYKCPECGKSFSRSDKLVRHQRTHTGEKPYKCPECGKSFSQLAHLRAHQRTHTGEKPTGKKTS

SEQ ID NO: 1482 - protein, 209 aa, Artificial Sequence
  source: /note="Description of Artificial Sequence: Synthetic polypeptide"
LEPGEKPYKCPECGKSFSRSDKLTEHQRTHTGEKPYKCPECGKSFSRSDNLVRHQRTHTGEKPYKCPECGKSFSRADNLTEHQRTHTGEKPYKCPECGKSFSRSDNLVRHQRTHTGEKPYKCPECGKSFSRSDHLTNHQRTHTGEKPYKCPECGKSFSSKKALTEHQRTHTGEKPYKCPECGKSFSTSGNLVRHQRTHTGEKPTGKKTS

SEQ ID NO: 1483 - protein, 209 aa, Artificial Sequence
  source: /note="Description of Artificial Sequence: Synthetic polypeptide"
LEPGEKPYKCPECGKSFSRSDHLTNHQRTHTGEKPYKCPECGKSFSSKKALTEHQRTHTGEKPYKCPECGKSFSTSGNLVRHQRTHTGEKPYKCPECGKSFSRSDHLTTHQRTHTGEKPYKCPECGKSFSRSDKLVRHQRTHTGEKPYKCPECGKSFSQSGDLRRHQRTHTGEKPYKCPECGKSFSRSDKLVRHQRTHTGEKPTGKKTS

SEQ ID NO: 1484 - protein, 209 aa, Artificial Sequence
  source: /note="Description of Artificial Sequence: Synthetic polypeptide"
LEPGEKPYKCPECGKSFSRADNLTEHQRTHTGEKPYKCPECGKSFSRSDNLVRHQRTHTGEKPYKCPECGKSFSRSDHLTNHQRTHTGEKPYKCPECGKSFSSKKALTEHQRTHTGEKPYKCPECGKSFSTSGNLVRHQRTHTGEKPYKCPECGKSFSRSDHLTTHQRTHTGEKPYKCPECGKSFSRSDKLVRHQRTHTGEKPTGKKTS

SEQ ID NO: 1485 - protein, 209 aa, Artificial Sequence
  source: /note="Description of Artificial Sequence: Synthetic polypeptide"
LEPGEKPYKCPECGKSFSRSDNLVRHQRTHTGEKPYKCPECGKSFSRADNLTEHQRTHTGEKPYKCPECGKSFSRSDNLVRHQRTHTGEKPYKCPECGKSFSRSDHLTNHQRTHTGEKPYKCPECGKSFSSKKALTEHQRTHTGEKPYKCPECGKSFSTSGNLVRHQRTHTGEKPYKCPECGKSFSRSDHLTTHQRTHTGEKPTGKKTS

SEQ ID NO: 1486 - protein, 209 aa, Artificial Sequence
  source: /note="Description of Artificial Sequence: Synthetic polypeptide"
LEPGEKPYKCPECGKSFSRSDNLVRHQRTHTGEKPYKCPECGKSFSRSDHLTNHQRTHTGEKPYKCPECGKSFSSKKALTEHQRTHTGEKPYKCPECGKSFSTSGNLVRHQRTHTGEKPYKCPECGKSFSRSDHLTTHQRTHTGEKPYKCPECGKSFSRSDKLVRHQRTHTGEKPYKCPECGKSFSQSGDLRRHQRTHTGEKPTGKKTS

SEQ ID NO: 1487 - protein, 209 aa, Artificial Sequence
  source: /note="Description of Artificial Sequence: Synthetic polypeptide"
LEPGEKPYKCPECGKSFSHKNALQNHQRTHTGEKPYKCPECGKSFSQRAHLERHQRTHTGEKPYKCPECGKSFSRSDKLTEHQRTHTGEKPYKCPECGKSFSRSDNLVRHQRTHTGEKPYKCPECGKSFSRADNLTEHQRTHTGEKPYKCPECGKSFSRSDNLVRHQRTHTGEKPYKCPECGKSFSRSDHLTNHQRTHTGEKPTGKKTS

SEQ ID NO: 1488 - protein, 209 aa, Artificial Sequence
  source: /note="Description of Artificial Sequence: Synthetic polypeptide"
LEPGEKPYKCPECGKSFSQRAHLERHQRTHTGEKPYKCPECGKSFSRSDKLTEHQRTHTGEKPYKCPECGKSFSRSDNLVRHQRTHTGEKPYKCPECGKSFSRADNLTEHQRTHTGEKPYKCPECGKSFSRSDNLVRHQRTHTGEKPYKCPECGKSFSRSDHLTNHQRTHTGEKPYKCPECGKSFSSKKALTEHQRTHTGEKPTGKKTS

SEQ ID NO: 1489 - protein, 209 aa, Artificial Sequence
  source: /note="Description of Artificial Sequence: Synthetic polypeptide"
LEPGEKPYKCPECGKSFSQRAHLERHQRTHTGEKPYKCPECGKSFSHKNALQNHQRTHTGEKPYKCPECGKSFSQRAHLERHQRTHTGEKPYKCPECGKSFSRSDKLTEHQRTHTGEKPYKCPECGKSFSRSDNLVRHQRTHTGEKPYKCPECGKSFSRADNLTEHQRTHTGEKPYKCPECGKSFSRSDNLVRHQRTHTGEKPTGKKTS

SEQ ID NO: 1490 - protein, 209 aa, Artificial Sequence
  source: /note="Description of Artificial Sequence: Synthetic polypeptide"
LEPGEKPYKCPECGKSFSTSGHLVRHQRTHTGEKPYKCPECGKSFSQRAHLERHQRTHTGEKPYKCPECGKSFSHKNALQNHQRTHTGEKPYKCPECGKSFSQRAHLERHQRTHTGEKPYKCPECGKSFSRSDKLTEHQRTHTGEKPYKCPECGKSFSRSDNLVRHQRTHTGEKPYKCPECGKSFSRADNLTEHQRTHTGEKPTGKKTS

SEQ ID NO: 1491 - protein, 209 aa, Artificial Sequence
  source: /note="Description of Artificial Sequence: Synthetic polypeptide"
LEPGEKPYKCPECGKSFSQSSNLVRHQRTHTGEKPYKCPECGKSFSTSGHLVRHQRTHTGEKPYKCPECGKSFSQRAHLERHQRTHTGEKPYKCPECGKSFSHKNALQNHQRTHTGEKPYKCPECGKSFSQRAHLERHQRTHTGEKPYKCPECGKSFSRSDKLTEHQRTHTGEKPYKCPECGKSFSRSDNLVRHQRTHTGEKPTGKKTS

SEQ ID NO: 1492 - protein, 209 aa, Artificial Sequence
  source: /note="Description of Artificial Sequence: Synthetic polypeptide"
LEPGEKPYKCPECGKSFSQSSNLVRHQRTHTGEKPYKCPECGKSFSRSDKLVRHQRTHTGEKPYKCPECGKSFSERSHLREHQRTHTGEKPYKCPECGKSFSRSDHLTNHQRTHTGEKPYKCPECGKSFSERSHLREHQRTHTGEKPYKCPECGKSFSRSDKLVRHQRTHTGEKPYKCPECGKSFSSPADLTRHQRTHTGEKPTGKKTS

SEQ ID NO: 1493 - protein, 209 aa, Artificial Sequence
  source: /note="Description of Artificial Sequence: Synthetic polypeptide"
LEPGEKPYKCPECGKSFSRSDHLTNHQRTHTGEKPYKCPECGKSFSRSDHLTTHQRTHTGEKPYKCPECGKSFSTTGNLTVHQRTHTGEKPYKCPECGKSFSRSDKLVRHQRTHTGEKPYKCPECGKSFSRSDDLVRHQRTHTGEKPYKCPECGKSFSQRAHLERHQRTHTGEKPYKCPECGKSFSQSGDLRRHQRTHTGEKPTGKKTS

SEQ ID NO: 1494 - protein, 209 aa, Artificial Sequence
  source: /note="Description of Artificial Sequence: Synthetic polypeptide"
LEPGEKPYKCPECGKSFSQAGHLASHQRTHTGEKPYKCPECGKSFSRSDHLTNHQRTHTGEKPYKCPECGKSFSRSDHLTTHQRTHTGEKPYKCPECGKSFSTTGNLTVHQRTHTGEKPYKCPECGKSFSRSDKLVRHQRTHTGEKPYKCPECGKSFSRSDDLVRHQRTHTGEKPYKCPECGKSFSQRAHLERHQRTHTGEKPTGKKTS

SEQ ID NO: 1495 - protein, 209 aa, Artificial Sequence
  source: /note="Description of Artificial Sequence: Synthetic polypeptide"
LEPGEKPYKCPECGKSFSTTGNLTVHQRTHTGEKPYKCPECGKSFSRSDKLVRHQRTHTGEKPYKCPECGKSFSRSDDLVRHQRTHTGEKPYKCPECGKSFSQRAHLERHQRTHTGEKPYKCPECGKSFSQSGDLRRHQRTHTGEKPYKCPECGKSFSQRAHLERHQRTHTGEKPYKCPECGKSFSRADNLTEHQRTHTGEKPTGKKTS

SEQ ID NO: 1496 - protein, 209 aa, Artificial Sequence
  source: /note="Description of Artificial Sequence: Synthetic polypeptide"
LEPGEKPYKCPECGKSFSRSDHLTTHQRTHTGEKPYKCPECGKSFSTTGNLTVHQRTHTGEKPYKCPECGKSFSRSDKLVRHQRTHTGEKPYKCPECGKSFSRSDDLVRHQRTHTGEKPYKCPECGKSFSQRAHLERHQRTHTGEKPYKCPECGKSFSQSGDLRRHQRTHTGEKPYKCPECGKSFSQRAHLERHQRTHTGEKPTGKKTS

SEQ ID NO: 1497 - protein, 209 aa, Artificial Sequence
  source: /note="Description of Artificial Sequence: Synthetic polypeptide"
LEPGEKPYKCPECGKSFSDPGALVRHQRTHTGEKPYKCPECGKSFSTSHSLTEHQRTHTGEKPYKCPECGKSFSTTGALTEHQRTHTGEKPYKCPECGKSFSQRANLRAHQRTHTGEKPYKCPECGKSFSSKKHLAEHQRTHTGEKPYKCPECGKSFSTKNSLTEHQRTHTGEKPYKCPECGKSFSDPGHLVRHQRTHTGEKPTGKKTS

SEQ ID NO: 1498 - protein, 209 aa, Artificial Sequence
  source: /note="Description of Artificial Sequence: Synthetic polypeptide"
LEPGEKPYKCPECGKSFSTSGNLTEHQRTHTGEKPYKCPECGKSFSDPGALVRHQRTHTGEKPYKCPECGKSFSTSHSLTEHQRTHTGEKPYKCPECGKSFSTTGALTEHQRTHTGEKPYKCPECGKSFSQRANLRAHQRTHTGEKPYKCPECGKSFSSKKHLAEHQRTHTGEKPYKCPECGKSFSTKNSLTEHQRTHTGEKPTGKKTS

SEQ ID NO: 1499 - protein, 209 aa, Artificial Sequence
  source: /note="Description of Artificial Sequence: Synthetic polypeptide"
LEPGEKPYKCPECGKSFSRSDHLTTHQRTHTGEKPYKCPECGKSFSDSGNLRVHQRTHTGEKPYKCPECGKSFSRSDKLVRHQRTHTGEKPYKCPECGKSFSRSDKLTEHQRTHTGEKPYKCPECGKSFSRNDALTEHQRTHTGEKPYKCPECGKSFSQRANLRAHQRTHTGEKPYKCPECGKSFSRSDKLVRHQRTHTGEKPTGKKTS

SEQ ID NO: 1500 - protein, 209 aa, Artificial Sequence
  source: /note="Description of Artificial Sequence: Synthetic polypeptide"
LEPGEKPYKCPECGKSFSDSGNLRVHQRTHTGEKPYKCPECGKSFSRSDKLVRHQRTHTGEKPYKCPECGKSFSRSDKLTEHQRTHTGEKPYKCPECGKSFSRNDALTEHQRTHTGEKPYKCPECGKSFSQRANLRAHQRTHTGEKPYKCPECGKSFSRSDKLVRHQRTHTGEKPYKCPECGKSFSDKKDLTRHQRTHTGEKPTGKKTS

SEQ ID NO: 1501 - protein, 209 aa, Artificial Sequence
  source: /note="Description of Artificial Sequence: Synthetic polypeptide"
LEPGEKPYKCPECGKSFSRKDNLKNHQRTHTGEKPYKCPECGKSFSRSDHLTTHQRTHTGEKPYKCPECGKSFSDSGNLRVHQRTHTGEKPYKCPECGKSFSRSDKLVRHQRTHTGEKPYKCPECGKSFSRSDKLTEHQRTHTGEKPYKCPECGKSFSRNDALTEHQRTHTGEKPYKCPECGKSFSQRANLRAHQRTHTGEKPTGKKTS

SEQ ID NO: 1502 - protein, 209 aa, Artificial Sequence
  source: /note="Description of Artificial Sequence: Synthetic polypeptide"
LEPGEKPYKCPECGKSFSRSDKLVRHQRTHTGEKPYKCPECGKSFSRSDKLTEHQRTHTGEKPYKCPECGKSFSRNDALTEHQRTHTGEKPYKCPECGKSFSQRANLRAHQRTHTGEKPYKCPECGKSFSRSDKLVRHQRTHTGEKPYKCPECGKSFSDKKDLTRHQRTHTGEKPYKCPECGKSFSQRAHLERHQRTHTGEKPTGKKTS

SEQ ID NO: 1503 - protein, 209 aa, Artificial Sequence
  source: /note="Description of Artificial Sequence: Synthetic polypeptide"
LEPGEKPYKCPECGKSFSRSDKLTEHQRTHTGEKPYKCPECGKSFSRNDALTEHQRTHTGEKPYKCPECGKSFSQRANLRAHQRTHTGEKPYKCPECGKSFSRSDKLVRHQRTHTGEKPYKCPECGKSFSDKKDLTRHQRTHTGEKPYKCPECGKSFSQRAHLERHQRTHTGEKPYKCPECGKSFSRSDHLTNHQRTHTGEKPTGKKTS

SEQ ID NO: 1504 - protein, 209 aa, Artificial Sequence
  source: /note="Description of Artificial Sequence: Synthetic polypeptide"
LEPGEKPYKCPECGKSFSQRAHLERHQRTHTGEKPYKCPECGKSFSRKDNLKNHQRTHTGEKPYKCPECGKSFSRSDHLTTHQRTHTGEKPYKCPECGKSFSDSGNLRVHQRTHTGEKPYKCPECGKSFSRSDKLVRHQRTHTGEKPYKCPECGKSFSRSDKLTEHQRTHTGEKPYKCPECGKSFSRNDALTEHQRTHTGEKPTGKKTS

SEQ ID NO: 1505 - protein, 209 aa, Artificial Sequence
  source: /note="Description of Artificial Sequence: Synthetic polypeptide"
LEPGEKPYKCPECGKSFSTSGELVRHQRTHTGEKPYKCPECGKSFSQRAHLERHQRTHTGEKPYKCPECGKSFSRKDNLKNHQRTHTGEKPYKCPECGKSFSRSDHLTTHQRTHTGEKPYKCPECGKSFSDSGNLRVHQRTHTGEKPYKCPECGKSFSRSDKLVRHQRTHTGEKPYKCPECGKSFSRSDKLTEHQRTHTGEKPTGKKTS

SEQ ID NO: 1506 - protein, 209 aa, Artificial Sequence
  source: /note="Description of Artificial Sequence: Synthetic polypeptide"
LEPGEKPYKCPECGKSFSRNDALTEHQRTHTGEKPYKCPECGKSFSQRANLRAHQRTHTGEKPYKCPECGKSFSRSDKLVRHQRTHTGEKPYKCPECGKSFSDKKDLTRHQRTHTGEKPYKCPECGKSFSQRAHLERHQRTHTGEKPYKCPECGKSFSRSDHLTNHQRTHTGEKPYKCPECGKSFSSKKHLAEHQRTHTGEKPTGKKTS

SEQ ID NO: 1507 - protein, 209 aa, Artificial Sequence
  source: /note="Description of Artificial Sequence: Synthetic polypeptide"
LEPGEKPYKCPECGKSFSQRANLRAHQRTHTGEKPYKCPECGKSFSRSDKLVRHQRTHTGEKPYKCPECGKSFSDKKDLTRHQRTHTGEKPYKCPECGKSFSQRAHLERHQRTHTGEKPYKCPECGKSFSRSDHLTNHQRTHTGEKPYKCPECGKSFSSKKHLAEHQRTHTGEKPYKCPECGKSFSTSGELVRHQRTHTGEKPTGKKTS

SEQ ID NO: 1508 - protein, 209 aa, Artificial Sequence
  source: /note="Description of Artificial Sequence: Synthetic polypeptide"
LEPGEKPYKCPECGKSFSSKKHLAEHQRTHTGEKPYKCPECGKSFSTSGELVRHQRTHTGEKPYKCPECGKSFSQRAHLERHQRTHTGEKPYKCPECGKSFSRKDNLKNHQRTHTGEKPYKCPECGKSFSRSDHLTTHQRTHTGEKPYKCPECGKSFSDSGNLRVHQRTHTGEKPYKCPECGKSFSRSDKLVRHQRTHTGEKPTGKKTS

SEQ ID NO: 1509 - protein, 209 aa, Artificial Sequence
  source: /note="Description of Artificial Sequence: Synthetic polypeptide"
LEPGEKPYKCPECGKSFSQLAHLRAHQRTHTGEKPYKCPECGKSFSSKKHLAEHQRTHTGEKPYKCPECGKSFSTSGELVRHQRTHTGEKPYKCPECGKSFSQRAHLERHQRTHTGEKPYKCPECGKSFSRKDNLKNHQRTHTGEKPYKCPECGKSFSRSDHLTTHQRTHTGEKPYKCPECGKSFSDSGNLRVHQRTHTGEKPTGKKTS

SEQ ID NO: 1510 - protein, 209 aa, Artificial Sequence
  source: /note="Description of Artificial Sequence: Synthetic polypeptide"
LEPGEKPYKCPECGKSFSSPADLTRHQRTHTGEKPYKCPECGKSFSQLAHLRAHQRTHTGEKPYKCPECGKSFSSKKHLAEHQRTHTGEKPYKCPECGKSFSTSGELVRHQRTHTGEKPYKCPECGKSFSQRAHLERHQRTHTGEKPYKCPECGKSFSRKDNLKNHQRTHTGEKPYKCPECGKSFSRSDHLTTHQRTHTGEKPTGKKTS

SEQ ID NO: 1511 - protein, 209 aa, Artificial Sequence
  source: /note="Description of Artificial Sequence: Synthetic polypeptide"
LEPGEKPYKCPECGKSFSRSDHLTNHQRTHTGEKPYKCPECGKSFSSPADLTRHQRTHTGEKPYKCPECGKSFSQLAHLRAHQRTHTGEKPYKCPECGKSFSSKKHLAEHQRTHTGEKPYKCPECGKSFSTSGELVRHQRTHTGEKPYKCPECGKSFSQRAHLERHQRTHTGEKPYKCPECGKSFSRKDNLKNHQRTHTGEKPTGKKTS

SEQ ID NO: 1512 - protein, 209 aa, Artificial Sequence
  source: /note="Description of Artificial Sequence: Synthetic polypeptide"
LEPGEKPYKCPECGKSFSRSDDLVRHQRTHTGEKPYKCPECGKSFSTHLDLIRHQRTHTGEKPYKCPECGKSFSQSSNLVRHQRTHTGEKPYKCPECGKSFSRSDKLTEHQRTHTGEKPYKCPECGKSFSDSGNLRVHQRTHTGEKPYKCPECGKSFSRSDKLVRHQRTHTGEKPYKCPECGKSFSRADNLTEHQRTHTGEKPTGKKTS

SEQ ID NO: 1513 - protein, 209 aa, Artificial Sequence
  source: /note="Description of Artificial Sequence: Synthetic polypeptide"
LEPGEKPYKCPECGKSFSRSDKLVRHQRTHTGEKPYKCPECGKSFSRSDDLVRHQRTHTGEKPYKCPECGKSFSTHLDLIRHQRTHTGEKPYKCPECGKSFSQSSNLVRHQRTHTGEKPYKCPECGKSFSRSDKLTEHQRTHTGEKPYKCPECGKSFSDSGNLRVHQRTHTGEKPYKCPECGKSFSRSDKLVRHQRTHTGEKPTGKKTS

SEQ ID NO: 1514 - protein, 209 aa, Artificial Sequence
  source: /note="Description of Artificial Sequence: Synthetic polypeptide"
LEPGEKPYKCPECGKSFSQSSNLVRHQRTHTGEKPYKCPECGKSFSRSDKLVRHQRTHTGEKPYKCPECGKSFSRSDDLVRHQRTHTGEKPYKCPECGKSFSTHLDLIRHQRTHTGEKPYKCPECGKSFSQSSNLVRHQRTHTGEKPYKCPECGKSFSRSDKLTEHQRTHTGEKPYKCPECGKSFSDSGNLRVHQRTHTGEKPTGKKTS

SEQ ID NO: 1515 - protein, 209 aa, Artificial Sequence
  source: /note="Description of Artificial Sequence: Synthetic polypeptide"
LEPGEKPYKCPECGKSFSERSHLREHQRTHTGEKPYKCPECGKSFSRSDKLVRHQRTHTGEKPYKCPECGKSFSQSSNLVRHQRTHTGEKPYKCPECGKSFSRNDALTEHQRTHTGEKPYKCPECGKSFSQSSNLVRHQRTHTGEKPYKCPECGKSFSRSDKLVRHQRTHTGEKPYKCPECGKSFSRSDDLVRHQRTHTGEKPTGKKTS

SEQ ID NO: 1516 - protein, 209 aa, Artificial Sequence
  source: /note="Description of Artificial Sequence: Synthetic polypeptide"
LEPGEKPYKCPECGKSFSRSDKLVRHQRTHTGEKPYKCPECGKSFSQSSNLVRHQRTHTGEKPYKCPECGKSFSRNDALTEHQRTHTGEKPYKCPECGKSFSQSSNLVRHQRTHTGEKPYKCPECGKSFSRSDKLVRHQRTHTGEKPYKCPECGKSFSRSDDLVRHQRTHTGEKPYKCPECGKSFSTHLDLIRHQRTHTGEKPTGKKTS

SEQ ID NO: 1517 - protein, 209 aa, Artificial Sequence
  source: /note="Description of Artificial Sequence: Synthetic polypeptide"
LEPGEKPYKCPECGKSFSRNDALTEHQRTHTGEKPYKCPECGKSFSQSSNLVRHQRTHTGEKPYKCPECGKSFSRSDKLVRHQRTHTGEKPYKCPECGKSFSRSDDLVRHQRTHTGEKPYKCPECGKSFSTHLDLIRHQRTHTGEKPYKCPECGKSFSQSSNLVRHQRTHTGEKPYKCPECGKSFSRSDKLTEHQRTHTGEKPTGKKTS

SEQ ID NO: 1518 - protein, 209 aa, Artificial Sequence
  source: /note="Description of Artificial Sequence: Synthetic polypeptide"
LEPGEKPYKCPECGKSFSQSSNLVRHQRTHTGEKPYKCPECGKSFSRNDALTEHQRTHTGEKPYKCPECGKSFSQSSNLVRHQRTHTGEKPYKCPECGKSFSRSDKLVRHQRTHTGEKPYKCPECGKSFSRSDDLVRHQRTHTGEKPYKCPECGKSFSTHLDLIRHQRTHTGEKPYKCPECGKSFSQSSNLVRHQRTHTGEKPTGKKTS

SEQ ID NO: 1519 - protein, 209 aa, Artificial Sequence
  source: /note="Description of Artificial Sequence: Synthetic polypeptide"
LEPGEKPYKCPECGKSFSREDNLHTHQRTHTGEKPYKCPECGKSFSHKNALQNHQRTHTGEKPYKCPECGKSFSRSDKLVRHQRTHTGEKPYKCPECGKSFSTKNSLTEHQRTHTGEKPYKCPECGKSFSRSDKLVRHQRTHTGEKPYKCPECGKSFSRNDALTEHQRTHTGEKPYKCPECGKSFSTSGNLTEHQRTHTGEKPTGKKTS

SEQ ID NO: 1520 - protein, 209 aa, Artificial Sequence
  source: /note="Description of Artificial Sequence: Synthetic polypeptide"
LEPGEKPYKCPECGKSFSRSDKLVRHQRTHTGEKPYKCPECGKSFSTKNSLTEHQRTHTGEKPYKCPECGKSFSRSDKLVRHQRTHTGEKPYKCPECGKSFSRNDALTEHQRTHTGEKPYKCPECGKSFSTSGNLTEHQRTHTGEKPYKCPECGKSFSRSDHLTTHQRTHTGEKPYKCPECGKSFSTSGNLVRHQRTHTGEKPTGKKTS

SEQ ID NO: 1521 - protein, 209 aa, Artificial Sequence
  source: /note="Description of Artificial Sequence: Synthetic polypeptide"
LEPGEKPYKCPECGKSFSHKNALQNHQRTHTGEKPYKCPECGKSFSRSDKLVRHQRTHTGEKPYKCPECGKSFSTKNSLTEHQRTHTGEKPYKCPECGKSFSRSDKLVRHQRTHTGEKPYKCPECGKSFSRNDALTEHQRTHTGEKPYKCPECGKSFSTSGNLTEHQRTHTGEKPYKCPECGKSFSRSDHLTTHQRTHTGEKPTGKKTS

SEQ ID NO: 1522 - protein, 209 aa, Artificial Sequence
  source: /note="Description of Artificial Sequence: Synthetic polypeptide"
LEPGEKPYKCPECGKSFSTSGNLVRHQRTHTGEKPYKCPECGKSFSQSSNLVRHQRTHTGEKPYKCPECGKSFSTSHSLTEHQRTHTGEKPYKCPECGKSFSTSGNLVRHQRTHTGEKPYKCPECGKSFSRKDNLKNHQRTHTGEKPYKCPECGKSFSDSGNLRVHQRTHTGEKPYKCPECGKSFSRADNLTEHQRTHTGEKPTGKKTS

SEQ ID NO: 1523 - protein, 209 aa, Artificial Sequence
  source: /note="Description of Artificial Sequence: Synthetic polypeptide"
LEPGEKPYKCPECGKSFSTKNSLTEHQRTHTGEKPYKCPECGKSFSRSDKLVRHQRTHTGEKPYKCPECGKSFSRNDALTEHQRTHTGEKPYKCPECGKSFSTSGNLTEHQRTHTGEKPYKCPECGKSFSRSDHLTTHQRTHTGEKPYKCPECGKSFSTSGNLVRHQRTHTGEKPYKCPECGKSFSQSSNLVRHQRTHTGEKPTGKKTS

SEQ ID NO: 1524 - protein, 209 aa, Artificial Sequence
  source: /note="Description of Artificial Sequence: Synthetic polypeptide"
LEPGEKPYKCPECGKSFSRSDHLTTHQRTHTGEKPYKCPECGKSFSTSGNLVRHQRTHTGEKPYKCPECGKSFSQSSNLVRHQRTHTGEKPYKCPECGKSFSTSHSLTEHQRTHTGEKPYKCPECGKSFSTSGNLVRHQRTHTGEKPYKCPECGKSFSRKDNLKNHQRTHTGEKPYKCPECGKSFSDSGNLRVHQRTHTGEKPTGKKTS

SEQ ID NO: 1525 - protein, 209 aa, Artificial Sequence
  source: /note="Description of Artificial Sequence: Synthetic polypeptide"
LEPGEKPYKCPECGKSFSRSDKLVRHQRTHTGEKPYKCPECGKSFSRNDALTEHQRTHTGEKPYKCPECGKSFSTSGNLTEHQRTHTGEKPYKCPECGKSFSRSDHLTTHQRTHTGEKPYKCPECGKSFSTSGNLVRHQRTHTGEKPYKCPECGKSFSQSSNLVRHQRTHTGEKPYKCPECGKSFSTSHSLTEHQRTHTGEKPTGKKTS

SEQ ID NO: 1526 - protein, 209 aa, Artificial Sequence
  source: /note="Description of Artificial Sequence: Synthetic polypeptide"
LEPGEKPYKCPECGKSFSRNDALTEHQRTHTGEKPYKCPECGKSFSTSGNLTEHQRTHTGEKPYKCPECGKSFSRSDHLTTHQRTHTGEKPYKCPECGKSFSTSGNLVRHQRTHTGEKPYKCPECGKSFSQSSNLVRHQRTHTGEKPYKCPECGKSFSTSHSLTEHQRTHTGEKPYKCPECGKSFSTSGNLVRHQRTHTGEKPTGKKTS

SEQ ID NO: 1527 - protein, 209 aa, Artificial Sequence
  source: /note="Description of Artificial Sequence: Synthetic polypeptide"
LEPGEKPYKCPECGKSFSTSGNLTEHQRTHTGEKPYKCPECGKSFSRSDHLTTHQRTHTGEKPYKCPECGKSFSTSGNLVRHQRTHTGEKPYKCPECGKSFSQSSNLVRHQRTHTGEKPYKCPECGKSFSTSHSLTEHQRTHTGEKPYKCPECGKSFSTSGNLVRHQRTHTGEKPYKCPECGKSFSRKDNLKNHQRTHTGEKPTGKKTS

SEQ ID NO: 1528 - protein, 209 aa, Artificial Sequence
  source: /note="Description of Artificial Sequence: Synthetic polypeptide"
LEPGEKPYKCPECGKSFSTSGSLVRHQRTHTGEKPYKCPECGKSFSREDNLHTHQRTHTGEKPYKCPECGKSFSHKNALQNHQRTHTGEKPYKCPECGKSFSRSDKLVRHQRTHTGEKPYKCPECGKSFSTKNSLTEHQRTHTGEKPYKCPECGKSFSRSDKLVRHQRTHTGEKPYKCPECGKSFSRNDALTEHQRTHTGEKPTGKKTS

SEQ ID NO: 1529 - protein, 209 aa, Artificial Sequence
  source: /note="Description of Artificial Sequence: Synthetic polypeptide"
LEPGEKPYKCPECGKSFSDPGHLVRHQRTHTGEKPYKCPECGKSFSRSDHLTTHQRTHTGEKPYKCPECGKSFSTSHSLTEHQRTHTGEKPYKCPECGKSFSRSDKLVRHQRTHTGEKPYKCPECGKSFSSRRTCRAHQRTHTGEKPYKCPECGKSFSTTGNLTVHQRTHTGEKPYKCPECGKSFSQNSTLTEHQRTHTGEKPTGKKTS

SEQ ID NO: 1530 - protein, 209 aa, Artificial Sequence
  source: /note="Description of Artificial Sequence: Synthetic polypeptide"
LEPGEKPYKCPECGKSFSERSHLREHQRTHTGEKPYKCPECGKSFSDPGHLVRHQRTHTGEKPYKCPECGKSFSRSDHLTTHQRTHTGEKPYKCPECGKSFSTSHSLTEHQRTHTGEKPYKCPECGKSFSRSDKLVRHQRTHTGEKPYKCPECGKSFSSRRTCRAHQRTHTGEKPYKCPECGKSFSTTGNLTVHQRTHTGEKPTGKKTS

SEQ ID NO: 1531 - protein, 209 aa, Artificial Sequence
  source: /note="Description of Artificial Sequence: Synthetic polypeptide"
LEPGEKPYKCPECGKSFSTTGALTEHQRTHTGEKPYKCPECGKSFSERSHLREHQRTHTGEKPYKCPECGKSFSDPGHLVRHQRTHTGEKPYKCPECGKSFSRSDHLTTHQRTHTGEKPYKCPECGKSFSTSHSLTEHQRTHTGEKPYKCPECGKSFSRSDKLVRHQRTHTGEKPYKCPECGKSFSSRRTCRAHQRTHTGEKPTGKKTS

SEQ ID NO: 1532 - protein, 209 aa, Artificial Sequence
  source: /note="Description of Artificial Sequence: Synthetic polypeptide"
LEPGEKPYKCPECGKSFSREDNLHTHQRTHTGEKPYKCPECGKSFSRSDKLVRHQRTHTGEKPYKCPECGKSFSQAGHLASHQRTHTGEKPYKCPECGKSFSTSGNLTEHQRTHTGEKPYKCPECGKSFSRKDNLKNHQRTHTGEKPYKCPECGKSFSQSGNLTEHQRTHTGEKPYKCPECGKSFSRNDALTEHQRTHTGEKPTGKKTS

SEQ ID NO: 1533 - protein, 209 aa, Artificial Sequence
  source: /note="Description of Artificial Sequence: Synthetic polypeptide"
LEPGEKPYKCPECGKSFSRKDNLKNHQRTHTGEKPYKCPECGKSFSREDNLHTHQRTHTGEKPYKCPECGKSFSRSDKLVRHQRTHTGEKPYKCPECGKSFSQAGHLASHQRTHTGEKPYKCPECGKSFSTSGNLTEHQRTHTGEKPYKCPECGKSFSRKDNLKNHQRTHTGEKPYKCPECGKSFSQSGNLTEHQRTHTGEKPTGKKTS

SEQ ID NO: 1534 - protein, 209 aa, Artificial Sequence
  source: /note="Description of Artificial Sequence: Synthetic polypeptide"
LEPGEKPYKCPECGKSFSHRTTLTNHQRTHTGEKPYKCPECGKSFSQLAHLRAHQRTHTGEKPYKCPECGKSFSTSGHLVRHQRTHTGEKPYKCPECGKSFSRSDNLVRHQRTHTGEKPYKCPECGKSFSHKNALQNHQRTHTGEKPYKCPECGKSFSERSHLREHQRTHTGEKPYKCPECGKSFSQRANLRAHQRTHTGEKPTGKKTS

SEQ ID NO: 1535 - protein, 209 aa, Artificial Sequence
  source: /note="Description of Artificial Sequence: Synthetic polypeptide"
LEPGEKPYKCPECGKSFSQAGHLASHQRTHTGEKPYKCPECGKSFSQSGNLTEHQRTHTGEKPYKCPECGKSFSHRTTLTNHQRTHTGEKPYKCPECGKSFSQLAHLRAHQRTHTGEKPYKCPECGKSFSTSGHLVRHQRTHTGEKPYKCPECGKSFSRSDNLVRHQRTHTGEKPYKCPECGKSFSHKNALQNHQRTHTGEKPTGKKTS

SEQ ID NO: 1536 - protein, 209 aa, Artificial Sequence
  source: /note="Description of Artificial Sequence: Synthetic polypeptide"
LEPGEKPYKCPECGKSFSQSGNLTEHQRTHTGEKPYKCPECGKSFSHRTTLTNHQRTHTGEKPYKCPECGKSFSQLAHLRAHQRTHTGEKPYKCPECGKSFSTSGHLVRHQRTHTGEKPYKCPECGKSFSRSDNLVRHQRTHTGEKPYKCPECGKSFSHKNALQNHQRTHTGEKPYKCPECGKSFSERSHLREHQRTHTGEKPTGKKTS

SEQ ID NO: 1537 - protein, 209 aa, Artificial Sequence
  source: /note="Description of Artificial Sequence: Synthetic polypeptide"
LEPGEKPYKCPECGKSFSQSSNLVRHQRTHTGEKPYKCPECGKSFSHKNALQNHQRTHTGEKPYKCPECGKSFSTSGSLVRHQRTHTGEKPYKCPECGKSFSQSSNLVRHQRTHTGEKPYKCPECGKSFSRSDHLTTHQRTHTGEKPYKCPECGKSFSHKNALQNHQRTHTGEKPYKCPECGKSFSRRDELNVHQRTHTGEKPTGKKTS

SEQ ID NO: 1538 - protein, 209 aa, Artificial Sequence
  source: /note="Description of Artificial Sequence: Synthetic polypeptide"
LEPGEKPYKCPECGKSFSREDNLHTHQRTHTGEKPYKCPECGKSFSQAGHLASHQRTHTGEKPYKCPECGKSFSDCRDLARHQRTHTGEKPYKCPECGKSFSHRTTLTNHQRTHTGEKPYKCPECGKSFSDPGALVRHQRTHTGEKPYKCPECGKSFSTSGELVRHQRTHTGEKPYKCPECGKSFSREDNLHTHQRTHTGEKPTGKKTS

SEQ ID NO: 1539 - protein, 209 aa, Artificial Sequence
  source: /note="Description of Artificial Sequence: Synthetic polypeptide"
LEPGEKPYKCPECGKSFSQAGHLASHQRTHTGEKPYKCPECGKSFSDCRDLARHQRTHTGEKPYKCPECGKSFSHRTTLTNHQRTHTGEKPYKCPECGKSFSDPGALVRHQRTHTGEKPYKCPECGKSFSTSGELVRHQRTHTGEKPYKCPECGKSFSREDNLHTHQRTHTGEKPYKCPECGKSFSRSDHLTNHQRTHTGEKPTGKKTS

SEQ ID NO: 1540 - protein, 209 aa, Artificial Sequence
  source: /note="Description of Artificial Sequence: Synthetic polypeptide"
LEPGEKPYKCPECGKSFSDCRDLARHQRTHTGEKPYKCPECGKSFSHRTTLTNHQRTHTGEKPYKCPECGKSFSDPGALVRHQRTHTGEKPYKCPECGKSFSTSGELVRHQRTHTGEKPYKCPECGKSFSREDNLHTHQRTHTGEKPYKCPECGKSFSRSDHLTNHQRTHTGEKPYKCPECGKSFSRSDKLTEHQRTHTGEKPTGKKTS

SEQ ID NO: 1541 - protein, 209 aa, Artificial Sequence
  source: /note="Description of Artificial Sequence: Synthetic polypeptide"
LEPGEKPYKCPECGKSFSRSDELVRHQRTHTGEKPYKCPECGKSFSRSDKLVRHQRTHTGEKPYKCPECGKSFSTTGALTEHQRTHTGEKPYKCPECGKSFSQAGHLASHQRTHTGEKPYKCPECGKSFSDCRDLARHQRTHTGEKPYKCPECGKSFSTTGNLTVHQRTHTGEKPYKCPECGKSFSREDNLHTHQRTHTGEKPTGKKTS

SEQ ID NO: 1542 - protein, 209 aa, Artificial Sequence
  source: /note="Description of Artificial Sequence: Synthetic polypeptide"
LEPGEKPYKCPECGKSFSSPADLTRHQRTHTGEKPYKCPECGKSFSRSDELVRHQRTHTGEKPYKCPECGKSFSRSDKLVRHQRTHTGEKPYKCPECGKSFSTTGALTEHQRTHTGEKPYKCPECGKSFSQAGHLASHQRTHTGEKPYKCPECGKSFSDCRDLARHQRTHTGEKPYKCPECGKSFSTTGNLTVHQRTHTGEKPTGKKTS

SEQ ID NO: 1543 - protein, 209 aa, Artificial Sequence
  source: /note="Description of Artificial Sequence: Synthetic polypeptide"
LEPGEKPYKCPECGKSFSRSDKLVRHQRTHTGEKPYKCPECGKSFSTTGALTEHQRTHTGEKPYKCPECGKSFSQAGHLASHQRTHTGEKPYKCPECGKSFSDCRDLARHQRTHTGEKPYKCPECGKSFSTTGNLTVHQRTHTGEKPYKCPECGKSFSREDNLHTHQRTHTGEKPYKCPECGKSFSHRTTLTNHQRTHTGEKPTGKKTS

SEQ ID NO: 1544 - protein, 209 aa, Artificial Sequence
  source: /note="Description of Artificial Sequence: Synthetic polypeptide"
LEPGEKPYKCPECGKSFSRRDELNVHQRTHTGEKPYKCPECGKSFSSPADLTRHQRTHTGEKPYKCPECGKSFSRSDELVRHQRTHTGEKPYKCPECGKSFSRSDKLVRHQRTHTGEKPYKCPECGKSFSTTGALTEHQRTHTGEKPYKCPECGKSFSQAGHLASHQRTHTGEKPYKCPECGKSFSDCRDLARHQRTHTGEKPTGKKTS

SEQ ID NO: 1545 - protein, 209 aa, Artificial Sequence
  source: /note="Description of Artificial Sequence: Synthetic polypeptide"
LEPGEKPYKCPECGKSFSRSDHLTNHQRTHTGEKPYKCPECGKSFSRSDHLTTHQRTHTGEKPYKCPECGKSFSTSGELVRHQRTHTGEKPYKCPECGKSFSRRDELNVHQRTHTGEKPYKCPECGKSFSSPADLTRHQRTHTGEKPYKCPECGKSFSRSDELVRHQRTHTGEKPYKCPECGKSFSRSDKLVRHQRTHTGEKPTGKKTS

SEQ ID NO: 1546 - protein, 209 aa, Artificial Sequence
  source: /note="Description of Artificial Sequence: Synthetic polypeptide"
LEPGEKPYKCPECGKSFSTSGELVRHQRTHTGEKPYKCPECGKSFSRRDELNVHQRTHTGEKPYKCPECGKSFSSPADLTRHQRTHTGEKPYKCPECGKSFSRSDELVRHQRTHTGEKPYKCPECGKSFSRSDKLVRHQRTHTGEKPYKCPECGKSFSTTGALTEHQRTHTGEKPYKCPECGKSFSQAGHLASHQRTHTGEKPTGKKTS

SEQ ID NO: 1547 - protein, 209 aa, Artificial Sequence
  source: /note="Description of Artificial Sequence: Synthetic polypeptide"
LEPGEKPYKCPECGKSFSDPGALVRHQRTHTGEKPYKCPECGKSFSQAGHLASHQRTHTGEKPYKCPECGKSFSRSDKLVRHQRTHTGEKPYKCPECGKSFSTSGHLVRHQRTHTGEKPYKCPECGKSFSRSDHLTNHQRTHTGEKPYKCPECGKSFSRSDHLTTHQRTHTGEKPYKCPECGKSFSTSGELVRHQRTHTGEKPTGKKTS

SEQ ID NO: 1548 - protein, 209 aa, Artificial Sequence
  source: /note="Description of Artificial Sequence: Synthetic polypeptide"
LEPGEKPYKCPECGKSFSRKDNLKNHQRTHTGEKPYKCPECGKSFSDPGALVRHQRTHTGEKPYKCPECGKSFSQAGHLASHQRTHTGEKPYKCPECGKSFSRSDKLVRHQRTHTGEKPYKCPECGKSFSTSGHLVRHQRTHTGEKPYKCPECGKSFSRSDHLTNHQRTHTGEKPYKCPECGKSFSRSDHLTTHQRTHTGEKPTGKKTS

SEQ ID NO: 1549 - protein, 209 aa, Artificial Sequence
  source: /note="Description of Artificial Sequence: Synthetic polypeptide"
LEPGEKPYKCPECGKSFSTSGHLVRHQRTHTGEKPYKCPECGKSFSRSDHLTNHQRTHTGEKPYKCPECGKSFSRSDHLTTHQRTHTGEKPYKCPECGKSFSTSGELVRHQRTHTGEKPYKCPECGKSFSRRDELNVHQRTHTGEKPYKCPECGKSFSSPADLTRHQRTHTGEKPYKCPECGKSFSRSDELVRHQRTHTGEKPTGKKTS

SEQ ID NO: 1550 - protein, 209 aa, Artificial Sequence
  source: /note="Description of Artificial Sequence: Synthetic polypeptide"
LEPGEKPYKCPECGKSFSQAGHLASHQRTHTGEKPYKCPECGKSFSRSDKLVRHQRTHTGEKPYKCPECGKSFSTSGHLVRHQRTHTGEKPYKCPECGKSFSRSDHLTNHQRTHTGEKPYKCPECGKSFSRSDHLTTHQRTHTGEKPYKCPECGKSFSTSGELVRHQRTHTGEKPYKCPECGKSFSRRDELNVHQRTHTGEKPTGKKTS

SEQ ID NO: 1551 - protein, 209 aa, Artificial Sequence
  source: /note="Description of Artificial Sequence: Synthetic polypeptide"
LEPGEKPYKCPECGKSFSRSDKLVRHQRTHTGEKPYKCPECGKSFSTSGHLVRHQRTHTGEKPYKCPECGKSFSRSDHLTNHQRTHTGEKPYKCPECGKSFSRSDHLTTHQRTHTGEKPYKCPECGKSFSTSGELVRHQRTHTGEKPYKCPECGKSFSRRDELNVHQRTHTGEKPYKCPECGKSFSSPADLTRHQRTHTGEKPTGKKTS

SEQ ID NO: 1552 - protein, 209 aa, Artificial Sequence
  source: /note="Description of Artificial Sequence: Synthetic polypeptide"
LEPGEKPYKCPECGKSFSRRDELNVHQRTHTGEKPYKCPECGKSFSQSGNLTEHQRTHTGEKPYKCPECGKSFSTSGHLVRHQRTHTGEKPYKCPECGKSFSRKDNLKNHQRTHTGEKPYKCPECGKSFSDPGALVRHQRTHTGEKPYKCPECGKSFSQAGHLASHQRTHTGEKPYKCPECGKSFSRSDKLVRHQRTHTGEKPTGKKTS

SEQ ID NO: 1553 - protein, 209 aa, Artificial Sequence
  source: /note="Description of Artificial Sequence: Synthetic polypeptide"
LEPGEKPYKCPECGKSFSRSDNLVRHQRTHTGEKPYKCPECGKSFSSRRTCRAHQRTHTGEKPYKCPECGKSFSDCRDLARHQRTHTGEKPYKCPECGKSFSHRTTLTNHQRTHTGEKPYKCPECGKSFSRRDELNVHQRTHTGEKPYKCPECGKSFSQSGNLTEHQRTHTGEKPYKCPECGKSFSTSGHLVRHQRTHTGEKPTGKKTS

SEQ ID NO: 1554 - protein, 209 aa, Artificial Sequence
  source: /note="Description of Artificial Sequence: Synthetic polypeptide"
LEPGEKPYKCPECGKSFSHRTTLTNHQRTHTGEKPYKCPECGKSFSRRDELNVHQRTHTGEKPYKCPECGKSFSQSGNLTEHQRTHTGEKPYKCPECGKSFSTSGHLVRHQRTHTGEKPYKCPECGKSFSRKDNLKNHQRTHTGEKPYKCPECGKSFSDPGALVRHQRTHTGEKPYKCPECGKSFSQAGHLASHQRTHTGEKPTGKKTS

SEQ ID NO: 1555 - protein, 209 aa, Artificial Sequence
  source: /note="Description of Artificial Sequence: Synthetic polypeptide"
LEPGEKPYKCPECGKSFSDCRDLARHQRTHTGEKPYKCPECGKSFSHRTTLTNHQRTHTGEKPYKCPECGKSFSRRDELNVHQRTHTGEKPYKCPECGKSFSQSGNLTEHQRTHTGEKPYKCPECGKSFSTSGHLVRHQRTHTGEKPYKCPECGKSFSRKDNLKNHQRTHTGEKPYKCPECGKSFSDPGALVRHQRTHTGEKPTGKKTS

SEQ ID NO: 1556 - protein, 209 aa, Artificial Sequence
  source: /note="Description of Artificial Sequence: Synthetic polypeptide"
LEPGEKPYKCPECGKSFSSRRTCRAHQRTHTGEKPYKCPECGKSFSDCRDLARHQRTHTGEKPYKCPECGKSFSHRTTLTNHQRTHTGEKPYKCPECGKSFSRRDELNVHQRTHTGEKPYKCPECGKSFSQSGNLTEHQRTHTGEKPYKCPECGKSFSTSGHLVRHQRTHTGEKPYKCPECGKSFSRKDNLKNHQRTHTGEKPTGKKTS

SEQ ID NO: 1557 - protein, 209 aa, Artificial Sequence
  source: /note="Description of Artificial Sequence: Synthetic polypeptide"
LEPGEKPYKCPECGKSFSTSGHLVRHQRTHTGEKPYKCPECGKSFSRKDNLKNHQRTHTGEKPYKCPECGKSFSDPGALVRHQRTHTGEKPYKCPECGKSFSQAGHLASHQRTHTGEKPYKCPECGKSFSRSDKLVRHQRTHTGEKPYKCPECGKSFSTSGHLVRHQRTHTGEKPYKCPECGKSFSRSDHLTNHQRTHTGEKPTGKKTS

SEQ ID NO: 1558 - protein, 209 aa, Artificial Sequence
  source: /note="Description of Artificial Sequence: Synthetic polypeptide"
LEPGEKPYKCPECGKSFSQSGNLTEHQRTHTGEKPYKCPECGKSFSTSGHLVRHQRTHTGEKPYKCPECGKSFSRKDNLKNHQRTHTGEKPYKCPECGKSFSDPGALVRHQRTHTGEKPYKCPECGKSFSQAGHLASHQRTHTGEKPYKCPECGKSFSRSDKLVRHQRTHTGEKPYKCPECGKSFSTSGHLVRHQRTHTGEKPTGKKTS

SEQ ID NO: 1559 - protein, 209 aa, Artificial Sequence
  source: /note="Description of Artificial Sequence: Synthetic polypeptide"
LEPGEKPYKCPECGKSFSDPGHLVRHQRTHTGEKPYKCPECGKSFSTTGNLTVHQRTHTGEKPYKCPECGKSFSDPGNLVRHQRTHTGEKPYKCPECGKSFSTSGHLVRHQRTHTGEKPYKCPECGKSFSRSDHLTTHQRTHTGEKPYKCPECGKSFSTHLDLIRHQRTHTGEKPYKCPECGKSFSRNDALTEHQRTHTGEKPTGKKTS

SEQ ID NO: 1560 - protein, 209 aa, Artificial Sequence
  source: /note="Description of Artificial Sequence: Synthetic polypeptide"
LEPGEKPYKCPECGKSFSRSDKLVRHQRTHTGEKPYKCPECGKSFSQRAHLERHQRTHTGEKPYKCPECGKSFSTTGALTEHQRTHTGEKPYKCPECGKSFSRSDHLTTHQRTHTGEKPYKCPECGKSFSQSGNLTEHQRTHTGEKPYKCPECGKSFSQAGHLASHQRTHTGEKPYKCPECGKSFSRSDKLVRHQRTHTGEKPTGKKTS

SEQ ID NO: 1561 - protein, 209 aa, Artificial Sequence
  source: /note="Description of Artificial Sequence: Synthetic polypeptide"
LEPGEKPYKCPECGKSFSRSDELVRHQRTHTGEKPYKCPECGKSFSRSDKLVRHQRTHTGEKPYKCPECGKSFSQRAHLERHQRTHTGEKPYKCPECGKSFSTTGALTEHQRTHTGEKPYKCPECGKSFSRSDHLTTHQRTHTGEKPYKCPECGKSFSQSGNLTEHQRTHTGEKPYKCPECGKSFSQAGHLASHQRTHTGEKPTGKKTS

SEQ ID NO: 1562 - protein, 209 aa, Artificial Sequence
  source: /note="Description of Artificial Sequence: Synthetic polypeptide"
LEPGEKPYKCPECGKSFSRSDNLVRHQRTHTGEKPYKCPECGKSFSTSGHLVRHQRTHTGEKPYKCPECGKSFSRSDELVRHQRTHTGEKPYKCPECGKSFSRSDKLVRHQRTHTGEKPYKCPECGKSFSQRAHLERHQRTHTGEKPYKCPECGKSFSTTGALTEHQRTHTGEKPYKCPECGKSFSRSDHLTTHQRTHTGEKPTGKKTS

SEQ ID NO: 1563 - protein, 209 aa, Artificial Sequence
  source: /note="Description of Artificial Sequence: Synthetic polypeptide"
LEPGEKPYKCPECGKSFSTSGHLVRHQRTHTGEKPYKCPECGKSFSRSDELVRHQRTHTGEKPYKCPECGKSFSRSDKLVRHQRTHTGEKPYKCPECGKSFSQRAHLERHQRTHTGEKPYKCPECGKSFSTTGALTEHQRTHTGEKPYKCPECGKSFSRSDHLTTHQRTHTGEKPYKCPECGKSFSQSGNLTEHQRTHTGEKPTGKKTS

SEQ ID NO: 1564 - protein, 209 aa, Artificial Sequence
  source: /note="Description of Artificial Sequence: Synthetic polypeptide"
LEPGEKPYKCPECGKSFSRSDKLVRHQRTHTGEKPYKCPECGKSFSQSGNLTEHQRTHTGEKPYKCPECGKSFSHRTTLTNHQRTHTGEKPYKCPECGKSFSRSDELVRHQRTHTGEKPYKCPECGKSFSRSDHLTTHQRTHTGEKPYKCPECGKSFSRSDKLVRHQRTHTGEKPYKCPECGKSFSRSDNLVRHQRTHTGEKPTGKKTS

SEQ ID NO: 1565 - protein, 209 aa, Artificial Sequence
  source: /note="Description of Artificial Sequence: Synthetic polypeptide"
LEPGEKPYKCPECGKSFSRSDELVRHQRTHTGEKPYKCPECGKSFSSKKHLAEHQRTHTGEKPYKCPECGKSFSRSDELVRHQRTHTGEKPYKCPECGKSFSQAGHLASHQRTHTGEKPYKCPECGKSFSQRANLRAHQRTHTGEKPYKCPECGKSFSDPGALVRHQRTHTGEKPYKCPECGKSFSRSDHLTNHQRTHTGEKPTGKKTS

SEQ ID NO: 1566 - protein, 209 aa, Artificial Sequence
  source: /note="Description of Artificial Sequence: Synthetic polypeptide"
LEPGEKPYKCPECGKSFSHRTTLTNHQRTHTGEKPYKCPECGKSFSRSDELVRHQRTHTGEKPYKCPECGKSFSSKKHLAEHQRTHTGEKPYKCPECGKSFSRSDELVRHQRTHTGEKPYKCPECGKSFSQAGHLASHQRTHTGEKPYKCPECGKSFSQRANLRAHQRTHTGEKPYKCPECGKSFSDPGALVRHQRTHTGEKPTGKKTS

SEQ ID NO: 1567 - protein, 209 aa, Artificial Sequence
  source: /note="Description of Artificial Sequence: Synthetic polypeptide"
LEPGEKPYKCPECGKSFSTSGNLTEHQRTHTGEKPYKCPECGKSFSHRTTLTNHQRTHTGEKPYKCPECGKSFSRSDELVRHQRTHTGEKPYKCPECGKSFSSKKHLAEHQRTHTGEKPYKCPECGKSFSRSDELVRHQRTHTGEKPYKCPECGKSFSQAGHLASHQRTHTGEKPYKCPECGKSFSQRANLRAHQRTHTGEKPTGKKTS

SEQ ID NO: 1568 - protein, 209 aa, Artificial Sequence
  source: /note="Description of Artificial Sequence: Synthetic polypeptide"
LEPGEKPYKCPECGKSFSTSGNLVRHQRTHTGEKPYKCPECGKSFSTSGNLTEHQRTHTGEKPYKCPECGKSFSHRTTLTNHQRTHTGEKPYKCPECGKSFSRSDELVRHQRTHTGEKPYKCPECGKSFSSKKHLAEHQRTHTGEKPYKCPECGKSFSRSDELVRHQRTHTGEKPYKCPECGKSFSQAGHLASHQRTHTGEKPTGKKTS

SEQ ID NO: 1569 - protein, 209 aa, Artificial Sequence
  source: /note="Description of Artificial Sequence: Synthetic polypeptide"
LEPGEKPYKCPECGKSFSDCRDLARHQRTHTGEKPYKCPECGKSFSTSGNLVRHQRTHTGEKPYKCPECGKSFSTSGNLTEHQRTHTGEKPYKCPECGKSFSHRTTLTNHQRTHTGEKPYKCPECGKSFSRSDELVRHQRTHTGEKPYKCPECGKSFSSKKHLAEHQRTHTGEKPYKCPECGKSFSRSDELVRHQRTHTGEKPTGKKTS

SEQ ID NO: 1570 - protein, 209 aa, Artificial Sequence
  source: /note="Description of Artificial Sequence: Synthetic polypeptide"
LEPGEKPYKCPECGKSFSDCRDLARHQRTHTGEKPYKCPECGKSFSTKNSLTEHQRTHTGEKPYKCPECGKSFSRRDELNVHQRTHTGEKPYKCPECGKSFSRRDELNVHQRTHTGEKPYKCPECGKSFSDPGALVRHQRTHTGEKPYKCPECGKSFSQAGHLASHQRTHTGEKPYKCPECGKSFSRNDTLTEHQRTHTGEKPTGKKTS

SEQ ID NO: 1571 - protein, 209 aa, Artificial Sequence
  source: /note="Description of Artificial Sequence: Synthetic polypeptide"
LEPGEKPYKCPECGKSFSDSGNLRVHQRTHTGEKPYKCPECGKSFSSPADLTRHQRTHTGEKPYKCPECGKSFSTSHSLTEHQRTHTGEKPYKCPECGKSFSQRANLRAHQRTHTGEKPYKCPECGKSFSRADNLTEHQRTHTGEKPYKCPECGKSFSERSHLREHQRTHTGEKPYKCPECGKSFSDPGALVRHQRTHTGEKPTGKKTS

SEQ ID NO: 1572 - protein, 209 aa, Artificial Sequence
  source: /note="Description of Artificial Sequence: Synthetic polypeptide"
LEPGEKPYKCPECGKSFSERSHLREHQRTHTGEKPYKCPECGKSFSDSGNLRVHQRTHTGEKPYKCPECGKSFSSPADLTRHQRTHTGEKPYKCPECGKSFSTSHSLTEHQRTHTGEKPYKCPECGKSFSQRANLRAHQRTHTGEKPYKCPECGKSFSRADNLTEHQRTHTGEKPYKCPECGKSFSERSHLREHQRTHTGEKPTGKKTS

SEQ ID NO: 1573 - protein, 209 aa, Artificial Sequence
  source: /note="Description of Artificial Sequence: Synthetic polypeptide"
LEPGEKPYKCPECGKSFSQSGNLTEHQRTHTGEKPYKCPECGKSFSERSHLREHQRTHTGEKPYKCPECGKSFSDSGNLRVHQRTHTGEKPYKCPECGKSFSSPADLTRHQRTHTGEKPYKCPECGKSFSTSHSLTEHQRTHTGEKPYKCPECGKSFSQRANLRAHQRTHTGEKPYKCPECGKSFSRADNLTEHQRTHTGEKPTGKKTS

SEQ ID NO: 1574 - protein, 209 aa, Artificial Sequence
  source: /note="Description of Artificial Sequence: Synthetic polypeptide"
LEPGEKPYKCPECGKSFSERSHLREHQRTHTGEKPYKCPECGKSFSHKNALQNHQRTHTGEKPYKCPECGKSFSQSSSLVRHQRTHTGEKPYKCPECGKSFSTSGSLVRHQRTHTGEKPYKCPECGKSFSQSGDLRRHQRTHTGEKPYKCPECGKSFSTSHSLTEHQRTHTGEKPYKCPECGKSFSDCRDLARHQRTHTGEKPTGKKTS

SEQ ID NO: 1575 - protein, 209 aa, Artificial Sequence
  source: /note="Description of Artificial Sequence: Synthetic polypeptide"
LEPGEKPYKCPECGKSFSQSGDLRRHQRTHTGEKPYKCPECGKSFSTSHSLTEHQRTHTGEKPYKCPECGKSFSDCRDLARHQRTHTGEKPYKCPECGKSFSRSDHLTNHQRTHTGEKPYKCPECGKSFSTSGSLVRHQRTHTGEKPYKCPECGKSFSQAGHLASHQRTHTGEKPYKCPECGKSFSRSDKLTEHQRTHTGEKPTGKKTS

SEQ ID NO: 1576 - protein, 209 aa, Artificial Sequence
  source: /note="Description of Artificial Sequence: Synthetic polypeptide"
LEPGEKPYKCPECGKSFSSPADLTRHQRTHTGEKPYKCPECGKSFSTSHSLTEHQRTHTGEKPYKCPECGKSFSQRANLRAHQRTHTGEKPYKCPECGKSFSRADNLTEHQRTHTGEKPYKCPECGKSFSERSHLREHQRTHTGEKPYKCPECGKSFSDPGALVRHQRTHTGEKPYKCPECGKSFSTSGHLVRHQRTHTGEKPTGKKTS

SEQ ID NO: 1577 - protein, 209 aa, Artificial Sequence
  source: /note="Description of Artificial Sequence: Synthetic polypeptide"
LEPGEKPYKCPECGKSFSHKNALQNHQRTHTGEKPYKCPECGKSFSQSSSLVRHQRTHTGEKPYKCPECGKSFSTSGSLVRHQRTHTGEKPYKCPECGKSFSQSGDLRRHQRTHTGEKPYKCPECGKSFSTSHSLTEHQRTHTGEKPYKCPECGKSFSDCRDLARHQRTHTGEKPYKCPECGKSFSRSDHLTNHQRTHTGEKPTGKKTS

SEQ ID NO: 1578 - protein, 209 aa, Artificial Sequence
  source: /note="Description of Artificial Sequence: Synthetic polypeptide"
LEPGEKPYKCPECGKSFSDKKDLTRHQRTHTGEKPYKCPECGKSFSERSHLREHQRTHTGEKPYKCPECGKSFSHKNALQNHQRTHTGEKPYKCPECGKSFSQSSSLVRHQRTHTGEKPYKCPECGKSFSTSGSLVRHQRTHTGEKPYKCPECGKSFSQSGDLRRHQRTHTGEKPYKCPECGKSFSTSHSLTEHQRTHTGEKPTGKKTS

SEQ ID NO: 1579 - protein, 209 aa, Artificial Sequence
  source: /note="Description of Artificial Sequence: Synthetic polypeptide"
LEPGEKPYKCPECGKSFSTSGSLVRHQRTHTGEKPYKCPECGKSFSQAGHLASHQRTHTGEKPYKCPECGKSFSRSDKLTEHQRTHTGEKPYKCPECGKSFSTSGNLTEHQRTHTGEKPYKCPECGKSFSQSSNLVRHQRTHTGEKPYKCPECGKSFSTHLDLIRHQRTHTGEKPYKCPECGKSFSQKSSLIAHQRTHTGEKPTGKKTS

SEQ ID NO: 1580 - protein, 209 aa, Artificial Sequence
  source: /note="Description of Artificial Sequence: Synthetic polypeptide"
LEPGEKPYKCPECGKSFSTSHSLTEHQRTHTGEKPYKCPECGKSFSDCRDLARHQRTHTGEKPYKCPECGKSFSRSDHLTNHQRTHTGEKPYKCPECGKSFSTSGSLVRHQRTHTGEKPYKCPECGKSFSQAGHLASHQRTHTGEKPYKCPECGKSFSRSDKLTEHQRTHTGEKPYKCPECGKSFSTSGNLTEHQRTHTGEKPTGKKTS

SEQ ID NO: 1581 - protein, 209 aa, Artificial Sequence
  source: /note="Description of Artificial Sequence: Synthetic polypeptide"
LEPGEKPYKCPECGKSFSDCRDLARHQRTHTGEKPYKCPECGKSFSRSDHLTNHQRTHTGEKPYKCPECGKSFSTSGSLVRHQRTHTGEKPYKCPECGKSFSQAGHLASHQRTHTGEKPYKCPECGKSFSRSDKLTEHQRTHTGEKPYKCPECGKSFSTSGNLTEHQRTHTGEKPYKCPECGKSFSQSSNLVRHQRTHTGEKPTGKKTS

SEQ ID NO: 1582 - protein, 209 aa, Artificial Sequence
  source: /note="Description of Artificial Sequence: Synthetic polypeptide"
LEPGEKPYKCPECGKSFSQRANLRAHQRTHTGEKPYKCPECGKSFSRADNLTEHQRTHTGEKPYKCPECGKSFSERSHLREHQRTHTGEKPYKCPECGKSFSDPGALVRHQRTHTGEKPYKCPECGKSFSTSGHLVRHQRTHTGEKPYKCPECGKSFSRNDTLTEHQRTHTGEKPYKCPECGKSFSDKKDLTRHQRTHTGEKPTGKKTS

SEQ ID NO: 1583 - protein, 209 aa, Artificial Sequence
  source: /note="Description of Artificial Sequence: Synthetic polypeptide"
LEPGEKPYKCPECGKSFSRADNLTEHQRTHTGEKPYKCPECGKSFSERSHLREHQRTHTGEKPYKCPECGKSFSDPGALVRHQRTHTGEKPYKCPECGKSFSTSGHLVRHQRTHTGEKPYKCPECGKSFSRNDTLTEHQRTHTGEKPYKCPECGKSFSDKKDLTRHQRTHTGEKPYKCPECGKSFSERSHLREHQRTHTGEKPTGKKTS

SEQ ID NO: 1584 - protein, 209 aa, Artificial Sequence
  source: /note="Description of Artificial Sequence: Synthetic polypeptide"
LEPGEKPYKCPECGKSFSRNDTLTEHQRTHTGEKPYKCPECGKSFSDKKDLTRHQRTHTGEKPYKCPECGKSFSERSHLREHQRTHTGEKPYKCPECGKSFSHKNALQNHQRTHTGEKPYKCPECGKSFSQSSSLVRHQRTHTGEKPYKCPECGKSFSTSGSLVRHQRTHTGEKPYKCPECGKSFSQSGDLRRHQRTHTGEKPTGKKTS

SEQ ID NO: 1585 - protein, 209 aa, Artificial Sequence
  source: /note="Description of Artificial Sequence: Synthetic polypeptide"
LEPGEKPYKCPECGKSFSERSHLREHQRTHTGEKPYKCPECGKSFSDPGALVRHQRTHTGEKPYKCPECGKSFSTSGHLVRHQRTHTGEKPYKCPECGKSFSRNDTLTEHQRTHTGEKPYKCPECGKSFSDKKDLTRHQRTHTGEKPYKCPECGKSFSERSHLREHQRTHTGEKPYKCPECGKSFSHKNALQNHQRTHTGEKPTGKKTS

SEQ ID NO: 1586 - protein, 209 aa, Artificial Sequence
  source: /note="Description of Artificial Sequence: Synthetic polypeptide"
LEPGEKPYKCPECGKSFSDPGALVRHQRTHTGEKPYKCPECGKSFSTSGHLVRHQRTHTGEKPYKCPECGKSFSRNDTLTEHQRTHTGEKPYKCPECGKSFSDKKDLTRHQRTHTGEKPYKCPECGKSFSERSHLREHQRTHTGEKPYKCPECGKSFSHKNALQNHQRTHTGEKPYKCPECGKSFSQSSSLVRHQRTHTGEKPTGKKTS

SEQ ID NO: 1587 - protein, 209 aa, Artificial Sequence
  source: /note="Description of Artificial Sequence: Synthetic polypeptide"
LEPGEKPYKCPECGKSFSTSGSLVRHQRTHTGEKPYKCPECGKSFSQSGDLRRHQRTHTGEKPYKCPECGKSFSTSHSLTEHQRTHTGEKPYKCPECGKSFSDCRDLARHQRTHTGEKPYKCPECGKSFSRSDHLTNHQRTHTGEKPYKCPECGKSFSTSGSLVRHQRTHTGEKPYKCPECGKSFSQAGHLASHQRTHTGEKPTGKKTS

SEQ ID NO: 1588 - protein, 209 aa, Artificial Sequence
  source: /note="Description of Artificial Sequence: Synthetic polypeptide"
LEPGEKPYKCPECGKSFSQSSSLVRHQRTHTGEKPYKCPECGKSFSTSGSLVRHQRTHTGEKPYKCPECGKSFSQSGDLRRHQRTHTGEKPYKCPECGKSFSTSHSLTEHQRTHTGEKPYKCPECGKSFSDCRDLARHQRTHTGEKPYKCPECGKSFSRSDHLTNHQRTHTGEKPYKCPECGKSFSTSGSLVRHQRTHTGEKPTGKKTS

SEQ ID NO: 1589 - protein, 209 aa, Artificial Sequence
  source: /note="Description of Artificial Sequence: Synthetic polypeptide"
LEPGEKPYKCPECGKSFSTSGHLVRHQRTHTGEKPYKCPECGKSFSRNDTLTEHQRTHTGEKPYKCPECGKSFSDKKDLTRHQRTHTGEKPYKCPECGKSFSERSHLREHQRTHTGEKPYKCPECGKSFSHKNALQNHQRTHTGEKPYKCPECGKSFSQSSSLVRHQRTHTGEKPYKCPECGKSFSTSGSLVRHQRTHTGEKPTGKKTS

SEQ ID NO: 1590 - protein, 209 aa, Artificial Sequence
  source: /note="Description of Artificial Sequence: Synthetic polypeptide"
LEPGEKPYKCPECGKSFSHRTTLTNHQRTHTGEKPYKCPECGKSFSERSHLREHQRTHTGEKPYKCPECGKSFSSKKHLAEHQRTHTGEKPYKCPECGKSFSDPGHLVRHQRTHTGEKPYKCPECGKSFSREDNLHTHQRTHTGEKPYKCPECGKSFSHRTTLTNHQRTHTGEKPYKCPECGKSFSRSDELVRHQRTHTGEKPTGKKTS

SEQ ID NO: 1591 - protein, 209 aa, Artificial Sequence
  source: /note="Description of Artificial Sequence: Synthetic polypeptide"
LEPGEKPYKCPECGKSFSRADNLTEHQRTHTGEKPYKCPECGKSFSQRANLRAHQRTHTGEKPYKCPECGKSFSDSGNLRVHQRTHTGEKPYKCPECGKSFSDKKDLTRHQRTHTGEKPYKCPECGKSFSQSSNLVRHQRTHTGEKPYKCPECGKSFSTSHSLTEHQRTHTGEKPYKCPECGKSFSRADNLTEHQRTHTGEKPTGKKTS

SEQ ID NO: 1592 - protein, 209 aa, Artificial Sequence
  source: /note="Description of Artificial Sequence: Synthetic polypeptide"
LEPGEKPYKCPECGKSFSTTGNLTVHQRTHTGEKPYKCPECGKSFSTSHSLTEHQRTHTGEKPYKCPECGKSFSRADNLTEHQRTHTGEKPYKCPECGKSFSQRANLRAHQRTHTGEKPYKCPECGKSFSDSGNLRVHQRTHTGEKPYKCPECGKSFSDKKDLTRHQRTHTGEKPYKCPECGKSFSQSSNLVRHQRTHTGEKPTGKKTS

SEQ ID NO: 1593 - protein, 209 aa, Artificial Sequence
  source: /note="Description of Artificial Sequence: Synthetic polypeptide"
LEPGEKPYKCPECGKSFSTSHSLTEHQRTHTGEKPYKCPECGKSFSRADNLTEHQRTHTGEKPYKCPECGKSFSQRANLRAHQRTHTGEKPYKCPECGKSFSDSGNLRVHQRTHTGEKPYKCPECGKSFSDKKDLTRHQRTHTGEKPYKCPECGKSFSQSSNLVRHQRTHTGEKPYKCPECGKSFSTSHSLTEHQRTHTGEKPTGKKTS

SEQ ID NO: 1594 - protein, 209 aa, Artificial Sequence
  source: /note="Description of Artificial Sequence: Synthetic polypeptide"
LEPGEKPYKCPECGKSFSSKKHLAEHQRTHTGEKPYKCPECGKSFSTTGNLTVHQRTHTGEKPYKCPECGKSFSTSHSLTEHQRTHTGEKPYKCPECGKSFSRADNLTEHQRTHTGEKPYKCPECGKSFSQRANLRAHQRTHTGEKPYKCPECGKSFSDSGNLRVHQRTHTGEKPYKCPECGKSFSDKKDLTRHQRTHTGEKPTGKKTS

SEQ ID NO: 1595 - protein, 209 aa, Artificial Sequence
  source: /note="Description of Artificial Sequence: Synthetic polypeptide"
LEPGEKPYKCPECGKSFSDCRDLARHQRTHTGEKPYKCPECGKSFSSPADLTRHQRTHTGEKPYKCPECGKSFSQSGNLTEHQRTHTGEKPYKCPECGKSFSQSGNLTEHQRTHTGEKPYKCPECGKSFSDSGNLRVHQRTHTGEKPYKCPECGKSFSQLAHLRAHQRTHTGEKPYKCPECGKSFSDCRDLARHQRTHTGEKPTGKKTS

SEQ ID NO: 1596 - protein, 209 aa, Artificial Sequence
  source: /note="Description of Artificial Sequence: Synthetic polypeptide"
LEPGEKPYKCPECGKSFSQRANLRAHQRTHTGEKPYKCPECGKSFSDCRDLARHQRTHTGEKPYKCPECGKSFSSPADLTRHQRTHTGEKPYKCPECGKSFSQSGNLTEHQRTHTGEKPYKCPECGKSFSQSGNLTEHQRTHTGEKPYKCPECGKSFSDSGNLRVHQRTHTGEKPYKCPECGKSFSQLAHLRAHQRTHTGEKPTGKKTS

SEQ ID NO: 1597 - protein, 209 aa, Artificial Sequence
  source: /note="Description of Artificial Sequence: Synthetic polypeptide"
LEPGEKPYKCPECGKSFSDSGNLRVHQRTHTGEKPYKCPECGKSFSHKNALQNHQRTHTGEKPYKCPECGKSFSRNDTLTEHQRTHTGEKPYKCPECGKSFSQRAHLERHQRTHTGEKPYKCPECGKSFSRSDKLVRHQRTHTGEKPYKCPECGKSFSDPGHLVRHQRTHTGEKPYKCPECGKSFSDKKDLTRHQRTHTGEKPTGKKTS

SEQ ID NO: 1598 - protein, 209 aa, Artificial Sequence
  source: /note="Description of Artificial Sequence: Synthetic polypeptide"
LEPGEKPYKCPECGKSFSRADNLTEHQRTHTGEKPYKCPECGKSFSRSDKLTEHQRTHTGEKPYKCPECGKSFSSKKHLAEHQRTHTGEKPYKCPECGKSFSTKNSLTEHQRTHTGEKPYKCPECGKSFSDKKDLTRHQRTHTGEKPYKCPECGKSFSSKKHLAEHQRTHTGEKPYKCPECGKSFSDKKDLTRHQRTHTGEKPTGKKTS

SEQ ID NO: 1599 - protein, 209 aa, Artificial Sequence
  source: /note="Description of Artificial Sequence: Synthetic polypeptide"
LEPGEKPYKCPECGKSFSTHLDLIRHQRTHTGEKPYKCPECGKSFSRKDNLKNHQRTHTGEKPYKCPECGKSFSDCRDLARHQRTHTGEKPYKCPECGKSFSREDNLHTHQRTHTGEKPYKCPECGKSFSDPGHLVRHQRTHTGEKPYKCPECGKSFSQLAHLRAHQRTHTGEKPYKCPECGKSFSSKKALTEHQRTHTGEKPTGKKTS

SEQ ID NO: 1600 - protein, 209 aa, Artificial Sequence
  source: /note="Description of Artificial Sequence: Synthetic polypeptide"
LEPGEKPYKCPECGKSFSRKDNLKNHQRTHTGEKPYKCPECGKSFSDCRDLARHQRTHTGEKPYKCPECGKSFSREDNLHTHQRTHTGEKPYKCPECGKSFSDPGHLVRHQRTHTGEKPYKCPECGKSFSQLAHLRAHQRTHTGEKPYKCPECGKSFSSKKALTEHQRTHTGEKPYKCPECGKSFSTTGALTEHQRTHTGEKPTGKKTS

SEQ ID NO: 1601 - protein, 209 aa, Artificial Sequence
  source: /note="Description of Artificial Sequence: Synthetic polypeptide"
LEPGEKPYKCPECGKSFSQLAHLRAHQRTHTGEKPYKCPECGKSFSERSHLREHQRTHTGEKPYKCPECGKSFSSKKHLAEHQRTHTGEKPYKCPECGKSFSTHLDLIRHQRTHTGEKPYKCPECGKSFSRKDNLKNHQRTHTGEKPYKCPECGKSFSDCRDLARHQRTHTGEKPYKCPECGKSFSREDNLHTHQRTHTGEKPTGKKTS

SEQ ID NO: 1602 - protein, 209 aa, Artificial Sequence
  source: /note="Description of Artificial Sequence: Synthetic polypeptide"
LEPGEKPYKCPECGKSFSERSHLREHQRTHTGEKPYKCPECGKSFSSKKHLAEHQRTHTGEKPYKCPECGKSFSTHLDLIRHQRTHTGEKPYKCPECGKSFSRKDNLKNHQRTHTGEKPYKCPECGKSFSDCRDLARHQRTHTGEKPYKCPECGKSFSREDNLHTHQRTHTGEKPYKCPECGKSFSDPGHLVRHQRTHTGEKPTGKKTS

SEQ ID NO: 1603 - protein, 209 aa, Artificial Sequence
  source: /note="Description of Artificial Sequence: Synthetic polypeptide"
LEPGEKPYKCPECGKSFSDCRDLARHQRTHTGEKPYKCPECGKSFSREDNLHTHQRTHTGEKPYKCPECGKSFSDPGHLVRHQRTHTGEKPYKCPECGKSFSQLAHLRAHQRTHTGEKPYKCPECGKSFSSKKALTEHQRTHTGEKPYKCPECGKSFSTTGALTEHQRTHTGEKPYKCPECGKSFSSKKHLAEHQRTHTGEKPTGKKTS

SEQ ID NO: 1604 - protein, 209 aa, Artificial Sequence
  source: /note="Description of Artificial Sequence: Synthetic polypeptide"
LEPGEKPYKCPECGKSFSREDNLHTHQRTHTGEKPYKCPECGKSFSDPGHLVRHQRTHTGEKPYKCPECGKSFSQLAHLRAHQRTHTGEKPYKCPECGKSFSSKKALTEHQRTHTGEKPYKCPECGKSFSTTGALTEHQRTHTGEKPYKCPECGKSFSSKKHLAEHQRTHTGEKPYKCPECGKSFSTSHSLTEHQRTHTGEKPTGKKTS

SEQ ID NO: 1605 - protein, 209 aa, Artificial Sequence
  source: /note="Description of Artificial Sequence: Synthetic polypeptide"
LEPGEKPYKCPECGKSFSDPGHLVRHQRTHTGEKPYKCPECGKSFSQLAHLRAHQRTHTGEKPYKCPECGKSFSSKKALTEHQRTHTGEKPYKCPECGKSFSTTGALTEHQRTHTGEKPYKCPECGKSFSSKKHLAEHQRTHTGEKPYKCPECGKSFSTSHSLTEHQRTHTGEKPYKCPECGKSFSTKNSLTEHQRTHTGEKPTGKKTS

SEQ ID NO: 1606 - protein, 209 aa, Artificial Sequence
  source: /note="Description of Artificial Sequence: Synthetic polypeptide"
LEPGEKPYKCPECGKSFSSKKALTEHQRTHTGEKPYKCPECGKSFSTTGALTEHQRTHTGEKPYKCPECGKSFSSKKHLAEHQRTHTGEKPYKCPECGKSFSTSHSLTEHQRTHTGEKPYKCPECGKSFSTKNSLTEHQRTHTGEKPYKCPECGKSFSRSDNLVRHQRTHTGEKPYKCPECGKSFSQSGDLRRHQRTHTGEKPTGKKTS

SEQ ID NO: 1607 - protein, 209 aa, Artificial Sequence
  source: /note="Description of Artificial Sequence: Synthetic polypeptide"
LEPGEKPYKCPECGKSFSQLAHLRAHQRTHTGEKPYKCPECGKSFSSKKALTEHQRTHTGEKPYKCPECGKSFSTTGALTEHQRTHTGEKPYKCPECGKSFSSKKHLAEHQRTHTGEKPYKCPECGKSFSTSHSLTEHQRTHTGEKPYKCPECGKSFSTKNSLTEHQRTHTGEKPYKCPECGKSFSRSDNLVRHQRTHTGEKPTGKKTS

SEQ ID NO: 1608 - protein, 209 aa, Artificial Sequence
  source: /note="Description of Artificial Sequence: Synthetic polypeptide"
LEPGEKPYKCPECGKSFSTTGALTEHQRTHTGEKPYKCPECGKSFSSKKHLAEHQRTHTGEKPYKCPECGKSFSTSHSLTEHQRTHTGEKPYKCPECGKSFSTKNSLTEHQRTHTGEKPYKCPECGKSFSRSDNLVRHQRTHTGEKPYKCPECGKSFSQSGDLRRHQRTHTGEKPYKCPECGKSFSRNDTLTEHQRTHTGEKPTGKKTS

SEQ ID NO: 1609 - protein, 209 aa, Artificial Sequence
  source: /note="Description of Artificial Sequence: Synthetic polypeptide"
LEPGEKPYKCPECGKSFSRSDKLTEHQRTHTGEKPYKCPECGKSFSQRAHLERHQRTHTGEKPYKCPECGKSFSQLAHLRAHQRTHTGEKPYKCPECGKSFSSKKHLAEHQRTHTGEKPYKCPECGKSFSTTGALTEHQRTHTGEKPYKCPECGKSFSTSGNLVRHQRTHTGEKPYKCPECGKSFSQSGDLRRHQRTHTGEKPTGKKTS

SEQ ID NO: 1610 - protein, 209 aa, Artificial Sequence
  source: /note="Description of Artificial Sequence: Synthetic polypeptide"
LEPGEKPYKCPECGKSFSRSDHLTNHQRTHTGEKPYKCPECGKSFSRSDKLVRHQRTHTGEKPYKCPECGKSFSTHLDLIRHQRTHTGEKPYKCPECGKSFSDPGHLVRHQRTHTGEKPYKCPECGKSFSRSDNLVRHQRTHTGEKPYKCPECGKSFSQLAHLRAHQRTHTGEKPYKCPECGKSFSDPGHLVRHQRTHTGEKPTGKKTS

SEQ ID NO: 1611 - protein, 209 aa, Artificial Sequence
  source: /note="Description of Artificial Sequence: Synthetic polypeptide"
LEPGEKPYKCPECGKSFSRSDKLVRHQRTHTGEKPYKCPECGKSFSTHLDLIRHQRTHTGEKPYKCPECGKSFSDPGHLVRHQRTHTGEKPYKCPECGKSFSRSDNLVRHQRTHTGEKPYKCPECGKSFSQLAHLRAHQRTHTGEKPYKCPECGKSFSDPGHLVRHQRTHTGEKPYKCPECGKSFSQSSNLVRHQRTHTGEKPTGKKTS

SEQ ID NO: 1612 - protein, 209 aa, Artificial Sequence
  source: /note="Description of Artificial Sequence: Synthetic polypeptide"
LEPGEKPYKCPECGKSFSRADNLTEHQRTHTGEKPYKCPECGKSFSRSDHLTNHQRTHTGEKPYKCPECGKSFSRSDHLTNHQRTHTGEKPYKCPECGKSFSRSDKLVRHQRTHTGEKPYKCPECGKSFSTHLDLIRHQRTHTGEKPYKCPECGKSFSDPGHLVRHQRTHTGEKPYKCPECGKSFSRSDNLVRHQRTHTGEKPTGKKTS

SEQ ID NO: 1613 - protein, 209 aa, Artificial Sequence
  source: /note="Description of Artificial Sequence: Synthetic polypeptide"
LEPGEKPYKCPECGKSFSRSDHLTNHQRTHTGEKPYKCPECGKSFSRSDHLTNHQRTHTGEKPYKCPECGKSFSRSDKLVRHQRTHTGEKPYKCPECGKSFSTHLDLIRHQRTHTGEKPYKCPECGKSFSDPGHLVRHQRTHTGEKPYKCPECGKSFSRSDNLVRHQRTHTGEKPYKCPECGKSFSQLAHLRAHQRTHTGEKPTGKKTS

SEQ ID NO: 1614 - protein, 209 aa, Artificial Sequence
  source: /note="Description of Artificial Sequence: Synthetic polypeptide"
LEPGEKPYKCPECGKSFSDPGHLVRHQRTHTGEKPYKCPECGKSFSRSDNLVRHQRTHTGEKPYKCPECGKSFSRSDHLTTHQRTHTGEKPYKCPECGKSFSRADNLTEHQRTHTGEKPYKCPECGKSFSRSDHLTNHQRTHTGEKPYKCPECGKSFSRSDHLTNHQRTHTGEKPYKCPECGKSFSRSDKLVRHQRTHTGEKPTGKKTS

SEQ ID NO: 1615 - protein, 209 aa, Artificial Sequence
  source: /note="Description of Artificial Sequence: Synthetic polypeptide"
LEPGEKPYKCPECGKSFSRSDHLTTHQRTHTGEKPYKCPECGKSFSRADNLTEHQRTHTGEKPYKCPECGKSFSRSDHLTNHQRTHTGEKPYKCPECGKSFSRSDHLTNHQRTHTGEKPYKCPECGKSFSRSDKLVRHQRTHTGEKPYKCPECGKSFSTHLDLIRHQRTHTGEKPYKCPECGKSFSDPGHLVRHQRTHTGEKPTGKKTS

SEQ ID NO: 1616 - protein, 209 aa, Artificial Sequence
  source: /note="Description of Artificial Sequence: Synthetic polypeptide"
LEPGEKPYKCPECGKSFSTKNSLTEHQRTHTGEKPYKCPECGKSFSRSDKLVRHQRTHTGEKPYKCPECGKSFSRSDKLTEHQRTHTGEKPYKCPECGKSFSRSDKLVRHQRTHTGEKPYKCPECGKSFSQRAHLERHQRTHTGEKPYKCPECGKSFSDPGHLVRHQRTHTGEKPYKCPECGKSFSRSDNLVRHQRTHTGEKPTGKKTS

SEQ ID NO: 1617 - protein, 209 aa, Artificial Sequence
  source: /note="Description of Artificial Sequence: Synthetic polypeptide"
LEPGEKPYKCPECGKSFSRSDNLVRHQRTHTGEKPYKCPECGKSFSRSDHLTTHQRTHTGEKPYKCPECGKSFSRADNLTEHQRTHTGEKPYKCPECGKSFSRSDHLTNHQRTHTGEKPYKCPECGKSFSRSDHLTNHQRTHTGEKPYKCPECGKSFSRSDKLVRHQRTHTGEKPYKCPECGKSFSTHLDLIRHQRTHTGEKPTGKKTS

SEQ ID NO: 1618 - protein, 209 aa, Artificial Sequence
  source: /note="Description of Artificial Sequence: Synthetic polypeptide"
LEPGEKPYKCPECGKSFSDPGHLVRHQRTHTGEKPYKCPECGKSFSRSDNLVRHQRTHTGEKPYKCPECGKSFSQLAHLRAHQRTHTGEKPYKCPECGKSFSDPGHLVRHQRTHTGEKPYKCPECGKSFSQSSNLVRHQRTHTGEKPYKCPECGKSFSRKDNLKNHQRTHTGEKPYKCPECGKSFSQAGHLASHQRTHTGEKPTGKKTS

SEQ ID NO: 1619 - protein, 209 aa, Artificial Sequence
  source: /note="Description of Artificial Sequence: Synthetic polypeptide"
LEPGEKPYKCPECGKSFSTHLDLIRHQRTHTGEKPYKCPECGKSFSDPGHLVRHQRTHTGEKPYKCPECGKSFSRSDNLVRHQRTHTGEKPYKCPECGKSFSQLAHLRAHQRTHTGEKPYKCPECGKSFSDPGHLVRHQRTHTGEKPYKCPECGKSFSQSSNLVRHQRTHTGEKPYKCPECGKSFSRKDNLKNHQRTHTGEKPTGKKTS

SEQ ID NO: 1620 - protein, 209 aa, Artificial Sequence
  source: /note="Description of Artificial Sequence: Synthetic polypeptide"
LEPGEKPYKCPECGKSFSRSDKLVRHQRTHTGEKPYKCPECGKSFSRSDKLTEHQRTHTGEKPYKCPECGKSFSRSDKLVRHQRTHTGEKPYKCPECGKSFSQRAHLERHQRTHTGEKPYKCPECGKSFSDPGHLVRHQRTHTGEKPYKCPECGKSFSRSDNLVRHQRTHTGEKPYKCPECGKSFSRSDHLTTHQRTHTGEKPTGKKTS

SEQ ID NO: 1621 - protein, 209 aa, Artificial Sequence
  source: /note="Description of Artificial Sequence: Synthetic polypeptide"
LEPGEKPYKCPECGKSFSRSDKLTEHQRTHTGEKPYKCPECGKSFSRSDKLVRHQRTHTGEKPYKCPECGKSFSQRAHLERHQRTHTGEKPYKCPECGKSFSDPGHLVRHQRTHTGEKPYKCPECGKSFSRSDNLVRHQRTHTGEKPYKCPECGKSFSRSDHLTTHQRTHTGEKPYKCPECGKSFSRADNLTEHQRTHTGEKPTGKKTS

SEQ ID NO: 1622 - protein, 209 aa, Artificial Sequence
  source: /note="Description of Artificial Sequence: Synthetic polypeptide"
LEPGEKPYKCPECGKSFSRSDKLVRHQRTHTGEKPYKCPECGKSFSQRAHLERHQRTHTGEKPYKCPECGKSFSDPGHLVRHQRTHTGEKPYKCPECGKSFSRSDNLVRHQRTHTGEKPYKCPECGKSFSRSDHLTTHQRTHTGEKPYKCPECGKSFSRADNLTEHQRTHTGEKPYKCPECGKSFSRSDHLTNHQRTHTGEKPTGKKTS

SEQ ID NO: 1623 - protein, 209 aa, Artificial Sequence
  source: /note="Description of Artificial Sequence: Synthetic polypeptide"
LEPGEKPYKCPECGKSFSQRAHLERHQRTHTGEKPYKCPECGKSFSDPGHLVRHQRTHTGEKPYKCPECGKSFSRSDNLVRHQRTHTGEKPYKCPECGKSFSRSDHLTTHQRTHTGEKPYKCPECGKSFSRADNLTEHQRTHTGEKPYKCPECGKSFSRSDHLTNHQRTHTGEKPYKCPECGKSFSRSDHLTNHQRTHTGEKPTGKKTS

SEQ ID NO: 1624 - protein, 209 aa, Artificial Sequence
  source: /note="Description of Artificial Sequence: Synthetic polypeptide"
LEPGEKPYKCPECGKSFSQLAHLRAHQRTHTGEKPYKCPECGKSFSDPGHLVRHQRTHTGEKPYKCPECGKSFSQSSNLVRHQRTHTGEKPYKCPECGKSFSRKDNLKNHQRTHTGEKPYKCPECGKSFSQAGHLASHQRTHTGEKPYKCPECGKSFSTSGSLVRHQRTHTGEKPYKCPECGKSFSRTDTLRDHQRTHTGEKPTGKKTS

SEQ ID NO: 1625 - protein, 209 aa, Artificial Sequence
  source: /note="Description of Artificial Sequence: Synthetic polypeptide"
LEPGEKPYKCPECGKSFSDPGHLVRHQRTHTGEKPYKCPECGKSFSQSSNLVRHQRTHTGEKPYKCPECGKSFSRKDNLKNHQRTHTGEKPYKCPECGKSFSQAGHLASHQRTHTGEKPYKCPECGKSFSTSGSLVRHQRTHTGEKPYKCPECGKSFSRTDTLRDHQRTHTGEKPYKCPECGKSFSRSDHLTNHQRTHTGEKPTGKKTS

SEQ ID NO: 1626 - protein, 209 aa, Artificial Sequence
  source: /note="Description of Artificial Sequence: Synthetic polypeptide"
LEPGEKPYKCPECGKSFSQSSNLVRHQRTHTGEKPYKCPECGKSFSRKDNLKNHQRTHTGEKPYKCPECGKSFSQAGHLASHQRTHTGEKPYKCPECGKSFSTSGSLVRHQRTHTGEKPYKCPECGKSFSRTDTLRDHQRTHTGEKPYKCPECGKSFSRSDHLTNHQRTHTGEKPYKCPECGKSFSRADNLTEHQRTHTGEKPTGKKTS

SEQ ID NO: 1627 - protein, 209 aa, Artificial Sequence
  source: /note="Description of Artificial Sequence: Synthetic polypeptide"
LEPGEKPYKCPECGKSFSRSDHLTNHQRTHTGEKPYKCPECGKSFSDPGHLVRHQRTHTGEKPYKCPECGKSFSREDNLHTHQRTHTGEKPYKCPECGKSFSRSDKLVRHQRTHTGEKPYKCPECGKSFSTSHSLTEHQRTHTGEKPYKCPECGKSFSHTGHLLEHQRTHTGEKPYKCPECGKSFSRSDKLVRHQRTHTGEKPTGKKTS

SEQ ID NO: 1628 - protein, 209 aa, Artificial Sequence
  source: /note="Description of Artificial Sequence: Synthetic polypeptide"
LEPGEKPYKCPECGKSFSRSDHLTTHQRTHTGEKPYKCPECGKSFSRSDHLTNHQRTHTGEKPYKCPECGKSFSDPGHLVRHQRTHTGEKPYKCPECGKSFSREDNLHTHQRTHTGEKPYKCPECGKSFSRSDKLVRHQRTHTGEKPYKCPECGKSFSTSHSLTEHQRTHTGEKPYKCPECGKSFSHTGHLLEHQRTHTGEKPTGKKTS

SEQ ID NO: 1629 - protein, 209 aa, Artificial Sequence
  source: /note="Description of Artificial Sequence: Synthetic polypeptide"
LEPGEKPYKCPECGKSFSDPGHLVRHQRTHTGEKPYKCPECGKSFSRSDKLVRHQRTHTGEKPYKCPECGKSFSDPGHLVRHQRTHTGEKPYKCPECGKSFSRSDNLVRHQRTHTGEKPYKCPECGKSFSRSDDLVRHQRTHTGEKPYKCPECGKSFSRSDHLTNHQRTHTGEKPYKCPECGKSFSRSDKLVRHQRTHTGEKPTGKKTS

SEQ ID NO: 1630 - protein, 209 aa, Artificial Sequence
  source: /note="Description of Artificial Sequence: Synthetic polypeptide"
LEPGEKPYKCPECGKSFSTTGNLTVHQRTHTGEKPYKCPECGKSFSRSDNLVRHQRTHTGEKPYKCPECGKSFSRSDHLTNHQRTHTGEKPYKCPECGKSFSDPGHLVRHQRTHTGEKPYKCPECGKSFSQRAHLERHQRTHTGEKPYKCPECGKSFSSRRTCRAHQRTHTGEKPYKCPECGKSFSRSDKLTEHQRTHTGEKPTGKKTS

SEQ ID NO: 1631 - protein, 209 aa, Artificial Sequence
  source: /note="Description of Artificial Sequence: Synthetic polypeptide"
LEPGEKPYKCPECGKSFSRNDALTEHQRTHTGEKPYKCPECGKSFSQSGDLRRHQRTHTGEKPYKCPECGKSFSRSDHLTNHQRTHTGEKPYKCPECGKSFSRSDNLVRHQRTHTGEKPYKCPECGKSFSQSGDLRRHQRTHTGEKPYKCPECGKSFSRKDNLKNHQRTHTGEKPYKCPECGKSFSRSDHLTNHQRTHTGEKPTGKKTS

SEQ ID NO: 1632 - protein, 209 aa, Artificial Sequence
  source: /note="Description of Artificial Sequence: Synthetic polypeptide"
LEPGEKPYKCPECGKSFSSRRTCRAHQRTHTGEKPYKCPECGKSFSRSDKLTEHQRTHTGEKPYKCPECGKSFSRNDTLTEHQRTHTGEKPYKCPECGKSFSRSDHLTTHQRTHTGEKPYKCPECGKSFSRSDHLTNHQRTHTGEKPYKCPECGKSFSDPGHLVRHQRTHTGEKPYKCPECGKSFSREDNLHTHQRTHTGEKPTGKKTS

SEQ ID NO: 1633 - protein, 209 aa, Artificial Sequence
  source: /note="Description of Artificial Sequence: Synthetic polypeptide"
LEPGEKPYKCPECGKSFSRSDKLTEHQRTHTGEKPYKCPECGKSFSRNDTLTEHQRTHTGEKPYKCPECGKSFSRSDHLTTHQRTHTGEKPYKCPECGKSFSRSDHLTNHQRTHTGEKPYKCPECGKSFSDPGHLVRHQRTHTGEKPYKCPECGKSFSREDNLHTHQRTHTGEKPYKCPECGKSFSRSDKLVRHQRTHTGEKPTGKKTS

SEQ ID NO: 1634 - protein, 209 aa, Artificial Sequence
  source: /note="Description of Artificial Sequence: Synthetic polypeptide"
LEPGEKPYKCPECGKSFSRNDTLTEHQRTHTGEKPYKCPECGKSFSRSDHLTTHQRTHTGEKPYKCPECGKSFSRSDHLTNHQRTHTGEKPYKCPECGKSFSDPGHLVRHQRTHTGEKPYKCPECGKSFSREDNLHTHQRTHTGEKPYKCPECGKSFSRSDKLVRHQRTHTGEKPYKCPECGKSFSTSHSLTEHQRTHTGEKPTGKKTS

SEQ ID NO: 1635 - protein, 209 aa, Artificial Sequence
  source: /note="Description of Artificial Sequence: Synthetic polypeptide"
LEPGEKPYKCPECGKSFSRSDKLTEHQRTHTGEKPYKCPECGKSFSTTGALTEHQRTHTGEKPYKCPECGKSFSDPGHLVRHQRTHTGEKPYKCPECGKSFSRSDKLVRHQRTHTGEKPYKCPECGKSFSDPGHLVRHQRTHTGEKPYKCPECGKSFSRSDNLVRHQRTHTGEKPYKCPECGKSFSRSDDLVRHQRTHTGEKPTGKKTS

SEQ ID NO: 1636 - protein, 209 aa, Artificial Sequence
  source: /note="Description of Artificial Sequence: Synthetic polypeptide"
LEPGEKPYKCPECGKSFSQSGDLRRHQRTHTGEKPYKCPECGKSFSRSDHLTNHQRTHTGEKPYKCPECGKSFSRSDNLVRHQRTHTGEKPYKCPECGKSFSQSGDLRRHQRTHTGEKPYKCPECGKSFSRKDNLKNHQRTHTGEKPYKCPECGKSFSRSDHLTNHQRTHTGEKPYKCPECGKSFSQSSNLVRHQRTHTGEKPTGKKTS

SEQ ID NO: 1637 - protein, 209 aa, Artificial Sequence
  source: /note="Description of Artificial Sequence: Synthetic polypeptide"
LEPGEKPYKCPECGKSFSDPGHLVRHQRTHTGEKPYKCPECGKSFSRSDNLVRHQRTHTGEKPYKCPECGKSFSRSDDLVRHQRTHTGEKPYKCPECGKSFSRSDHLTNHQRTHTGEKPYKCPECGKSFSRSDKLVRHQRTHTGEKPYKCPECGKSFSHRTTLTNHQRTHTGEKPYKCPECGKSFSDPGHLVRHQRTHTGEKPTGKKTS

SEQ ID NO: 1638 - protein, 209 aa, Artificial Sequence
  source: /note="Description of Artificial Sequence: Synthetic polypeptide"
LEPGEKPYKCPECGKSFSRSDKLVRHQRTHTGEKPYKCPECGKSFSDPGHLVRHQRTHTGEKPYKCPECGKSFSRSDNLVRHQRTHTGEKPYKCPECGKSFSRSDDLVRHQRTHTGEKPYKCPECGKSFSRSDHLTNHQRTHTGEKPYKCPECGKSFSRSDKLVRHQRTHTGEKPYKCPECGKSFSHRTTLTNHQRTHTGEKPTGKKTS

SEQ ID NO: 1639 - protein, 209 aa, Artificial Sequence
  source: /note="Description of Artificial Sequence: Synthetic polypeptide"
LEPGEKPYKCPECGKSFSTTGALTEHQRTHTGEKPYKCPECGKSFSDPGHLVRHQRTHTGEKPYKCPECGKSFSRSDKLVRHQRTHTGEKPYKCPECGKSFSDPGHLVRHQRTHTGEKPYKCPECGKSFSRSDNLVRHQRTHTGEKPYKCPECGKSFSRSDDLVRHQRTHTGEKPYKCPECGKSFSRSDHLTNHQRTHTGEKPTGKKTS

SEQ ID NO: 1640 - protein, 209 aa, Artificial Sequence
  source: /note="Description of Artificial Sequence: Synthetic polypeptide"
LEPGEKPYKCPECGKSFSQRAHLERHQRTHTGEKPYKCPECGKSFSRNDALTEHQRTHTGEKPYKCPECGKSFSQSGDLRRHQRTHTGEKPYKCPECGKSFSRSDHLTNHQRTHTGEKPYKCPECGKSFSRSDNLVRHQRTHTGEKPYKCPECGKSFSQSGDLRRHQRTHTGEKPYKCPECGKSFSRKDNLKNHQRTHTGEKPTGKKTS

SEQ ID NO: 1641 - protein, 209 aa, Artificial Sequence
  source: /note="Description of Artificial Sequence: Synthetic polypeptide"
LEPGEKPYKCPECGKSFSRSDDLVRHQRTHTGEKPYKCPECGKSFSTTGNLTVHQRTHTGEKPYKCPECGKSFSRSDNLVRHQRTHTGEKPYKCPECGKSFSRSDHLTNHQRTHTGEKPYKCPECGKSFSDPGHLVRHQRTHTGEKPYKCPECGKSFSQRAHLERHQRTHTGEKPYKCPECGKSFSSRRTCRAHQRTHTGEKPTGKKTS

SEQ ID NO: 1642 - protein, 209 aa, Artificial Sequence
  source: /note="Description of Artificial Sequence: Synthetic polypeptide"
LEPGEKPYKCPECGKSFSQRAHLERHQRTHTGEKPYKCPECGKSFSQRAHLERHQRTHTGEKPYKCPECGKSFSRNDALTEHQRTHTGEKPYKCPECGKSFSQSGDLRRHQRTHTGEKPYKCPECGKSFSRSDHLTNHQRTHTGEKPYKCPECGKSFSRSDNLVRHQRTHTGEKPYKCPECGKSFSQSGDLRRHQRTHTGEKPTGKKTS

SEQ ID NO: 1643 - protein, 209 aa, Artificial Sequence
  source: /note="Description of Artificial Sequence: Synthetic polypeptide"
LEPGEKPYKCPECGKSFSDPGHLVRHQRTHTGEKPYKCPECGKSFSQRAHLERHQRTHTGEKPYKCPECGKSFSQRAHLERHQRTHTGEKPYKCPECGKSFSRNDALTEHQRTHTGEKPYKCPECGKSFSQSGDLRRHQRTHTGEKPYKCPECGKSFSRSDHLTNHQRTHTGEKPYKCPECGKSFSRSDNLVRHQRTHTGEKPTGKKTS

SEQ ID NO: 1644 - protein, 209 aa, Artificial Sequence
  source: /note="Description of Artificial Sequence: Synthetic polypeptide"
LEPGEKPYKCPECGKSFSDPGHLVRHQRTHTGEKPYKCPECGKSFSQRAHLERHQRTHTGEKPYKCPECGKSFSSRRTCRAHQRTHTGEKPYKCPECGKSFSRSDKLTEHQRTHTGEKPYKCPECGKSFSRNDTLTEHQRTHTGEKPYKCPECGKSFSRSDHLTTHQRTHTGEKPYKCPECGKSFSRSDHLTNHQRTHTGEKPTGKKTS

SEQ ID NO: 1645 - protein, 209 aa, Artificial Sequence
  source: /note="Description of Artificial Sequence: Synthetic polypeptide"
LEPGEKPYKCPECGKSFSRSDHLTNHQRTHTGEKPYKCPECGKSFSDPGHLVRHQRTHTGEKPYKCPECGKSFSQRAHLERHQRTHTGEKPYKCPECGKSFSSRRTCRAHQRTHTGEKPYKCPECGKSFSRSDKLTEHQRTHTGEKPYKCPECGKSFSRNDTLTEHQRTHTGEKPYKCPECGKSFSRSDHLTTHQRTHTGEKPTGKKTS

SEQ ID NO: 1646 - protein, 209 aa, Artificial Sequence
  source: /note="Description of Artificial Sequence: Synthetic polypeptide"
LEPGEKPYKCPECGKSFSQRAHLERHQRTHTGEKPYKCPECGKSFSSRRTCRAHQRTHTGEKPYKCPECGKSFSRSDKLTEHQRTHTGEKPYKCPECGKSFSRNDTLTEHQRTHTGEKPYKCPECGKSFSRSDHLTTHQRTHTGEKPYKCPECGKSFSRSDHLTNHQRTHTGEKPYKCPECGKSFSDPGHLVRHQRTHTGEKPTGKKTS

SEQ ID NO: 1647 - protein, 209 aa, Artificial Sequence
  source: /note="Description of Artificial Sequence: Synthetic polypeptide"
LEPGEKPYKCPECGKSFSTHLDLIRHQRTHTGEKPYKCPECGKSFSRSDDLVRHQRTHTGEKPYKCPECGKSFSTTGNLTVHQRTHTGEKPYKCPECGKSFSRSDNLVRHQRTHTGEKPYKCPECGKSFSRSDHLTNHQRTHTGEKPYKCPECGKSFSDPGHLVRHQRTHTGEKPYKCPECGKSFSQRAHLERHQRTHTGEKPTGKKTS

SEQ ID NO: 1648 - protein, 209 aa, Artificial Sequence
  source: /note="Description of Artificial Sequence: Synthetic polypeptide"
LEPGEKPYKCPECGKSFSRSDKLVRHQRTHTGEKPYKCPECGKSFSHRTTLTNHQRTHTGEKPYKCPECGKSFSDPGHLVRHQRTHTGEKPYKCPECGKSFSQRAHLERHQRTHTGEKPYKCPECGKSFSQRAHLERHQRTHTGEKPYKCPECGKSFSRNDALTEHQRTHTGEKPYKCPECGKSFSQSGDLRRHQRTHTGEKPTGKKTS

SEQ ID NO: 1649 - protein, 209 aa, Artificial Sequence
  source: /note="Description of Artificial Sequence: Synthetic polypeptide"
LEPGEKPYKCPECGKSFSRSDNLVRHQRTHTGEKPYKCPECGKSFSRSDDLVRHQRTHTGEKPYKCPECGKSFSRSDHLTNHQRTHTGEKPYKCPECGKSFSRSDKLVRHQRTHTGEKPYKCPECGKSFSHRTTLTNHQRTHTGEKPYKCPECGKSFSDPGHLVRHQRTHTGEKPYKCPECGKSFSQRAHLERHQRTHTGEKPTGKKTS

SEQ ID NO: 1650 - protein, 209 aa, Artificial Sequence
  source: /note="Description of Artificial Sequence: Synthetic polypeptide"
LEPGEKPYKCPECGKSFSHRTTLTNHQRTHTGEKPYKCPECGKSFSDPGHLVRHQRTHTGEKPYKCPECGKSFSQRAHLERHQRTHTGEKPYKCPECGKSFSQRAHLERHQRTHTGEKPYKCPECGKSFSRNDALTEHQRTHTGEKPYKCPECGKSFSQSGDLRRHQRTHTGEKPYKCPECGKSFSRSDHLTNHQRTHTGEKPTGKKTS

SEQ ID NO: 1651 - protein, 209 aa, Artificial Sequence
  source: /note="Description of Artificial Sequence: Synthetic polypeptide"
LEPGEKPYKCPECGKSFSRSDHLTNHQRTHTGEKPYKCPECGKSFSRSDKLVRHQRTHTGEKPYKCPECGKSFSHRTTLTNHQRTHTGEKPYKCPECGKSFSDPGHLVRHQRTHTGEKPYKCPECGKSFSQRAHLERHQRTHTGEKPYKCPECGKSFSQRAHLERHQRTHTGEKPYKCPECGKSFSRNDALTEHQRTHTGEKPTGKKTS

SEQ ID NO: 1652 - protein, 209 aa, Artificial Sequence
  source: /note="Description of Artificial Sequence: Synthetic polypeptide"
LEPGEKPYKCPECGKSFSDPGHLVRHQRTHTGEKPYKCPECGKSFSREDNLHTHQRTHTGEKPYKCPECGKSFSRSDKLVRHQRTHTGEKPYKCPECGKSFSTSHSLTEHQRTHTGEKPYKCPECGKSFSHTGHLLEHQRTHTGEKPYKCPECGKSFSRSDKLVRHQRTHTGEKPYKCPECGKSFSTSGHLVRHQRTHTGEKPTGKKTS

SEQ ID NO: 1653 - protein, 209 aa, Artificial Sequence
  source: /note="Description of Artificial Sequence: Synthetic polypeptide"
LEPGEKPYKCPECGKSFSREDNLHTHQRTHTGEKPYKCPECGKSFSRSDKLVRHQRTHTGEKPYKCPECGKSFSTSHSLTEHQRTHTGEKPYKCPECGKSFSHTGHLLEHQRTHTGEKPYKCPECGKSFSRSDKLVRHQRTHTGEKPYKCPECGKSFSTSGHLVRHQRTHTGEKPYKCPECGKSFSRSDKLTEHQRTHTGEKPTGKKTS

SEQ ID NO: 1654 - protein, 209 aa, Artificial Sequence
  source: /note="Description of Artificial Sequence: Synthetic polypeptide"
LEPGEKPYKCPECGKSFSRSDKLVRHQRTHTGEKPYKCPECGKSFSTSGHLVRHQRTHTGEKPYKCPECGKSFSRSDKLTEHQRTHTGEKPYKCPECGKSFSTTGALTEHQRTHTGEKPYKCPECGKSFSDPGHLVRHQRTHTGEKPYKCPECGKSFSRSDKLVRHQRTHTGEKPYKCPECGKSFSDPGHLVRHQRTHTGEKPTGKKTS

SEQ ID NO: 1655 - protein, 209 aa, Artificial Sequence
  source: /note="Description of Artificial Sequence: Synthetic polypeptide"
LEPGEKPYKCPECGKSFSTSGHLVRHQRTHTGEKPYKCPECGKSFSRSDKLTEHQRTHTGEKPYKCPECGKSFSTTGALTEHQRTHTGEKPYKCPECGKSFSDPGHLVRHQRTHTGEKPYKCPECGKSFSRSDKLVRHQRTHTGEKPYKCPECGKSFSDPGHLVRHQRTHTGEKPYKCPECGKSFSRSDNLVRHQRTHTGEKPTGKKTS

SEQ ID NO: 1656 - protein, 209 aa, Artificial Sequence
  source: /note="Description of Artificial Sequence: Synthetic polypeptide"
LEPGEKPYKCPECGKSFSHTGHLLEHQRTHTGEKPYKCPECGKSFSRSDKLVRHQRTHTGEKPYKCPECGKSFSTSGHLVRHQRTHTGEKPYKCPECGKSFSRSDKLTEHQRTHTGEKPYKCPECGKSFSTTGALTEHQRTHTGEKPYKCPECGKSFSDPGHLVRHQRTHTGEKPYKCPECGKSFSRSDKLVRHQRTHTGEKPTGKKTS

SEQ ID NO: 1657 - protein, 209 aa, Artificial Sequence
  source: /note="Description of Artificial Sequence: Synthetic polypeptide"
LEPGEKPYKCPECGKSFSRSDDLVRHQRTHTGEKPYKCPECGKSFSRSDHLTNHQRTHTGEKPYKCPECGKSFSRSDKLVRHQRTHTGEKPYKCPECGKSFSHRTTLTNHQRTHTGEKPYKCPECGKSFSDPGHLVRHQRTHTGEKPYKCPECGKSFSQRAHLERHQRTHTGEKPYKCPECGKSFSQRAHLERHQRTHTGEKPTGKKTS

SEQ ID NO: 1658 - protein, 209 aa, Artificial Sequence
  source: /note="Description of Artificial Sequence: Synthetic polypeptide"
LEPGEKPYKCPECGKSFSTSHSLTEHQRTHTGEKPYKCPECGKSFSHTGHLLEHQRTHTGEKPYKCPECGKSFSRSDKLVRHQRTHTGEKPYKCPECGKSFSTSGHLVRHQRTHTGEKPYKCPECGKSFSRSDKLTEHQRTHTGEKPYKCPECGKSFSTTGALTEHQRTHTGEKPYKCPECGKSFSDPGHLVRHQRTHTGEKPTGKKTS

SEQ ID NO: 1659 - protein, 209 aa, Artificial Sequence
  source: /note="Description of Artificial Sequence: Synthetic polypeptide"
LEPGEKPYKCPECGKSFSRSDKLVRHQRTHTGEKPYKCPECGKSFSTSHSLTEHQRTHTGEKPYKCPECGKSFSHTGHLLEHQRTHTGEKPYKCPECGKSFSRSDKLVRHQRTHTGEKPYKCPECGKSFSTSGHLVRHQRTHTGEKPYKCPECGKSFSRSDKLTEHQRTHTGEKPYKCPECGKSFSTTGALTEHQRTHTGEKPTGKKTS

SEQ ID NO: 1660 - protein, 209 aa, Artificial Sequence
  source: /note="Description of Artificial Sequence: Synthetic polypeptide"
LEPGEKPYKCPECGKSFSRSDNLVRHQRTHTGEKPYKCPECGKSFSRSDNLVRHQRTHTGEKPYKCPECGKSFSRSDHLTTHQRTHTGEKPYKCPECGKSFSSKKALTEHQRTHTGEKPYKCPECGKSFSRSDKLVRHQRTHTGEKPYKCPECGKSFSQLAHLRAHQRTHTGEKPYKCPECGKSFSRADNLTEHQRTHTGEKPTGKKTS

SEQ ID NO: 1661 - protein, 209 aa, Artificial Sequence
  source: /note="Description of Artificial Sequence: Synthetic polypeptide"
LEPGEKPYKCPECGKSFSQSGDLRRHQRTHTGEKPYKCPECGKSFSRSDNLVRHQRTHTGEKPYKCPECGKSFSRSDNLVRHQRTHTGEKPYKCPECGKSFSRSDHLTTHQRTHTGEKPYKCPECGKSFSSKKALTEHQRTHTGEKPYKCPECGKSFSRSDKLVRHQRTHTGEKPYKCPECGKSFSQLAHLRAHQRTHTGEKPTGKKTS

SEQ ID NO: 1662 - protein, 209 aa, Artificial Sequence
  source: /note="Description of Artificial Sequence: Synthetic polypeptide"
LEPGEKPYKCPECGKSFSRSDELVRHQRTHTGEKPYKCPECGKSFSQSGDLRRHQRTHTGEKPYKCPECGKSFSRSDNLVRHQRTHTGEKPYKCPECGKSFSRSDNLVRHQRTHTGEKPYKCPECGKSFSRSDHLTTHQRTHTGEKPYKCPECGKSFSSKKALTEHQRTHTGEKPYKCPECGKSFSRSDKLVRHQRTHTGEKPTGKKTS

SEQ ID NO: 1663 - protein, 209 aa, Artificial Sequence
  source: /note="Description of Artificial Sequence: Synthetic polypeptide"
LEPGEKPYKCPECGKSFSRSDNLVRHQRTHTGEKPYKCPECGKSFSRSDHLTTHQRTHTGEKPYKCPECGKSFSSKKALTEHQRTHTGEKPYKCPECGKSFSRSDKLVRHQRTHTGEKPYKCPECGKSFSQLAHLRAHQRTHTGEKPYKCPECGKSFSRADNLTEHQRTHTGEKPYKCPECGKSFSRSDHLTNHQRTHTGEKPTGKKTS

SEQ ID NO: 1664 - protein, 209 aa, Artificial Sequence
  source: /note="Description of Artificial Sequence: Synthetic polypeptide"
LEPGEKPYKCPECGKSFSRSDKLTEHQRTHTGEKPYKCPECGKSFSRSDKLVRHQRTHTGEKPYKCPECGKSFSQRAHLERHQRTHTGEKPYKCPECGKSFSRSDELVRHQRTHTGEKPYKCPECGKSFSQSGDLRRHQRTHTGEKPYKCPECGKSFSRSDNLVRHQRTHTGEKPYKCPECGKSFSRSDNLVRHQRTHTGEKPTGKKTS

SEQ ID NO: 1665 - protein, 209 aa, Artificial Sequence
  source: /note="Description of Artificial Sequence: Synthetic polypeptide"
LEPGEKPYKCPECGKSFSRSDKLVRHQRTHTGEKPYKCPECGKSFSQRAHLERHQRTHTGEKPYKCPECGKSFSRSDELVRHQRTHTGEKPYKCPECGKSFSQSGDLRRHQRTHTGEKPYKCPECGKSFSRSDNLVRHQRTHTGEKPYKCPECGKSFSRSDNLVRHQRTHTGEKPYKCPECGKSFSRSDHLTTHQRTHTGEKPTGKKTS

SEQ ID NO: 1666 - protein, 209 aa, Artificial Sequence
  source: /note="Description of Artificial Sequence: Synthetic polypeptide"
LEPGEKPYKCPECGKSFSRSDHLTNHQRTHTGEKPYKCPECGKSFSRSDKLTEHQRTHTGEKPYKCPECGKSFSRSDKLVRHQRTHTGEKPYKCPECGKSFSQRAHLERHQRTHTGEKPYKCPECGKSFSRSDELVRHQRTHTGEKPYKCPECGKSFSQSGDLRRHQRTHTGEKPYKCPECGKSFSRSDNLVRHQRTHTGEKPTGKKTS

SEQ ID NO: 1667 - protein, 209 aa, Artificial Sequence
  source: /note="Description of Artificial Sequence: Synthetic polypeptide"
LEPGEKPYKCPECGKSFSQRAHLERHQRTHTGEKPYKCPECGKSFSRSDELVRHQRTHTGEKPYKCPECGKSFSQSGDLRRHQRTHTGEKPYKCPECGKSFSRSDNLVRHQRTHTGEKPYKCPECGKSFSRSDNLVRHQRTHTGEKPYKCPECGKSFSRSDHLTTHQRTHTGEKPYKCPECGKSFSSKKALTEHQRTHTGEKPTGKKTS

SEQ ID NO: 1668 - protein, 209 aa, Artificial Sequence
  source: /note="Description of Artificial Sequence: Synthetic polypeptide"
LEPGEKPYKCPECGKSFSSKKALTEHQRTHTGEKPYKCPECGKSFSRSDKLVRHQRTHTGEKPYKCPECGKSFSQLAHLRAHQRTHTGEKPYKCPECGKSFSRADNLTEHQRTHTGEKPYKCPECGKSFSRSDHLTNHQRTHTGEKPYKCPECGKSFSQRAHLERHQRTHTGEKPYKCPECGKSFSQRANLRAHQRTHTGEKPTGKKTS

SEQ ID NO: 1669 - protein, 209 aa, Artificial Sequence
  source: /note="Description of Artificial Sequence: Synthetic polypeptide"
LEPGEKPYKCPECGKSFSRSDHLTTHQRTHTGEKPYKCPECGKSFSSKKALTEHQRTHTGEKPYKCPECGKSFSRSDKLVRHQRTHTGEKPYKCPECGKSFSQLAHLRAHQRTHTGEKPYKCPECGKSFSRADNLTEHQRTHTGEKPYKCPECGKSFSRSDHLTNHQRTHTGEKPYKCPECGKSFSQRAHLERHQRTHTGEKPTGKKTS

SEQ ID NO: 1670 - protein, 209 aa, Artificial Sequence
  source: /note="Description of Artificial Sequence: Synthetic polypeptide"
LEPGEKPYKCPECGKSFSRSDKLVRHQRTHTGEKPYKCPECGKSFSRSDDLVRHQRTHTGEKPYKCPECGKSFSRSDHLTNHQRTHTGEKPYKCPECGKSFSRSDKLTEHQRTHTGEKPYKCPECGKSFSRSDKLVRHQRTHTGEKPYKCPECGKSFSQRAHLERHQRTHTGEKPYKCPECGKSFSRSDELVRHQRTHTGEKPTGKKTS

SEQ ID NO: 1671 - protein, 209 aa, Artificial Sequence
  source: /note="Description of Artificial Sequence: Synthetic polypeptide"
LEPGEKPYKCPECGKSFSRSDDLVRHQRTHTGEKPYKCPECGKSFSRSDHLTNHQRTHTGEKPYKCPECGKSFSRSDKLTEHQRTHTGEKPYKCPECGKSFSRSDKLVRHQRTHTGEKPYKCPECGKSFSQRAHLERHQRTHTGEKPYKCPECGKSFSRSDELVRHQRTHTGEKPYKCPECGKSFSQSGDLRRHQRTHTGEKPTGKKTS

SEQ ID NO: 1672 - protein, 209 aa, Artificial Sequence
  source: /note="Description of Artificial Sequence: Synthetic polypeptide"
LEPGEKPYKCPECGKSFSDCRDLARHQRTHTGEKPYKCPECGKSFSRSDKLVRHQRTHTGEKPYKCPECGKSFSRSDDLVRHQRTHTGEKPYKCPECGKSFSRSDHLTNHQRTHTGEKPYKCPECGKSFSRSDKLTEHQRTHTGEKPYKCPECGKSFSRSDKLVRHQRTHTGEKPYKCPECGKSFSQRAHLERHQRTHTGEKPTGKKTS

SEQ ID NO: 1673 - protein, 209 aa, Artificial Sequence
  source: /note="Description of Artificial Sequence: Synthetic polypeptide"
LEPGEKPYKCPECGKSFSQLAHLRAHQRTHTGEKPYKCPECGKSFSRSDKLVRHQRTHTGEKPYKCPECGKSFSQSGDLRRHQRTHTGEKPYKCPECGKSFSRSDNLVRHQRTHTGEKPYKCPECGKSFSRSDELVRHQRTHTGEKPYKCPECGKSFSDPGHLVRHQRTHTGEKPYKCPECGKSFSHTGHLLEHQRTHTGEKPTGKKTS

SEQ ID NO: 1674 - protein, 209 aa, Artificial Sequence
  source: /note="Description of Artificial Sequence: Synthetic polypeptide"
LEPGEKPYKCPECGKSFSRSDKLVRHQRTHTGEKPYKCPECGKSFSQSGDLRRHQRTHTGEKPYKCPECGKSFSRSDNLVRHQRTHTGEKPYKCPECGKSFSRSDELVRHQRTHTGEKPYKCPECGKSFSDPGHLVRHQRTHTGEKPYKCPECGKSFSHTGHLLEHQRTHTGEKPYKCPECGKSFSDPGHLVRHQRTHTGEKPTGKKTS

SEQ ID NO: 1675 - protein, 209 aa, Artificial Sequence
  source: /note="Description of Artificial Sequence: Synthetic polypeptide"
LEPGEKPYKCPECGKSFSRRDELNVHQRTHTGEKPYKCPECGKSFSQLAHLRAHQRTHTGEKPYKCPECGKSFSRSDKLVRHQRTHTGEKPYKCPECGKSFSQSGDLRRHQRTHTGEKPYKCPECGKSFSRSDNLVRHQRTHTGEKPYKCPECGKSFSRSDELVRHQRTHTGEKPYKCPECGKSFSDPGHLVRHQRTHTGEKPTGKKTS

SEQ ID NO: 1676 - protein, 209 aa, Artificial Sequence
  source: /note="Description of Artificial Sequence: Synthetic polypeptide"
LEPGEKPYKCPECGKSFSQSGHLTEHQRTHTGEKPYKCPECGKSFSRRDELNVHQRTHTGEKPYKCPECGKSFSQLAHLRAHQRTHTGEKPYKCPECGKSFSRSDKLVRHQRTHTGEKPYKCPECGKSFSQSGDLRRHQRTHTGEKPYKCPECGKSFSRSDNLVRHQRTHTGEKPYKCPECGKSFSRSDELVRHQRTHTGEKPTGKKTS

SEQ ID NO: 1677 - protein, 209 aa, Artificial Sequence
  source: /note="Description of Artificial Sequence: Synthetic polypeptide"
LEPGEKPYKCPECGKSFSRSDHLTNHQRTHTGEKPYKCPECGKSFSTSGHLVRHQRTHTGEKPYKCPECGKSFSRADNLTEHQRTHTGEKPYKCPECGKSFSDCRDLARHQRTHTGEKPYKCPECGKSFSDPGHLVRHQRTHTGEKPYKCPECGKSFSRSDELVRHQRTHTGEKPYKCPECGKSFSRSDKLVRHQRTHTGEKPTGKKTS

SEQ ID NO: 1678 - protein, 209 aa, Artificial Sequence
  source: /note="Description of Artificial Sequence: Synthetic polypeptide"
LEPGEKPYKCPECGKSFSQSGDLRRHQRTHTGEKPYKCPECGKSFSRSDHLTNHQRTHTGEKPYKCPECGKSFSTSGHLVRHQRTHTGEKPYKCPECGKSFSRADNLTEHQRTHTGEKPYKCPECGKSFSDCRDLARHQRTHTGEKPYKCPECGKSFSDPGHLVRHQRTHTGEKPYKCPECGKSFSRSDELVRHQRTHTGEKPTGKKTS

SEQ ID NO: 1679 - protein, 209 aa, Artificial Sequence
  source: /note="Description of Artificial Sequence: Synthetic polypeptide"
LEPGEKPYKCPECGKSFSRSDNLVRHQRTHTGEKPYKCPECGKSFSRSDELVRHQRTHTGEKPYKCPECGKSFSDPGHLVRHQRTHTGEKPYKCPECGKSFSHTGHLLEHQRTHTGEKPYKCPECGKSFSDPGHLVRHQRTHTGEKPYKCPECGKSFSTSGHLVRHQRTHTGEKPYKCPECGKSFSQSGDLRRHQRTHTGEKPTGKKTS

SEQ ID NO: 1680 - protein, 209 aa, Artificial Sequence
  source: /note="Description of Artificial Sequence: Synthetic polypeptide"
LEPGEKPYKCPECGKSFSQSGDLRRHQRTHTGEKPYKCPECGKSFSRSDNLVRHQRTHTGEKPYKCPECGKSFSRSDELVRHQRTHTGEKPYKCPECGKSFSDPGHLVRHQRTHTGEKPYKCPECGKSFSHTGHLLEHQRTHTGEKPYKCPECGKSFSDPGHLVRHQRTHTGEKPYKCPECGKSFSTSGHLVRHQRTHTGEKPTGKKTS

SEQ ID NO: 1681 - protein, 209 aa, Artificial Sequence
  source: /note="Description of Artificial Sequence: Synthetic polypeptide"
LEPGEKPYKCPECGKSFSRSDELVRHQRTHTGEKPYKCPECGKSFSDPGHLVRHQRTHTGEKPYKCPECGKSFSHTGHLLEHQRTHTGEKPYKCPECGKSFSDPGHLVRHQRTHTGEKPYKCPECGKSFSTSGHLVRHQRTHTGEKPYKCPECGKSFSQSGDLRRHQRTHTGEKPYKCPECGKSFSRSDHLTNHQRTHTGEKPTGKKTS

SEQ ID NO: 1682 - protein, 209 aa, Artificial Sequence
  source: /note="Description of Artificial Sequence: Synthetic polypeptide"
LEPGEKPYKCPECGKSFSDPGHLVRHQRTHTGEKPYKCPECGKSFSTSGHLVRHQRTHTGEKPYKCPECGKSFSQSGDLRRHQRTHTGEKPYKCPECGKSFSRSDHLTNHQRTHTGEKPYKCPECGKSFSTSGHLVRHQRTHTGEKPYKCPECGKSFSRADNLTEHQRTHTGEKPYKCPECGKSFSDCRDLARHQRTHTGEKPTGKKTS

SEQ ID NO: 1683 - protein, 209 aa, Artificial Sequence
  source: /note="Description of Artificial Sequence: Synthetic polypeptide"
LEPGEKPYKCPECGKSFSTSGHLVRHQRTHTGEKPYKCPECGKSFSQSGDLRRHQRTHTGEKPYKCPECGKSFSRSDHLTNHQRTHTGEKPYKCPECGKSFSTSGHLVRHQRTHTGEKPYKCPECGKSFSRADNLTEHQRTHTGEKPYKCPECGKSFSDCRDLARHQRTHTGEKPYKCPECGKSFSDPGHLVRHQRTHTGEKPTGKKTS

SEQ ID NO: 1684 - protein, 209 aa, Artificial Sequence
  source: /note="Description of Artificial Sequence: Synthetic polypeptide"
LEPGEKPYKCPECGKSFSHTGHLLEHQRTHTGEKPYKCPECGKSFSDPGHLVRHQRTHTGEKPYKCPECGKSFSTSGHLVRHQRTHTGEKPYKCPECGKSFSQSGDLRRHQRTHTGEKPYKCPECGKSFSRSDHLTNHQRTHTGEKPYKCPECGKSFSTSGHLVRHQRTHTGEKPYKCPECGKSFSRADNLTEHQRTHTGEKPTGKKTS

SEQ ID NO: 1685 - protein, 209 aa, Artificial Sequence
  source: /note="Description of Artificial Sequence: Synthetic polypeptide"
LEPGEKPYKCPECGKSFSDPGHLVRHQRTHTGEKPYKCPECGKSFSHTGHLLEHQRTHTGEKPYKCPECGKSFSDPGHLVRHQRTHTGEKPYKCPECGKSFSTSGHLVRHQRTHTGEKPYKCPECGKSFSQSGDLRRHQRTHTGEKPYKCPECGKSFSRSDHLTNHQRTHTGEKPYKCPECGKSFSTSGHLVRHQRTHTGEKPTGKKTS

SEQ ID NO: 1686 - protein, 209 aa, Artificial Sequence
  source: /note="Description of Artificial Sequence: Synthetic polypeptide"
LEPGEKPYKCPECGKSFSRSDDLVRHQRTHTGEKPYKCPECGKSFSDCRDLARHQRTHTGEKPYKCPECGKSFSRSDELVRHQRTHTGEKPYKCPECGKSFSRADNLTEHQRTHTGEKPYKCPECGKSFSRSDKLVRHQRTHTGEKPYKCPECGKSFSQSSSLVRHQRTHTGEKPYKCPECGKSFSRSDHLTNHQRTHTGEKPTGKKTS

SEQ ID NO: 1687 - protein, 209 aa, Artificial Sequence
  source: /note="Description of Artificial Sequence: Synthetic polypeptide"
LEPGEKPYKCPECGKSFSDCRDLARHQRTHTGEKPYKCPECGKSFSRSDELVRHQRTHTGEKPYKCPECGKSFSRADNLTEHQRTHTGEKPYKCPECGKSFSRSDKLVRHQRTHTGEKPYKCPECGKSFSQSSSLVRHQRTHTGEKPYKCPECGKSFSRSDHLTNHQRTHTGEKPYKCPECGKSFSSKKHLAEHQRTHTGEKPTGKKTS

SEQ ID NO: 1688 - protein, 209 aa, Artificial Sequence
  source: /note="Description of Artificial Sequence: Synthetic polypeptide"
LEPGEKPYKCPECGKSFSRSDDLVRHQRTHTGEKPYKCPECGKSFSRSDDLVRHQRTHTGEKPYKCPECGKSFSDCRDLARHQRTHTGEKPYKCPECGKSFSRSDELVRHQRTHTGEKPYKCPECGKSFSRADNLTEHQRTHTGEKPYKCPECGKSFSRSDKLVRHQRTHTGEKPYKCPECGKSFSQSSSLVRHQRTHTGEKPTGKKTS

SEQ ID NO: 1689 - protein, 209 aa, Artificial Sequence
  source: /note="Description of Artificial Sequence: Synthetic polypeptide"
LEPGEKPYKCPECGKSFSRSDHLTTHQRTHTGEKPYKCPECGKSFSRSDDLVRHQRTHTGEKPYKCPECGKSFSRSDDLVRHQRTHTGEKPYKCPECGKSFSDCRDLARHQRTHTGEKPYKCPECGKSFSRSDELVRHQRTHTGEKPYKCPECGKSFSRADNLTEHQRTHTGEKPYKCPECGKSFSRSDKLVRHQRTHTGEKPTGKKTS

SEQ ID NO: 1690 - protein, 209 aa, Artificial Sequence
  source: /note="Description of Artificial Sequence: Synthetic polypeptide"
LEPGEKPYKCPECGKSFSRADNLTEHQRTHTGEKPYKCPECGKSFSRSDHLTNHQRTHTGEKPYKCPECGKSFSRSDHLTTHQRTHTGEKPYKCPECGKSFSRSDDLVRHQRTHTGEKPYKCPECGKSFSRSDDLVRHQRTHTGEKPYKCPECGKSFSDCRDLARHQRTHTGEKPYKCPECGKSFSRSDELVRHQRTHTGEKPTGKKTS

SEQ ID NO: 1691 - protein, 209 aa, Artificial Sequence
  source: /note="Description of Artificial Sequence: Synthetic polypeptide"
LEPGEKPYKCPECGKSFSRSDHLTNHQRTHTGEKPYKCPECGKSFSRSDHLTTHQRTHTGEKPYKCPECGKSFSRSDDLVRHQRTHTGEKPYKCPECGKSFSRSDDLVRHQRTHTGEKPYKCPECGKSFSDCRDLARHQRTHTGEKPYKCPECGKSFSRSDELVRHQRTHTGEKPYKCPECGKSFSRADNLTEHQRTHTGEKPTGKKTS

SEQ ID NO: 1692 - protein, 209 aa, Artificial Sequence
  source: /note="Description of Artificial Sequence: Synthetic polypeptide"
LEPGEKPYKCPECGKSFSRSDELVRHQRTHTGEKPYKCPECGKSFSRADNLTEHQRTHTGEKPYKCPECGKSFSRSDKLVRHQRTHTGEKPYKCPECGKSFSQSSSLVRHQRTHTGEKPYKCPECGKSFSRSDHLTNHQRTHTGEKPYKCPECGKSFSSKKHLAEHQRTHTGEKPYKCPECGKSFSRSDDLVRHQRTHTGEKPTGKKTS

SEQ ID NO: 1693 - protein, 209 aa, Artificial Sequence
  source: /note="Description of Artificial Sequence: Synthetic polypeptide"
LEPGEKPYKCPECGKSFSRSDKLVRHQRTHTGEKPYKCPECGKSFSQSSSLVRHQRTHTGEKPYKCPECGKSFSRSDHLTNHQRTHTGEKPYKCPECGKSFSSKKHLAEHQRTHTGEKPYKCPECGKSFSRSDDLVRHQRTHTGEKPYKCPECGKSFSRSDHLTTHQRTHTGEKPYKCPECGKSFSRSDKLVRHQRTHTGEKPTGKKTS

SEQ ID NO: 1694 - protein, 209 aa, Artificial Sequence
  source: /note="Description of Artificial Sequence: Synthetic polypeptide"
LEPGEKPYKCPECGKSFSRADNLTEHQRTHTGEKPYKCPECGKSFSRSDKLVRHQRTHTGEKPYKCPECGKSFSQSSSLVRHQRTHTGEKPYKCPECGKSFSRSDHLTNHQRTHTGEKPYKCPECGKSFSSKKHLAEHQRTHTGEKPYKCPECGKSFSRSDDLVRHQRTHTGEKPYKCPECGKSFSRSDHLTTHQRTHTGEKPTGKKTS

SEQ ID NO: 1695 - protein, 209 aa, Artificial Sequence
  source: /note="Description of Artificial Sequence: Synthetic polypeptide"
LEPGEKPYKCPECGKSFSQSSNLVRHQRTHTGEKPYKCPECGKSFSQRAHLERHQRTHTGEKPYKCPECGKSFSRADNLTEHQRTHTGEKPYKCPECGKSFSRSDHLTNHQRTHTGEKPYKCPECGKSFSRSDHLTTHQRTHTGEKPYKCPECGKSFSRSDDLVRHQRTHTGEKPYKCPECGKSFSRSDDLVRHQRTHTGEKPTGKKTS

SEQ ID NO: 1696 - protein, 209 aa, Artificial Sequence
  source: /note="Description of Artificial Sequence: Synthetic polypeptide"
LEPGEKPYKCPECGKSFSQRAHLERHQRTHTGEKPYKCPECGKSFSRADNLTEHQRTHTGEKPYKCPECGKSFSRSDHLTNHQRTHTGEKPYKCPECGKSFSRSDHLTTHQRTHTGEKPYKCPECGKSFSRSDDLVRHQRTHTGEKPYKCPECGKSFSRSDDLVRHQRTHTGEKPYKCPECGKSFSDCRDLARHQRTHTGEKPTGKKTS

SEQ ID NO: 1697 - protein, 209 aa, Artificial Sequence
  source: /note="Description of Artificial Sequence: Synthetic polypeptide"
LEPGEKPYKCPECGKSFSTSGNLTEHQRTHTGEKPYKCPECGKSFSQRAHLERHQRTHTGEKPYKCPECGKSFSTSGNLTEHQRTHTGEKPYKCPECGKSFSQSGHLTEHQRTHTGEKPYKCPECGKSFSSRRTCRAHQRTHTGEKPYKCPECGKSFSTKNSLTEHQRTHTGEKPYKCPECGKSFSDSGNLRVHQRTHTGEKPTGKKTS

SEQ ID NO: 1698 - protein, 209 aa, Artificial Sequence
  source: /note="Description of Artificial Sequence: Synthetic polypeptide"
LEPGEKPYKCPECGKSFSDPGHLVRHQRTHTGEKPYKCPECGKSFSTSGNLTEHQRTHTGEKPYKCPECGKSFSQRAHLERHQRTHTGEKPYKCPECGKSFSTSGNLTEHQRTHTGEKPYKCPECGKSFSQSGHLTEHQRTHTGEKPYKCPECGKSFSSRRTCRAHQRTHTGEKPYKCPECGKSFSTKNSLTEHQRTHTGEKPTGKKTS

SEQ ID NO: 1699 - protein, 209 aa, Artificial Sequence
  source: /note="Description of Artificial Sequence: Synthetic polypeptide"
LEPGEKPYKCPECGKSFSRADNLTEHQRTHTGEKPYKCPECGKSFSQNSTLTEHQRTHTGEKPYKCPECGKSFSQSGHLTEHQRTHTGEKPYKCPECGKSFSDPGHLVRHQRTHTGEKPYKCPECGKSFSTSGNLTEHQRTHTGEKPYKCPECGKSFSQRAHLERHQRTHTGEKPYKCPECGKSFSTSGNLTEHQRTHTGEKPTGKKTS

SEQ ID NO: 1700 - protein, 209 aa, Artificial Sequence
  source: /note="Description of Artificial Sequence: Synthetic polypeptide"
LEPGEKPYKCPECGKSFSQRAHLERHQRTHTGEKPYKCPECGKSFSTSGNLTEHQRTHTGEKPYKCPECGKSFSQSGHLTEHQRTHTGEKPYKCPECGKSFSSRRTCRAHQRTHTGEKPYKCPECGKSFSTKNSLTEHQRTHTGEKPYKCPECGKSFSDSGNLRVHQRTHTGEKPYKCPECGKSFSQSGNLTEHQRTHTGEKPTGKKTS

SEQ ID NO: 1701 - protein, 209 aa, Artificial Sequence
  source: /note="Description of Artificial Sequence: Synthetic polypeptide"
LEPGEKPYKCPECGKSFSQSGHLTEHQRTHTGEKPYKCPECGKSFSDPGHLVRHQRTHTGEKPYKCPECGKSFSTSGNLTEHQRTHTGEKPYKCPECGKSFSQRAHLERHQRTHTGEKPYKCPECGKSFSTSGNLTEHQRTHTGEKPYKCPECGKSFSQSGHLTEHQRTHTGEKPYKCPECGKSFSSRRTCRAHQRTHTGEKPTGKKTS

SEQ ID NO: 1702 - protein, 209 aa, Artificial Sequence
  source: /note="Description of Artificial Sequence: Synthetic polypeptide"
LEPGEKPYKCPECGKSFSQNSTLTEHQRTHTGEKPYKCPECGKSFSQSGHLTEHQRTHTGEKPYKCPECGKSFSDPGHLVRHQRTHTGEKPYKCPECGKSFSTSGNLTEHQRTHTGEKPYKCPECGKSFSQRAHLERHQRTHTGEKPYKCPECGKSFSTSGNLTEHQRTHTGEKPYKCPECGKSFSQSGHLTEHQRTHTGEKPTGKKTS

SEQ ID NO: 1703 - protein, 209 aa, Artificial Sequence
  source: /note="Description of Artificial Sequence: Synthetic polypeptide"
LEPGEKPYKCPECGKSFSDPGNLVRHQRTHTGEKPYKCPECGKSFSDCRDLARHQRTHTGEKPYKCPECGKSFSRRDELNVHQRTHTGEKPYKCPECGKSFSDPGNLVRHQRTHTGEKPYKCPECGKSFSRRDELNVHQRTHTGEKPYKCPECGKSFSDPGNLVRHQRTHTGEKPYKCPECGKSFSDPGALVRHQRTHTGEKPTGKKTS

SEQ ID NO: 1704 - protein, 209 aa, Artificial Sequence
  source: /note="Description of Artificial Sequence: Synthetic polypeptide"
LEPGEKPYKCPECGKSFSTKNSLTEHQRTHTGEKPYKCPECGKSFSRADNLTEHQRTHTGEKPYKCPECGKSFSDKKDLTRHQRTHTGEKPYKCPECGKSFSRSDHLTTHQRTHTGEKPYKCPECGKSFSSKKALTEHQRTHTGEKPYKCPECGKSFSRNDALTEHQRTHTGEKPYKCPECGKSFSRSDELVRHQRTHTGEKPTGKKTS

SEQ ID NO: 1705 - protein, 209 aa, Artificial Sequence
  source: /note="Description of Artificial Sequence: Synthetic polypeptide"
LEPGEKPYKCPECGKSFSRADNLTEHQRTHTGEKPYKCPECGKSFSDKKDLTRHQRTHTGEKPYKCPECGKSFSRSDHLTTHQRTHTGEKPYKCPECGKSFSSKKALTEHQRTHTGEKPYKCPECGKSFSRNDALTEHQRTHTGEKPYKCPECGKSFSRSDELVRHQRTHTGEKPYKCPECGKSFSSPADLTRHQRTHTGEKPTGKKTS

SEQ ID NO: 1706 - protein, 209 aa, Artificial Sequence
  source: /note="Description of Artificial Sequence: Synthetic polypeptide"
LEPGEKPYKCPECGKSFSSPADLTRHQRTHTGEKPYKCPECGKSFSTKNSLTEHQRTHTGEKPYKCPECGKSFSRADNLTEHQRTHTGEKPYKCPECGKSFSDKKDLTRHQRTHTGEKPYKCPECGKSFSRSDHLTTHQRTHTGEKPYKCPECGKSFSSKKALTEHQRTHTGEKPYKCPECGKSFSRNDALTEHQRTHTGEKPTGKKTS

SEQ ID NO: 1707 - protein, 209 aa, Artificial Sequence
  source: /note="Description of Artificial Sequence: Synthetic polypeptide"
LEPGEKPYKCPECGKSFSTSHSLTEHQRTHTGEKPYKCPECGKSFSSPADLTRHQRTHTGEKPYKCPECGKSFSTKNSLTEHQRTHTGEKPYKCPECGKSFSRADNLTEHQRTHTGEKPYKCPECGKSFSDKKDLTRHQRTHTGEKPYKCPECGKSFSRSDHLTTHQRTHTGEKPYKCPECGKSFSSKKALTEHQRTHTGEKPTGKKTS

SEQ ID NO: 1708 - protein, 209 aa, Artificial Sequence
  source: /note="Description of Artificial Sequence: Synthetic polypeptide"
LEPGEKPYKCPECGKSFSDKKDLTRHQRTHTGEKPYKCPECGKSFSRSDHLTTHQRTHTGEKPYKCPECGKSFSSKKALTEHQRTHTGEKPYKCPECGKSFSRNDALTEHQRTHTGEKPYKCPECGKSFSRSDELVRHQRTHTGEKPYKCPECGKSFSSPADLTRHQRTHTGEKPYKCPECGKSFSTHLDLIRHQRTHTGEKPTGKKTS

SEQ ID NO: 1709 - protein, 209 aa, Artificial Sequence
  source: /note="Description of Artificial Sequence: Synthetic polypeptide"
LEPGEKPYKCPECGKSFSRNDALTEHQRTHTGEKPYKCPECGKSFSRSDELVRHQRTHTGEKPYKCPECGKSFSSPADLTRHQRTHTGEKPYKCPECGKSFSTHLDLIRHQRTHTGEKPYKCPECGKSFSRNDTLTEHQRTHTGEKPYKCPECGKSFSRSDHLTTHQRTHTGEKPYKCPECGKSFSSPADLTRHQRTHTGEKPTGKKTS

SEQ ID NO: 1710 - protein, 209 aa, Artificial Sequence
  source: /note="Description of Artificial Sequence: Synthetic polypeptide"
LEPGEKPYKCPECGKSFSRSDELVRHQRTHTGEKPYKCPECGKSFSSPADLTRHQRTHTGEKPYKCPECGKSFSTHLDLIRHQRTHTGEKPYKCPECGKSFSRNDTLTEHQRTHTGEKPYKCPECGKSFSRSDHLTTHQRTHTGEKPYKCPECGKSFSSPADLTRHQRTHTGEKPYKCPECGKSFSRSDHLTTHQRTHTGEKPTGKKTS

SEQ ID NO: 1711 - protein, 209 aa, Artificial Sequence
  source: /note="Description of Artificial Sequence: Synthetic polypeptide"
LEPGEKPYKCPECGKSFSTTGNLTVHQRTHTGEKPYKCPECGKSFSRSDHLTTHQRTHTGEKPYKCPECGKSFSSKKHLAEHQRTHTGEKPYKCPECGKSFSTSHSLTEHQRTHTGEKPYKCPECGKSFSSPADLTRHQRTHTGEKPYKCPECGKSFSTKNSLTEHQRTHTGEKPYKCPECGKSFSRADNLTEHQRTHTGEKPTGKKTS

SEQ ID NO: 1712 - protein, 209 aa, Artificial Sequence
  source: /note="Description of Artificial Sequence: Synthetic polypeptide"
LEPGEKPYKCPECGKSFSSPADLTRHQRTHTGEKPYKCPECGKSFSTHLDLIRHQRTHTGEKPYKCPECGKSFSRNDTLTEHQRTHTGEKPYKCPECGKSFSRSDHLTTHQRTHTGEKPYKCPECGKSFSSPADLTRHQRTHTGEKPYKCPECGKSFSRSDHLTTHQRTHTGEKPYKCPECGKSFSSPADLTRHQRTHTGEKPTGKKTS

SEQ ID NO: 1713 - protein, 209 aa, Artificial Sequence
  source: /note="Description of Artificial Sequence: Synthetic polypeptide"
LEPGEKPYKCPECGKSFSSKKHLAEHQRTHTGEKPYKCPECGKSFSTSHSLTEHQRTHTGEKPYKCPECGKSFSSPADLTRHQRTHTGEKPYKCPECGKSFSTKNSLTEHQRTHTGEKPYKCPECGKSFSRADNLTEHQRTHTGEKPYKCPECGKSFSDKKDLTRHQRTHTGEKPYKCPECGKSFSRSDHLTTHQRTHTGEKPTGKKTS

SEQ ID NO: 1714 - protein, 209 aa, Artificial Sequence
  source: /note="Description of Artificial Sequence: Synthetic polypeptide"
LEPGEKPYKCPECGKSFSRSDHLTTHQRTHTGEKPYKCPECGKSFSSKKHLAEHQRTHTGEKPYKCPECGKSFSTSHSLTEHQRTHTGEKPYKCPECGKSFSSPADLTRHQRTHTGEKPYKCPECGKSFSTKNSLTEHQRTHTGEKPYKCPECGKSFSRADNLTEHQRTHTGEKPYKCPECGKSFSDKKDLTRHQRTHTGEKPTGKKTS

SEQ ID NO: 1715 - protein, 209 aa, Artificial Sequence
  source: /note="Description of Artificial Sequence: Synthetic polypeptide"
LEPGEKPYKCPECGKSFSRSDHLTTHQRTHTGEKPYKCPECGKSFSSKKALTEHQRTHTGEKPYKCPECGKSFSRNDALTEHQRTHTGEKPYKCPECGKSFSRSDELVRHQRTHTGEKPYKCPECGKSFSSPADLTRHQRTHTGEKPYKCPECGKSFSTHLDLIRHQRTHTGEKPYKCPECGKSFSRNDTLTEHQRTHTGEKPTGKKTS

SEQ ID NO: 1716 - protein, 209 aa, Artificial Sequence
  source: /note="Description of Artificial Sequence: Synthetic polypeptide"
LEPGEKPYKCPECGKSFSSKKALTEHQRTHTGEKPYKCPECGKSFSRNDALTEHQRTHTGEKPYKCPECGKSFSRSDELVRHQRTHTGEKPYKCPECGKSFSSPADLTRHQRTHTGEKPYKCPECGKSFSTHLDLIRHQRTHTGEKPYKCPECGKSFSRNDTLTEHQRTHTGEKPYKCPECGKSFSRSDHLTTHQRTHTGEKPTGKKTS

SEQ ID NO: 1717 - protein, 209 aa, Artificial Sequence
  source: /note="Description of Artificial Sequence: Synthetic polypeptide"
LEPGEKPYKCPECGKSFSDCRDLARHQRTHTGEKPYKCPECGKSFSTSHSLTEHQRTHTGEKPYKCPECGKSFSDPGNLVRHQRTHTGEKPYKCPECGKSFSRNDALTEHQRTHTGEKPYKCPECGKSFSQSGDLRRHQRTHTGEKPYKCPECGKSFSTSGELVRHQRTHTGEKPYKCPECGKSFSHRTTLTNHQRTHTGEKPTGKKTS

SEQ ID NO: 1718 - protein, 209 aa, Artificial Sequence
  source: /note="Description of Artificial Sequence: Synthetic polypeptide"
LEPGEKPYKCPECGKSFSQAGHLASHQRTHTGEKPYKCPECGKSFSHKNALQNHQRTHTGEKPYKCPECGKSFSQRAHLERHQRTHTGEKPYKCPECGKSFSTKNSLTEHQRTHTGEKPYKCPECGKSFSSKKALTEHQRTHTGEKPYKCPECGKSFSSKKALTEHQRTHTGEKPYKCPECGKSFSQNSTLTEHQRTHTGEKPTGKKTS

SEQ ID NO: 1719 - protein, 209 aa, Artificial Sequence
  source: /note="Description of Artificial Sequence: Synthetic polypeptide"
LEPGEKPYKCPECGKSFSHKNALQNHQRTHTGEKPYKCPECGKSFSQRAHLERHQRTHTGEKPYKCPECGKSFSTKNSLTEHQRTHTGEKPYKCPECGKSFSSKKALTEHQRTHTGEKPYKCPECGKSFSSKKALTEHQRTHTGEKPYKCPECGKSFSQNSTLTEHQRTHTGEKPYKCPECGKSFSERSHLREHQRTHTGEKPTGKKTS

SEQ ID NO: 1720 - protein, 209 aa, Artificial Sequence
  source: /note="Description of Artificial Sequence: Synthetic polypeptide"
LEPGEKPYKCPECGKSFSQSSNLVRHQRTHTGEKPYKCPECGKSFSQAGHLASHQRTHTGEKPYKCPECGKSFSHKNALQNHQRTHTGEKPYKCPECGKSFSQRAHLERHQRTHTGEKPYKCPECGKSFSTKNSLTEHQRTHTGEKPYKCPECGKSFSSKKALTEHQRTHTGEKPYKCPECGKSFSSKKALTEHQRTHTGEKPTGKKTS

SEQ ID NO: 1721 - protein, 209 aa, Artificial Sequence
  source: /note="Description of Artificial Sequence: Synthetic polypeptide"
LEPGEKPYKCPECGKSFSTKNSLTEHQRTHTGEKPYKCPECGKSFSSKKALTEHQRTHTGEKPYKCPECGKSFSSKKALTEHQRTHTGEKPYKCPECGKSFSQNSTLTEHQRTHTGEKPYKCPECGKSFSERSHLREHQRTHTGEKPYKCPECGKSFSSKKHLAEHQRTHTGEKPYKCPECGKSFSQRAHLERHQRTHTGEKPTGKKTS

SEQ ID NO: 1722 - protein, 209 aa, Artificial Sequence
  source: /note="Description of Artificial Sequence: Synthetic polypeptide"
LEPGEKPYKCPECGKSFSQRAHLERHQRTHTGEKPYKCPECGKSFSTKNSLTEHQRTHTGEKPYKCPECGKSFSSKKALTEHQRTHTGEKPYKCPECGKSFSSKKALTEHQRTHTGEKPYKCPECGKSFSQNSTLTEHQRTHTGEKPYKCPECGKSFSERSHLREHQRTHTGEKPYKCPECGKSFSSKKHLAEHQRTHTGEKPTGKKTS

SEQ ID NO: 1723 - protein, 209 aa, Artificial Sequence
  source: /note="Description of Artificial Sequence: Synthetic polypeptide"
LEPGEKPYKCPECGKSFSSKKALTEHQRTHTGEKPYKCPECGKSFSSKKALTEHQRTHTGEKPYKCPECGKSFSQNSTLTEHQRTHTGEKPYKCPECGKSFSERSHLREHQRTHTGEKPYKCPECGKSFSSKKHLAEHQRTHTGEKPYKCPECGKSFSQRAHLERHQRTHTGEKPYKCPECGKSFSTHLDLIRHQRTHTGEKPTGKKTS

SEQ ID NO: 1724 - protein, 209 aa, Artificial Sequence
  source: /note="Description of Artificial Sequence: Synthetic polypeptide"
LEPGEKPYKCPECGKSFSRSDELVRHQRTHTGEKPYKCPECGKSFSTSGNLVRHQRTHTGEKPYKCPECGKSFSQSGDLRRHQRTHTGEKPYKCPECGKSFSRSDKLVRHQRTHTGEKPYKCPECGKSFSRSDELVRHQRTHTGEKPYKCPECGKSFSREDNLHTHQRTHTGEKPYKCPECGKSFSRSDHLTTHQRTHTGEKPTGKKTS

SEQ ID NO: 1725 - protein, 209 aa, Artificial Sequence
  source: /note="Description of Artificial Sequence: Synthetic polypeptide"
LEPGEKPYKCPECGKSFSSKKHLAEHQRTHTGEKPYKCPECGKSFSRSDELVRHQRTHTGEKPYKCPECGKSFSTSGNLVRHQRTHTGEKPYKCPECGKSFSQSGDLRRHQRTHTGEKPYKCPECGKSFSRSDKLVRHQRTHTGEKPYKCPECGKSFSRSDELVRHQRTHTGEKPYKCPECGKSFSREDNLHTHQRTHTGEKPTGKKTS

SEQ ID NO: 1726 - protein, 209 aa, Artificial Sequence
  source: /note="Description of Artificial Sequence: Synthetic polypeptide"
LEPGEKPYKCPECGKSFSRSDKLVRHQRTHTGEKPYKCPECGKSFSRSDELVRHQRTHTGEKPYKCPECGKSFSREDNLHTHQRTHTGEKPYKCPECGKSFSRSDHLTTHQRTHTGEKPYKCPECGKSFSQSGNLTEHQRTHTGEKPYKCPECGKSFSRSDKLVRHQRTHTGEKPYKCPECGKSFSTSGNLVRHQRTHTGEKPTGKKTS

SEQ ID NO: 1727 - protein, 209 aa, Artificial Sequence
  source: /note="Description of Artificial Sequence: Synthetic polypeptide"
LEPGEKPYKCPECGKSFSQSGDLRRHQRTHTGEKPYKCPECGKSFSRSDKLVRHQRTHTGEKPYKCPECGKSFSRSDELVRHQRTHTGEKPYKCPECGKSFSREDNLHTHQRTHTGEKPYKCPECGKSFSRSDHLTTHQRTHTGEKPYKCPECGKSFSQSGNLTEHQRTHTGEKPYKCPECGKSFSRSDKLVRHQRTHTGEKPTGKKTS

SEQ ID NO: 1728 - protein, 209 aa, Artificial Sequence
  source: /note="Description of Artificial Sequence: Synthetic polypeptide"
LEPGEKPYKCPECGKSFSTSGNLVRHQRTHTGEKPYKCPECGKSFSQSGDLRRHQRTHTGEKPYKCPECGKSFSRSDKLVRHQRTHTGEKPYKCPECGKSFSRSDELVRHQRTHTGEKPYKCPECGKSFSREDNLHTHQRTHTGEKPYKCPECGKSFSRSDHLTTHQRTHTGEKPYKCPECGKSFSQSGNLTEHQRTHTGEKPTGKKTS

SEQ ID NO: 1729 - protein, 209 aa, Artificial Sequence
  source: /note="Description of Artificial Sequence: Synthetic polypeptide"
LEPGEKPYKCPECGKSFSRSDHLTNHQRTHTGEKPYKCPECGKSFSSKKHLAEHQRTHTGEKPYKCPECGKSFSRSDELVRHQRTHTGEKPYKCPECGKSFSTSGNLVRHQRTHTGEKPYKCPECGKSFSQSGDLRRHQRTHTGEKPYKCPECGKSFSRSDKLVRHQRTHTGEKPYKCPECGKSFSRSDELVRHQRTHTGEKPTGKKTS

SEQ ID NO: 1730 - protein, 209 aa, Artificial Sequence
  source: /note="Description of Artificial Sequence: Synthetic polypeptide"
LEPGEKPYKCPECGKSFSRSDELVRHQRTHTGEKPYKCPECGKSFSREDNLHTHQRTHTGEKPYKCPECGKSFSRSDHLTTHQRTHTGEKPYKCPECGKSFSQSGNLTEHQRTHTGEKPYKCPECGKSFSRSDKLVRHQRTHTGEKPYKCPECGKSFSTSGNLVRHQRTHTGEKPYKCPECGKSFSDPGNLVRHQRTHTGEKPTGKKTS

SEQ ID NO: 1731 - protein, 209 aa, Artificial Sequence
  source: /note="Description of Artificial Sequence: Synthetic polypeptide"
LEPGEKPYKCPECGKSFSREDNLHTHQRTHTGEKPYKCPECGKSFSRSDHLTTHQRTHTGEKPYKCPECGKSFSQSGNLTEHQRTHTGEKPYKCPECGKSFSRSDKLVRHQRTHTGEKPYKCPECGKSFSTSGNLVRHQRTHTGEKPYKCPECGKSFSDPGNLVRHQRTHTGEKPYKCPECGKSFSTSGSLVRHQRTHTGEKPTGKKTS

SEQ ID NO: 1732 - protein, 209 aa, Artificial Sequence
  source: /note="Description of Artificial Sequence: Synthetic polypeptide"
LEPGEKPYKCPECGKSFSQSGNLTEHQRTHTGEKPYKCPECGKSFSRSDKLVRHQRTHTGEKPYKCPECGKSFSTSGNLVRHQRTHTGEKPYKCPECGKSFSDPGNLVRHQRTHTGEKPYKCPECGKSFSTSGSLVRHQRTHTGEKPYKCPECGKSFSTSGHLVRHQRTHTGEKPYKCPECGKSFSQSGDLRRHQRTHTGEKPTGKKTS

SEQ ID NO: 1733 - protein, 209 aa, Artificial Sequence
  source: /note="Description of Artificial Sequence: Synthetic polypeptide"
LEPGEKPYKCPECGKSFSRSDHLTTHQRTHTGEKPYKCPECGKSFSQSGNLTEHQRTHTGEKPYKCPECGKSFSRSDKLVRHQRTHTGEKPYKCPECGKSFSTSGNLVRHQRTHTGEKPYKCPECGKSFSDPGNLVRHQRTHTGEKPYKCPECGKSFSTSGSLVRHQRTHTGEKPYKCPECGKSFSTSGHLVRHQRTHTGEKPTGKKTS

SEQ ID NO: 1734 - protein, 209 aa, Artificial Sequence
  source: /note="Description of Artificial Sequence: Synthetic polypeptide"
LEPGEKPYKCPECGKSFSQLAHLRAHQRTHTGEKPYKCPECGKSFSDPGHLVRHQRTHTGEKPYKCPECGKSFSRSDKLVRHQRTHTGEKPYKCPECGKSFSTSGHLVRHQRTHTGEKPYKCPECGKSFSQSSSLVRHQRTHTGEKPYKCPECGKSFSRRDELNVHQRTHTGEKPYKCPECGKSFSQSGDLRRHQRTHTGEKPTGKKTS

SEQ ID NO: 1735 - protein, 209 aa, Artificial Sequence
  source: /note="Description of Artificial Sequence: Synthetic polypeptide"
LEPGEKPYKCPECGKSFSDPGHLVRHQRTHTGEKPYKCPECGKSFSRSDKLVRHQRTHTGEKPYKCPECGKSFSTSGHLVRHQRTHTGEKPYKCPECGKSFSQSSSLVRHQRTHTGEKPYKCPECGKSFSRRDELNVHQRTHTGEKPYKCPECGKSFSQSGDLRRHQRTHTGEKPYKCPECGKSFSRSDHLTTHQRTHTGEKPTGKKTS

SEQ ID NO: 1736 - protein, 209 aa, Artificial Sequence
  source: /note="Description of Artificial Sequence: Synthetic polypeptide"
LEPGEKPYKCPECGKSFSTSGHLVRHQRTHTGEKPYKCPECGKSFSQSSSLVRHQRTHTGEKPYKCPECGKSFSRRDELNVHQRTHTGEKPYKCPECGKSFSQSGDLRRHQRTHTGEKPYKCPECGKSFSRSDHLTTHQRTHTGEKPYKCPECGKSFSQSGHLTEHQRTHTGEKPYKCPECGKSFSQAGHLASHQRTHTGEKPTGKKTS

SEQ ID NO: 1737 - protein, 209 aa, Artificial Sequence
  source: /note="Description of Artificial Sequence: Synthetic polypeptide"
LEPGEKPYKCPECGKSFSRSDKLVRHQRTHTGEKPYKCPECGKSFSTSGHLVRHQRTHTGEKPYKCPECGKSFSQSSSLVRHQRTHTGEKPYKCPECGKSFSRRDELNVHQRTHTGEKPYKCPECGKSFSQSGDLRRHQRTHTGEKPYKCPECGKSFSRSDHLTTHQRTHTGEKPYKCPECGKSFSQSGHLTEHQRTHTGEKPTGKKTS

SEQ ID NO: 1738 - protein, 209 aa, Artificial Sequence
  source: /note="Description of Artificial Sequence: Synthetic polypeptide"
LEPGEKPYKCPECGKSFSRADNLTEHQRTHTGEKPYKCPECGKSFSRSDKLVRHQRTHTGEKPYKCPECGKSFSRSDHLTTHQRTHTGEKPYKCPECGKSFSRSDHLTNHQRTHTGEKPYKCPECGKSFSTSGHLVRHQRTHTGEKPYKCPECGKSFSTTGNLTVHQRTHTGEKPYKCPECGKSFSDPGHLVRHQRTHTGEKPTGKKTS

SEQ ID NO: 1739 - protein, 209 aa, Artificial Sequence
  source: /note="Description of Artificial Sequence: Synthetic polypeptide"
LEPGEKPYKCPECGKSFSRSDKLVRHQRTHTGEKPYKCPECGKSFSRSDHLTTHQRTHTGEKPYKCPECGKSFSRSDHLTNHQRTHTGEKPYKCPECGKSFSTSGHLVRHQRTHTGEKPYKCPECGKSFSTTGNLTVHQRTHTGEKPYKCPECGKSFSDPGHLVRHQRTHTGEKPYKCPECGKSFSRRDELNVHQRTHTGEKPTGKKTS

SEQ ID NO: 1740 - protein, 209 aa, Artificial Sequence
  source: /note="Description of Artificial Sequence: Synthetic polypeptide"
LEPGEKPYKCPECGKSFSRRDELNVHQRTHTGEKPYKCPECGKSFSRADNLTEHQRTHTGEKPYKCPECGKSFSRSDKLVRHQRTHTGEKPYKCPECGKSFSRSDHLTTHQRTHTGEKPYKCPECGKSFSRSDHLTNHQRTHTGEKPYKCPECGKSFSTSGHLVRHQRTHTGEKPYKCPECGKSFSTTGNLTVHQRTHTGEKPTGKKTS

SEQ ID NO: 1741 - protein, 209 aa, Artificial Sequence
  source: /note="Description of Artificial Sequence: Synthetic polypeptide"
LEPGEKPYKCPECGKSFSRSDHLTTHQRTHTGEKPYKCPECGKSFSRSDHLTNHQRTHTGEKPYKCPECGKSFSTSGHLVRHQRTHTGEKPYKCPECGKSFSTTGNLTVHQRTHTGEKPYKCPECGKSFSDPGHLVRHQRTHTGEKPYKCPECGKSFSRRDELNVHQRTHTGEKPYKCPECGKSFSRTDTLRDHQRTHTGEKPTGKKTS

SEQ ID NO: 1742 - protein, 209 aa, Artificial Sequence
  source: /note="Description of Artificial Sequence: Synthetic polypeptide"
LEPGEKPYKCPECGKSFSRSDKLVRHQRTHTGEKPYKCPECGKSFSTKNSLTEHQRTHTGEKPYKCPECGKSFSRSDELVRHQRTHTGEKPYKCPECGKSFSTSGHLVRHQRTHTGEKPYKCPECGKSFSQSGDLRRHQRTHTGEKPYKCPECGKSFSRSDKLVRHQRTHTGEKPYKCPECGKSFSRSDELVRHQRTHTGEKPTGKKTS

SEQ ID NO: 1743 - protein, 209 aa, Artificial Sequence
  source: /note="Description of Artificial Sequence: Synthetic polypeptide"
LEPGEKPYKCPECGKSFSTKNSLTEHQRTHTGEKPYKCPECGKSFSRSDELVRHQRTHTGEKPYKCPECGKSFSTSGHLVRHQRTHTGEKPYKCPECGKSFSQSGDLRRHQRTHTGEKPYKCPECGKSFSRSDKLVRHQRTHTGEKPYKCPECGKSFSRSDELVRHQRTHTGEKPYKCPECGKSFSTSHSLTEHQRTHTGEKPTGKKTS

SEQ ID NO: 1744 - protein, 209 aa, Artificial Sequence
  source: /note="Description of Artificial Sequence: Synthetic polypeptide"
LEPGEKPYKCPECGKSFSRSDELVRHQRTHTGEKPYKCPECGKSFSTSGHLVRHQRTHTGEKPYKCPECGKSFSQSGDLRRHQRTHTGEKPYKCPECGKSFSRSDKLVRHQRTHTGEKPYKCPECGKSFSRSDELVRHQRTHTGEKPYKCPECGKSFSTSHSLTEHQRTHTGEKPYKCPECGKSFSRSDELVRHQRTHTGEKPTGKKTS

SEQ ID NO: 1745 - protein, 209 aa, Artificial Sequence
  source: /note="Description of Artificial Sequence: Synthetic polypeptide"
LEPGEKPYKCPECGKSFSQSGDLRRHQRTHTGEKPYKCPECGKSFSRSDKLVRHQRTHTGEKPYKCPECGKSFSRSDELVRHQRTHTGEKPYKCPECGKSFSTSHSLTEHQRTHTGEKPYKCPECGKSFSRSDELVRHQRTHTGEKPYKCPECGKSFSTSGHLVRHQRTHTGEKPYKCPECGKSFSTSHSLTEHQRTHTGEKPTGKKTS

SEQ ID NO: 1746 - protein, 209 aa, Artificial Sequence
  source: /note="Description of Artificial Sequence: Synthetic polypeptide"
LEPGEKPYKCPECGKSFSTSGHLVRHQRTHTGEKPYKCPECGKSFSQSGDLRRHQRTHTGEKPYKCPECGKSFSRSDKLVRHQRTHTGEKPYKCPECGKSFSRSDELVRHQRTHTGEKPYKCPECGKSFSTSHSLTEHQRTHTGEKPYKCPECGKSFSRSDELVRHQRTHTGEKPYKCPECGKSFSTSGHLVRHQRTHTGEKPTGKKTS

SEQ ID NO: 1747 - protein, 209 aa, Artificial Sequence
  source: /note="Description of Artificial Sequence: Synthetic polypeptide"
LEPGEKPYKCPECGKSFSSKKALTEHQRTHTGEKPYKCPECGKSFSRSDHLTTHQRTHTGEKPYKCPECGKSFSTTGALTEHQRTHTGEKPYKCPECGKSFSTSGNLVRHQRTHTGEKPYKCPECGKSFSQSGDLRRHQRTHTGEKPYKCPECGKSFSQRAHLERHQRTHTGEKPYKCPECGKSFSTSHSLTEHQRTHTGEKPTGKKTS

SEQ ID NO: 1748 - protein, 209 aa, Artificial Sequence
  source: /note="Description of Artificial Sequence: Synthetic polypeptide"
LEPGEKPYKCPECGKSFSTTGALTEHQRTHTGEKPYKCPECGKSFSTSGNLVRHQRTHTGEKPYKCPECGKSFSQSGDLRRHQRTHTGEKPYKCPECGKSFSQRAHLERHQRTHTGEKPYKCPECGKSFSTSHSLTEHQRTHTGEKPYKCPECGKSFSTSGHLVRHQRTHTGEKPYKCPECGKSFSRNDALTEHQRTHTGEKPTGKKTS

SEQ ID NO: 1749 - protein, 209 aa, Artificial Sequence
  source: /note="Description of Artificial Sequence: Synthetic polypeptide"
LEPGEKPYKCPECGKSFSRSDHLTTHQRTHTGEKPYKCPECGKSFSTTGALTEHQRTHTGEKPYKCPECGKSFSTSGNLVRHQRTHTGEKPYKCPECGKSFSQSGDLRRHQRTHTGEKPYKCPECGKSFSQRAHLERHQRTHTGEKPYKCPECGKSFSTSHSLTEHQRTHTGEKPYKCPECGKSFSTSGHLVRHQRTHTGEKPTGKKTS

SEQ ID NO: 1750 - protein, 209 aa, Artificial Sequence
  source: /note="Description of Artificial Sequence: Synthetic polypeptide"
LEPGEKPYKCPECGKSFSTTGNLTVHQRTHTGEKPYKCPECGKSFSQSGNLTEHQRTHTGEKPYKCPECGKSFSQKSSLIAHQRTHTGEKPYKCPECGKSFSRRDELNVHQRTHTGEKPYKCPECGKSFSQLAHLRAHQRTHTGEKPYKCPECGKSFSRSDHLTNHQRTHTGEKPYKCPECGKSFSRSDKLVRHQRTHTGEKPTGKKTS

SEQ ID NO: 1751 - protein, 209 aa, Artificial Sequence
  source: /note="Description of Artificial Sequence: Synthetic polypeptide"
LEPGEKPYKCPECGKSFSQKSSLIAHQRTHTGEKPYKCPECGKSFSRRDELNVHQRTHTGEKPYKCPECGKSFSQLAHLRAHQRTHTGEKPYKCPECGKSFSRSDHLTNHQRTHTGEKPYKCPECGKSFSRSDKLVRHQRTHTGEKPYKCPECGKSFSTSGHLVRHQRTHTGEKPYKCPECGKSFSRSDHLTTHQRTHTGEKPTGKKTS

SEQ ID NO: 1752 - protein, 209 aa, Artificial Sequence
  source: /note="Description of Artificial Sequence: Synthetic polypeptide"
LEPGEKPYKCPECGKSFSRRDELNVHQRTHTGEKPYKCPECGKSFSQLAHLRAHQRTHTGEKPYKCPECGKSFSRSDHLTNHQRTHTGEKPYKCPECGKSFSRSDKLVRHQRTHTGEKPYKCPECGKSFSTSGHLVRHQRTHTGEKPYKCPECGKSFSRSDHLTTHQRTHTGEKPYKCPECGKSFSTTGALTEHQRTHTGEKPTGKKTS

SEQ ID NO: 1753 - protein, 209 aa, Artificial Sequence
  source: /note="Description of Artificial Sequence: Synthetic polypeptide"
LEPGEKPYKCPECGKSFSRSDKLVRHQRTHTGEKPYKCPECGKSFSTSGHLVRHQRTHTGEKPYKCPECGKSFSRSDHLTTHQRTHTGEKPYKCPECGKSFSTTGALTEHQRTHTGEKPYKCPECGKSFSQSGNLTEHQRTHTGEKPYKCPECGKSFSTHLDLIRHQRTHTGEKPYKCPECGKSFSDPGHLVRHQRTHTGEKPTGKKTS

SEQ ID NO: 1754 - protein, 209 aa, Artificial Sequence
  source: /note="Description of Artificial Sequence: Synthetic polypeptide"
LEPGEKPYKCPECGKSFSTSGHLVRHQRTHTGEKPYKCPECGKSFSTTGNLTVHQRTHTGEKPYKCPECGKSFSQSGNLTEHQRTHTGEKPYKCPECGKSFSQKSSLIAHQRTHTGEKPYKCPECGKSFSRRDELNVHQRTHTGEKPYKCPECGKSFSQLAHLRAHQRTHTGEKPYKCPECGKSFSRSDHLTNHQRTHTGEKPTGKKTS

SEQ ID NO: 1755 - protein, 209 aa, Artificial Sequence
  source: /note="Description of Artificial Sequence: Synthetic polypeptide"
LEPGEKPYKCPECGKSFSRSDHLTNHQRTHTGEKPYKCPECGKSFSTSGHLVRHQRTHTGEKPYKCPECGKSFSTTGNLTVHQRTHTGEKPYKCPECGKSFSQSGNLTEHQRTHTGEKPYKCPECGKSFSQKSSLIAHQRTHTGEKPYKCPECGKSFSRRDELNVHQRTHTGEKPYKCPECGKSFSQLAHLRAHQRTHTGEKPTGKKTS

SEQ ID NO: 1756 - protein, 209 aa, Artificial Sequence
  source: /note="Description of Artificial Sequence: Synthetic polypeptide"
LEPGEKPYKCPECGKSFSQSGNLTEHQRTHTGEKPYKCPECGKSFSQKSSLIAHQRTHTGEKPYKCPECGKSFSRRDELNVHQRTHTGEKPYKCPECGKSFSQLAHLRAHQRTHTGEKPYKCPECGKSFSRSDHLTNHQRTHTGEKPYKCPECGKSFSRSDKLVRHQRTHTGEKPYKCPECGKSFSTSGHLVRHQRTHTGEKPTGKKTS

SEQ ID NO: 1757 - protein, 209 aa, Artificial Sequence
  source: /note="Description of Artificial Sequence: Synthetic polypeptide"
LEPGEKPYKCPECGKSFSQLAHLRAHQRTHTGEKPYKCPECGKSFSRSDHLTNHQRTHTGEKPYKCPECGKSFSRSDKLVRHQRTHTGEKPYKCPECGKSFSTSGHLVRHQRTHTGEKPYKCPECGKSFSRSDHLTTHQRTHTGEKPYKCPECGKSFSTTGALTEHQRTHTGEKPYKCPECGKSFSQSGNLTEHQRTHTGEKPTGKKTS

SEQ ID NO: 1758 - protein, 209 aa, Artificial Sequence
  source: /note="Description of Artificial Sequence: Synthetic polypeptide"
LEPGEKPYKCPECGKSFSRSDHLTNHQRTHTGEKPYKCPECGKSFSRSDKLVRHQRTHTGEKPYKCPECGKSFSTSGHLVRHQRTHTGEKPYKCPECGKSFSRSDHLTTHQRTHTGEKPYKCPECGKSFSTTGALTEHQRTHTGEKPYKCPECGKSFSQSGNLTEHQRTHTGEKPYKCPECGKSFSTHLDLIRHQRTHTGEKPTGKKTS

SEQ ID NO: 1759 - protein, 209 aa, Artificial Sequence
  source: /note="Description of Artificial Sequence: Synthetic polypeptide"
LEPGEKPYKCPECGKSFSSPADLTRHQRTHTGEKPYKCPECGKSFSTSGNLVRHQRTHTGEKPYKCPECGKSFSTTGNLTVHQRTHTGEKPYKCPECGKSFSRSDNLVRHQRTHTGEKPYKCPECGKSFSRSDNLVRHQRTHTGEKPYKCPECGKSFSRSDHLTTHQRTHTGEKPYKCPECGKSFSRSDKLVRHQRTHTGEKPTGKKTS

SEQ ID NO: 1760 - protein, 209 aa, Artificial Sequence
  source: /note="Description of Artificial Sequence: Synthetic polypeptide"
LEPGEKPYKCPECGKSFSREDNLHTHQRTHTGEKPYKCPECGKSFSRSDHLTTHQRTHTGEKPYKCPECGKSFSQRANLRAHQRTHTGEKPYKCPECGKSFSSPADLTRHQRTHTGEKPYKCPECGKSFSTSGNLVRHQRTHTGEKPYKCPECGKSFSTTGNLTVHQRTHTGEKPYKCPECGKSFSRSDNLVRHQRTHTGEKPTGKKTS

SEQ ID NO: 1761 - protein, 209 aa, Artificial Sequence
  source: /note="Description of Artificial Sequence: Synthetic polypeptide"
LEPGEKPYKCPECGKSFSQRANLRAHQRTHTGEKPYKCPECGKSFSSPADLTRHQRTHTGEKPYKCPECGKSFSTSGNLVRHQRTHTGEKPYKCPECGKSFSTTGNLTVHQRTHTGEKPYKCPECGKSFSRSDNLVRHQRTHTGEKPYKCPECGKSFSRSDNLVRHQRTHTGEKPYKCPECGKSFSRSDHLTTHQRTHTGEKPTGKKTS

SEQ ID NO: 1762 - protein, 209 aa, Artificial Sequence
  source: /note="Description of Artificial Sequence: Synthetic polypeptide"
LEPGEKPYKCPECGKSFSRSDHLTTHQRTHTGEKPYKCPECGKSFSQRANLRAHQRTHTGEKPYKCPECGKSFSSPADLTRHQRTHTGEKPYKCPECGKSFSTSGNLVRHQRTHTGEKPYKCPECGKSFSTTGNLTVHQRTHTGEKPYKCPECGKSFSRSDNLVRHQRTHTGEKPYKCPECGKSFSRSDNLVRHQRTHTGEKPTGKKTS

SEQ ID NO: 1763 - protein, 209 aa, Artificial Sequence
  source: /note="Description of Artificial Sequence: Synthetic polypeptide"
LEPGEKPYKCPECGKSFSTSGSLVRHQRTHTGEKPYKCPECGKSFSREDNLHTHQRTHTGEKPYKCPECGKSFSRSDHLTTHQRTHTGEKPYKCPECGKSFSQRANLRAHQRTHTGEKPYKCPECGKSFSSPADLTRHQRTHTGEKPYKCPECGKSFSTSGNLVRHQRTHTGEKPYKCPECGKSFSTTGNLTVHQRTHTGEKPTGKKTS

SEQ ID NO: 1764 - protein, 209 aa, Artificial Sequence
  source: /note="Description of Artificial Sequence: Synthetic polypeptide"
LEPGEKPYKCPECGKSFSRSDHLTNHQRTHTGEKPYKCPECGKSFSSKKALTEHQRTHTGEKPYKCPECGKSFSRADNLTEHQRTHTGEKPYKCPECGKSFSDPGHLVRHQRTHTGEKPYKCPECGKSFSSPADLTRHQRTHTGEKPYKCPECGKSFSTKNSLTEHQRTHTGEKPYKCPECGKSFSTSGHLVRHQRTHTGEKPTGKKTS

SEQ ID NO: 1765 - protein, 209 aa, Artificial Sequence
  source: /note="Description of Artificial Sequence: Synthetic polypeptide"
LEPGEKPYKCPECGKSFSRADNLTEHQRTHTGEKPYKCPECGKSFSDPGHLVRHQRTHTGEKPYKCPECGKSFSSPADLTRHQRTHTGEKPYKCPECGKSFSTKNSLTEHQRTHTGEKPYKCPECGKSFSTSGHLVRHQRTHTGEKPYKCPECGKSFSTSGSLVRHQRTHTGEKPYKCPECGKSFSREDNLHTHQRTHTGEKPTGKKTS

SEQ ID NO: 1766 - protein, 209 aa, Artificial Sequence
  source: /note="Description of Artificial Sequence: Synthetic polypeptide"
LEPGEKPYKCPECGKSFSDPGHLVRHQRTHTGEKPYKCPECGKSFSSPADLTRHQRTHTGEKPYKCPECGKSFSTKNSLTEHQRTHTGEKPYKCPECGKSFSTSGHLVRHQRTHTGEKPYKCPECGKSFSTSGSLVRHQRTHTGEKPYKCPECGKSFSREDNLHTHQRTHTGEKPYKCPECGKSFSRSDHLTTHQRTHTGEKPTGKKTS

SEQ ID NO: 1767 - protein, 209 aa, Artificial Sequence
  source: /note="Description of Artificial Sequence: Synthetic polypeptide"
LEPGEKPYKCPECGKSFSSPADLTRHQRTHTGEKPYKCPECGKSFSTKNSLTEHQRTHTGEKPYKCPECGKSFSTSGHLVRHQRTHTGEKPYKCPECGKSFSTSGSLVRHQRTHTGEKPYKCPECGKSFSREDNLHTHQRTHTGEKPYKCPECGKSFSRSDHLTTHQRTHTGEKPYKCPECGKSFSQRANLRAHQRTHTGEKPTGKKTS

SEQ ID NO: 1768 - protein, 209 aa, Artificial Sequence
  source: /note="Description of Artificial Sequence: Synthetic polypeptide"
LEPGEKPYKCPECGKSFSTKNSLTEHQRTHTGEKPYKCPECGKSFSTSGHLVRHQRTHTGEKPYKCPECGKSFSTSGSLVRHQRTHTGEKPYKCPECGKSFSREDNLHTHQRTHTGEKPYKCPECGKSFSRSDHLTTHQRTHTGEKPYKCPECGKSFSQRANLRAHQRTHTGEKPYKCPECGKSFSSPADLTRHQRTHTGEKPTGKKTS

SEQ ID NO: 1769 - protein, 209 aa, Artificial Sequence
  source: /note="Description of Artificial Sequence: Synthetic polypeptide"
LEPGEKPYKCPECGKSFSTSGHLVRHQRTHTGEKPYKCPECGKSFSTSGSLVRHQRTHTGEKPYKCPECGKSFSREDNLHTHQRTHTGEKPYKCPECGKSFSRSDHLTTHQRTHTGEKPYKCPECGKSFSQRANLRAHQRTHTGEKPYKCPECGKSFSSPADLTRHQRTHTGEKPYKCPECGKSFSTSGNLVRHQRTHTGEKPTGKKTS

SEQ ID NO: 1770 - protein, 209 aa, Artificial Sequence
  source: /note="Description of Artificial Sequence: Synthetic polypeptide"
LEPGEKPYKCPECGKSFSSKKALTEHQRTHTGEKPYKCPECGKSFSRADNLTEHQRTHTGEKPYKCPECGKSFSDPGHLVRHQRTHTGEKPYKCPECGKSFSSPADLTRHQRTHTGEKPYKCPECGKSFSTKNSLTEHQRTHTGEKPYKCPECGKSFSTSGHLVRHQRTHTGEKPYKCPECGKSFSTSGSLVRHQRTHTGEKPTGKKTS

SEQ ID NO: 1771 - protein, 209 aa, Artificial Sequence
  source: /note="Description of Artificial Sequence: Synthetic polypeptide"
LEPGEKPYKCPECGKSFSTSGHLVRHQRTHTGEKPYKCPECGKSFSSPADLTRHQRTHTGEKPYKCPECGKSFSERSHLREHQRTHTGEKPYKCPECGKSFSDCRDLARHQRTHTGEKPYKCPECGKSFSRADNLTEHQRTHTGEKPYKCPECGKSFSQNSTLTEHQRTHTGEKPYKCPECGKSFSDPGALVRHQRTHTGEKPTGKKTS

SEQ ID NO: 1772 - protein, 209 aa, Artificial Sequence
  source: /note="Description of Artificial Sequence: Synthetic polypeptide"
LEPGEKPYKCPECGKSFSDCRDLARHQRTHTGEKPYKCPECGKSFSTSGSLVRHQRTHTGEKPYKCPECGKSFSTSGHLVRHQRTHTGEKPYKCPECGKSFSSPADLTRHQRTHTGEKPYKCPECGKSFSERSHLREHQRTHTGEKPYKCPECGKSFSDCRDLARHQRTHTGEKPYKCPECGKSFSRADNLTEHQRTHTGEKPTGKKTS

SEQ ID NO: 1773 - protein, 209 aa, Artificial Sequence
  source: /note="Description of Artificial Sequence: Synthetic polypeptide"
LEPGEKPYKCPECGKSFSTSGSLVRHQRTHTGEKPYKCPECGKSFSTSGHLVRHQRTHTGEKPYKCPECGKSFSSPADLTRHQRTHTGEKPYKCPECGKSFSERSHLREHQRTHTGEKPYKCPECGKSFSDCRDLARHQRTHTGEKPYKCPECGKSFSRADNLTEHQRTHTGEKPYKCPECGKSFSQNSTLTEHQRTHTGEKPTGKKTS

SEQ ID NO: 1774 - protein, 209 aa, Artificial Sequence
  source: /note="Description of Artificial Sequence: Synthetic polypeptide"
LEPGEKPYKCPECGKSFSTSHSLTEHQRTHTGEKPYKCPECGKSFSERSHLREHQRTHTGEKPYKCPECGKSFSQAGHLASHQRTHTGEKPYKCPECGKSFSRKDNLKNHQRTHTGEKPYKCPECGKSFSDCRDLARHQRTHTGEKPYKCPECGKSFSTSGSLVRHQRTHTGEKPYKCPECGKSFSTSGHLVRHQRTHTGEKPTGKKTS

SEQ ID NO: 1775 - protein, 209 aa, Artificial Sequence
  source: /note="Description of Artificial Sequence: Synthetic polypeptide"
LEPGEKPYKCPECGKSFSQAGHLASHQRTHTGEKPYKCPECGKSFSRKDNLKNHQRTHTGEKPYKCPECGKSFSDCRDLARHQRTHTGEKPYKCPECGKSFSTSGSLVRHQRTHTGEKPYKCPECGKSFSTSGHLVRHQRTHTGEKPYKCPECGKSFSSPADLTRHQRTHTGEKPYKCPECGKSFSERSHLREHQRTHTGEKPTGKKTS

SEQ ID NO: 1776 - protein, 209 aa, Artificial Sequence
  source: /note="Description of Artificial Sequence: Synthetic polypeptide"
LEPGEKPYKCPECGKSFSERSHLREHQRTHTGEKPYKCPECGKSFSQAGHLASHQRTHTGEKPYKCPECGKSFSRKDNLKNHQRTHTGEKPYKCPECGKSFSDCRDLARHQRTHTGEKPYKCPECGKSFSTSGSLVRHQRTHTGEKPYKCPECGKSFSTSGHLVRHQRTHTGEKPYKCPECGKSFSSPADLTRHQRTHTGEKPTGKKTS

SEQ ID NO: 1777 - protein, 209 aa, Artificial Sequence
  source: /note="Description of Artificial Sequence: Synthetic polypeptide"
LEPGEKPYKCPECGKSFSRKDNLKNHQRTHTGEKPYKCPECGKSFSDCRDLARHQRTHTGEKPYKCPECGKSFSTSGSLVRHQRTHTGEKPYKCPECGKSFSTSGHLVRHQRTHTGEKPYKCPECGKSFSSPADLTRHQRTHTGEKPYKCPECGKSFSERSHLREHQRTHTGEKPYKCPECGKSFSDCRDLARHQRTHTGEKPTGKKTS

SEQ ID NO: 1778 - protein, 209 aa, Artificial Sequence
  source: /note="Description of Artificial Sequence: Synthetic polypeptide"
LEPGEKPYKCPECGKSFSTSGNLTEHQRTHTGEKPYKCPECGKSFSRSDHLTNHQRTHTGEKPYKCPECGKSFSSKKALTEHQRTHTGEKPYKCPECGKSFSTSGNLVRHQRTHTGEKPYKCPECGKSFSHRTTLTNHQRTHTGEKPYKCPECGKSFSSKKALTEHQRTHTGEKPYKCPECGKSFSRSDHLTNHQRTHTGEKPTGKKTS

SEQ ID NO: 1779 - protein, 209 aa, Artificial Sequence
  source: /note="Description of Artificial Sequence: Synthetic polypeptide"
LEPGEKPYKCPECGKSFSSKKHLAEHQRTHTGEKPYKCPECGKSFSRSDELVRHQRTHTGEKPYKCPECGKSFSTSGNLTEHQRTHTGEKPYKCPECGKSFSDCRDLARHQRTHTGEKPYKCPECGKSFSQSSNLVRHQRTHTGEKPYKCPECGKSFSHRTTLTNHQRTHTGEKPYKCPECGKSFSTSHSLTEHQRTHTGEKPTGKKTS

SEQ ID NO: 1780 - protein, 209 aa, Artificial Sequence
  source: /note="Description of Artificial Sequence: Synthetic polypeptide"
LEPGEKPYKCPECGKSFSSKKALTEHQRTHTGEKPYKCPECGKSFSRSDHLTNHQRTHTGEKPYKCPECGKSFSSKKHLAEHQRTHTGEKPYKCPECGKSFSRSDELVRHQRTHTGEKPYKCPECGKSFSTSGNLTEHQRTHTGEKPYKCPECGKSFSDCRDLARHQRTHTGEKPYKCPECGKSFSQSSNLVRHQRTHTGEKPTGKKTS

SEQ ID NO: 1781 - protein, 209 aa, Artificial Sequence
  source: /note="Description of Artificial Sequence: Synthetic polypeptide"
LEPGEKPYKCPECGKSFSRSDHLTNHQRTHTGEKPYKCPECGKSFSSKKHLAEHQRTHTGEKPYKCPECGKSFSRSDELVRHQRTHTGEKPYKCPECGKSFSTSGNLTEHQRTHTGEKPYKCPECGKSFSDCRDLARHQRTHTGEKPYKCPECGKSFSQSSNLVRHQRTHTGEKPYKCPECGKSFSHRTTLTNHQRTHTGEKPTGKKTS

SEQ ID NO: 1782 - protein, 209 aa, Artificial Sequence
  source: /note="Description of Artificial Sequence: Synthetic polypeptide"
LEPGEKPYKCPECGKSFSSKKALTEHQRTHTGEKPYKCPECGKSFSTSGNLVRHQRTHTGEKPYKCPECGKSFSHRTTLTNHQRTHTGEKPYKCPECGKSFSSKKALTEHQRTHTGEKPYKCPECGKSFSRSDHLTNHQRTHTGEKPYKCPECGKSFSSKKHLAEHQRTHTGEKPYKCPECGKSFSRSDELVRHQRTHTGEKPTGKKTS

SEQ ID NO: 1783 - protein, 209 aa, Artificial Sequence
  source: /note="Description of Artificial Sequence: Synthetic polypeptide"
LEPGEKPYKCPECGKSFSHRTTLTNHQRTHTGEKPYKCPECGKSFSSKKALTEHQRTHTGEKPYKCPECGKSFSRSDHLTNHQRTHTGEKPYKCPECGKSFSSKKHLAEHQRTHTGEKPYKCPECGKSFSRSDELVRHQRTHTGEKPYKCPECGKSFSTSGNLTEHQRTHTGEKPYKCPECGKSFSDCRDLARHQRTHTGEKPTGKKTS

SEQ ID NO: 1784 - protein, 209 aa, Artificial Sequence
  source: /note="Description of Artificial Sequence: Synthetic polypeptide"
LEPGEKPYKCPECGKSFSTSGNLVRHQRTHTGEKPYKCPECGKSFSHRTTLTNHQRTHTGEKPYKCPECGKSFSSKKALTEHQRTHTGEKPYKCPECGKSFSRSDHLTNHQRTHTGEKPYKCPECGKSFSSKKHLAEHQRTHTGEKPYKCPECGKSFSRSDELVRHQRTHTGEKPYKCPECGKSFSTSGNLTEHQRTHTGEKPTGKKTS

SEQ ID NO: 1785 - protein, 209 aa, Artificial Sequence
  source: /note="Description of Artificial Sequence: Synthetic polypeptide"
LEPGEKPYKCPECGKSFSRSDHLTNHQRTHTGEKPYKCPECGKSFSSKKALTEHQRTHTGEKPYKCPECGKSFSTSGNLVRHQRTHTGEKPYKCPECGKSFSHRTTLTNHQRTHTGEKPYKCPECGKSFSSKKALTEHQRTHTGEKPYKCPECGKSFSRSDHLTNHQRTHTGEKPYKCPECGKSFSSKKHLAEHQRTHTGEKPTGKKTS

SEQ ID NO: 1786 - protein, 209 aa, Artificial Sequence
  source: /note="Description of Artificial Sequence: Synthetic polypeptide"
LEPGEKPYKCPECGKSFSTTGNLTVHQRTHTGEKPYKCPECGKSFSDCRDLARHQRTHTGEKPYKCPECGKSFSRSDHLTNHQRTHTGEKPYKCPECGKSFSQSGDLRRHQRTHTGEKPYKCPECGKSFSTKNSLTEHQRTHTGEKPYKCPECGKSFSRSDHLTNHQRTHTGEKPYKCPECGKSFSRSDKLVRHQRTHTGEKPTGKKTS

SEQ ID NO: 1787 - protein, 209 aa, Artificial Sequence
  source: /note="Description of Artificial Sequence: Synthetic polypeptide"
LEPGEKPYKCPECGKSFSDCRDLARHQRTHTGEKPYKCPECGKSFSRSDHLTNHQRTHTGEKPYKCPECGKSFSQSGDLRRHQRTHTGEKPYKCPECGKSFSTKNSLTEHQRTHTGEKPYKCPECGKSFSRSDHLTNHQRTHTGEKPYKCPECGKSFSRSDKLVRHQRTHTGEKPYKCPECGKSFSQSSNLVRHQRTHTGEKPTGKKTS

SEQ ID NO: 1788 - protein, 209 aa, Artificial Sequence
  source: /note="Description of Artificial Sequence: Synthetic polypeptide"
LEPGEKPYKCPECGKSFSRSDKLVRHQRTHTGEKPYKCPECGKSFSQSSNLVRHQRTHTGEKPYKCPECGKSFSTSGHLVRHQRTHTGEKPYKCPECGKSFSRNDALTEHQRTHTGEKPYKCPECGKSFSHKNALQNHQRTHTGEKPYKCPECGKSFSDPGHLVRHQRTHTGEKPYKCPECGKSFSSPADLTRHQRTHTGEKPTGKKTS

SEQ ID NO: 1789 - protein, 209 aa, Artificial Sequence
  source: /note="Description of Artificial Sequence: Synthetic polypeptide"
LEPGEKPYKCPECGKSFSQSGDLRRHQRTHTGEKPYKCPECGKSFSTKNSLTEHQRTHTGEKPYKCPECGKSFSRSDHLTNHQRTHTGEKPYKCPECGKSFSRSDKLVRHQRTHTGEKPYKCPECGKSFSQSSNLVRHQRTHTGEKPYKCPECGKSFSTSGHLVRHQRTHTGEKPYKCPECGKSFSRNDALTEHQRTHTGEKPTGKKTS

SEQ ID NO: 1790 - protein, 209 aa, Artificial Sequence
  source: /note="Description of Artificial Sequence: Synthetic polypeptide"
LEPGEKPYKCPECGKSFSTKNSLTEHQRTHTGEKPYKCPECGKSFSRSDHLTNHQRTHTGEKPYKCPECGKSFSRSDKLVRHQRTHTGEKPYKCPECGKSFSQSSNLVRHQRTHTGEKPYKCPECGKSFSTSGHLVRHQRTHTGEKPYKCPECGKSFSRNDALTEHQRTHTGEKPYKCPECGKSFSHKNALQNHQRTHTGEKPTGKKTS

SEQ ID NO: 1791 - protein, 209 aa, Artificial Sequence
  source: /note="Description of Artificial Sequence: Synthetic polypeptide"
LEPGEKPYKCPECGKSFSRSDHLTNHQRTHTGEKPYKCPECGKSFSRSDKLVRHQRTHTGEKPYKCPECGKSFSQSSNLVRHQRTHTGEKPYKCPECGKSFSTSGHLVRHQRTHTGEKPYKCPECGKSFSRNDALTEHQRTHTGEKPYKCPECGKSFSHKNALQNHQRTHTGEKPYKCPECGKSFSDPGHLVRHQRTHTGEKPTGKKTS

SEQ ID NO: 1792 - protein, 209 aa, Artificial Sequence
  source: /note="Description of Artificial Sequence: Synthetic polypeptide"
LEPGEKPYKCPECGKSFSRSDHLTNHQRTHTGEKPYKCPECGKSFSQSGDLRRHQRTHTGEKPYKCPECGKSFSTKNSLTEHQRTHTGEKPYKCPECGKSFSRSDHLTNHQRTHTGEKPYKCPECGKSFSRSDKLVRHQRTHTGEKPYKCPECGKSFSQSSNLVRHQRTHTGEKPYKCPECGKSFSTSGHLVRHQRTHTGEKPTGKKTS

SEQ ID NO: 1793 - protein, 209 aa, Artificial Sequence
  source: /note="Description of Artificial Sequence: Synthetic polypeptide"
LEPGEKPYKCPECGKSFSHKNALQNHQRTHTGEKPYKCPECGKSFSTSHSLTEHQRTHTGEKPYKCPECGKSFSRSDKLVRHQRTHTGEKPYKCPECGKSFSQSGNLTEHQRTHTGEKPYKCPECGKSFSRNDALTEHQRTHTGEKPYKCPECGKSFSDPGHLVRHQRTHTGEKPYKCPECGKSFSQRAHLERHQRTHTGEKPTGKKTS

SEQ ID NO: 1794 - protein, 209 aa, Artificial Sequence
  source: /note="Description of Artificial Sequence: Synthetic polypeptide"
LEPGEKPYKCPECGKSFSRSDKLVRHQRTHTGEKPYKCPECGKSFSQSGNLTEHQRTHTGEKPYKCPECGKSFSRNDALTEHQRTHTGEKPYKCPECGKSFSDPGHLVRHQRTHTGEKPYKCPECGKSFSQRAHLERHQRTHTGEKPYKCPECGKSFSRKDNLKNHQRTHTGEKPYKCPECGKSFSRSDELVRHQRTHTGEKPTGKKTS

SEQ ID NO: 1795 - protein, 209 aa, Artificial Sequence
  source: /note="Description of Artificial Sequence: Synthetic polypeptide"
LEPGEKPYKCPECGKSFSQSGNLTEHQRTHTGEKPYKCPECGKSFSRNDALTEHQRTHTGEKPYKCPECGKSFSDPGHLVRHQRTHTGEKPYKCPECGKSFSQRAHLERHQRTHTGEKPYKCPECGKSFSRKDNLKNHQRTHTGEKPYKCPECGKSFSRSDELVRHQRTHTGEKPYKCPECGKSFSRSDHLTTHQRTHTGEKPTGKKTS

SEQ ID NO: 1796 - protein, 209 aa, Artificial Sequence
  source: /note="Description of Artificial Sequence: Synthetic polypeptide"
LEPGEKPYKCPECGKSFSTSHSLTEHQRTHTGEKPYKCPECGKSFSRSDKLVRHQRTHTGEKPYKCPECGKSFSQSGNLTEHQRTHTGEKPYKCPECGKSFSRNDALTEHQRTHTGEKPYKCPECGKSFSDPGHLVRHQRTHTGEKPYKCPECGKSFSQRAHLERHQRTHTGEKPYKCPECGKSFSRKDNLKNHQRTHTGEKPTGKKTS

SEQ ID NO: 1797 - protein, 209 aa, Artificial Sequence
  source: /note="Description of Artificial Sequence: Synthetic polypeptide"
LEPGEKPYKCPECGKSFSDPGHLVRHQRTHTGEKPYKCPECGKSFSRRDELNVHQRTHTGEKPYKCPECGKSFSSKKALTEHQRTHTGEKPYKCPECGKSFSRSDKLVRHQRTHTGEKPYKCPECGKSFSTKNSLTEHQRTHTGEKPYKCPECGKSFSRSDELVRHQRTHTGEKPYKCPECGKSFSTHLDLIRHQRTHTGEKPTGKKTS

SEQ ID NO: 1798 - protein, 209 aa, Artificial Sequence
  source: /note="Description of Artificial Sequence: Synthetic polypeptide"
LEPGEKPYKCPECGKSFSSKKALTEHQRTHTGEKPYKCPECGKSFSTTGALTEHQRTHTGEKPYKCPECGKSFSRSDKLVRHQRTHTGEKPYKCPECGKSFSTSGNLTEHQRTHTGEKPYKCPECGKSFSQSGDLRRHQRTHTGEKPYKCPECGKSFSRSDHLTTHQRTHTGEKPYKCPECGKSFSDCRDLARHQRTHTGEKPTGKKTS

SEQ ID NO: 1799 - protein, 209 aa, Artificial Sequence
  source: /note="Description of Artificial Sequence: Synthetic polypeptide"
LEPGEKPYKCPECGKSFSTKNSLTEHQRTHTGEKPYKCPECGKSFSQSGNLTEHQRTHTGEKPYKCPECGKSFSDPGNLVRHQRTHTGEKPYKCPECGKSFSREDNLHTHQRTHTGEKPYKCPECGKSFSRNDALTEHQRTHTGEKPYKCPECGKSFSDPGHLVRHQRTHTGEKPYKCPECGKSFSTSGELVRHQRTHTGEKPTGKKTS

SEQ ID NO: 1800 - protein, 209 aa, Artificial Sequence
  source: /note="Description of Artificial Sequence: Synthetic polypeptide"
LEPGEKPYKCPECGKSFSDKKDLTRHQRTHTGEKPYKCPECGKSFSTKNSLTEHQRTHTGEKPYKCPECGKSFSQSGNLTEHQRTHTGEKPYKCPECGKSFSDPGNLVRHQRTHTGEKPYKCPECGKSFSREDNLHTHQRTHTGEKPYKCPECGKSFSRNDALTEHQRTHTGEKPYKCPECGKSFSDPGHLVRHQRTHTGEKPTGKKTS

SEQ ID NO: 1801 - protein, 209 aa, Artificial Sequence
  source: /note="Description of Artificial Sequence: Synthetic polypeptide"
LEPGEKPYKCPECGKSFSHKNALQNHQRTHTGEKPYKCPECGKSFSDKKDLTRHQRTHTGEKPYKCPECGKSFSTKNSLTEHQRTHTGEKPYKCPECGKSFSQSGNLTEHQRTHTGEKPYKCPECGKSFSDPGNLVRHQRTHTGEKPYKCPECGKSFSREDNLHTHQRTHTGEKPYKCPECGKSFSRNDALTEHQRTHTGEKPTGKKTS

SEQ ID NO: 1802 - protein, 209 aa, Artificial Sequence
  source: /note="Description of Artificial Sequence: Synthetic polypeptide"
LEPGEKPYKCPECGKSFSTSHSLTEHQRTHTGEKPYKCPECGKSFSRSDELVRHQRTHTGEKPYKCPECGKSFSQAGHLASHQRTHTGEKPYKCPECGKSFSHRTTLTNHQRTHTGEKPYKCPECGKSFSQSGNLTEHQRTHTGEKPYKCPECGKSFSSKKHLAEHQRTHTGEKPYKCPECGKSFSTSHSLTEHQRTHTGEKPTGKKTS

SEQ ID NO: 1803 - protein, 209 aa, Artificial Sequence
  source: /note="Description of Artificial Sequence: Synthetic polypeptide"
LEPGEKPYKCPECGKSFSRKDNLKNHQRTHTGEKPYKCPECGKSFSTSHSLTEHQRTHTGEKPYKCPECGKSFSRSDELVRHQRTHTGEKPYKCPECGKSFSQAGHLASHQRTHTGEKPYKCPECGKSFSHRTTLTNHQRTHTGEKPYKCPECGKSFSQSGNLTEHQRTHTGEKPYKCPECGKSFSSKKHLAEHQRTHTGEKPTGKKTS

SEQ ID NO: 1804 - protein, 209 aa, Artificial Sequence
  source: /note="Description of Artificial Sequence: Synthetic polypeptide"
LEPGEKPYKCPECGKSFSDKKDLTRHQRTHTGEKPYKCPECGKSFSSKKALTEHQRTHTGEKPYKCPECGKSFSRSDHLTNHQRTHTGEKPYKCPECGKSFSSKKHLAEHQRTHTGEKPYKCPECGKSFSQRAHLERHQRTHTGEKPYKCPECGKSFSTKNSLTEHQRTHTGEKPYKCPECGKSFSTSGELVRHQRTHTGEKPTGKKTS

SEQ ID NO: 1805 - protein, 209 aa, Artificial Sequence
  source: /note="Description of Artificial Sequence: Synthetic polypeptide"
LEPGEKPYKCPECGKSFSDCRDLARHQRTHTGEKPYKCPECGKSFSTKNSLTEHQRTHTGEKPYKCPECGKSFSSPADLTRHQRTHTGEKPYKCPECGKSFSDPGHLVRHQRTHTGEKPYKCPECGKSFSTSHSLTEHQRTHTGEKPYKCPECGKSFSDPGNLVRHQRTHTGEKPYKCPECGKSFSRNDALTEHQRTHTGEKPTGKKTS

SEQ ID NO: 1806 - protein, 209 aa, Artificial Sequence
  source: /note="Description of Artificial Sequence: Synthetic polypeptide"
LEPGEKPYKCPECGKSFSRSDKLVRHQRTHTGEKPYKCPECGKSFSTKNSLTEHQRTHTGEKPYKCPECGKSFSSPADLTRHQRTHTGEKPYKCPECGKSFSDPGHLVRHQRTHTGEKPYKCPECGKSFSTHLDLIRHQRTHTGEKPYKCPECGKSFSSKKHLAEHQRTHTGEKPYKCPECGKSFSDCRDLARHQRTHTGEKPTGKKTS

SEQ ID NO: 1807 - protein, 209 aa, Artificial Sequence
  source: /note="Description of Artificial Sequence: Synthetic polypeptide"
LEPGEKPYKCPECGKSFSTKNSLTEHQRTHTGEKPYKCPECGKSFSSPADLTRHQRTHTGEKPYKCPECGKSFSDPGHLVRHQRTHTGEKPYKCPECGKSFSTHLDLIRHQRTHTGEKPYKCPECGKSFSSKKHLAEHQRTHTGEKPYKCPECGKSFSDCRDLARHQRTHTGEKPYKCPECGKSFSTKNSLTEHQRTHTGEKPTGKKTS

SEQ ID NO: 1808 - protein, 209 aa, Artificial Sequence
  source: /note="Description of Artificial Sequence: Synthetic polypeptide"
LEPGEKPYKCPECGKSFSDPGHLVRHQRTHTGEKPYKCPECGKSFSTHLDLIRHQRTHTGEKPYKCPECGKSFSSKKHLAEHQRTHTGEKPYKCPECGKSFSDCRDLARHQRTHTGEKPYKCPECGKSFSTKNSLTEHQRTHTGEKPYKCPECGKSFSSPADLTRHQRTHTGEKPYKCPECGKSFSDPGHLVRHQRTHTGEKPTGKKTS

SEQ ID NO: 1809 - protein, 209 aa, Artificial Sequence
  source: /note="Description of Artificial Sequence: Synthetic polypeptide"
LEPGEKPYKCPECGKSFSSPADLTRHQRTHTGEKPYKCPECGKSFSDPGHLVRHQRTHTGEKPYKCPECGKSFSTHLDLIRHQRTHTGEKPYKCPECGKSFSSKKHLAEHQRTHTGEKPYKCPECGKSFSDCRDLARHQRTHTGEKPYKCPECGKSFSTKNSLTEHQRTHTGEKPYKCPECGKSFSSPADLTRHQRTHTGEKPTGKKTS

SEQ ID NO: 1810 - protein, 209 aa, Artificial Sequence
  source: /note="Description of Artificial Sequence: Synthetic polypeptide"
LEPGEKPYKCPECGKSFSTHLDLIRHQRTHTGEKPYKCPECGKSFSSKKHLAEHQRTHTGEKPYKCPECGKSFSDCRDLARHQRTHTGEKPYKCPECGKSFSTKNSLTEHQRTHTGEKPYKCPECGKSFSSPADLTRHQRTHTGEKPYKCPECGKSFSDPGHLVRHQRTHTGEKPYKCPECGKSFSTSHSLTEHQRTHTGEKPTGKKTS

SEQ ID NO: 1811 - protein, 209 aa, Artificial Sequence
  source: /note="Description of Artificial Sequence: Synthetic polypeptide"
LEPGEKPYKCPECGKSFSSKKALTEHQRTHTGEKPYKCPECGKSFSRSDKLVRHQRTHTGEKPYKCPECGKSFSTKNSLTEHQRTHTGEKPYKCPECGKSFSSPADLTRHQRTHTGEKPYKCPECGKSFSDPGHLVRHQRTHTGEKPYKCPECGKSFSTHLDLIRHQRTHTGEKPYKCPECGKSFSSKKHLAEHQRTHTGEKPTGKKTS

SEQ ID NO: 1812 - protein, 209 aa, Artificial Sequence
  source: /note="Description of Artificial Sequence: Synthetic polypeptide"
LEPGEKPYKCPECGKSFSSKKHLAEHQRTHTGEKPYKCPECGKSFSDCRDLARHQRTHTGEKPYKCPECGKSFSTKNSLTEHQRTHTGEKPYKCPECGKSFSSPADLTRHQRTHTGEKPYKCPECGKSFSDPGHLVRHQRTHTGEKPYKCPECGKSFSTSHSLTEHQRTHTGEKPYKCPECGKSFSDPGNLVRHQRTHTGEKPTGKKTS

SEQ ID NO: 1813 - protein, 209 aa, Artificial Sequence
  source: /note="Description of Artificial Sequence: Synthetic polypeptide"
LEPGEKPYKCPECGKSFSSPADLTRHQRTHTGEKPYKCPECGKSFSDPGHLVRHQRTHTGEKPYKCPECGKSFSRNDALTEHQRTHTGEKPYKCPECGKSFSSKKALTEHQRTHTGEKPYKCPECGKSFSQSGDLRRHQRTHTGEKPYKCPECGKSFSRNDALTEHQRTHTGEKPYKCPECGKSFSTSHSLTEHQRTHTGEKPTGKKTS

SEQ ID NO: 1814 - protein, 209 aa, Artificial Sequence
  source: /note="Description of Artificial Sequence: Synthetic polypeptide"
LEPGEKPYKCPECGKSFSQSGDLRRHQRTHTGEKPYKCPECGKSFSRNDALTEHQRTHTGEKPYKCPECGKSFSTSHSLTEHQRTHTGEKPYKCPECGKSFSSKKHLAEHQRTHTGEKPYKCPECGKSFSRNDALTEHQRTHTGEKPYKCPECGKSFSSKKALTEHQRTHTGEKPYKCPECGKSFSQSGDLRRHQRTHTGEKPTGKKTS

SEQ ID NO: 1815 - protein, 209 aa, Artificial Sequence
  source: /note="Description of Artificial Sequence: Synthetic polypeptide"
LEPGEKPYKCPECGKSFSRNDALTEHQRTHTGEKPYKCPECGKSFSSKKALTEHQRTHTGEKPYKCPECGKSFSQSGDLRRHQRTHTGEKPYKCPECGKSFSRNDALTEHQRTHTGEKPYKCPECGKSFSTSHSLTEHQRTHTGEKPYKCPECGKSFSSKKHLAEHQRTHTGEKPYKCPECGKSFSRNDALTEHQRTHTGEKPTGKKTS

SEQ ID NO: 1816 - protein, 209 aa, Artificial Sequence
  source: /note="Description of Artificial Sequence: Synthetic polypeptide"
LEPGEKPYKCPECGKSFSDPGHLVRHQRTHTGEKPYKCPECGKSFSRNDALTEHQRTHTGEKPYKCPECGKSFSSKKALTEHQRTHTGEKPYKCPECGKSFSQSGDLRRHQRTHTGEKPYKCPECGKSFSRNDALTEHQRTHTGEKPYKCPECGKSFSTSHSLTEHQRTHTGEKPYKCPECGKSFSSKKHLAEHQRTHTGEKPTGKKTS

SEQ ID NO: 1817 - protein, 209 aa, Artificial Sequence
  source: /note="Description of Artificial Sequence: Synthetic polypeptide"
LEPGEKPYKCPECGKSFSRNDALTEHQRTHTGEKPYKCPECGKSFSTSHSLTEHQRTHTGEKPYKCPECGKSFSSKKHLAEHQRTHTGEKPYKCPECGKSFSRNDALTEHQRTHTGEKPYKCPECGKSFSSKKALTEHQRTHTGEKPYKCPECGKSFSQSGDLRRHQRTHTGEKPYKCPECGKSFSRADNLTEHQRTHTGEKPTGKKTS

SEQ ID NO: 1818 - protein, 209 aa, Artificial Sequence
  source: /note="Description of Artificial Sequence: Synthetic polypeptide"
LEPGEKPYKCPECGKSFSSKKHLAEHQRTHTGEKPYKCPECGKSFSRNDALTEHQRTHTGEKPYKCPECGKSFSSKKALTEHQRTHTGEKPYKCPECGKSFSQSGDLRRHQRTHTGEKPYKCPECGKSFSRADNLTEHQRTHTGEKPYKCPECGKSFSDKKDLTRHQRTHTGEKPYKCPECGKSFSRSDHLTTHQRTHTGEKPTGKKTS

SEQ ID NO: 1819 - protein, 209 aa, Artificial Sequence
  source: /note="Description of Artificial Sequence: Synthetic polypeptide"
LEPGEKPYKCPECGKSFSTSHSLTEHQRTHTGEKPYKCPECGKSFSSKKHLAEHQRTHTGEKPYKCPECGKSFSRNDALTEHQRTHTGEKPYKCPECGKSFSSKKALTEHQRTHTGEKPYKCPECGKSFSQSGDLRRHQRTHTGEKPYKCPECGKSFSRADNLTEHQRTHTGEKPYKCPECGKSFSDKKDLTRHQRTHTGEKPTGKKTS

SEQ ID NO: 1820 - protein, 209 aa, Artificial Sequence
  source: /note="Description of Artificial Sequence: Synthetic polypeptide"
LEPGEKPYKCPECGKSFSSKKALTEHQRTHTGEKPYKCPECGKSFSQSGDLRRHQRTHTGEKPYKCPECGKSFSRNDALTEHQRTHTGEKPYKCPECGKSFSTSHSLTEHQRTHTGEKPYKCPECGKSFSSKKHLAEHQRTHTGEKPYKCPECGKSFSRNDALTEHQRTHTGEKPYKCPECGKSFSSKKALTEHQRTHTGEKPTGKKTS

SEQ ID NO: 1821 - protein, 209 aa, Artificial Sequence
  source: /note="Description of Artificial Sequence: Synthetic polypeptide"
LEPGEKPYKCPECGKSFSSRRTCRAHQRTHTGEKPYKCPECGKSFSTSGNLTEHQRTHTGEKPYKCPECGKSFSDCRDLARHQRTHTGEKPYKCPECGKSFSHKNALQNHQRTHTGEKPYKCPECGKSFSDKKDLTRHQRTHTGEKPYKCPECGKSFSTKNSLTEHQRTHTGEKPYKCPECGKSFSTSHSLTEHQRTHTGEKPTGKKTS

SEQ ID NO: 1822 - protein, 209 aa, Artificial Sequence
  source: /note="Description of Artificial Sequence: Synthetic polypeptide"
LEPGEKPYKCPECGKSFSRNDALTEHQRTHTGEKPYKCPECGKSFSTSGNLTEHQRTHTGEKPYKCPECGKSFSQSGDLRRHQRTHTGEKPYKCPECGKSFSRSDHLTTHQRTHTGEKPYKCPECGKSFSDKKDLTRHQRTHTGEKPYKCPECGKSFSSKKALTEHQRTHTGEKPYKCPECGKSFSRSDHLTTHQRTHTGEKPTGKKTS

SEQ ID NO: 1823 - protein, 209 aa, Artificial Sequence
  source: /note="Description of Artificial Sequence: Synthetic polypeptide"
LEPGEKPYKCPECGKSFSTSGNLTEHQRTHTGEKPYKCPECGKSFSQSGDLRRHQRTHTGEKPYKCPECGKSFSRSDHLTTHQRTHTGEKPYKCPECGKSFSDKKDLTRHQRTHTGEKPYKCPECGKSFSSKKALTEHQRTHTGEKPYKCPECGKSFSRSDHLTTHQRTHTGEKPYKCPECGKSFSSKKALTEHQRTHTGEKPTGKKTS

SEQ ID NO: 1824 - protein, 209 aa, Artificial Sequence
  source: /note="Description of Artificial Sequence: Synthetic polypeptide"
LEPGEKPYKCPECGKSFSDCRDLARHQRTHTGEKPYKCPECGKSFSHKNALQNHQRTHTGEKPYKCPECGKSFSDKKDLTRHQRTHTGEKPYKCPECGKSFSTKNSLTEHQRTHTGEKPYKCPECGKSFSTSHSLTEHQRTHTGEKPYKCPECGKSFSSKKHLAEHQRTHTGEKPYKCPECGKSFSRNDALTEHQRTHTGEKPTGKKTS

SEQ ID NO: 1825 - protein, 209 aa, Artificial Sequence
  source: /note="Description of Artificial Sequence: Synthetic polypeptide"
LEPGEKPYKCPECGKSFSTKNSLTEHQRTHTGEKPYKCPECGKSFSTSHSLTEHQRTHTGEKPYKCPECGKSFSSKKHLAEHQRTHTGEKPYKCPECGKSFSRNDALTEHQRTHTGEKPYKCPECGKSFSTSGNLTEHQRTHTGEKPYKCPECGKSFSQSGDLRRHQRTHTGEKPYKCPECGKSFSRSDHLTTHQRTHTGEKPTGKKTS

SEQ ID NO: 1826 - protein, 209 aa, Artificial Sequence
  source: /note="Description of Artificial Sequence: Synthetic polypeptide"
LEPGEKPYKCPECGKSFSTSHSLTEHQRTHTGEKPYKCPECGKSFSSKKHLAEHQRTHTGEKPYKCPECGKSFSRNDALTEHQRTHTGEKPYKCPECGKSFSTSGNLTEHQRTHTGEKPYKCPECGKSFSQSGDLRRHQRTHTGEKPYKCPECGKSFSRSDHLTTHQRTHTGEKPYKCPECGKSFSDKKDLTRHQRTHTGEKPTGKKTS

SEQ ID NO: 1827 - protein, 209 aa, Artificial Sequence
  source: /note="Description of Artificial Sequence: Synthetic polypeptide"
LEPGEKPYKCPECGKSFSDKKDLTRHQRTHTGEKPYKCPECGKSFSTKNSLTEHQRTHTGEKPYKCPECGKSFSTSHSLTEHQRTHTGEKPYKCPECGKSFSSKKHLAEHQRTHTGEKPYKCPECGKSFSRNDALTEHQRTHTGEKPYKCPECGKSFSTSGNLTEHQRTHTGEKPYKCPECGKSFSQSGDLRRHQRTHTGEKPTGKKTS

SEQ ID NO: 1828 - protein, 209 aa, Artificial Sequence
  source: /note="Description of Artificial Sequence: Synthetic polypeptide"
LEPGEKPYKCPECGKSFSQSGNLTEHQRTHTGEKPYKCPECGKSFSSRRTCRAHQRTHTGEKPYKCPECGKSFSTSGNLTEHQRTHTGEKPYKCPECGKSFSDCRDLARHQRTHTGEKPYKCPECGKSFSHKNALQNHQRTHTGEKPYKCPECGKSFSDKKDLTRHQRTHTGEKPYKCPECGKSFSTKNSLTEHQRTHTGEKPTGKKTS

SEQ ID NO: 1829 - protein, 209 aa, Artificial Sequence
  source: /note="Description of Artificial Sequence: Synthetic polypeptide"
LEPGEKPYKCPECGKSFSHKNALQNHQRTHTGEKPYKCPECGKSFSDKKDLTRHQRTHTGEKPYKCPECGKSFSTKNSLTEHQRTHTGEKPYKCPECGKSFSTSHSLTEHQRTHTGEKPYKCPECGKSFSSKKHLAEHQRTHTGEKPYKCPECGKSFSRNDALTEHQRTHTGEKPYKCPECGKSFSTSGNLTEHQRTHTGEKPTGKKTS

SEQ ID NO: 1830 - protein, 209 aa, Artificial Sequence
  source: /note="Description of Artificial Sequence: Synthetic polypeptide"
LEPGEKPYKCPECGKSFSQSGDLRRHQRTHTGEKPYKCPECGKSFSRSDHLTTHQRTHTGEKPYKCPECGKSFSDKKDLTRHQRTHTGEKPYKCPECGKSFSSKKALTEHQRTHTGEKPYKCPECGKSFSRSDHLTTHQRTHTGEKPYKCPECGKSFSSKKALTEHQRTHTGEKPYKCPECGKSFSSKKHLAEHQRTHTGEKPTGKKTS

SEQ ID NO: 1831 - protein, 209 aa, Artificial Sequence
  source: /note="Description of Artificial Sequence: Synthetic polypeptide"
LEPGEKPYKCPECGKSFSTSGNLTEHQRTHTGEKPYKCPECGKSFSDCRDLARHQRTHTGEKPYKCPECGKSFSHKNALQNHQRTHTGEKPYKCPECGKSFSDKKDLTRHQRTHTGEKPYKCPECGKSFSTKNSLTEHQRTHTGEKPYKCPECGKSFSTSHSLTEHQRTHTGEKPYKCPECGKSFSSKKHLAEHQRTHTGEKPTGKKTS

SEQ ID NO: 1832 - protein, 209 aa, Artificial Sequence
  source: /note="Description of Artificial Sequence: Synthetic polypeptide"
LEPGEKPYKCPECGKSFSSKKHLAEHQRTHTGEKPYKCPECGKSFSRNDALTEHQRTHTGEKPYKCPECGKSFSTSGNLTEHQRTHTGEKPYKCPECGKSFSQSGDLRRHQRTHTGEKPYKCPECGKSFSRSDHLTTHQRTHTGEKPYKCPECGKSFSDKKDLTRHQRTHTGEKPYKCPECGKSFSSKKALTEHQRTHTGEKPTGKKTS

SEQ ID NO: 1833 - protein, 209 aa, Artificial Sequence
  source: /note="Description of Artificial Sequence: Synthetic polypeptide"
LEPGEKPYKCPECGKSFSRNDALTEHQRTHTGEKPYKCPECGKSFSSKKALTEHQRTHTGEKPYKCPECGKSFSQSGNLTEHQRTHTGEKPYKCPECGKSFSSRRTCRAHQRTHTGEKPYKCPECGKSFSTSGNLTEHQRTHTGEKPYKCPECGKSFSDCRDLARHQRTHTGEKPYKCPECGKSFSHKNALQNHQRTHTGEKPTGKKTS

SEQ ID NO: 1834 - protein, 209 aa, Artificial Sequence
  source: /note="Description of Artificial Sequence: Synthetic polypeptide"
LEPGEKPYKCPECGKSFSHKNALQNHQRTHTGEKPYKCPECGKSFSSKKALTEHQRTHTGEKPYKCPECGKSFSRNDALTEHQRTHTGEKPYKCPECGKSFSSKKALTEHQRTHTGEKPYKCPECGKSFSQSGNLTEHQRTHTGEKPYKCPECGKSFSSRRTCRAHQRTHTGEKPYKCPECGKSFSTSGNLTEHQRTHTGEKPTGKKTS

SEQ ID NO: 1835 - protein, 209 aa, Artificial Sequence
  source: /note="Description of Artificial Sequence: Synthetic polypeptide"
LEPGEKPYKCPECGKSFSSKKALTEHQRTHTGEKPYKCPECGKSFSQSGNLTEHQRTHTGEKPYKCPECGKSFSSRRTCRAHQRTHTGEKPYKCPECGKSFSTSGNLTEHQRTHTGEKPYKCPECGKSFSDCRDLARHQRTHTGEKPYKCPECGKSFSHKNALQNHQRTHTGEKPYKCPECGKSFSDKKDLTRHQRTHTGEKPTGKKTS

SEQ ID NO: 1836 - protein, 209 aa, Artificial Sequence
  source: /note="Description of Artificial Sequence: Synthetic polypeptide"
LEPGEKPYKCPECGKSFSSKKALTEHQRTHTGEKPYKCPECGKSFSRNDALTEHQRTHTGEKPYKCPECGKSFSSKKALTEHQRTHTGEKPYKCPECGKSFSQSGNLTEHQRTHTGEKPYKCPECGKSFSSRRTCRAHQRTHTGEKPYKCPECGKSFSTSGNLTEHQRTHTGEKPYKCPECGKSFSDCRDLARHQRTHTGEKPTGKKTS

SEQ ID NO: 1837 - protein, 209 aa, Artificial Sequence
  source: /note="Description of Artificial Sequence: Synthetic polypeptide"
LEPGEKPYKCPECGKSFSDPGALVRHQRTHTGEKPYKCPECGKSFSRSDHLTTHQRTHTGEKPYKCPECGKSFSDPGHLVRHQRTHTGEKPYKCPECGKSFSQSSSLVRHQRTHTGEKPYKCPECGKSFSTSGHLVRHQRTHTGEKPYKCPECGKSFSTSGHLVRHQRTHTGEKPYKCPECGKSFSRADNLTEHQRTHTGEKPTGKKTS

SEQ ID NO: 1838 - protein, 209 aa, Artificial Sequence
  source: /note="Description of Artificial Sequence: Synthetic polypeptide"
LEPGEKPYKCPECGKSFSRADNLTEHQRTHTGEKPYKCPECGKSFSDPGALVRHQRTHTGEKPYKCPECGKSFSRSDHLTTHQRTHTGEKPYKCPECGKSFSDPGHLVRHQRTHTGEKPYKCPECGKSFSQSSSLVRHQRTHTGEKPYKCPECGKSFSTSGHLVRHQRTHTGEKPYKCPECGKSFSTSGHLVRHQRTHTGEKPTGKKTS

SEQ ID NO: 1839 - protein, 209 aa, Artificial Sequence
  source: /note="Description of Artificial Sequence: Synthetic polypeptide"
LEPGEKPYKCPECGKSFSSKKALTEHQRTHTGEKPYKCPECGKSFSRADNLTEHQRTHTGEKPYKCPECGKSFSRSDELVRHQRTHTGEKPYKCPECGKSFSTSHSLTEHQRTHTGEKPYKCPECGKSFSTSGHLVRHQRTHTGEKPYKCPECGKSFSRNDALTEHQRTHTGEKPYKCPECGKSFSRSDHLTNHQRTHTGEKPTGKKTS

SEQ ID NO: 1840 - protein, 209 aa, Artificial Sequence
  source: /note="Description of Artificial Sequence: Synthetic polypeptide"
LEPGEKPYKCPECGKSFSDPGALVRHQRTHTGEKPYKCPECGKSFSTSGNLTEHQRTHTGEKPYKCPECGKSFSDPGHLVRHQRTHTGEKPYKCPECGKSFSDPGALVRHQRTHTGEKPYKCPECGKSFSQSSSLVRHQRTHTGEKPYKCPECGKSFSTHLDLIRHQRTHTGEKPYKCPECGKSFSERSHLREHQRTHTGEKPTGKKTS

SEQ ID NO: 1841 - protein, 209 aa, Artificial Sequence
  source: /note="Description of Artificial Sequence: Synthetic polypeptide"
LEPGEKPYKCPECGKSFSTSGNLTEHQRTHTGEKPYKCPECGKSFSDPGALVRHQRTHTGEKPYKCPECGKSFSTSGNLTEHQRTHTGEKPYKCPECGKSFSDPGHLVRHQRTHTGEKPYKCPECGKSFSDPGALVRHQRTHTGEKPYKCPECGKSFSQSSSLVRHQRTHTGEKPYKCPECGKSFSTHLDLIRHQRTHTGEKPTGKKTS

SEQ ID NO: 1842 - protein, 209 aa, Artificial Sequence
  source: /note="Description of Artificial Sequence: Synthetic polypeptide"
LEPGEKPYKCPECGKSFSDPGALVRHQRTHTGEKPYKCPECGKSFSTSGNLTEHQRTHTGEKPYKCPECGKSFSDPGALVRHQRTHTGEKPYKCPECGKSFSTSGNLTEHQRTHTGEKPYKCPECGKSFSDPGHLVRHQRTHTGEKPYKCPECGKSFSDPGALVRHQRTHTGEKPYKCPECGKSFSQSSSLVRHQRTHTGEKPTGKKTS

SEQ ID NO: 1843 - protein, 209 aa, Artificial Sequence
  source: /note="Description of Artificial Sequence: Synthetic polypeptide"
LEPGEKPYKCPECGKSFSDPGNLVRHQRTHTGEKPYKCPECGKSFSDPGALVRHQRTHTGEKPYKCPECGKSFSTSGNLTEHQRTHTGEKPYKCPECGKSFSDPGALVRHQRTHTGEKPYKCPECGKSFSTSGNLTEHQRTHTGEKPYKCPECGKSFSDPGHLVRHQRTHTGEKPYKCPECGKSFSDPGALVRHQRTHTGEKPTGKKTS

SEQ ID NO: 1844 - protein, 209 aa, Artificial Sequence
  source: /note="Description of Artificial Sequence: Synthetic polypeptide"
LEPGEKPYKCPECGKSFSRSDNLVRHQRTHTGEKPYKCPECGKSFSDPGNLVRHQRTHTGEKPYKCPECGKSFSDPGALVRHQRTHTGEKPYKCPECGKSFSTSGNLTEHQRTHTGEKPYKCPECGKSFSDPGALVRHQRTHTGEKPYKCPECGKSFSTSGNLTEHQRTHTGEKPYKCPECGKSFSDPGHLVRHQRTHTGEKPTGKKTS

SEQ ID NO: 1845 - protein, 209 aa, Artificial Sequence
  source: /note="Description of Artificial Sequence: Synthetic polypeptide"
LEPGEKPYKCPECGKSFSTSGHLVRHQRTHTGEKPYKCPECGKSFSRSDNLVRHQRTHTGEKPYKCPECGKSFSDPGNLVRHQRTHTGEKPYKCPECGKSFSDPGALVRHQRTHTGEKPYKCPECGKSFSTSGNLTEHQRTHTGEKPYKCPECGKSFSDPGALVRHQRTHTGEKPYKCPECGKSFSTSGNLTEHQRTHTGEKPTGKKTS

SEQ ID NO: 1846 - protein, 209 aa, Artificial Sequence
  source: /note="Description of Artificial Sequence: Synthetic polypeptide"
LEPGEKPYKCPECGKSFSSKKALTEHQRTHTGEKPYKCPECGKSFSDPGHLVRHQRTHTGEKPYKCPECGKSFSHTGHLLEHQRTHTGEKPYKCPECGKSFSHTGHLLEHQRTHTGEKPYKCPECGKSFSTSHSLTEHQRTHTGEKPYKCPECGKSFSTKNSLTEHQRTHTGEKPYKCPECGKSFSRNDALTEHQRTHTGEKPTGKKTS

SEQ ID NO: 1847 - protein, 209 aa, Artificial Sequence
  source: /note="Description of Artificial Sequence: Synthetic polypeptide"
LEPGEKPYKCPECGKSFSRNDALTEHQRTHTGEKPYKCPECGKSFSSKKALTEHQRTHTGEKPYKCPECGKSFSDPGHLVRHQRTHTGEKPYKCPECGKSFSHTGHLLEHQRTHTGEKPYKCPECGKSFSHTGHLLEHQRTHTGEKPYKCPECGKSFSTSHSLTEHQRTHTGEKPYKCPECGKSFSTKNSLTEHQRTHTGEKPTGKKTS

SEQ ID NO: 1848 - protein, 209 aa, Artificial Sequence
  source: /note="Description of Artificial Sequence: Synthetic polypeptide"
LEPGEKPYKCPECGKSFSSKKHLAEHQRTHTGEKPYKCPECGKSFSRNDALTEHQRTHTGEKPYKCPECGKSFSSKKALTEHQRTHTGEKPYKCPECGKSFSDPGHLVRHQRTHTGEKPYKCPECGKSFSHTGHLLEHQRTHTGEKPYKCPECGKSFSHTGHLLEHQRTHTGEKPYKCPECGKSFSTSHSLTEHQRTHTGEKPTGKKTS

SEQ ID NO: 1849 - protein, 209 aa, Artificial Sequence
  source: /note="Description of Artificial Sequence: Synthetic polypeptide"
LEPGEKPYKCPECGKSFSRSDHLTTHQRTHTGEKPYKCPECGKSFSSKKHLAEHQRTHTGEKPYKCPECGKSFSQNSTLTEHQRTHTGEKPYKCPECGKSFSDCRDLARHQRTHTGEKPYKCPECGKSFSTKNSLTEHQRTHTGEKPYKCPECGKSFSTSHSLTEHQRTHTGEKPYKCPECGKSFSRSDKLTEHQRTHTGEKPTGKKTS

SEQ ID NO: 1850 - protein, 209 aa, Artificial Sequence
  source: /note="Description of Artificial Sequence: Synthetic polypeptide"
LEPGEKPYKCPECGKSFSQNSTLTEHQRTHTGEKPYKCPECGKSFSDCRDLARHQRTHTGEKPYKCPECGKSFSTKNSLTEHQRTHTGEKPYKCPECGKSFSTSHSLTEHQRTHTGEKPYKCPECGKSFSRSDKLTEHQRTHTGEKPYKCPECGKSFSRNDTLTEHQRTHTGEKPYKCPECGKSFSRTDTLRDHQRTHTGEKPTGKKTS

SEQ ID NO: 1851 - protein, 209 aa, Artificial Sequence
  source: /note="Description of Artificial Sequence: Synthetic polypeptide"
LEPGEKPYKCPECGKSFSSKKHLAEHQRTHTGEKPYKCPECGKSFSQNSTLTEHQRTHTGEKPYKCPECGKSFSDCRDLARHQRTHTGEKPYKCPECGKSFSTKNSLTEHQRTHTGEKPYKCPECGKSFSTSHSLTEHQRTHTGEKPYKCPECGKSFSRSDKLTEHQRTHTGEKPYKCPECGKSFSRNDTLTEHQRTHTGEKPTGKKTS

SEQ ID NO: 1852 - protein, 209 aa, Artificial Sequence
  source: /note="Description of Artificial Sequence: Synthetic polypeptide"
LEPGEKPYKCPECGKSFSRSDDLVRHQRTHTGEKPYKCPECGKSFSRSDHLTTHQRTHTGEKPYKCPECGKSFSSKKHLAEHQRTHTGEKPYKCPECGKSFSQNSTLTEHQRTHTGEKPYKCPECGKSFSDCRDLARHQRTHTGEKPYKCPECGKSFSTKNSLTEHQRTHTGEKPYKCPECGKSFSTSHSLTEHQRTHTGEKPTGKKTS

SEQ ID NO: 1853 - protein, 209 aa, Artificial Sequence
  source: /note="Description of Artificial Sequence: Synthetic polypeptide"
LEPGEKPYKCPECGKSFSSKKHLAEHQRTHTGEKPYKCPECGKSFSRSDDLVRHQRTHTGEKPYKCPECGKSFSRSDHLTTHQRTHTGEKPYKCPECGKSFSSKKHLAEHQRTHTGEKPYKCPECGKSFSQNSTLTEHQRTHTGEKPYKCPECGKSFSDCRDLARHQRTHTGEKPYKCPECGKSFSTKNSLTEHQRTHTGEKPTGKKTS

SEQ ID NO: 1854 - protein, 209 aa, Artificial Sequence
  source: /note="Description of Artificial Sequence: Synthetic polypeptide"
LEPGEKPYKCPECGKSFSDKKDLTRHQRTHTGEKPYKCPECGKSFSSKKHLAEHQRTHTGEKPYKCPECGKSFSRSDDLVRHQRTHTGEKPYKCPECGKSFSRSDHLTTHQRTHTGEKPYKCPECGKSFSSKKHLAEHQRTHTGEKPYKCPECGKSFSQNSTLTEHQRTHTGEKPYKCPECGKSFSDCRDLARHQRTHTGEKPTGKKTS

SEQ ID NO: 1855 - protein, 209 aa, Artificial Sequence
  source: /note="Description of Artificial Sequence: Synthetic polypeptide"
LEPGEKPYKCPECGKSFSRKDNLKNHQRTHTGEKPYKCPECGKSFSRNDTLTEHQRTHTGEKPYKCPECGKSFSDKKDLTRHQRTHTGEKPYKCPECGKSFSSKKHLAEHQRTHTGEKPYKCPECGKSFSRSDDLVRHQRTHTGEKPYKCPECGKSFSRSDHLTTHQRTHTGEKPYKCPECGKSFSSKKHLAEHQRTHTGEKPTGKKTS

SEQ ID NO: 1856 - protein, 209 aa, Artificial Sequence
  source: /note="Description of Artificial Sequence: Synthetic polypeptide"
LEPGEKPYKCPECGKSFSDCRDLARHQRTHTGEKPYKCPECGKSFSRKDNLKNHQRTHTGEKPYKCPECGKSFSRNDTLTEHQRTHTGEKPYKCPECGKSFSDKKDLTRHQRTHTGEKPYKCPECGKSFSSKKHLAEHQRTHTGEKPYKCPECGKSFSRSDDLVRHQRTHTGEKPYKCPECGKSFSRSDHLTTHQRTHTGEKPTGKKTS

SEQ ID NO: 1857 - protein, 209 aa, Artificial Sequence
  source: /note="Description of Artificial Sequence: Synthetic polypeptide"
LEPGEKPYKCPECGKSFSRNDTLTEHQRTHTGEKPYKCPECGKSFSDKKDLTRHQRTHTGEKPYKCPECGKSFSSKKHLAEHQRTHTGEKPYKCPECGKSFSRSDDLVRHQRTHTGEKPYKCPECGKSFSRSDHLTTHQRTHTGEKPYKCPECGKSFSSKKHLAEHQRTHTGEKPYKCPECGKSFSQNSTLTEHQRTHTGEKPTGKKTS

SEQ ID NO: 1858 - protein, 209 aa, Artificial Sequence
  source: /note="Description of Artificial Sequence: Synthetic polypeptide"
LEPGEKPYKCPECGKSFSDCRDLARHQRTHTGEKPYKCPECGKSFSSKKHLAEHQRTHTGEKPYKCPECGKSFSDCRDLARHQRTHTGEKPYKCPECGKSFSRKDNLKNHQRTHTGEKPYKCPECGKSFSRNDTLTEHQRTHTGEKPYKCPECGKSFSDKKDLTRHQRTHTGEKPYKCPECGKSFSSKKHLAEHQRTHTGEKPTGKKTS

SEQ ID NO: 1859 - protein, 209 aa, Artificial Sequence
  source: /note="Description of Artificial Sequence: Synthetic polypeptide"
LEPGEKPYKCPECGKSFSSKKHLAEHQRTHTGEKPYKCPECGKSFSDCRDLARHQRTHTGEKPYKCPECGKSFSRKDNLKNHQRTHTGEKPYKCPECGKSFSRNDTLTEHQRTHTGEKPYKCPECGKSFSDKKDLTRHQRTHTGEKPYKCPECGKSFSSKKHLAEHQRTHTGEKPYKCPECGKSFSRSDDLVRHQRTHTGEKPTGKKTS

SEQ ID NO: 1860 - protein, 209 aa, Artificial Sequence
  source: /note="Description of Artificial Sequence: Synthetic polypeptide"
LEPGEKPYKCPECGKSFSSKKHLAEHQRTHTGEKPYKCPECGKSFSSKKALTEHQRTHTGEKPYKCPECGKSFSDCRDLARHQRTHTGEKPYKCPECGKSFSDPGHLVRHQRTHTGEKPYKCPECGKSFSRNDALTEHQRTHTGEKPYKCPECGKSFSDKKDLTRHQRTHTGEKPYKCPECGKSFSTKNSLTEHQRTHTGEKPTGKKTS

SEQ ID NO: 1861 - protein, 209 aa, Artificial Sequence
  source: /note="Description of Artificial Sequence: Synthetic polypeptide"
LEPGEKPYKCPECGKSFSDPGHLVRHQRTHTGEKPYKCPECGKSFSQSSNLVRHQRTHTGEKPYKCPECGKSFSSKKHLAEHQRTHTGEKPYKCPECGKSFSSKKALTEHQRTHTGEKPYKCPECGKSFSDCRDLARHQRTHTGEKPYKCPECGKSFSDPGHLVRHQRTHTGEKPYKCPECGKSFSRNDALTEHQRTHTGEKPTGKKTS

SEQ ID NO: 1862 - protein, 209 aa, Artificial Sequence
  source: /note="Description of Artificial Sequence: Synthetic polypeptide"
LEPGEKPYKCPECGKSFSSKKHLAEHQRTHTGEKPYKCPECGKSFSDPGHLVRHQRTHTGEKPYKCPECGKSFSQSSNLVRHQRTHTGEKPYKCPECGKSFSSKKHLAEHQRTHTGEKPYKCPECGKSFSSKKALTEHQRTHTGEKPYKCPECGKSFSDCRDLARHQRTHTGEKPYKCPECGKSFSDPGHLVRHQRTHTGEKPTGKKTS

SEQ ID NO: 1863 - protein, 209 aa, Artificial Sequence
  source: /note="Description of Artificial Sequence: Synthetic polypeptide"
LEPGEKPYKCPECGKSFSTKNSLTEHQRTHTGEKPYKCPECGKSFSHTGHLLEHQRTHTGEKPYKCPECGKSFSSKKHLAEHQRTHTGEKPYKCPECGKSFSDPGHLVRHQRTHTGEKPYKCPECGKSFSQSSNLVRHQRTHTGEKPYKCPECGKSFSSKKHLAEHQRTHTGEKPYKCPECGKSFSSKKALTEHQRTHTGEKPTGKKTS

SEQ ID NO: 1864 - protein, 209 aa, Artificial Sequence
  source: /note="Description of Artificial Sequence: Synthetic polypeptide"
LEPGEKPYKCPECGKSFSHTGHLLEHQRTHTGEKPYKCPECGKSFSSKKHLAEHQRTHTGEKPYKCPECGKSFSDPGHLVRHQRTHTGEKPYKCPECGKSFSQSSNLVRHQRTHTGEKPYKCPECGKSFSSKKHLAEHQRTHTGEKPYKCPECGKSFSSKKALTEHQRTHTGEKPYKCPECGKSFSDCRDLARHQRTHTGEKPTGKKTS

SEQ ID NO: 1865 - protein, 209 aa, Artificial Sequence
  source: /note="Description of Artificial Sequence: Synthetic polypeptide"
LEPGEKPYKCPECGKSFSRNDTLTEHQRTHTGEKPYKCPECGKSFSTKNSLTEHQRTHTGEKPYKCPECGKSFSHTGHLLEHQRTHTGEKPYKCPECGKSFSSKKHLAEHQRTHTGEKPYKCPECGKSFSDPGHLVRHQRTHTGEKPYKCPECGKSFSQSSNLVRHQRTHTGEKPYKCPECGKSFSSKKHLAEHQRTHTGEKPTGKKTS

SEQ ID NO: 1866 - protein, 209 aa, Artificial Sequence
  source: /note="Description of Artificial Sequence: Synthetic polypeptide"
LEPGEKPYKCPECGKSFSSKKHLAEHQRTHTGEKPYKCPECGKSFSRNDTLTEHQRTHTGEKPYKCPECGKSFSTKNSLTEHQRTHTGEKPYKCPECGKSFSHTGHLLEHQRTHTGEKPYKCPECGKSFSSKKHLAEHQRTHTGEKPYKCPECGKSFSDPGHLVRHQRTHTGEKPYKCPECGKSFSQSSNLVRHQRTHTGEKPTGKKTS

SEQ ID NO: 1867 - protein, 209 aa, Artificial Sequence
  source: /note="Description of Artificial Sequence: Synthetic polypeptide"
LEPGEKPYKCPECGKSFSRSDHLTNHQRTHTGEKPYKCPECGKSFSQSGHLTEHQRTHTGEKPYKCPECGKSFSSKKHLAEHQRTHTGEKPYKCPECGKSFSTSHSLTEHQRTHTGEKPYKCPECGKSFSHTGHLLEHQRTHTGEKPYKCPECGKSFSRSDKLVRHQRTHTGEKPYKCPECGKSFSTKNSLTEHQRTHTGEKPTGKKTS

SEQ ID NO: 1868 - protein, 209 aa, Artificial Sequence
  source: /note="Description of Artificial Sequence: Synthetic polypeptide"
LEPGEKPYKCPECGKSFSSKKHLAEHQRTHTGEKPYKCPECGKSFSRSDHLTNHQRTHTGEKPYKCPECGKSFSQSGHLTEHQRTHTGEKPYKCPECGKSFSSKKHLAEHQRTHTGEKPYKCPECGKSFSTSHSLTEHQRTHTGEKPYKCPECGKSFSHTGHLLEHQRTHTGEKPYKCPECGKSFSRSDKLVRHQRTHTGEKPTGKKTS

SEQ ID NO: 1869 - protein, 209 aa, Artificial Sequence
  source: /note="Description of Artificial Sequence: Synthetic polypeptide"
LEPGEKPYKCPECGKSFSRNDTLTEHQRTHTGEKPYKCPECGKSFSSKKHLAEHQRTHTGEKPYKCPECGKSFSRSDHLTNHQRTHTGEKPYKCPECGKSFSQSGHLTEHQRTHTGEKPYKCPECGKSFSSKKHLAEHQRTHTGEKPYKCPECGKSFSTSHSLTEHQRTHTGEKPYKCPECGKSFSHTGHLLEHQRTHTGEKPTGKKTS

SEQ ID NO: 1870 - protein, 209 aa, Artificial Sequence
  source: /note="Description of Artificial Sequence: Synthetic polypeptide"
LEPGEKPYKCPECGKSFSSKKHLAEHQRTHTGEKPYKCPECGKSFSRNDTLTEHQRTHTGEKPYKCPECGKSFSSKKHLAEHQRTHTGEKPYKCPECGKSFSRSDHLTNHQRTHTGEKPYKCPECGKSFSQSGHLTEHQRTHTGEKPYKCPECGKSFSSKKHLAEHQRTHTGEKPYKCPECGKSFSTSHSLTEHQRTHTGEKPTGKKTS

SEQ ID NO: 1871 - protein, 209 aa, Artificial Sequence
  source: /note="Description of Artificial Sequence: Synthetic polypeptide"
LEPGEKPYKCPECGKSFSDCRDLARHQRTHTGEKPYKCPECGKSFSHRTTLTNHQRTHTGEKPYKCPECGKSFSSKKHLAEHQRTHTGEKPYKCPECGKSFSTKNSLTEHQRTHTGEKPYKCPECGKSFSTKNSLTEHQRTHTGEKPYKCPECGKSFSRNDALTEHQRTHTGEKPYKCPECGKSFSTSHSLTEHQRTHTGEKPTGKKTS

SEQ ID NO: 1872 - protein, 209 aa, Artificial Sequence
  source: /note="Description of Artificial Sequence: Synthetic polypeptide"
LEPGEKPYKCPECGKSFSDPGALVRHQRTHTGEKPYKCPECGKSFSQRAHLERHQRTHTGEKPYKCPECGKSFSRNDALTEHQRTHTGEKPYKCPECGKSFSRNDALTEHQRTHTGEKPYKCPECGKSFSTSGNLVRHQRTHTGEKPYKCPECGKSFSQSSNLVRHQRTHTGEKPYKCPECGKSFSRSDHLTTHQRTHTGEKPTGKKTS

SEQ ID NO: 1873 - protein, 209 aa, Artificial Sequence
  source: /note="Description of Artificial Sequence: Synthetic polypeptide"
LEPGEKPYKCPECGKSFSDCRDLARHQRTHTGEKPYKCPECGKSFSQNSTLTEHQRTHTGEKPYKCPECGKSFSDPGHLVRHQRTHTGEKPYKCPECGKSFSTTGALTEHQRTHTGEKPYKCPECGKSFSHRTTLTNHQRTHTGEKPYKCPECGKSFSRSDKLVRHQRTHTGEKPYKCPECGKSFSTSGELVRHQRTHTGEKPTGKKTS

SEQ ID NO: 1874 - protein, 209 aa, Artificial Sequence
  source: /note="Description of Artificial Sequence: Synthetic polypeptide"
LEPGEKPYKCPECGKSFSTSGHLVRHQRTHTGEKPYKCPECGKSFSRSDHLTNHQRTHTGEKPYKCPECGKSFSQAGHLASHQRTHTGEKPYKCPECGKSFSRNDALTEHQRTHTGEKPYKCPECGKSFSTKNSLTEHQRTHTGEKPYKCPECGKSFSREDNLHTHQRTHTGEKPYKCPECGKSFSDCRDLARHQRTHTGEKPTGKKTS

SEQ ID NO: 1875 - protein, 209 aa, Artificial Sequence
  source: /note="Description of Artificial Sequence: Synthetic polypeptide"
LEPGEKPYKCPECGKSFSQRAHLERHQRTHTGEKPYKCPECGKSFSTSGHLVRHQRTHTGEKPYKCPECGKSFSRSDHLTNHQRTHTGEKPYKCPECGKSFSQAGHLASHQRTHTGEKPYKCPECGKSFSRNDALTEHQRTHTGEKPYKCPECGKSFSTKNSLTEHQRTHTGEKPYKCPECGKSFSREDNLHTHQRTHTGEKPTGKKTS

SEQ ID NO: 1876 - protein, 209 aa, Artificial Sequence
  source: /note="Description of Artificial Sequence: Synthetic polypeptide"
LEPGEKPYKCPECGKSFSDPGHLVRHQRTHTGEKPYKCPECGKSFSQRAHLERHQRTHTGEKPYKCPECGKSFSTSGHLVRHQRTHTGEKPYKCPECGKSFSRSDHLTNHQRTHTGEKPYKCPECGKSFSQAGHLASHQRTHTGEKPYKCPECGKSFSRNDALTEHQRTHTGEKPYKCPECGKSFSTKNSLTEHQRTHTGEKPTGKKTS

SEQ ID NO: 1877 - protein, 209 aa, Artificial Sequence
  source: /note="Description of Artificial Sequence: Synthetic polypeptide"
LEPGEKPYKCPECGKSFSRSDKLVRHQRTHTGEKPYKCPECGKSFSRNDTLTEHQRTHTGEKPYKCPECGKSFSRNDALTEHQRTHTGEKPYKCPECGKSFSTSGELVRHQRTHTGEKPYKCPECGKSFSRSDNLVRHQRTHTGEKPYKCPECGKSFSRSDELVRHQRTHTGEKPYKCPECGKSFSRSDKLVRHQRTHTGEKPTGKKTS

SEQ ID NO: 1878 - protein, 209 aa, Artificial Sequence
  source: /note="Description of Artificial Sequence: Synthetic polypeptide"
LEPGEKPYKCPECGKSFSRSDHLTNHQRTHTGEKPYKCPECGKSFSRSDKLVRHQRTHTGEKPYKCPECGKSFSRNDTLTEHQRTHTGEKPYKCPECGKSFSRNDALTEHQRTHTGEKPYKCPECGKSFSTSGELVRHQRTHTGEKPYKCPECGKSFSRSDNLVRHQRTHTGEKPYKCPECGKSFSRSDELVRHQRTHTGEKPTGKKTS

SEQ ID NO: 1879 - protein, 209 aa, Artificial Sequence
  source: /note="Description of Artificial Sequence: Synthetic polypeptide"
LEPGEKPYKCPECGKSFSTSGHLVRHQRTHTGEKPYKCPECGKSFSRSDHLTNHQRTHTGEKPYKCPECGKSFSRSDKLVRHQRTHTGEKPYKCPECGKSFSRNDTLTEHQRTHTGEKPYKCPECGKSFSRNDALTEHQRTHTGEKPYKCPECGKSFSTSGELVRHQRTHTGEKPYKCPECGKSFSRSDNLVRHQRTHTGEKPTGKKTS

SEQ ID NO: 1880 - protein, 209 aa, Artificial Sequence
  source: /note="Description of Artificial Sequence: Synthetic polypeptide"
LEPGEKPYKCPECGKSFSRSDKLVRHQRTHTGEKPYKCPECGKSFSTSGHLVRHQRTHTGEKPYKCPECGKSFSRSDHLTNHQRTHTGEKPYKCPECGKSFSRSDKLVRHQRTHTGEKPYKCPECGKSFSRNDTLTEHQRTHTGEKPYKCPECGKSFSRNDALTEHQRTHTGEKPYKCPECGKSFSTSGELVRHQRTHTGEKPTGKKTS

SEQ ID NO: 1881 - protein, 209 aa, Artificial Sequence
  source: /note="Description of Artificial Sequence: Synthetic polypeptide"
LEPGEKPYKCPECGKSFSTSGHLVRHQRTHTGEKPYKCPECGKSFSRSDKLVRHQRTHTGEKPYKCPECGKSFSTSGHLVRHQRTHTGEKPYKCPECGKSFSRSDHLTNHQRTHTGEKPYKCPECGKSFSRSDKLVRHQRTHTGEKPYKCPECGKSFSRNDTLTEHQRTHTGEKPYKCPECGKSFSRNDALTEHQRTHTGEKPTGKKTS

SEQ ID NO: 1882 - protein, 209 aa, Artificial Sequence
  source: /note="Description of Artificial Sequence: Synthetic polypeptide"
LEPGEKPYKCPECGKSFSTTGNLTVHQRTHTGEKPYKCPECGKSFSTSGSLVRHQRTHTGEKPYKCPECGKSFSRSDKLVRHQRTHTGEKPYKCPECGKSFSRSDELVRHQRTHTGEKPYKCPECGKSFSRSDKLVRHQRTHTGEKPYKCPECGKSFSQRAHLERHQRTHTGEKPYKCPECGKSFSRSDKLTEHQRTHTGEKPTGKKTS

SEQ ID NO: 1883 - protein, 209 aa, Artificial Sequence
  source: /note="Description of Artificial Sequence: Synthetic polypeptide"
LEPGEKPYKCPECGKSFSRSDHLTTHQRTHTGEKPYKCPECGKSFSHKNALQNHQRTHTGEKPYKCPECGKSFSRSDKLVRHQRTHTGEKPYKCPECGKSFSQSGDLRRHQRTHTGEKPYKCPECGKSFSTSGELVRHQRTHTGEKPYKCPECGKSFSRSDKLVRHQRTHTGEKPYKCPECGKSFSDPGHLVRHQRTHTGEKPTGKKTS

SEQ ID NO: 1884 - protein, 209 aa, Artificial Sequence
  source: /note="Description of Artificial Sequence: Synthetic polypeptide"
LEPGEKPYKCPECGKSFSHKNALQNHQRTHTGEKPYKCPECGKSFSRSDKLVRHQRTHTGEKPYKCPECGKSFSQSGDLRRHQRTHTGEKPYKCPECGKSFSTSGELVRHQRTHTGEKPYKCPECGKSFSRSDKLVRHQRTHTGEKPYKCPECGKSFSDPGHLVRHQRTHTGEKPYKCPECGKSFSRNDALTEHQRTHTGEKPTGKKTS

SEQ ID NO: 1885 - protein, 209 aa, Artificial Sequence
  source: /note="Description of Artificial Sequence: Synthetic polypeptide"
LEPGEKPYKCPECGKSFSRNDALTEHQRTHTGEKPYKCPECGKSFSRSDHLTTHQRTHTGEKPYKCPECGKSFSHKNALQNHQRTHTGEKPYKCPECGKSFSRSDKLVRHQRTHTGEKPYKCPECGKSFSQSGDLRRHQRTHTGEKPYKCPECGKSFSTSGELVRHQRTHTGEKPYKCPECGKSFSRSDKLVRHQRTHTGEKPTGKKTS

SEQ ID NO: 1886 - protein, 209 aa, Artificial Sequence
  source: /note="Description of Artificial Sequence: Synthetic polypeptide"
LEPGEKPYKCPECGKSFSTSGELVRHQRTHTGEKPYKCPECGKSFSRSDKLVRHQRTHTGEKPYKCPECGKSFSDPGHLVRHQRTHTGEKPYKCPECGKSFSRNDALTEHQRTHTGEKPYKCPECGKSFSRSDHLTNHQRTHTGEKPYKCPECGKSFSTSGNLVRHQRTHTGEKPYKCPECGKSFSRSDELVRHQRTHTGEKPTGKKTS

SEQ ID NO: 1887 - protein, 209 aa, Artificial Sequence
  source: /note="Description of Artificial Sequence: Synthetic polypeptide"
LEPGEKPYKCPECGKSFSQSGDLRRHQRTHTGEKPYKCPECGKSFSTSGELVRHQRTHTGEKPYKCPECGKSFSRSDKLVRHQRTHTGEKPYKCPECGKSFSDPGHLVRHQRTHTGEKPYKCPECGKSFSRNDALTEHQRTHTGEKPYKCPECGKSFSRSDHLTNHQRTHTGEKPYKCPECGKSFSTSGNLVRHQRTHTGEKPTGKKTS

SEQ ID NO: 1888 - protein, 209 aa, Artificial Sequence
  source: /note="Description of Artificial Sequence: Synthetic polypeptide"
LEPGEKPYKCPECGKSFSRSDKLVRHQRTHTGEKPYKCPECGKSFSDPGHLVRHQRTHTGEKPYKCPECGKSFSRNDALTEHQRTHTGEKPYKCPECGKSFSRSDHLTNHQRTHTGEKPYKCPECGKSFSTSGNLVRHQRTHTGEKPYKCPECGKSFSRSDELVRHQRTHTGEKPYKCPECGKSFSRNDTLTEHQRTHTGEKPTGKKTS

SEQ ID NO: 1889 - protein, 209 aa, Artificial Sequence
  source: /note="Description of Artificial Sequence: Synthetic polypeptide"
LEPGEKPYKCPECGKSFSDPGHLVRHQRTHTGEKPYKCPECGKSFSRNDALTEHQRTHTGEKPYKCPECGKSFSRSDHLTNHQRTHTGEKPYKCPECGKSFSTSGNLVRHQRTHTGEKPYKCPECGKSFSRSDELVRHQRTHTGEKPYKCPECGKSFSRNDTLTEHQRTHTGEKPYKCPECGKSFSRNDTLTEHQRTHTGEKPTGKKTS

SEQ ID NO: 1890 - protein, 209 aa, Artificial Sequence
  source: /note="Description of Artificial Sequence: Synthetic polypeptide"
LEPGEKPYKCPECGKSFSRNDALTEHQRTHTGEKPYKCPECGKSFSRSDHLTNHQRTHTGEKPYKCPECGKSFSTSGNLVRHQRTHTGEKPYKCPECGKSFSRSDELVRHQRTHTGEKPYKCPECGKSFSRNDTLTEHQRTHTGEKPYKCPECGKSFSRNDTLTEHQRTHTGEKPYKCPECGKSFSSKKHLAEHQRTHTGEKPTGKKTS

SEQ ID NO: 1891 - protein, 209 aa, Artificial Sequence
  source: /note="Description of Artificial Sequence: Synthetic polypeptide"
LEPGEKPYKCPECGKSFSRSDHLTNHQRTHTGEKPYKCPECGKSFSTSGNLVRHQRTHTGEKPYKCPECGKSFSRSDELVRHQRTHTGEKPYKCPECGKSFSRNDTLTEHQRTHTGEKPYKCPECGKSFSRNDTLTEHQRTHTGEKPYKCPECGKSFSSKKHLAEHQRTHTGEKPYKCPECGKSFSTSGHLVRHQRTHTGEKPTGKKTS

SEQ ID NO: 1892 - protein, 209 aa, Artificial Sequence
  source: /note="Description of Artificial Sequence: Synthetic polypeptide"
LEPGEKPYKCPECGKSFSRADNLTEHQRTHTGEKPYKCPECGKSFSRNDALTEHQRTHTGEKPYKCPECGKSFSRSDKLVRHQRTHTGEKPYKCPECGKSFSRSDDLVRHQRTHTGEKPYKCPECGKSFSRSDHLTTHQRTHTGEKPYKCPECGKSFSDPGHLVRHQRTHTGEKPYKCPECGKSFSQKSSLIAHQRTHTGEKPTGKKTS

SEQ ID NO: 1893 - protein, 209 aa, Artificial Sequence
  source: /note="Description of Artificial Sequence: Synthetic polypeptide"
LEPGEKPYKCPECGKSFSRSDKLVRHQRTHTGEKPYKCPECGKSFSRSDDLVRHQRTHTGEKPYKCPECGKSFSRSDHLTTHQRTHTGEKPYKCPECGKSFSDPGHLVRHQRTHTGEKPYKCPECGKSFSQKSSLIAHQRTHTGEKPYKCPECGKSFSRSDHLTTHQRTHTGEKPYKCPECGKSFSRSDKLTEHQRTHTGEKPTGKKTS

SEQ ID NO: 1894 - protein, 209 aa, Artificial Sequence
  source: /note="Description of Artificial Sequence: Synthetic polypeptide"
LEPGEKPYKCPECGKSFSRNDALTEHQRTHTGEKPYKCPECGKSFSRSDKLVRHQRTHTGEKPYKCPECGKSFSRSDDLVRHQRTHTGEKPYKCPECGKSFSRSDHLTTHQRTHTGEKPYKCPECGKSFSDPGHLVRHQRTHTGEKPYKCPECGKSFSQKSSLIAHQRTHTGEKPYKCPECGKSFSRSDHLTTHQRTHTGEKPTGKKTS

SEQ ID NO: 1895 - protein, 209 aa, Artificial Sequence
  source: /note="Description of Artificial Sequence: Synthetic polypeptide"
LEPGEKPYKCPECGKSFSRSDDLVRHQRTHTGEKPYKCPECGKSFSRSDHLTTHQRTHTGEKPYKCPECGKSFSDPGHLVRHQRTHTGEKPYKCPECGKSFSQKSSLIAHQRTHTGEKPYKCPECGKSFSRSDHLTTHQRTHTGEKPYKCPECGKSFSRSDKLTEHQRTHTGEKPYKCPECGKSFSHTGHLLEHQRTHTGEKPTGKKTS

SEQ ID NO: 1896 - protein, 209 aa, Artificial Sequence
  source: /note="Description of Artificial Sequence: Synthetic polypeptide"
LEPGEKPYKCPECGKSFSDPGHLVRHQRTHTGEKPYKCPECGKSFSQKSSLIAHQRTHTGEKPYKCPECGKSFSRSDHLTTHQRTHTGEKPYKCPECGKSFSRSDKLTEHQRTHTGEKPYKCPECGKSFSHTGHLLEHQRTHTGEKPYKCPECGKSFSSKKHLAEHQRTHTGEKPYKCPECGKSFSDPGALVRHQRTHTGEKPTGKKTS

SEQ ID NO: 1897 - protein, 209 aa, Artificial Sequence
  source: /note="Description of Artificial Sequence: Synthetic polypeptide"
LEPGEKPYKCPECGKSFSRSDHLTTHQRTHTGEKPYKCPECGKSFSDPGHLVRHQRTHTGEKPYKCPECGKSFSQKSSLIAHQRTHTGEKPYKCPECGKSFSRSDHLTTHQRTHTGEKPYKCPECGKSFSRSDKLTEHQRTHTGEKPYKCPECGKSFSHTGHLLEHQRTHTGEKPYKCPECGKSFSSKKHLAEHQRTHTGEKPTGKKTS

SEQ ID NO: 1898 - protein, 209 aa, Artificial Sequence
  source: /note="Description of Artificial Sequence: Synthetic polypeptide"
LEPGEKPYKCPECGKSFSQRAHLERHQRTHTGEKPYKCPECGKSFSRADNLTEHQRTHTGEKPYKCPECGKSFSRNDALTEHQRTHTGEKPYKCPECGKSFSRSDKLVRHQRTHTGEKPYKCPECGKSFSRSDDLVRHQRTHTGEKPYKCPECGKSFSRSDHLTTHQRTHTGEKPYKCPECGKSFSDPGHLVRHQRTHTGEKPTGKKTS

SEQ ID NO: 1899 - protein, 209 aa, Artificial Sequence
  source: /note="Description of Artificial Sequence: Synthetic polypeptide"
LEPGEKPYKCPECGKSFSDPGHLVRHQRTHTGEKPYKCPECGKSFSRSDKLTEHQRTHTGEKPYKCPECGKSFSRSDKLVRHQRTHTGEKPYKCPECGKSFSTSGELVRHQRTHTGEKPYKCPECGKSFSREDNLHTHQRTHTGEKPYKCPECGKSFSQRAHLERHQRTHTGEKPYKCPECGKSFSTSGHLVRHQRTHTGEKPTGKKTS

SEQ ID NO: 1900 - protein, 209 aa, Artificial Sequence
  source: /note="Description of Artificial Sequence: Synthetic polypeptide"
LEPGEKPYKCPECGKSFSRSDKLTEHQRTHTGEKPYKCPECGKSFSRSDKLVRHQRTHTGEKPYKCPECGKSFSTSGELVRHQRTHTGEKPYKCPECGKSFSREDNLHTHQRTHTGEKPYKCPECGKSFSQRAHLERHQRTHTGEKPYKCPECGKSFSTSGHLVRHQRTHTGEKPYKCPECGKSFSDCRDLARHQRTHTGEKPTGKKTS

SEQ ID NO: 1901 - protein, 209 aa, Artificial Sequence
  source: /note="Description of Artificial Sequence: Synthetic polypeptide"
LEPGEKPYKCPECGKSFSRSDKLVRHQRTHTGEKPYKCPECGKSFSTSGELVRHQRTHTGEKPYKCPECGKSFSREDNLHTHQRTHTGEKPYKCPECGKSFSQRAHLERHQRTHTGEKPYKCPECGKSFSTSGHLVRHQRTHTGEKPYKCPECGKSFSDCRDLARHQRTHTGEKPYKCPECGKSFSSKKHLAEHQRTHTGEKPTGKKTS

SEQ ID NO: 1902 - protein, 209 aa, Artificial Sequence
  source: /note="Description of Artificial Sequence: Synthetic polypeptide"
LEPGEKPYKCPECGKSFSTTGNLTVHQRTHTGEKPYKCPECGKSFSTSGELVRHQRTHTGEKPYKCPECGKSFSTSGHLVRHQRTHTGEKPYKCPECGKSFSRSDKLTEHQRTHTGEKPYKCPECGKSFSDKKDLTRHQRTHTGEKPYKCPECGKSFSDPGNLVRHQRTHTGEKPYKCPECGKSFSTSGELVRHQRTHTGEKPTGKKTS

SEQ ID NO: 1903 - protein, 209 aa, Artificial Sequence
  source: /note="Description of Artificial Sequence: Synthetic polypeptide"
LEPGEKPYKCPECGKSFSTSGELVRHQRTHTGEKPYKCPECGKSFSTSGHLVRHQRTHTGEKPYKCPECGKSFSRSDKLTEHQRTHTGEKPYKCPECGKSFSDKKDLTRHQRTHTGEKPYKCPECGKSFSDPGNLVRHQRTHTGEKPYKCPECGKSFSTSGELVRHQRTHTGEKPYKCPECGKSFSRNDALTEHQRTHTGEKPTGKKTS

SEQ ID NO: 1904 - protein, 209 aa, Artificial Sequence
  source: /note="Description of Artificial Sequence: Synthetic polypeptide"
LEPGEKPYKCPECGKSFSTHLDLIRHQRTHTGEKPYKCPECGKSFSQNSTLTEHQRTHTGEKPYKCPECGKSFSDCRDLARHQRTHTGEKPYKCPECGKSFSRSDKLVRHQRTHTGEKPYKCPECGKSFSTSGELVRHQRTHTGEKPYKCPECGKSFSTHLDLIRHQRTHTGEKPYKCPECGKSFSSPADLTRHQRTHTGEKPTGKKTS

SEQ ID NO: 1905 - protein, 209 aa, Artificial Sequence
  source: /note="Description of Artificial Sequence: Synthetic polypeptide"
LEPGEKPYKCPECGKSFSDCRDLARHQRTHTGEKPYKCPECGKSFSRSDKLVRHQRTHTGEKPYKCPECGKSFSTSGELVRHQRTHTGEKPYKCPECGKSFSTHLDLIRHQRTHTGEKPYKCPECGKSFSSPADLTRHQRTHTGEKPYKCPECGKSFSHKNALQNHQRTHTGEKPYKCPECGKSFSQNSTLTEHQRTHTGEKPTGKKTS

SEQ ID NO: 1906 - protein, 209 aa, Artificial Sequence
  source: /note="Description of Artificial Sequence: Synthetic polypeptide"
LEPGEKPYKCPECGKSFSQNSTLTEHQRTHTGEKPYKCPECGKSFSDCRDLARHQRTHTGEKPYKCPECGKSFSRSDKLVRHQRTHTGEKPYKCPECGKSFSTSGELVRHQRTHTGEKPYKCPECGKSFSTHLDLIRHQRTHTGEKPYKCPECGKSFSSPADLTRHQRTHTGEKPYKCPECGKSFSHKNALQNHQRTHTGEKPTGKKTS

SEQ ID NO: 1907 - protein, 209 aa, Artificial Sequence
  source: /note="Description of Artificial Sequence: Synthetic polypeptide"
LEPGEKPYKCPECGKSFSRSDKLVRHQRTHTGEKPYKCPECGKSFSTSGELVRHQRTHTGEKPYKCPECGKSFSTHLDLIRHQRTHTGEKPYKCPECGKSFSSPADLTRHQRTHTGEKPYKCPECGKSFSHKNALQNHQRTHTGEKPYKCPECGKSFSQNSTLTEHQRTHTGEKPYKCPECGKSFSRSDELVRHQRTHTGEKPTGKKTS

SEQ ID NO: 1908 - protein, 209 aa, Artificial Sequence
  source: /note="Description of Artificial Sequence: Synthetic polypeptide"
LEPGEKPYKCPECGKSFSTSGELVRHQRTHTGEKPYKCPECGKSFSTHLDLIRHQRTHTGEKPYKCPECGKSFSSPADLTRHQRTHTGEKPYKCPECGKSFSHKNALQNHQRTHTGEKPYKCPECGKSFSQNSTLTEHQRTHTGEKPYKCPECGKSFSRSDELVRHQRTHTGEKPYKCPECGKSFSRSDKLVRHQRTHTGEKPTGKKTS

SEQ ID NO: 1909 - protein, 209 aa, Artificial Sequence
  source: /note="Description of Artificial Sequence: Synthetic polypeptide"
LEPGEKPYKCPECGKSFSSKKALTEHQRTHTGEKPYKCPECGKSFSTHLDLIRHQRTHTGEKPYKCPECGKSFSQNSTLTEHQRTHTGEKPYKCPECGKSFSDCRDLARHQRTHTGEKPYKCPECGKSFSRSDKLVRHQRTHTGEKPYKCPECGKSFSTSGELVRHQRTHTGEKPYKCPECGKSFSTHLDLIRHQRTHTGEKPTGKKTS

SEQ ID NO: 1910 - protein, 209 aa, Artificial Sequence
  source: /note="Description of Artificial Sequence: Synthetic polypeptide"
LEPGEKPYKCPECGKSFSTHLDLIRHQRTHTGEKPYKCPECGKSFSSPADLTRHQRTHTGEKPYKCPECGKSFSHKNALQNHQRTHTGEKPYKCPECGKSFSQNSTLTEHQRTHTGEKPYKCPECGKSFSRSDELVRHQRTHTGEKPYKCPECGKSFSRSDKLVRHQRTHTGEKPYKCPECGKSFSSKKHLAEHQRTHTGEKPTGKKTS

SEQ ID NO: 1911 - protein, 209 aa, Artificial Sequence
  source: /note="Description of Artificial Sequence: Synthetic polypeptide"
LEPGEKPYKCPECGKSFSQNSTLTEHQRTHTGEKPYKCPECGKSFSRSDELVRHQRTHTGEKPYKCPECGKSFSRSDKLVRHQRTHTGEKPYKCPECGKSFSSKKHLAEHQRTHTGEKPYKCPECGKSFSSPADLTRHQRTHTGEKPYKCPECGKSFSRNDALTEHQRTHTGEKPYKCPECGKSFSRSDHLTTHQRTHTGEKPTGKKTS

SEQ ID NO: 1912 - protein, 209 aa, Artificial Sequence
  source: /note="Description of Artificial Sequence: Synthetic polypeptide"
LEPGEKPYKCPECGKSFSSPADLTRHQRTHTGEKPYKCPECGKSFSHKNALQNHQRTHTGEKPYKCPECGKSFSQNSTLTEHQRTHTGEKPYKCPECGKSFSRSDELVRHQRTHTGEKPYKCPECGKSFSRSDKLVRHQRTHTGEKPYKCPECGKSFSSKKHLAEHQRTHTGEKPYKCPECGKSFSSPADLTRHQRTHTGEKPTGKKTS

SEQ ID NO: 1913 - protein, 209 aa, Artificial Sequence
  source: /note="Description of Artificial Sequence: Synthetic polypeptide"
LEPGEKPYKCPECGKSFSHKNALQNHQRTHTGEKPYKCPECGKSFSQNSTLTEHQRTHTGEKPYKCPECGKSFSRSDELVRHQRTHTGEKPYKCPECGKSFSRSDKLVRHQRTHTGEKPYKCPECGKSFSSKKHLAEHQRTHTGEKPYKCPECGKSFSSPADLTRHQRTHTGEKPYKCPECGKSFSRNDALTEHQRTHTGEKPTGKKTS

SEQ ID NO: 1914 - protein, 209 aa, Artificial Sequence
  source: /note="Description of Artificial Sequence: Synthetic polypeptide"
LEPGEKPYKCPECGKSFSQSGHLTEHQRTHTGEKPYKCPECGKSFSSKKALTEHQRTHTGEKPYKCPECGKSFSTHLDLIRHQRTHTGEKPYKCPECGKSFSQNSTLTEHQRTHTGEKPYKCPECGKSFSDCRDLARHQRTHTGEKPYKCPECGKSFSRSDKLVRHQRTHTGEKPYKCPECGKSFSTSGELVRHQRTHTGEKPTGKKTS

SEQ ID NO: 1915 - protein, 209 aa, Artificial Sequence
  source: /note="Description of Artificial Sequence: Synthetic polypeptide"
LEPGEKPYKCPECGKSFSTSGNLTEHQRTHTGEKPYKCPECGKSFSTSGNLTEHQRTHTGEKPYKCPECGKSFSRSDHLTNHQRTHTGEKPYKCPECGKSFSDPGHLVRHQRTHTGEKPYKCPECGKSFSQSGNLTEHQRTHTGEKPYKCPECGKSFSQSSSLVRHQRTHTGEKPYKCPECGKSFSHKNALQNHQRTHTGEKPTGKKTS

SEQ ID NO: 1916 - protein, 209 aa, Artificial Sequence
  source: /note="Description of Artificial Sequence: Synthetic polypeptide"
LEPGEKPYKCPECGKSFSDPGNLVRHQRTHTGEKPYKCPECGKSFSTSGNLTEHQRTHTGEKPYKCPECGKSFSTSGNLTEHQRTHTGEKPYKCPECGKSFSRSDHLTNHQRTHTGEKPYKCPECGKSFSDPGHLVRHQRTHTGEKPYKCPECGKSFSQSGNLTEHQRTHTGEKPYKCPECGKSFSQSSSLVRHQRTHTGEKPTGKKTS

SEQ ID NO: 1917 - protein, 209 aa, Artificial Sequence
  source: /note="Description of Artificial Sequence: Synthetic polypeptide"
LEPGEKPYKCPECGKSFSQSGDLRRHQRTHTGEKPYKCPECGKSFSRADNLTEHQRTHTGEKPYKCPECGKSFSHRTTLTNHQRTHTGEKPYKCPECGKSFSTSHSLTEHQRTHTGEKPYKCPECGKSFSDKKDLTRHQRTHTGEKPYKCPECGKSFSDPGALVRHQRTHTGEKPYKCPECGKSFSHKNALQNHQRTHTGEKPTGKKTS

SEQ ID NO: 1918 - protein, 209 aa, Artificial Sequence
  source: /note="Description of Artificial Sequence: Synthetic polypeptide"
LEPGEKPYKCPECGKSFSRADNLTEHQRTHTGEKPYKCPECGKSFSHRTTLTNHQRTHTGEKPYKCPECGKSFSTSHSLTEHQRTHTGEKPYKCPECGKSFSDKKDLTRHQRTHTGEKPYKCPECGKSFSDPGALVRHQRTHTGEKPYKCPECGKSFSHKNALQNHQRTHTGEKPYKCPECGKSFSDCRDLARHQRTHTGEKPTGKKTS

SEQ ID NO: 1919 - protein, 209 aa, Artificial Sequence
  source: /note="Description of Artificial Sequence: Synthetic polypeptide"
LEPGEKPYKCPECGKSFSHRTTLTNHQRTHTGEKPYKCPECGKSFSTSHSLTEHQRTHTGEKPYKCPECGKSFSDKKDLTRHQRTHTGEKPYKCPECGKSFSDPGALVRHQRTHTGEKPYKCPECGKSFSHKNALQNHQRTHTGEKPYKCPECGKSFSDCRDLARHQRTHTGEKPYKCPECGKSFSQSGNLTEHQRTHTGEKPTGKKTS

SEQ ID NO: 1920 - protein, 209 aa, Artificial Sequence
  source: /note="Description of Artificial Sequence: Synthetic polypeptide"
LEPGEKPYKCPECGKSFSRNDTLTEHQRTHTGEKPYKCPECGKSFSTKNSLTEHQRTHTGEKPYKCPECGKSFSQNSTLTEHQRTHTGEKPYKCPECGKSFSERSHLREHQRTHTGEKPYKCPECGKSFSDPGNLVRHQRTHTGEKPYKCPECGKSFSTHLDLIRHQRTHTGEKPYKCPECGKSFSDPGHLVRHQRTHTGEKPTGKKTS

SEQ ID NO: 1921 - protein, 209 aa, Artificial Sequence
  source: /note="Description of Artificial Sequence: Synthetic polypeptide"
LEPGEKPYKCPECGKSFSQLAHLRAHQRTHTGEKPYKCPECGKSFSRNDTLTEHQRTHTGEKPYKCPECGKSFSTKNSLTEHQRTHTGEKPYKCPECGKSFSQNSTLTEHQRTHTGEKPYKCPECGKSFSERSHLREHQRTHTGEKPYKCPECGKSFSDPGNLVRHQRTHTGEKPYKCPECGKSFSTHLDLIRHQRTHTGEKPTGKKTS

SEQ ID NO: 1922 - protein, 209 aa, Artificial Sequence
  source: /note="Description of Artificial Sequence: Synthetic polypeptide"
LEPGEKPYKCPECGKSFSSKKHLAEHQRTHTGEKPYKCPECGKSFSQNSTLTEHQRTHTGEKPYKCPECGKSFSTTGALTEHQRTHTGEKPYKCPECGKSFSQAGHLASHQRTHTGEKPYKCPECGKSFSTSGNLTEHQRTHTGEKPYKCPECGKSFSTTGNLTVHQRTHTGEKPYKCPECGKSFSTSHSLTEHQRTHTGEKPTGKKTS

SEQ ID NO: 1923 - protein, 209 aa, Artificial Sequence
  source: /note="Description of Artificial Sequence: Synthetic polypeptide"
LEPGEKPYKCPECGKSFSTSGNLTEHQRTHTGEKPYKCPECGKSFSSKKHLAEHQRTHTGEKPYKCPECGKSFSRNDALTEHQRTHTGEKPYKCPECGKSFSRSDHLTNHQRTHTGEKPYKCPECGKSFSQKSSLIAHQRTHTGEKPYKCPECGKSFSRSDNLVRHQRTHTGEKPYKCPECGKSFSQSGDLRRHQRTHTGEKPTGKKTS

SEQ ID NO: 1924 - protein, 209 aa, Artificial Sequence
  source: /note="Description of Artificial Sequence: Synthetic polypeptide"
LEPGEKPYKCPECGKSFSDPGHLVRHQRTHTGEKPYKCPECGKSFSTSGNLTEHQRTHTGEKPYKCPECGKSFSSKKHLAEHQRTHTGEKPYKCPECGKSFSRNDALTEHQRTHTGEKPYKCPECGKSFSRSDHLTNHQRTHTGEKPYKCPECGKSFSQKSSLIAHQRTHTGEKPYKCPECGKSFSRSDNLVRHQRTHTGEKPTGKKTS

SEQ ID NO: 1925 - protein, 209 aa, Artificial Sequence
  source: /note="Description of Artificial Sequence: Synthetic polypeptide"
LEPGEKPYKCPECGKSFSTSHSLTEHQRTHTGEKPYKCPECGKSFSDPGHLVRHQRTHTGEKPYKCPECGKSFSTSGNLTEHQRTHTGEKPYKCPECGKSFSSKKHLAEHQRTHTGEKPYKCPECGKSFSRNDALTEHQRTHTGEKPYKCPECGKSFSRSDHLTNHQRTHTGEKPYKCPECGKSFSQKSSLIAHQRTHTGEKPTGKKTS

SEQ ID NO: 1926 - protein, 209 aa, Artificial Sequence
  source: /note="Description of Artificial Sequence: Synthetic polypeptide"
LEPGEKPYKCPECGKSFSQSGHLTEHQRTHTGEKPYKCPECGKSFSTSHSLTEHQRTHTGEKPYKCPECGKSFSDPGHLVRHQRTHTGEKPYKCPECGKSFSTSGNLTEHQRTHTGEKPYKCPECGKSFSSKKHLAEHQRTHTGEKPYKCPECGKSFSRNDALTEHQRTHTGEKPYKCPECGKSFSRSDHLTNHQRTHTGEKPTGKKTS

SEQ ID NO: 1927 - protein, 209 aa, Artificial Sequence
  source: /note="Description of Artificial Sequence: Synthetic polypeptide"
LEPGEKPYKCPECGKSFSRSDHLTTHQRTHTGEKPYKCPECGKSFSTSHSLTEHQRTHTGEKPYKCPECGKSFSDCRDLARHQRTHTGEKPYKCPECGKSFSTSGELVRHQRTHTGEKPYKCPECGKSFSRKDNLKNHQRTHTGEKPYKCPECGKSFSTSGNLVRHQRTHTGEKPYKCPECGKSFSQLAHLRAHQRTHTGEKPTGKKTS

SEQ ID NO: 1928 - protein, 209 aa, Artificial Sequence
  source: /note="Description of Artificial Sequence: Synthetic polypeptide"
LEPGEKPYKCPECGKSFSQRANLRAHQRTHTGEKPYKCPECGKSFSTKNSLTEHQRTHTGEKPYKCPECGKSFSQRANLRAHQRTHTGEKPYKCPECGKSFSREDNLHTHQRTHTGEKPYKCPECGKSFSHKNALQNHQRTHTGEKPYKCPECGKSFSRTDTLRDHQRTHTGEKPYKCPECGKSFSSKKHLAEHQRTHTGEKPTGKKTS

SEQ ID NO: 1929 - protein, 209 aa, Artificial Sequence
  source: /note="Description of Artificial Sequence: Synthetic polypeptide"
LEPGEKPYKCPECGKSFSTKNSLTEHQRTHTGEKPYKCPECGKSFSQRANLRAHQRTHTGEKPYKCPECGKSFSREDNLHTHQRTHTGEKPYKCPECGKSFSHKNALQNHQRTHTGEKPYKCPECGKSFSRTDTLRDHQRTHTGEKPYKCPECGKSFSSKKHLAEHQRTHTGEKPYKCPECGKSFSRSDHLTTHQRTHTGEKPTGKKTS

SEQ ID NO: 1930 - protein, 209 aa, Artificial Sequence
  source: /note="Description of Artificial Sequence: Synthetic polypeptide"
LEPGEKPYKCPECGKSFSQRANLRAHQRTHTGEKPYKCPECGKSFSREDNLHTHQRTHTGEKPYKCPECGKSFSHKNALQNHQRTHTGEKPYKCPECGKSFSRTDTLRDHQRTHTGEKPYKCPECGKSFSSKKHLAEHQRTHTGEKPYKCPECGKSFSRSDHLTTHQRTHTGEKPYKCPECGKSFSTSHSLTEHQRTHTGEKPTGKKTS

SEQ ID NO: 1931 - protein, 209 aa, Artificial Sequence
  source: /note="Description of Artificial Sequence: Synthetic polypeptide"
LEPGEKPYKCPECGKSFSREDNLHTHQRTHTGEKPYKCPECGKSFSHKNALQNHQRTHTGEKPYKCPECGKSFSRTDTLRDHQRTHTGEKPYKCPECGKSFSSKKHLAEHQRTHTGEKPYKCPECGKSFSRSDHLTTHQRTHTGEKPYKCPECGKSFSTSHSLTEHQRTHTGEKPYKCPECGKSFSDCRDLARHQRTHTGEKPTGKKTS

SEQ ID NO: 1932 - protein, 209 aa, Artificial Sequence
  source: /note="Description of Artificial Sequence: Synthetic polypeptide"
LEPGEKPYKCPECGKSFSSKKHLAEHQRTHTGEKPYKCPECGKSFSRSDHLTTHQRTHTGEKPYKCPECGKSFSTSHSLTEHQRTHTGEKPYKCPECGKSFSDCRDLARHQRTHTGEKPYKCPECGKSFSTSGELVRHQRTHTGEKPYKCPECGKSFSRKDNLKNHQRTHTGEKPYKCPECGKSFSTSGNLVRHQRTHTGEKPTGKKTS

SEQ ID NO: 1933 - protein, 209 aa, Artificial Sequence
  source: /note="Description of Artificial Sequence: Synthetic polypeptide"
LEPGEKPYKCPECGKSFSHKNALQNHQRTHTGEKPYKCPECGKSFSRTDTLRDHQRTHTGEKPYKCPECGKSFSSKKHLAEHQRTHTGEKPYKCPECGKSFSRSDHLTTHQRTHTGEKPYKCPECGKSFSTSHSLTEHQRTHTGEKPYKCPECGKSFSDCRDLARHQRTHTGEKPYKCPECGKSFSTSGELVRHQRTHTGEKPTGKKTS

SEQ ID NO: 1934 - protein, 209 aa, Artificial Sequence
  source: /note="Description of Artificial Sequence: Synthetic polypeptide"
LEPGEKPYKCPECGKSFSRTDTLRDHQRTHTGEKPYKCPECGKSFSSKKHLAEHQRTHTGEKPYKCPECGKSFSRSDHLTTHQRTHTGEKPYKCPECGKSFSTSHSLTEHQRTHTGEKPYKCPECGKSFSDCRDLARHQRTHTGEKPYKCPECGKSFSTSGELVRHQRTHTGEKPYKCPECGKSFSRKDNLKNHQRTHTGEKPTGKKTS

SEQ ID NO: 1935 - protein, 209 aa, Artificial Sequence
  source: /note="Description of Artificial Sequence: Synthetic polypeptide"
LEPGEKPYKCPECGKSFSSKKHLAEHQRTHTGEKPYKCPECGKSFSRSDHLTNHQRTHTGEKPYKCPECGKSFSSKKHLAEHQRTHTGEKPYKCPECGKSFSTTGNLTVHQRTHTGEKPYKCPECGKSFSQNSTLTEHQRTHTGEKPYKCPECGKSFSDSGNLRVHQRTHTGEKPYKCPECGKSFSQLAHLRAHQRTHTGEKPTGKKTS

SEQ ID NO: 1936 - protein, 209 aa, Artificial Sequence
  source: /note="Description of Artificial Sequence: Synthetic polypeptide"
LEPGEKPYKCPECGKSFSRADNLTEHQRTHTGEKPYKCPECGKSFSSKKHLAEHQRTHTGEKPYKCPECGKSFSRSDHLTNHQRTHTGEKPYKCPECGKSFSSKKHLAEHQRTHTGEKPYKCPECGKSFSTTGNLTVHQRTHTGEKPYKCPECGKSFSQNSTLTEHQRTHTGEKPYKCPECGKSFSDSGNLRVHQRTHTGEKPTGKKTS

SEQ ID NO: 1937 - protein, 209 aa, Artificial Sequence
  source: /note="Description of Artificial Sequence: Synthetic polypeptide"
LEPGEKPYKCPECGKSFSRRDELNVHQRTHTGEKPYKCPECGKSFSRADNLTEHQRTHTGEKPYKCPECGKSFSSKKHLAEHQRTHTGEKPYKCPECGKSFSRSDHLTNHQRTHTGEKPYKCPECGKSFSSKKHLAEHQRTHTGEKPYKCPECGKSFSTTGNLTVHQRTHTGEKPYKCPECGKSFSQNSTLTEHQRTHTGEKPTGKKTS

SEQ ID NO: 1938 - protein, 209 aa, Artificial Sequence
  source: /note="Description of Artificial Sequence: Synthetic polypeptide"
LEPGEKPYKCPECGKSFSTSHSLTEHQRTHTGEKPYKCPECGKSFSRRDELNVHQRTHTGEKPYKCPECGKSFSRADNLTEHQRTHTGEKPYKCPECGKSFSSKKHLAEHQRTHTGEKPYKCPECGKSFSRSDHLTNHQRTHTGEKPYKCPECGKSFSSKKHLAEHQRTHTGEKPYKCPECGKSFSTTGNLTVHQRTHTGEKPTGKKTS

SEQ ID NO: 1939 - protein, 209 aa, Artificial Sequence
  source: /note="Description of Artificial Sequence: Synthetic polypeptide"
LEPGEKPYKCPECGKSFSTTGALTEHQRTHTGEKPYKCPECGKSFSTTGNLTVHQRTHTGEKPYKCPECGKSFSDCRDLARHQRTHTGEKPYKCPECGKSFSTSGNLVRHQRTHTGEKPYKCPECGKSFSTSHSLTEHQRTHTGEKPYKCPECGKSFSDCRDLARHQRTHTGEKPYKCPECGKSFSRADNLTEHQRTHTGEKPTGKKTS

SEQ ID NO: 1940 - protein, 209 aa, Artificial Sequence
  source: /note="Description of Artificial Sequence: Synthetic polypeptide"
LEPGEKPYKCPECGKSFSTKNSLTEHQRTHTGEKPYKCPECGKSFSTSGNLVRHQRTHTGEKPYKCPECGKSFSRNDALTEHQRTHTGEKPYKCPECGKSFSTTGALTEHQRTHTGEKPYKCPECGKSFSTTGNLTVHQRTHTGEKPYKCPECGKSFSDCRDLARHQRTHTGEKPYKCPECGKSFSTSGNLVRHQRTHTGEKPTGKKTS

SEQ ID NO: 1941 - protein, 209 aa, Artificial Sequence
  source: /note="Description of Artificial Sequence: Synthetic polypeptide"
LEPGEKPYKCPECGKSFSRNDALTEHQRTHTGEKPYKCPECGKSFSTTGALTEHQRTHTGEKPYKCPECGKSFSTTGNLTVHQRTHTGEKPYKCPECGKSFSDCRDLARHQRTHTGEKPYKCPECGKSFSTSGNLVRHQRTHTGEKPYKCPECGKSFSTSHSLTEHQRTHTGEKPYKCPECGKSFSDCRDLARHQRTHTGEKPTGKKTS

SEQ ID NO: 1942 - protein, 209 aa, Artificial Sequence
  source: /note="Description of Artificial Sequence: Synthetic polypeptide"
LEPGEKPYKCPECGKSFSTSGNLVRHQRTHTGEKPYKCPECGKSFSRNDALTEHQRTHTGEKPYKCPECGKSFSTTGALTEHQRTHTGEKPYKCPECGKSFSTTGNLTVHQRTHTGEKPYKCPECGKSFSDCRDLARHQRTHTGEKPYKCPECGKSFSTSGNLVRHQRTHTGEKPYKCPECGKSFSTSHSLTEHQRTHTGEKPTGKKTS

SEQ ID NO: 1943 - protein, 209 aa, Artificial Sequence
  source: /note="Description of Artificial Sequence: Synthetic polypeptide"
LEPGEKPYKCPECGKSFSQRAHLERHQRTHTGEKPYKCPECGKSFSTHLDLIRHQRTHTGEKPYKCPECGKSFSRSDHLTTHQRTHTGEKPYKCPECGKSFSQSSNLVRHQRTHTGEKPYKCPECGKSFSQSGDLRRHQRTHTGEKPYKCPECGKSFSQRAHLERHQRTHTGEKPYKCPECGKSFSRNDALTEHQRTHTGEKPTGKKTS

SEQ ID NO: 1944 - protein, 209 aa, Artificial Sequence
  source: /note="Description of Artificial Sequence: Synthetic polypeptide"
LEPGEKPYKCPECGKSFSTHLDLIRHQRTHTGEKPYKCPECGKSFSRSDHLTTHQRTHTGEKPYKCPECGKSFSQSSNLVRHQRTHTGEKPYKCPECGKSFSQSGDLRRHQRTHTGEKPYKCPECGKSFSQRAHLERHQRTHTGEKPYKCPECGKSFSRNDALTEHQRTHTGEKPYKCPECGKSFSSKKHLAEHQRTHTGEKPTGKKTS

SEQ ID NO: 1945 - protein, 209 aa, Artificial Sequence
  source: /note="Description of Artificial Sequence: Synthetic polypeptide"
LEPGEKPYKCPECGKSFSHRTTLTNHQRTHTGEKPYKCPECGKSFSQRAHLERHQRTHTGEKPYKCPECGKSFSTHLDLIRHQRTHTGEKPYKCPECGKSFSRSDHLTTHQRTHTGEKPYKCPECGKSFSQSSNLVRHQRTHTGEKPYKCPECGKSFSQSGDLRRHQRTHTGEKPYKCPECGKSFSQRAHLERHQRTHTGEKPTGKKTS

SEQ ID NO: 1946 - protein, 209 aa, Artificial Sequence
  source: /note="Description of Artificial Sequence: Synthetic polypeptide"
LEPGEKPYKCPECGKSFSRSDHLTTHQRTHTGEKPYKCPECGKSFSQSSNLVRHQRTHTGEKPYKCPECGKSFSQSGDLRRHQRTHTGEKPYKCPECGKSFSQRAHLERHQRTHTGEKPYKCPECGKSFSRNDALTEHQRTHTGEKPYKCPECGKSFSSKKHLAEHQRTHTGEKPYKCPECGKSFSTSGSLVRHQRTHTGEKPTGKKTS

SEQ ID NO: 1947 - protein, 209 aa, Artificial Sequence
  source: /note="Description of Artificial Sequence: Synthetic polypeptide"
LEPGEKPYKCPECGKSFSQSSNLVRHQRTHTGEKPYKCPECGKSFSQSGDLRRHQRTHTGEKPYKCPECGKSFSQRAHLERHQRTHTGEKPYKCPECGKSFSRNDALTEHQRTHTGEKPYKCPECGKSFSSKKHLAEHQRTHTGEKPYKCPECGKSFSTSGSLVRHQRTHTGEKPYKCPECGKSFSRNDTLTEHQRTHTGEKPTGKKTS

SEQ ID NO: 1948 - protein, 209 aa, Artificial Sequence
  source: /note="Description of Artificial Sequence: Synthetic polypeptide"
LEPGEKPYKCPECGKSFSQSSNLVRHQRTHTGEKPYKCPECGKSFSRNDALTEHQRTHTGEKPYKCPECGKSFSQRAHLERHQRTHTGEKPYKCPECGKSFSTTGNLTVHQRTHTGEKPYKCPECGKSFSRADNLTEHQRTHTGEKPYKCPECGKSFSRSDNLVRHQRTHTGEKPYKCPECGKSFSRSDHLTTHQRTHTGEKPTGKKTS

SEQ ID NO: 1949 - protein, 209 aa, Artificial Sequence
  source: /note="Description of Artificial Sequence: Synthetic polypeptide"
LEPGEKPYKCPECGKSFSRNDALTEHQRTHTGEKPYKCPECGKSFSQRAHLERHQRTHTGEKPYKCPECGKSFSTTGNLTVHQRTHTGEKPYKCPECGKSFSRADNLTEHQRTHTGEKPYKCPECGKSFSRSDNLVRHQRTHTGEKPYKCPECGKSFSRSDHLTTHQRTHTGEKPYKCPECGKSFSSKKHLAEHQRTHTGEKPTGKKTS

SEQ ID NO: 1950 - protein, 209 aa, Artificial Sequence
  source: /note="Description of Artificial Sequence: Synthetic polypeptide"
LEPGEKPYKCPECGKSFSRADNLTEHQRTHTGEKPYKCPECGKSFSDPGHLVRHQRTHTGEKPYKCPECGKSFSRSDNLVRHQRTHTGEKPYKCPECGKSFSRSDHLTTHQRTHTGEKPYKCPECGKSFSTSGSLVRHQRTHTGEKPYKCPECGKSFSQSSNLVRHQRTHTGEKPYKCPECGKSFSRNDALTEHQRTHTGEKPTGKKTS

SEQ ID NO: 1951 - protein, 209 aa, Artificial Sequence
  source: /note="Description of Artificial Sequence: Synthetic polypeptide"
LEPGEKPYKCPECGKSFSHKNALQNHQRTHTGEKPYKCPECGKSFSRADNLTEHQRTHTGEKPYKCPECGKSFSDPGHLVRHQRTHTGEKPYKCPECGKSFSRSDNLVRHQRTHTGEKPYKCPECGKSFSRSDHLTTHQRTHTGEKPYKCPECGKSFSTSGSLVRHQRTHTGEKPYKCPECGKSFSQSSNLVRHQRTHTGEKPTGKKTS

SEQ ID NO: 1952 - protein, 209 aa, Artificial Sequence
  source: /note="Description of Artificial Sequence: Synthetic polypeptide"
LEPGEKPYKCPECGKSFSSKKALTEHQRTHTGEKPYKCPECGKSFSHKNALQNHQRTHTGEKPYKCPECGKSFSRADNLTEHQRTHTGEKPYKCPECGKSFSDPGHLVRHQRTHTGEKPYKCPECGKSFSRSDNLVRHQRTHTGEKPYKCPECGKSFSRSDHLTTHQRTHTGEKPYKCPECGKSFSTSGSLVRHQRTHTGEKPTGKKTS

SEQ ID NO: 1953 - protein, 209 aa, Artificial Sequence
  source: /note="Description of Artificial Sequence: Synthetic polypeptide"
LEPGEKPYKCPECGKSFSTSGSLVRHQRTHTGEKPYKCPECGKSFSQSSNLVRHQRTHTGEKPYKCPECGKSFSRNDALTEHQRTHTGEKPYKCPECGKSFSQRAHLERHQRTHTGEKPYKCPECGKSFSTTGNLTVHQRTHTGEKPYKCPECGKSFSRADNLTEHQRTHTGEKPYKCPECGKSFSRSDNLVRHQRTHTGEKPTGKKTS

SEQ ID NO: 1954 - protein, 209 aa, Artificial Sequence
  source: /note="Description of Artificial Sequence: Synthetic polypeptide"
LEPGEKPYKCPECGKSFSRSDNLVRHQRTHTGEKPYKCPECGKSFSRSDHLTTHQRTHTGEKPYKCPECGKSFSTSGSLVRHQRTHTGEKPYKCPECGKSFSQSSNLVRHQRTHTGEKPYKCPECGKSFSRNDALTEHQRTHTGEKPYKCPECGKSFSQRAHLERHQRTHTGEKPYKCPECGKSFSTTGNLTVHQRTHTGEKPTGKKTS

SEQ ID NO: 1955 - protein, 209 aa, Artificial Sequence
  source: /note="Description of Artificial Sequence: Synthetic polypeptide"
LEPGEKPYKCPECGKSFSDPGHLVRHQRTHTGEKPYKCPECGKSFSRSDNLVRHQRTHTGEKPYKCPECGKSFSRSDHLTTHQRTHTGEKPYKCPECGKSFSTSGSLVRHQRTHTGEKPYKCPECGKSFSQSSNLVRHQRTHTGEKPYKCPECGKSFSRNDALTEHQRTHTGEKPYKCPECGKSFSQRAHLERHQRTHTGEKPTGKKTS

SEQ ID NO: 1956 - protein, 209 aa, Artificial Sequence
  source: /note="Description of Artificial Sequence: Synthetic polypeptide"
LEPGEKPYKCPECGKSFSRSDHLTTHQRTHTGEKPYKCPECGKSFSTSGSLVRHQRTHTGEKPYKCPECGKSFSQSSNLVRHQRTHTGEKPYKCPECGKSFSRNDALTEHQRTHTGEKPYKCPECGKSFSQRAHLERHQRTHTGEKPYKCPECGKSFSTTGNLTVHQRTHTGEKPYKCPECGKSFSRADNLTEHQRTHTGEKPTGKKTS

SEQ ID NO: 1957 - protein, 209 aa, Artificial Sequence
  source: /note="Description of Artificial Sequence: Synthetic polypeptide"
LEPGEKPYKCPECGKSFSRSDHLTTHQRTHTGEKPYKCPECGKSFSDPGNLVRHQRTHTGEKPYKCPECGKSFSRRDELNVHQRTHTGEKPYKCPECGKSFSQLAHLRAHQRTHTGEKPYKCPECGKSFSERSHLREHQRTHTGEKPYKCPECGKSFSRSDKLVRHQRTHTGEKPYKCPECGKSFSTKNSLTEHQRTHTGEKPTGKKTS

SEQ ID NO: 1958 - protein, 209 aa, Artificial Sequence
  source: /note="Description of Artificial Sequence: Synthetic polypeptide"
LEPGEKPYKCPECGKSFSRKDNLKNHQRTHTGEKPYKCPECGKSFSRSDHLTTHQRTHTGEKPYKCPECGKSFSDPGNLVRHQRTHTGEKPYKCPECGKSFSRRDELNVHQRTHTGEKPYKCPECGKSFSQLAHLRAHQRTHTGEKPYKCPECGKSFSERSHLREHQRTHTGEKPYKCPECGKSFSRSDKLVRHQRTHTGEKPTGKKTS

SEQ ID NO: 1959 - protein, 209 aa, Artificial Sequence
  source: /note="Description of Artificial Sequence: Synthetic polypeptide"
  MOD_RES (1)..(9): Any amino acid
  MOD_RES (11)..(12): Any amino acid
  MOD_RES (14)..(18): Any amino acid
  MOD_RES (27)..(29): Any amino acid
  MOD_RES (31)..(37): Any amino acid
  MOD_RES (39)..(40): Any amino acid
  MOD_RES (42)..(46): Any amino acid
  MOD_RES (55)..(57): Any amino acid
  MOD_RES (59)..(65): Any amino acid
  MOD_RES (67)..(68): Any amino acid
  MOD_RES (70)..(74): Any amino acid
  MOD_RES (83)..(85): Any amino acid
  MOD_RES (87)..(93): Any amino acid
  MOD_RES (95)..(96): Any amino acid
  MOD_RES (98)..(102): Any amino acid
  MOD_RES (111)..(113): Any amino acid
  MOD_RES (115)..(121): Any amino acid
  MOD_RES (123)..(124): Any amino acid
  MOD_RES (126)..(130): Any amino acid
  MOD_RES (139)..(141): Any amino acid
  MOD_RES (143)..(149): Any amino acid
  MOD_RES (151)..(152): Any amino acid
  MOD_RES (154)..(158): Any amino acid
  MOD_RES (167)..(169): Any amino acid
  MOD_RES (171)..(177): Any amino acid
  MOD_RES (179)..(180): Any amino acid
  MOD_RES (182)..(186): Any amino acid
  MOD_RES (195)..(197): Any amino acid
  MOD_RES (199)..(209): Any amino acid
XXXXXXXXXCXXCXXXXXTSHSLTEHXXXHXXXXXXXCXXCXXXXXRSDKLVRHXXXHXXXXXXXCXXCXXXXXTKNSLTEHXXXHXXXXXXXCXXCXXXXXRADNLTEHXXXHXXXXXXXCXXCXXXXXERSHLREHXXXHXXXXXXXCXXCXXXXXRSDHLTTHXXXHXXXXXXXCXXCXXXXXQLAHLRAHXXXHXXXXXXXXXXX

SEQ ID NO: 1960 - protein, 209 aa, Artificial Sequence
  source: /note="Description of Artificial Sequence: Synthetic polypeptide"
  MOD_RES (1)..(9): Any amino acid
  MOD_RES (11)..(12): Any amino acid
  MOD_RES (14)..(18): Any amino acid
  MOD_RES (27)..(29): Any amino acid
  MOD_RES (31)..(37): Any amino acid
  MOD_RES (39)..(40): Any amino acid
  MOD_RES (42)..(46): Any amino acid
  MOD_RES (55)..(57): Any amino acid
  MOD_RES (59)..(65): Any amino acid
  MOD_RES (67)..(68): Any amino acid
  MOD_RES (70)..(74): Any amino acid
  MOD_RES (83)..(85): Any amino acid
  MOD_RES (87)..(93): Any amino acid
  MOD_RES (95)..(96): Any amino acid
  MOD_RES (98)..(102): Any amino acid
  MOD_RES (111)..(113): Any amino acid
  MOD_RES (115)..(121): Any amino acid
  MOD_RES (123)..(124): Any amino acid
  MOD_RES (126)..(130): Any amino acid
  MOD_RES (139)..(141): Any amino acid
  MOD_RES (143)..(149): Any amino acid
  MOD_RES (151)..(152): Any amino acid
  MOD_RES (154)..(158): Any amino acid
  MOD_RES (167)..(169): Any amino acid
  MOD_RES (171)..(177): Any amino acid
  MOD_RES (179)..(180): Any amino acid
  MOD_RES (182)..(186): Any amino acid
  MOD_RES (195)..(197): Any amino acid
  MOD_RES (199)..(209): Any amino acid
XXXXXXXXXCXXCXXXXXRNDALTEHXXXHXXXXXXXCXXCXXXXXSPADLTRHXXXHXXXXXXXCXXCXXXXXQSSNLVRHXXXHXXXXXXXCXXCXXXXXTSHSLTEHXXXHXXXXXXXCXXCXXXXXRSDKLVRHXXXHXXXXXXXCXXCXXXXXTKNSLTEHXXXHXXXXXXXCXXCXXXXXRADNLTEHXXXHXXXXXXXXXXX

SEQ ID NO: 1961 - protein, 209 aa, Artificial Sequence
  source: /note="Description of Artificial Sequence: Synthetic polypeptide"
  MOD_RES (1)..(9): Any amino acid
  MOD_RES (11)..(12): Any amino acid
  MOD_RES (14)..(18): Any amino acid
  MOD_RES (27)..(29): Any amino acid
  MOD_RES (31)..(37): Any amino acid
  MOD_RES (39)..(40): Any amino acid
  MOD_RES (42)..(46): Any amino acid
  MOD_RES (55)..(57): Any amino acid
  MOD_RES (59)..(65): Any amino acid
  MOD_RES (67)..(68): Any amino acid
  MOD_RES (70)..(74): Any amino acid
  MOD_RES (83)..(85): Any amino acid
  MOD_RES (87)..(93): Any amino acid
  MOD_RES (95)..(96): Any amino acid
  MOD_RES (98)..(102): Any amino acid
  MOD_RES (111)..(113): Any amino acid
  MOD_RES (115)..(121): Any amino acid
  MOD_RES (123)..(124): Any amino acid
  MOD_RES (126)..(130): Any amino acid
  MOD_RES (139)..(141): Any amino acid
  MOD_RES (143)..(149): Any amino acid
  MOD_RES (151)..(152): Any amino acid
  MOD_RES (154)..(158): Any amino acid
  MOD_RES (167)..(169): Any amino acid
  MOD_RES (171)..(177): Any amino acid
  MOD_RES (179)..(180): Any amino acid
  MOD_RES (182)..(186): Any amino acid
  MOD_RES (195)..(197): Any amino acid
  MOD_RES (199)..(209): Any amino acid
XXXXXXXXXCXXCXXXXXSPADLTRHXXXHXXXXXXXCXXCXXXXXQSSNLVRHXXXHXXXXXXXCXXCXXXXXTSHSLTEHXXXHXXXXXXXCXXCXXXXXRSDKLVRHXXXHXXXXXXXCXXCXXXXXTKNSLTEHXXXHXXXXXXXCXXCXXXXXRADNLTEHXXXHXXXXXXXCXXCXXXXXERSHLREHXXXHXXXXXXXXXXX

SEQ ID NO: 1962 - protein, 209 aa, Artificial Sequence
  source: /note="Description of Artificial Sequence: Synthetic polypeptide"
  MOD_RES (1)..(9): Any amino acid
  MOD_RES (11)..(12): Any amino acid
  MOD_RES (14)..(18): Any amino acid
  MOD_RES (27)..(29): Any amino acid
  MOD_RES (31)..(37): Any amino acid
  MOD_RES (39)..(40): Any amino acid
  MOD_RES (42)..(46): Any amino acid
  MOD_RES (55)..(57): Any amino acid
  MOD_RES (59)..(65): Any amino acid
  MOD_RES (67)..(68): Any amino acid
  MOD_RES (70)..(74): Any amino acid
  MOD_RES (83)..(85): Any amino acid
  MOD_RES (87)..(93): Any amino acid
  MOD_RES (95)..(96): Any amino acid
  MOD_RES (98)..(102): Any amino acid
  MOD_RES (111)..(113): Any amino acid
  MOD_RES (115)..(121): Any amino acid
  MOD_RES (123)..(124): Any amino acid
  MOD_RES (126)..(130): Any amino acid
  MOD_RES (139)..(141): Any amino acid
  MOD_RES (143)..(149): Any amino acid
  MOD_RES (151)..(152): Any amino acid
  MOD_RES (154)..(158): Any amino acid
  MOD_RES (167)..(169): Any amino acid
  MOD_RES (171)..(177): Any amino acid
  MOD_RES (179)..(180): Any amino acid
  MOD_RES (182)..(186): Any amino acid
  MOD_RES (195)..(197): Any amino acid
  MOD_RES (199)..(209): Any amino acid
XXXXXXXXXCXXCXXXXXQSSNLVRHXXXHXXXXXXXCXXCXXXXXTSHSLTEHXXXHXXXXXXXCXXCXXXXXRSDKLVRHXXXHXXXXXXXCXXCXXXXXTKNSLTEHXXXHXXXXXXXCXXCXXXXXRADNLTEHXXXHXXXXXXXCXXCXXXXXERSHLREHXXXHXXXXXXXCXXCXXXXXRSDHLTTHXXXHXXXXXXXXXXX

SEQ ID NO: 1963 - protein, 209 aa, Artificial Sequence
  source: /note="Description of Artificial Sequence: Synthetic polypeptide"
  MOD_RES (1)..(9): Any amino acid
  MOD_RES (11)..(12): Any amino acid
  MOD_RES (14)..(18): Any amino acid
  MOD_RES (27)..(29): Any amino acid
  MOD_RES (31)..(37): Any amino acid
  MOD_RES (39)..(40): Any amino acid
  MOD_RES (42)..(46): Any amino acid
  MOD_RES (55)..(57): Any amino acid
  MOD_RES (59)..(65): Any amino acid
  MOD_RES (67)..(68): Any amino acid
  MOD_RES (70)..(74): Any amino acid
  MOD_RES (83)..(85): Any amino acid
  MOD_RES (87)..(93): Any amino acid
  MOD_RES (95)..(96): Any amino acid
  MOD_RES (98)..(102): Any amino acid
  MOD_RES (111)..(113): Any amino acid
  MOD_RES (115)..(121): Any amino acid
  MOD_RES (123)..(124): Any amino acid
  MOD_RES (126)..(130): Any amino acid
  MOD_RES (139)..(141): Any amino acid
  MOD_RES (143)..(149): Any amino acid
  MOD_RES (151)..(152): Any amino acid
  MOD_RES (154)..(158): Any amino acid
  MOD_RES (167)..(169): Any amino acid
  MOD_RES (171)..(177): Any amino acid
  MOD_RES (179)..(180): Any amino acid
  MOD_RES (182)..(186): Any amino acid
  MOD_RES (195)..(197): Any amino acid
  MOD_RES (199)..(209): Any amino acid
XXXXXXXXXCXXCXXXXXRSDKLVRHXXXHXXXXXXXCXXCXXXXXTKNSLTEHXXXHXXXXXXXCXXCXXXXXRADNLTEHXXXHXXXXXXXCXXCXXXXXERSHLREHXXXHXXXXXXXCXXCXXXXXRSDHLTTHXXXHXXXXXXXCXXCXXXXXQLAHLRAHXXXHXXXXXXXCXXCXXXXXRNDTLTEHXXXHXXXXXXXXXXX

SEQ ID NO: 1964 - protein, 209 aa, Artificial Sequence
  source: /note="Description of Artificial Sequence: Synthetic polypeptide"
  MOD_RES (1)..(9): Any amino acid
  MOD_RES (11)..(12): Any amino acid
  MOD_RES (14)..(18): Any amino acid
  MOD_RES (27)..(29): Any amino acid
  MOD_RES (31)..(37): Any amino acid
  MOD_RES (39)..(40): Any amino acid
  MOD_RES (42)..(46): Any amino acid
  MOD_RES (55)..(57): Any amino acid
  MOD_RES (59)..(65): Any amino acid
  MOD_RES (67)..(68): Any amino acid
  MOD_RES (70)..(74): Any amino acid
  MOD_RES (83)..(85): Any amino acid
  MOD_RES (87)..(93): Any amino acid
  MOD_RES (95)..(96): Any amino acid
  MOD_RES (98)..(102): Any amino acid
  MOD_RES (111)..(113): Any amino acid
  MOD_RES (115)..(121): Any amino acid
  MOD_RES (123)..(124): Any amino acid
  MOD_RES (126)..(130): Any amino acid
  MOD_RES (139)..(141): Any amino acid
  MOD_RES (143)..(149): Any amino acid
  MOD_RES (151)..(152): Any amino acid
  MOD_RES (154)..(158): Any amino acid
  MOD_RES (167)..(169): Any amino acid
  MOD_RES (171)..(177): Any amino acid
  MOD_RES (179)..(180): Any amino acid
  MOD_RES (182)..(186): Any amino acid
  MOD_RES (195)..(197): Any amino acid
  MOD_RES (199)..(209): Any amino acid
XXXXXXXXXCXXCXXXXXTKNSLTEHXXXHXXXXXXXCXXCXXXXXRADNLTEHXXXHXXXXXXXCXXCXXXXXERSHLREHXXXHXXXXXXXCXXCXXXXXRSDHLTTHXXXHXXXXXXXCXXCXXXXXQLAHLRAHXXXHXXXXXXXCXXCXXXXXRNDTLTEHXXXHXXXXXXXCXXCXXXXXTTGNLTVHXXXHXXXXXXXXXXX

SEQ ID NO: 1965 - protein, 209 aa, Artificial Sequence
  source: /note="Description of Artificial Sequence: Synthetic polypeptide"
  MOD_RES (1)..(9): Any amino acid
  MOD_RES (11)..(12): Any amino acid
  MOD_RES (14)..(18): Any amino acid
  MOD_RES (27)..(29): Any amino acid
  MOD_RES (31)..(37): Any amino acid
  MOD_RES (39)..(40): Any amino acid
  MOD_RES (42)..(46): Any amino acid
  MOD_RES (55)..(57): Any amino acid
  MOD_RES (59)..(65): Any amino acid
  MOD_RES (67)..(68): Any amino acid
  MOD_RES (70)..(74): Any amino acid
  MOD_RES (83)..(85): Any amino acid
  MOD_RES (87)..(93): Any amino acid
  MOD_RES (95)..(96): Any amino acid
  MOD_RES (98)..(102): Any amino acid
  MOD_RES (111)..(113): Any amino acid
  MOD_RES (115)..(121): Any amino acid
  MOD_RES (123)..(124): Any amino acid
  MOD_RES (126)..(130): Any amino acid
  MOD_RES (139)..(141): Any amino acid
  MOD_RES (143)..(149): Any amino acid
  MOD_RES (151)..(152): Any amino acid
  MOD_RES (154)..(158): Any amino acid
  MOD_RES (167)..(169): Any amino acid
  MOD_RES (171)..(177): Any amino acid
  MOD_RES (179)..(180): Any amino acid
  MOD_RES (182)..(186): Any amino acid
  MOD_RES (195)..(197): Any amino acid
  MOD_RES (199)..(209): Any amino acid
XXXXXXXXXCXXCXXXXXTTGNLTVHXXXHXXXXXXXCXXCXXXXXQSSNLVRHXXXHXXXXXXXCXXCXXXXXRSDHLTTHXXXHXXXXXXXCXXCXXXXXQAGHLASHXXXHXXXXXXXCXXCXXXXXRRDELNVHXXXHXXXXXXXCXXCXXXXXQLAHLRAHXXXHXXXXXXXCXXCXXXXXRSDHLTNHXXXHXXXXXXXXXXX

SEQ ID NO: 1966 - protein, 209 aa, Artificial Sequence
  source: /note="Description of Artificial Sequence: Synthetic polypeptide"
  MOD_RES (1)..(9): Any amino acid
  MOD_RES (11)..(12): Any amino acid
  MOD_RES (14)..(18): Any amino acid
  MOD_RES (27)..(29): Any amino acid
  MOD_RES (31)..(37): Any amino acid
  MOD_RES (39)..(40): Any amino acid
  MOD_RES (42)..(46): Any amino acid
  MOD_RES (55)..(57): Any amino acid
  MOD_RES (59)..(65): Any amino acid
  MOD_RES (67)..(68): Any amino acid
  MOD_RES (70)..(74): Any amino acid
  MOD_RES (83)..(85): Any amino acid
  MOD_RES (87)..(93): Any amino acid
  MOD_RES (95)..(96): Any amino acid
  MOD_RES (98)..(102): Any amino acid
  MOD_RES (111)..(113): Any amino acid
  MOD_RES (115)..(121): Any amino acid
  MOD_RES (123)..(124): Any amino acid
  MOD_RES (126)..(130): Any amino acid
  MOD_RES (139)..(141): Any amino acid
  MOD_RES (143)..(149): Any amino acid
  MOD_RES (151)..(152): Any amino acid
  MOD_RES (154)..(158): Any amino acid
  MOD_RES (167)..(169): Any amino acid
  MOD_RES (171)..(177): Any amino acid
  MOD_RES (179)..(180): Any amino acid
  MOD_RES (182)..(186): Any amino acid
  MOD_RES (195)..(197): Any amino acid
  MOD_RES (199)..(209): Any amino acid
XXXXXXXXXCXXCXXXXXQSSNLVRHXXXHXXXXXXXCXXCXXXXXRSDHLTTHXXXHXXXXXXXCXXCXXXXXQAGHLASHXXXHXXXXXXXCXXCXXXXXRRDELNVHXXXHXXXXXXXCXXCXXXXXQLAHLRAHXXXHXXXXXXXCXXCXXXXXRSDHLTNHXXXHXXXXXXXCXXCXXXXXDSGNLRVHXXXHXXXXXXXXXXX

SEQ ID NO: 1967 - protein, 209 aa, Artificial Sequence
  source: /note="Description of Artificial Sequence: Synthetic polypeptide"
  MOD_RES (1)..(9): Any amino acid
  MOD_RES (11)..(12): Any amino acid
  MOD_RES (14)..(18): Any amino acid
  MOD_RES (27)..(29): Any amino acid
  MOD_RES (31)..(37): Any amino acid
  MOD_RES (39)..(40): Any amino acid
  MOD_RES (42)..(46): Any amino acid
  MOD_RES (55)..(57): Any amino acid
  MOD_RES (59)..(65): Any amino acid
  MOD_RES (67)..(68): Any amino acid
  MOD_RES (70)..(74): Any amino acid
  MOD_RES (83)..(85): Any amino acid
  MOD_RES (87)..(93): Any amino acid
  MOD_RES (95)..(96): Any amino acid
  MOD_RES (98)..(102): Any amino acid
  MOD_RES (111)..(113): Any amino acid
  MOD_RES (115)..(121): Any amino acid
  MOD_RES (123)..(124): Any amino acid
  MOD_RES (126)..(130): Any amino acid
  MOD_RES (139)..(141): Any amino acid
  MOD_RES (143)..(149): Any amino acid
  MOD_RES (151)..(152): Any amino acid
  MOD_RES (154)..(158): Any amino acid
  MOD_RES (167)..(169): Any amino acid
  MOD_RES (171)..(177): Any amino acid
  MOD_RES (179)..(180): Any amino acid
  MOD_RES (182)..(186): Any amino acid
  MOD_RES (195)..(197): Any amino acid
  MOD_RES (199)..(209): Any amino acid
XXXXXXXXXCXXCXXXXXRSDHLTTHXXXHXXXXXXXCXXCXXXXXQLAHLRAHXXXHXXXXXXXCXXCXXXXXRNDTLTEHXXXHXXXXXXXCXXCXXXXXTTGNLTVHXXXHXXXXXXXCXXCXXXXXQSSNLVRHXXXHXXXXXXXCXXCXXXXXRSDHLTTHXXXHXXXXXXXCXXCXXXXXQAGHLASHXXXHXXXXXXXXXXX

SEQ ID NO: 1968 - protein, 209 aa, Artificial Sequence
  source: /note="Description of Artificial Sequence: Synthetic polypeptide"
  MOD_RES (1)..(9): Any amino acid
  MOD_RES (11)..(12): Any amino acid
  MOD_RES (14)..(18): Any amino acid
  MOD_RES (27)..(29): Any amino acid
  MOD_RES (31)..(37): Any amino acid
  MOD_RES (39)..(40): Any amino acid
  MOD_RES (42)..(46): Any amino acid
  MOD_RES (55)..(57): Any amino acid
  MOD_RES (59)..(65): Any amino acid
  MOD_RES (67)..(68): Any amino acid
  MOD_RES (70)..(74): Any amino acid
  MOD_RES (83)..(85): Any amino acid
  MOD_RES (87)..(93): Any amino acid
  MOD_RES (95)..(96): Any amino acid
  MOD_RES (98)..(102): Any amino acid
  MOD_RES (111)..(113): Any amino acid
  MOD_RES (115)..(121): Any amino acid
  MOD_RES (123)..(124): Any amino acid
  MOD_RES (126)..(130): Any amino acid
  MOD_RES (139)..(141): Any amino acid
  MOD_RES (143)..(149): Any amino acid
  MOD_RES (151)..(152): Any amino acid
  MOD_RES (154)..(158): Any amino acid
  MOD_RES (167)..(169): Any amino acid
  MOD_RES (171)..(177): Any amino acid
  MOD_RES (179)..(180): Any amino acid
  MOD_RES (182)..(186): Any amino acid
  MOD_RES (195)..(197): Any amino acid
  MOD_RES (199)..(209): Any amino acid
XXXXXXXXXCXXCXXXXXRADNLTEHXXXHXXXXXXXCXXCXXXXXERSHLREHXXXHXXXXXXXCXXCXXXXXRSDHLTTHXXXHXXXXXXXCXXCXXXXXQLAHLRAHXXXHXXXXXXXCXXCXXXXXRNDTLTEHXXXHXXXXXXXCXXCXXXXXTTGNLTVHXXXHXXXXXXXCXXCXXXXXQSSNLVRHXXXHXXXXXXXXXXX

SEQ ID NO: 1969 - protein, 209 aa, Artificial Sequence
  source: /note="Description of Artificial Sequence: Synthetic polypeptide"
  MOD_RES (1)..(9): Any amino acid
  MOD_RES (11)..(12): Any amino acid
  MOD_RES (14)..(18): Any amino acid
  MOD_RES (27)..(29): Any amino acid
  MOD_RES (31)..(37): Any amino acid
  MOD_RES (39)..(40): Any amino acid
  MOD_RES (42)..(46): Any amino acid
  MOD_RES (55)..(57): Any amino acid
  MOD_RES (59)..(65): Any amino acid
  MOD_RES (67)..(68): Any amino acid
  MOD_RES (70)..(74): Any amino acid
  MOD_RES (83)..(85): Any amino acid
  MOD_RES (87)..(93): Any amino acid
  MOD_RES (95)..(96): Any amino acid
  MOD_RES (98)..(102): Any amino acid
  MOD_RES (111)..(113): Any amino acid
  MOD_RES (115)..(121): Any amino acid
  MOD_RES (123)..(124): Any amino acid
  MOD_RES (126)..(130): Any amino acid
  MOD_RES (139)..(141): Any amino acid
  MOD_RES (143)..(149): Any amino acid
  MOD_RES (151)..(152): Any amino acid
  MOD_RES (154)..(158): Any amino acid
  MOD_RES (167)..(169): Any amino acid
  MOD_RES (171)..(177): Any amino acid
  MOD_RES (179)..(180): Any amino acid
  MOD_RES (182)..(186): Any amino acid
  MOD_RES (195)..(197): Any amino acid
  MOD_RES (199)..(209): Any amino acid
XXXXXXXXXCXXCXXXXXERSHLREHXXXHXXXXXXXCXXCXXXXXRSDHLTTHXXXHXXXXXXXCXXCXXXXXQLAHLRAHXXXHXXXXXXXCXXCXXXXXRNDTLTEHXXXHXXXXXXXCXXCXXXXXTTGNLTVHXXXHXXXXXXXCXXCXXXXXQSSNLVRHXXXHXXXXXXXCXXCXXXXXRSDHLTTHXXXHXXXXXXXXXXX

SEQ ID NO: 1970 - protein, 209 aa, Artificial Sequence
  source: /note="Description of Artificial Sequence: Synthetic polypeptide"
  MOD_RES (1)..(9): Any amino acid
  MOD_RES (11)..(12): Any amino acid
  MOD_RES (14)..(18): Any amino acid
  MOD_RES (27)..(29): Any amino acid
  MOD_RES (31)..(37): Any amino acid
  MOD_RES (39)..(40): Any amino acid
  MOD_RES (42)..(46): Any amino acid
  MOD_RES (55)..(57): Any amino acid
  MOD_RES (59)..(65): Any amino acid
  MOD_RES (67)..(68): Any amino acid
  MOD_RES (70)..(74): Any amino acid
  MOD_RES (83)..(85): Any amino acid
  MOD_RES (87)..(93): Any amino acid
  MOD_RES (95)..(96): Any amino acid
  MOD_RES (98)..(102): Any amino acid
  MOD_RES (111)..(113): Any amino acid
  MOD_RES (115)..(121): Any amino acid
  MOD_RES (123)..(124): Any amino acid
  MOD_RES (126)..(130): Any amino acid
  MOD_RES (139)..(141): Any amino acid
  MOD_RES (143)..(149): Any amino acid
  MOD_RES (151)..(152): Any amino acid
  MOD_RES (154)..(158): Any amino acid
  MOD_RES (167)..(169): Any amino acid
  MOD_RES (171)..(177): Any amino acid
  MOD_RES (179)..(180): Any amino acid
  MOD_RES (182)..(186): Any amino acid
  MOD_RES (195)..(197): Any amino acid
  MOD_RES (199)..(209): Any amino acid
XXXXXXXXXCXXCXXXXXQRAHLERHXXXHXXXXXXXCXXCXXXXXRNDALTEHXXXHXXXXXXXCXXCXXXXXSPADLTRHXXXHXXXXXXXCXXCXXXXXQSSNLVRHXXXHXXXXXXXCXXCXXXXXTSHSLTEHXXXHXXXXXXXCXXCXXXXXRSDKLVRHXXXHXXXXXXXCXXCXXXXXTKNSLTEHXXXHXXXXXXXXXXX

SEQ ID NO: 1971 - protein, 209 aa, Artificial Sequence
  source: /note="Description of Artificial Sequence: Synthetic polypeptide"
  MOD_RES (1)..(9): Any amino acid
  MOD_RES (11)..(12): Any amino acid
  MOD_RES (14)..(18): Any amino acid
  MOD_RES (27)..(29): Any amino acid
  MOD_RES (31)..(37): Any amino acid
  MOD_RES (39)..(40): Any amino acid
  MOD_RES (42)..(46): Any amino acid
  MOD_RES (55)..(57): Any amino acid
  MOD_RES (59)..(65): Any amino acid
  MOD_RES (67)..(68): Any amino acid
  MOD_RES (70)..(74): Any amino acid
  MOD_RES (83)..(85): Any amino acid
  MOD_RES (87)..(93): Any amino acid
  MOD_RES (95)..(96): Any amino acid
  MOD_RES (98)..(102): Any amino acid
  MOD_RES (111)..(113): Any amino acid
  MOD_RES (115)..(121): Any amino acid
  MOD_RES (123)..(124): Any amino acid
  MOD_RES (126)..(130): Any amino acid
  MOD_RES (139)..(141): Any amino acid
  MOD_RES (143)..(149): Any amino acid
  MOD_RES (151)..(152): Any amino acid
  MOD_RES (154)..(158): Any amino acid
  MOD_RES (167)..(169): Any amino acid
  MOD_RES (171)..(177): Any amino acid
  MOD_RES (179)..(180): Any amino acid
  MOD_RES (182)..(186): Any amino acid
  MOD_RES (195)..(197): Any amino acid
  MOD_RES (199)..(209): Any amino acid
XXXXXXXXXCXXCXXXXXRSDELVRHXXXHXXXXXXXCXXCXXXXXTSGELVRHXXXHXXXXXXXCXXCXXXXXQRAHLERHXXXHXXXXXXXCXXCXXXXXRNDALTEHXXXHXXXXXXXCXXCXXXXXSPADLTRHXXXHXXXXXXXCXXCXXXXXQSSNLVRHXXXHXXXXXXXCXXCXXXXXTSHSLTEHXXXHXXXXXXXXXXX

SEQ ID NO: 1972 - protein, 209 aa, Artificial Sequence
  source: /note="Description of Artificial Sequence: Synthetic polypeptide"
  MOD_RES (1)..(9): Any amino acid
  MOD_RES (11)..(12): Any amino acid
  MOD_RES (14)..(18): Any amino acid
  MOD_RES (27)..(29): Any amino acid
  MOD_RES (31)..(37): Any amino acid
  MOD_RES (39)..(40): Any amino acid
  MOD_RES (42)..(46): Any amino acid
  MOD_RES (55)..(57): Any amino acid
  MOD_RES (59)..(65): Any amino acid
  MOD_RES (67)..(68): Any amino acid
  MOD_RES (70)..(74): Any amino acid
  MOD_RES (83)..(85): Any amino acid
  MOD_RES (87)..(93): Any amino acid
  MOD_RES (95)..(96): Any amino acid
  MOD_RES (98)..(102): Any amino acid
  MOD_RES (111)..(113): Any amino acid
  MOD_RES (115)..(121): Any amino acid
  MOD_RES (123)..(124): Any amino acid
  MOD_RES (126)..(130): Any amino acid
  MOD_RES (139)..(141): Any amino acid
  MOD_RES (143)..(149): Any amino acid
  MOD_RES (151)..(152): Any amino acid
  MOD_RES (154)..(158): Any amino acid
  MOD_RES (167)..(169): Any amino acid
  MOD_RES (171)..(177): Any amino acid
  MOD_RES (179)..(180): Any amino acid
  MOD_RES (182)..(186): Any amino acid
  MOD_RES (195)..(197): Any amino acid
  MOD_RES (199)..(209): Any amino acid
XXXXXXXXXCXXCXXXXXTSGELVRHXXXHXXXXXXXCXXCXXXXXQRAHLERHXXXHXXXXXXXCXXCXXXXXRNDALTEHXXXHXXXXXXXCXXCXXXXXSPADLTRHXXXHXXXXXXXCXXCXXXXXQSSNLVRHXXXHXXXXXXXCXXCXXXXXTSHSLTEHXXXHXXXXXXXCXXCXXXXXRSDKLVRHXXXHXXXXXXXXXXX

SEQ ID NO: 1973 - protein, 209 aa, Artificial Sequence
  source: /note="Description of Artificial Sequence: Synthetic polypeptide"
  MOD_RES (1)..(9): Any amino acid
  MOD_RES (11)..(12): Any amino acid
  MOD_RES (14)..(18): Any amino acid
  MOD_RES (27)..(29): Any amino acid
  MOD_RES (31)..(37): Any amino acid
  MOD_RES (39)..(40): Any amino acid
  MOD_RES (42)..(46): Any amino acid
  MOD_RES (55)..(57): Any amino acid
  MOD_RES (59)..(65): Any amino acid
  MOD_RES (67)..(68): Any amino acid
  MOD_RES (70)..(74): Any amino acid
  MOD_RES (83)..(85): Any amino acid
  MOD_RES (87)..(93): Any amino acid
  MOD_RES (95)..(96): Any amino acid
  MOD_RES (98)..(102): Any amino acid
  MOD_RES (111)..(113): Any amino acid
  MOD_RES (115)..(121): Any amino acid
  MOD_RES (123)..(124): Any amino acid
  MOD_RES (126)..(130): Any amino acid
  MOD_RES (139)..(141): Any amino acid
  MOD_RES (143)..(149): Any amino acid
  MOD_RES (151)..(152): Any amino acid
  MOD_RES (154)..(158): Any amino acid
  MOD_RES (167)..(169): Any amino acid
  MOD_RES (171)..(177): Any amino acid
  MOD_RES (179)..(180): Any amino acid
  MOD_RES (182)..(186): Any amino acid
  MOD_RES (195)..(197): Any amino acid
  MOD_RES (199)..(209): Any amino acid
XXXXXXXXXCXXCXXXXXQAGHLASHXXXHXXXXXXXCXXCXXXXXRRDELNVHXXXHXXXXXXXCXXCXXXXXQLAHLRAHXXXHXXXXXXXCXXCXXXXXRSDHLTNHXXXHXXXXXXXCXXCXXXXXDSGNLRVHXXXHXXXXXXXCXXCXXXXXQRAHLERHXXXHXXXXXXXCXXCXXXXXRSDNLVRHXXXHXXXXXXXXXXX

SEQ ID NO: 1974 - protein, 209 aa, Artificial Sequence
  source: /note="Description of Artificial Sequence: Synthetic polypeptide"
  MOD_RES (1)..(9): Any amino acid
  MOD_RES (11)..(12): Any amino acid
  MOD_RES (14)..(18): Any amino acid
  MOD_RES (27)..(29): Any amino acid
  MOD_RES (31)..(37): Any amino acid
  MOD_RES (39)..(40): Any amino acid
  MOD_RES (42)..(46): Any amino acid
  MOD_RES (55)..(57): Any amino acid
  MOD_RES (59)..(65): Any amino acid
  MOD_RES (67)..(68): Any amino acid
  MOD_RES (70)..(74): Any amino acid
  MOD_RES (83)..(85): Any amino acid
  MOD_RES (87)..(93): Any amino acid
  MOD_RES (95)..(96): Any amino acid
  MOD_RES (98)..(102): Any amino acid
  MOD_RES (111)..(113): Any amino acid
  MOD_RES (115)..(121): Any amino acid
  MOD_RES (123)..(124): Any amino acid
  MOD_RES (126)..(130): Any amino acid
  MOD_RES (139)..(141): Any amino acid
  MOD_RES (143)..(149): Any amino acid
  MOD_RES (151)..(152): Any amino acid
  MOD_RES (154)..(158): Any amino acid
  MOD_RES (167)..(169): Any amino acid
  MOD_RES (171)..(177): Any amino acid
  MOD_RES (179)..(180): Any amino acid
  MOD_RES (182)..(186): Any amino acid
  MOD_RES (195)..(197): Any amino acid
  MOD_RES (199)..(209): Any amino acid
XXXXXXXXXCXXCXXXXXRSDHLTTHXXXHXXXXXXXCXXCXXXXXQAGHLASHXXXHXXXXXXXCXXCXXXXXRRDELNVHXXXHXXXXXXXCXXCXXXXXQLAHLRAHXXXHXXXXXXXCXXCXXXXXRSDHLTNHXXXHXXXXXXXCXXCXXXXXDSGNLRVHXXXHXXXXXXXCXXCXXXXXQRAHLERHXXXHXXXXXXXXXXX

SEQ ID NO: 1975 - protein, 209 aa, Artificial Sequence
  source: /note="Description of Artificial Sequence: Synthetic polypeptide"
  MOD_RES (1)..(9): Any amino acid
  MOD_RES (11)..(12): Any amino acid
  MOD_RES (14)..(18): Any amino acid
  MOD_RES (27)..(29): Any amino acid
  MOD_RES (31)..(37): Any amino acid
  MOD_RES (39)..(40): Any amino acid
  MOD_RES (42)..(46): Any amino acid
  MOD_RES (55)..(57): Any amino acid
  MOD_RES (59)..(65): Any amino acid
  MOD_RES (67)..(68): Any amino acid
  MOD_RES (70)..(74): Any amino acid
  MOD_RES (83)..(85): Any amino acid
  MOD_RES (87)..(93): Any amino acid
  MOD_RES (95)..(96): Any amino acid
  MOD_RES (98)..(102): Any amino acid
  MOD_RES (111)..(113): Any amino acid
  MOD_RES (115)..(121): Any amino acid
  MOD_RES (123)..(124): Any amino acid
  MOD_RES (126)..(130): Any amino acid
  MOD_RES (139)..(141): Any amino acid
  MOD_RES (143)..(149): Any amino acid
  MOD_RES (151)..(152): Any amino acid
  MOD_RES (154)..(158): Any amino acid
  MOD_RES (167)..(169): Any amino acid
  MOD_RES (171)..(177): Any amino acid
  MOD_RES (179)..(180): Any amino acid
  MOD_RES (182)..(186): Any amino acid
  MOD_RES (195)..(197): Any amino acid
  MOD_RES (199)..(209): Any amino acid
XXXXXXXXXCXXCXXXXXQLAHLRAHXXXHXXXXXXXCXXCXXXXXRNDTLTEHXXXHXXXXXXXCXXCXXXXXTTGNLTVHXXXHXXXXXXXCXXCXXXXXQSSNLVRHXXXHXXXXXXXCXXCXXXXXRSDHLTTHXXXHXXXXXXXCXXCXXXXXQAGHLASHXXXHXXXXXXXCXXCXXXXXRRDELNVHXXXHXXXXXXXXXXX

SEQ ID NO: 1976 - protein, 209 aa, Artificial Sequence
  source: /note="Description of Artificial Sequence: Synthetic polypeptide"
  MOD_RES (1)..(9): Any amino acid
  MOD_RES (11)..(12): Any amino acid
  MOD_RES (14)..(18): Any amino acid
  MOD_RES (27)..(29): Any amino acid
  MOD_RES (31)..(37): Any amino acid
  MOD_RES (39)..(40): Any amino acid
  MOD_RES (42)..(46): Any amino acid
  MOD_RES (55)..(57): Any amino acid
  MOD_RES (59)..(65): Any amino acid
  MOD_RES (67)..(68): Any amino acid
  MOD_RES (70)..(74): Any amino acid
  MOD_RES (83)..(85): Any amino acid
  MOD_RES (87)..(93): Any amino acid
  MOD_RES (95)..(96): Any amino acid
  MOD_RES (98)..(102): Any amino acid
  MOD_RES (111)..(113): Any amino acid
  MOD_RES (115)..(121): Any amino acid
  MOD_RES (123)..(124): Any amino acid
  MOD_RES (126)..(130): Any amino acid
  MOD_RES (139)..(141): Any amino acid
  MOD_RES (143)..(149): Any amino acid
  MOD_RES (151)..(152): Any amino acid
  MOD_RES (154)..(158): Any amino acid
  MOD_RES (167)..(169): Any amino acid
  MOD_RES (171)..(177): Any amino acid
  MOD_RES (179)..(180): Any amino acid
  MOD_RES (182)..(186): Any amino acid
  MOD_RES (195)..(197): Any amino acid
  MOD_RES (199)..(209): Any amino acid
XXXXXXXXXCXXCXXXXXRNDTLTEHXXXHXXXXXXXCXXCXXXXXTTGNLTVHXXXHXXXXXXXCXXCXXXXXQSSNLVRHXXXHXXXXXXXCXXCXXXXXRSDHLTTHXXXHXXXXXXXCXXCXXXXXQAGHLASHXXXHXXXXXXXCXXCXXXXXRRDELNVHXXXHXXXXXXXCXXCXXXXXQLAHLRAHXXXHXXXXXXXXXXX

SEQ ID NO: 1977 - protein, 209 aa, Artificial Sequence
  source: /note="Description of Artificial Sequence: Synthetic polypeptide"
  MOD_RES (1)..(9): Any amino acid
  MOD_RES (11)..(12): Any amino acid
  MOD_RES (14)..(18): Any amino acid
  MOD_RES (27)..(29): Any amino acid
  MOD_RES (31)..(37): Any amino acid
  MOD_RES (39)..(40): Any amino acid
  MOD_RES (42)..(46): Any amino acid
  MOD_RES (55)..(57): Any amino acid
  MOD_RES (59)..(65): Any amino acid
  MOD_RES (67)..(68): Any amino acid
  MOD_RES (70)..(74): Any amino acid
  MOD_RES (83)..(85): Any amino acid
  MOD_RES (87)..(93): Any amino acid
  MOD_RES (95)..(96): Any amino acid
  MOD_RES (98)..(102): Any amino acid
  MOD_RES (111)..(113): Any amino acid
  MOD_RES (115)..(121): Any amino acid
  MOD_RES (123)..(124): Any amino acid
  MOD_RES (126)..(130): Any amino acid
  MOD_RES (139)..(141): Any amino acid
  MOD_RES (143)..(149): Any amino acid
  MOD_RES (151)..(152): Any amino acid
  MOD_RES (154)..(158): Any amino acid
  MOD_RES (167)..(169): Any amino acid
  MOD_RES (171)..(177): Any amino acid
  MOD_RES (179)..(180): Any amino acid
  MOD_RES (182)..(186): Any amino acid
  MOD_RES (195)..(197): Any amino acid
  MOD_RES (199)..(209): Any amino acid
XXXXXXXXXCXXCXXXXXQRAHLERHXXXHXXXXXXXCXXCXXXXXRSDELVRHXXXHXXXXXXXCXXCXXXXXTSGELVRHXXXHXXXXXXXCXXCXXXXXQRAHLERHXXXHXXXXXXXCXXCXXXXXRNDALTEHXXXHXXXXXXXCXXCXXXXXSPADLTRHXXXHXXXXXXXCXXCXXXXXQSSNLVRHXXXHXXXXXXXXXXX

SEQ ID NO: 1978 - protein, 209 aa, Artificial Sequence
  source: /note="Description of Artificial Sequence: Synthetic polypeptide"
  MOD_RES (1)..(9): Any amino acid
  MOD_RES (11)..(12): Any amino acid
  MOD_RES (14)..(18): Any amino acid
  MOD_RES (27)..(29): Any amino acid
  MOD_RES (31)..(37): Any amino acid
  MOD_RES (39)..(40): Any amino acid
  MOD_RES (42)..(46): Any amino acid
  MOD_RES (55)..(57): Any amino acid
  MOD_RES (59)..(65): Any amino acid
  MOD_RES (67)..(68): Any amino acid
  MOD_RES (70)..(74): Any amino acid
  MOD_RES (83)..(85): Any amino acid
  MOD_RES (87)..(93): Any amino acid
  MOD_RES (95)..(96): Any amino acid
  MOD_RES (98)..(102): Any amino acid
  MOD_RES (111)..(113): Any amino acid
  MOD_RES (115)..(121): Any amino acid
  MOD_RES (123)..(124): Any amino acid
  MOD_RES (126)..(130): Any amino acid
  MOD_RES (139)..(141): Any amino acid
  MOD_RES (143)..(149): Any amino acid
  MOD_RES (151)..(152): Any amino acid
  MOD_RES (154)..(158): Any amino acid
  MOD_RES (167)..(169): Any amino acid
  MOD_RES (171)..(177): Any amino acid
  MOD_RES (179)..(180): Any amino acid
  MOD_RES (182)..(186): Any amino acid
  MOD_RES (195)..(197): Any amino acid
  MOD_RES (199)..(209): Any amino acid
XXXXXXXXXCXXCXXXXXRADNLTEHXXXHXXXXXXXCXXCXXXXXRSDKLVRHXXXHXXXXXXXCXXCXXXXXRSDNLVRHXXXHXXXXXXXCXXCXXXXXQRAHLERHXXXHXXXXXXXCXXCXXXXXDPGNLVRHXXXHXXXXXXXCXXCXXXXXQRAHLERHXXXHXXXXXXXCXXCXXXXXRSDELVRHXXXHXXXXXXXXXXX

SEQ ID NO: 1979 - protein, 209 aa, Artificial Sequence
  source: /note="Description of Artificial Sequence: Synthetic polypeptide"
  MOD_RES (1)..(9): Any amino acid
  MOD_RES (11)..(12): Any amino acid
  MOD_RES (14)..(18): Any amino acid
  MOD_RES (27)..(29): Any amino acid
  MOD_RES (31)..(37): Any amino acid
  MOD_RES (39)..(40): Any amino acid
  MOD_RES (42)..(46): Any amino acid
  MOD_RES (55)..(57): Any amino acid
  MOD_RES (59)..(65): Any amino acid
  MOD_RES (67)..(68): Any amino acid
  MOD_RES (70)..(74): Any amino acid
  MOD_RES (83)..(85): Any amino acid
  MOD_RES (87)..(93): Any amino acid
  MOD_RES (95)..(96): Any amino acid
  MOD_RES (98)..(102): Any amino acid
  MOD_RES (111)..(113): Any amino acid
  MOD_RES (115)..(121): Any amino acid
  MOD_RES (123)..(124): Any amino acid
  MOD_RES (126)..(130): Any amino acid
  MOD_RES (139)..(141): Any amino acid
  MOD_RES (143)..(149): Any amino acid
  MOD_RES (151)..(152): Any amino acid
  MOD_RES (154)..(158): Any amino acid
  MOD_RES (167)..(169): Any amino acid
  MOD_RES (171)..(177): Any amino acid
  MOD_RES (179)..(180): Any amino acid
  MOD_RES (182)..(186): Any amino acid
  MOD_RES (195)..(197): Any amino acid
  MOD_RES (199)..(209): Any amino acid
XXXXXXXXXCXXCXXXXXDPGNLVRHXXXHXXXXXXXCXXCXXXXXQRAHLERHXXXHXXXXXXXCXXCXXXXXRSDELVRHXXXHXXXXXXXCXXCXXXXXTSGELVRHXXXHXXXXXXXCXXCXXXXXQRAHLERHXXXHXXXXXXXCXXCXXXXXRNDALTEHXXXHXXXXXXXCXXCXXXXXSPADLTRHXXXHXXXXXXXXXXX

SEQ ID NO: 1980 - protein, 209 aa, Artificial Sequence
  source: /note="Description of Artificial Sequence: Synthetic polypeptide"
  MOD_RES (1)..(9): Any amino acid
  MOD_RES (11)..(12): Any amino acid
  MOD_RES (14)..(18): Any amino acid
  MOD_RES (27)..(29): Any amino acid
  MOD_RES (31)..(37): Any amino acid
  MOD_RES (39)..(40): Any amino acid
  MOD_RES (42)..(46): Any amino acid
  MOD_RES (55)..(57): Any amino acid
  MOD_RES (59)..(65): Any amino acid
  MOD_RES (67)..(68): Any amino acid
  MOD_RES (70)..(74): Any amino acid
  MOD_RES (83)..(85): Any amino acid
  MOD_RES (87)..(93): Any amino acid
  MOD_RES (95)..(96): Any amino acid
  MOD_RES (98)..(102): Any amino acid
  MOD_RES (111)..(113): Any amino acid
  MOD_RES (115)..(121): Any amino acid
  MOD_RES (123)..(124): Any amino acid
  MOD_RES (126)..(130): Any amino acid
  MOD_RES (139)..(141): Any amino acid
  MOD_RES (143)..(149): Any amino acid
  MOD_RES (151)..(152): Any amino acid
  MOD_RES (154)..(158): Any amino acid
  MOD_RES (167)..(169): Any amino acid
  MOD_RES (171)..(177): Any amino acid
  MOD_RES (179)..(180): Any amino acid
  MOD_RES (182)..(186): Any amino acid
  MOD_RES (195)..(197): Any amino acid
  MOD_RES (199)..(209): Any amino acid
XXXXXXXXXCXXCXXXXXRSDKLVRHXXXHXXXXXXXCXXCXXXXXRSDNLVRHXXXHXXXXXXXCXXCXXXXXQRAHLERHXXXHXXXXXXXCXXCXXXXXDPGNLVRHXXXHXXXXXXXCXXCXXXXXQRAHLERHXXXHXXXXXXXCXXCXXXXXRSDELVRHXXXHXXXXXXXCXXCXXXXXTSGELVRHXXXHXXXXXXXXXXX

SEQ ID NO: 1981 - protein, 209 aa, Artificial Sequence
  source: /note="Description of Artificial Sequence: Synthetic polypeptide"
  MOD_RES (1)..(9): Any amino acid
  MOD_RES (11)..(12): Any amino acid
  MOD_RES (14)..(18): Any amino acid
  MOD_RES (27)..(29): Any amino acid
  MOD_RES (31)..(37): Any amino acid
  MOD_RES (39)..(40): Any amino acid
  MOD_RES (42)..(46): Any amino acid
  MOD_RES (55)..(57): Any amino acid
  MOD_RES (59)..(65): Any amino acid
  MOD_RES (67)..(68): Any amino acid
  MOD_RES (70)..(74): Any amino acid
  MOD_RES (83)..(85): Any amino acid
  MOD_RES (87)..(93): Any amino acid
  MOD_RES (95)..(96): Any amino acid
  MOD_RES (98)..(102): Any amino acid
  MOD_RES (111)..(113): Any amino acid
  MOD_RES (115)..(121): Any amino acid
  MOD_RES (123)..(124): Any amino acid
  MOD_RES (126)..(130): Any amino acid
  MOD_RES (139)..(141): Any amino acid
  MOD_RES (143)..(149): Any amino acid
  MOD_RES (151)..(152): Any amino acid
  MOD_RES (154)..(158): Any amino acid
  MOD_RES (167)..(169): Any amino acid
  MOD_RES (171)..(177): Any amino acid
  MOD_RES (179)..(180): Any amino acid
  MOD_RES (182)..(186): Any amino acid
  MOD_RES (195)..(197): Any amino acid
  MOD_RES (199)..(209): Any amino acid
XXXXXXXXXCXXCXXXXXQRAHLERHXXXHXXXXXXXCXXCXXXXXDPGNLVRHXXXHXXXXXXXCXXCXXXXXQRAHLERHXXXHXXXXXXXCXXCXXXXXRSDELVRHXXXHXXXXXXXCXXCXXXXXTSGELVRHXXXHXXXXXXXCXXCXXXXXQRAHLERHXXXHXXXXXXXCXXCXXXXXRNDALTEHXXXHXXXXXXXXXXX

SEQ ID NO: 1982 - protein, 209 aa, Artificial Sequence
  source: /note="Description of Artificial Sequence: Synthetic polypeptide"
  MOD_RES (1)..(9): Any amino acid
  MOD_RES (11)..(12): Any amino acid
  MOD_RES (14)..(18): Any amino acid
  MOD_RES (27)..(29): Any amino acid
  MOD_RES (31)..(37): Any amino acid
  MOD_RES (39)..(40): Any amino acid
  MOD_RES (42)..(46): Any amino acid
  MOD_RES (55)..(57): Any amino acid
  MOD_RES (59)..(65): Any amino acid
  MOD_RES (67)..(68): Any amino acid
  MOD_RES (70)..(74): Any amino acid
  MOD_RES (83)..(85): Any amino acid
  MOD_RES (87)..(93): Any amino acid
  MOD_RES (95)..(96): Any amino acid
  MOD_RES (98)..(102): Any amino acid
  MOD_RES (111)..(113): Any amino acid
  MOD_RES (115)..(121): Any amino acid
  MOD_RES (123)..(124): Any amino acid
  MOD_RES (126)..(130): Any amino acid
  MOD_RES (139)..(141): Any amino acid
  MOD_RES (143)..(149): Any amino acid
  MOD_RES (151)..(152): Any amino acid
  MOD_RES (154)..(158): Any amino acid
  MOD_RES (167)..(169): Any amino acid
  MOD_RES (171)..(177): Any amino acid
  MOD_RES (179)..(180): Any amino acid
  MOD_RES (182)..(186): Any amino acid
  MOD_RES (195)..(197): Any amino acid
  MOD_RES (199)..(209): Any amino acid
XXXXXXXXXCXXCXXXXXRSDNLVRHXXXHXXXXXXXCXXCXXXXXQRAHLERHXXXHXXXXXXXCXXCXXXXXDPGNLVRHXXXHXXXXXXXCXXCXXXXXQRAHLERHXXXHXXXXXXXCXXCXXXXXRSDELVRHXXXHXXXXXXXCXXCXXXXXTSGELVRHXXXHXXXXXXXCXXCXXXXXQRAHLERHXXXHXXXXXXXXXXX

SEQ ID NO: 1983 - protein, 209 aa, Artificial Sequence
  source: /note="Description of Artificial Sequence: Synthetic polypeptide"
  MOD_RES (1)..(9): Any amino acid
  MOD_RES (11)..(12): Any amino acid
  MOD_RES (14)..(18): Any amino acid
  MOD_RES (27)..(29): Any amino acid
  MOD_RES (31)..(37): Any amino acid
  MOD_RES (39)..(40): Any amino acid
  MOD_RES (42)..(46): Any amino acid
  MOD_RES (55)..(57): Any amino acid
  MOD_RES (59)..(65): Any amino acid
  MOD_RES (67)..(68): Any amino acid
  MOD_RES (70)..(74): Any amino acid
  MOD_RES (83)..(85): Any amino acid
  MOD_RES (87)..(93): Any amino acid
  MOD_RES (95)..(96): Any amino acid
  MOD_RES (98)..(102): Any amino acid
  MOD_RES (111)..(113): Any amino acid
  MOD_RES (115)..(121): Any amino acid
  MOD_RES (123)..(124): Any amino acid
  MOD_RES (126)..(130): Any amino acid
  MOD_RES (139)..(141): Any amino acid
  MOD_RES (143)..(149): Any amino acid
  MOD_RES (151)..(152): Any amino acid
  MOD_RES (154)..(158): Any amino acid
  MOD_RES (167)..(169): Any amino acid
  MOD_RES (171)..(177): Any amino acid
  MOD_RES (179)..(180): Any amino acid
  MOD_RES (182)..(186): Any amino acid
  MOD_RES (195)..(197): Any amino acid
  MOD_RES (199)..(209): Any amino acid
XXXXXXXXXCXXCXXXXXQLAHLRAHXXXHXXXXXXXCXXCXXXXXRSDHLTNHXXXHXXXXXXXCXXCXXXXXDSGNLRVHXXXHXXXXXXXCXXCXXXXXQRAHLERHXXXHXXXXXXXCXXCXXXXXRSDNLVRHXXXHXXXXXXXCXXCXXXXXTSGHLVRHXXXHXXXXXXXCXXCXXXXXRSDKLVRHXXXHXXXXXXXXXXX

SEQ ID NO: 1984 - protein, 209 aa, Artificial Sequence
  source: /note="Description of Artificial Sequence: Synthetic polypeptide"
  MOD_RES (1)..(9): Any amino acid
  MOD_RES (11)..(12): Any amino acid
  MOD_RES (14)..(18): Any amino acid
  MOD_RES (27)..(29): Any amino acid
  MOD_RES (31)..(37): Any amino acid
  MOD_RES (39)..(40): Any amino acid
  MOD_RES (42)..(46): Any amino acid
  MOD_RES (55)..(57): Any amino acid
  MOD_RES (59)..(65): Any amino acid
  MOD_RES (67)..(68): Any amino acid
  MOD_RES (70)..(74): Any amino acid
  MOD_RES (83)..(85): Any amino acid
  MOD_RES (87)..(93): Any amino acid
  MOD_RES (95)..(96): Any amino acid
  MOD_RES (98)..(102): Any amino acid
  MOD_RES (111)..(113): Any amino acid
  MOD_RES (115)..(121): Any amino acid
  MOD_RES (123)..(124): Any amino acid
  MOD_RES (126)..(130): Any amino acid
  MOD_RES (139)..(141): Any amino acid
  MOD_RES (143)..(149): Any amino acid
  MOD_RES (151)..(152): Any amino acid
  MOD_RES (154)..(158): Any amino acid
  MOD_RES (167)..(169): Any amino acid
  MOD_RES (171)..(177): Any amino acid
  MOD_RES (179)..(180): Any amino acid
  MOD_RES (182)..(186): Any amino acid
  MOD_RES (195)..(197): Any amino acid
  MOD_RES (199)..(209): Any amino acid
XXXXXXXXXCXXCXXXXXRSDKLVRHXXXHXXXXXXXCXXCXXXXXTSGHLVRHXXXHXXXXXXXCXXCXXXXXRADNLTEHXXXHXXXXXXXCXXCXXXXXRSDKLVRHXXXHXXXXXXXCXXCXXXXXRSDNLVRHXXXHXXXXXXXCXXCXXXXXQRAHLERHXXXHXXXXXXXCXXCXXXXXDPGNLVRHXXXHXXXXXXXXXXX

SEQ ID NO: 1985 - protein, 209 aa, Artificial Sequence
  source: /note="Description of Artificial Sequence: Synthetic polypeptide"
  MOD_RES (1)..(9): Any amino acid
  MOD_RES (11)..(12): Any amino acid
  MOD_RES (14)..(18): Any amino acid
  MOD_RES (27)..(29): Any amino acid
  MOD_RES (31)..(37): Any amino acid
  MOD_RES (39)..(40): Any amino acid
  MOD_RES (42)..(46): Any amino acid
  MOD_RES (55)..(57): Any amino acid
  MOD_RES (59)..(65): Any amino acid
  MOD_RES (67)..(68): Any amino acid
  MOD_RES (70)..(74): Any amino acid
  MOD_RES (83)..(85): Any amino acid
  MOD_RES (87)..(93): Any amino acid
  MOD_RES (95)..(96): Any amino acid
  MOD_RES (98)..(102): Any amino acid
  MOD_RES (111)..(113): Any amino acid
  MOD_RES (115)..(121): Any amino acid
  MOD_RES (123)..(124): Any amino acid
  MOD_RES (126)..(130): Any amino acid
  MOD_RES (139)..(141): Any amino acid
  MOD_RES (143)..(149): Any amino acid
  MOD_RES (151)..(152): Any amino acid
  MOD_RES (154)..(158): Any amino acid
  MOD_RES (167)..(169): Any amino acid
  MOD_RES (171)..(177): Any amino acid
  MOD_RES (179)..(180): Any amino acid
  MOD_RES (182)..(186): Any amino acid
  MOD_RES (195)..(197): Any amino acid
  MOD_RES (199)..(209): Any amino acid
XXXXXXXXXCXXCXXXXXRRDELNVHXXXHXXXXXXXCXXCXXXXXQLAHLRAHXXXHXXXXXXXCXXCXXXXXRSDHLTNHXXXHXXXXXXXCXXCXXXXXDSGNLRVHXXXHXXXXXXXCXXCXXXXXQRAHLERHXXXHXXXXXXXCXXCXXXXXRSDNLVRHXXXHXXXXXXXCXXCXXXXXTSGHLVRHXXXHXXXXXXXXXXX

SEQ ID NO: 1986 - protein, 209 aa, Artificial Sequence
  source: /note="Description of Artificial Sequence: Synthetic polypeptide"
  MOD_RES (1)..(9): Any amino acid
  MOD_RES (11)..(12): Any amino acid
  MOD_RES (14)..(18): Any amino acid
  MOD_RES (27)..(29): Any amino acid
  MOD_RES (31)..(37): Any amino acid
  MOD_RES (39)..(40): Any amino acid
  MOD_RES (42)..(46): Any amino acid
  MOD_RES (55)..(57): Any amino acid
  MOD_RES (59)..(65): Any amino acid
  MOD_RES (67)..(68): Any amino acid
  MOD_RES (70)..(74): Any amino acid
  MOD_RES (83)..(85): Any amino acid
  MOD_RES (87)..(93): Any amino acid
  MOD_RES (95)..(96): Any amino acid
  MOD_RES (98)..(102): Any amino acid
  MOD_RES (111)..(113): Any amino acid
  MOD_RES (115)..(121): Any amino acid
  MOD_RES (123)..(124): Any amino acid
  MOD_RES (126)..(130): Any amino acid
  MOD_RES (139)..(141): Any amino acid
  MOD_RES (143)..(149): Any amino acid
  MOD_RES (151)..(152): Any amino acid
  MOD_RES (154)..(158): Any amino acid
  MOD_RES (167)..(169): Any amino acid
  MOD_RES (171)..(177): Any amino acid
  MOD_RES (179)..(180): Any amino acid
  MOD_RES (182)..(186): Any amino acid
  MOD_RES (195)..(197): Any amino acid
  MOD_RES (199)..(209): Any amino acid
XXXXXXXXXCXXCXXXXXTSGHLVRHXXXHXXXXXXXCXXCXXXXXRADNLTEHXXXHXXXXXXXCXXCXXXXXRSDKLVRHXXXHXXXXXXXCXXCXXXXXRSDNLVRHXXXHXXXXXXXCXXCXXXXXQRAHLERHXXXHXXXXXXXCXXCXXXXXDPGNLVRHXXXHXXXXXXXCXXCXXXXXQRAHLERHXXXHXXXXXXXXXXX

SEQ ID NO: 1987 - protein, 209 aa, Artificial Sequence
  source: /note="Description of Artificial Sequence: Synthetic polypeptide"
  MOD_RES (1)..(9): Any amino acid
  MOD_RES (11)..(12): Any amino acid
  MOD_RES (14)..(18): Any amino acid
  MOD_RES (27)..(29): Any amino acid
  MOD_RES (31)..(37): Any amino acid
  MOD_RES (39)..(40): Any amino acid
  MOD_RES (42)..(46): Any amino acid
  MOD_RES (55)..(57): Any amino acid
  MOD_RES (59)..(65): Any amino acid
  MOD_RES (67)..(68): Any amino acid
  MOD_RES (70)..(74): Any amino acid
  MOD_RES (83)..(85): Any amino acid
  MOD_RES (87)..(93): Any amino acid
  MOD_RES (95)..(96): Any amino acid
  MOD_RES (98)..(102): Any amino acid
  MOD_RES (111)..(113): Any amino acid
  MOD_RES (115)..(121): Any amino acid
  MOD_RES (123)..(124): Any amino acid
  MOD_RES (126)..(130): Any amino acid
  MOD_RES (139)..(141): Any amino acid
  MOD_RES (143)..(149): Any amino acid
  MOD_RES (151)..(152): Any amino acid
  MOD_RES (154)..(158): Any amino acid
  MOD_RES (167)..(169): Any amino acid
  MOD_RES (171)..(177): Any amino acid
  MOD_RES (179)..(180): Any amino acid
  MOD_RES (182)..(186): Any amino acid
  MOD_RES (195)..(197): Any amino acid
  MOD_RES (199)..(209): Any amino acid
XXXXXXXXXCXXCXXXXXDSGNLRVHXXXHXXXXXXXCXXCXXXXXQRAHLERHXXXHXXXXXXXCXXCXXXXXRSDNLVRHXXXHXXXXXXXCXXCXXXXXTSGHLVRHXXXHXXXXXXXCXXCXXXXXRSDKLVRHXXXHXXXXXXXCXXCXXXXXTSGHLVRHXXXHXXXXXXXCXXCXXXXXRSDKLVRHXXXHXXXXXXXXXXX

SEQ ID NO: 1988 - protein, 209 aa, Artificial Sequence
  source: /note="Description of Artificial Sequence: Synthetic polypeptide"
  MOD_RES (1)..(9): Any amino acid
  MOD_RES (11)..(12): Any amino acid
  MOD_RES (14)..(18): Any amino acid
  MOD_RES (27)..(29): Any amino acid
  MOD_RES (31)..(37): Any amino acid
  MOD_RES (39)..(40): Any amino acid
  MOD_RES (42)..(46): Any amino acid
  MOD_RES (55)..(57): Any amino acid
  MOD_RES (59)..(65): Any amino acid
  MOD_RES (67)..(68): Any amino acid
  MOD_RES (70)..(74): Any amino acid
  MOD_RES (83)..(85): Any amino acid
  MOD_RES (87)..(93): Any amino acid
  MOD_RES (95)..(96): Any amino acid
  MOD_RES (98)..(102): Any amino acid
  MOD_RES (111)..(113): Any amino acid
  MOD_RES (115)..(121): Any amino acid
  MOD_RES (123)..(124): Any amino acid
  MOD_RES (126)..(130): Any amino acid
  MOD_RES (139)..(141): Any amino acid
  MOD_RES (143)..(149): Any amino acid
  MOD_RES (151)..(152): Any amino acid
  MOD_RES (154)..(158): Any amino acid
  MOD_RES (167)..(169): Any amino acid
  MOD_RES (171)..(177): Any amino acid
  MOD_RES (179)..(180): Any amino acid
  MOD_RES (182)..(186): Any amino acid
  MOD_RES (195)..(197): Any amino acid
  MOD_RES (199)..(209): Any amino acid
XXXXXXXXXCXXCXXXXXRSDHLTNHXXXHXXXXXXXCXXCXXXXXDSGNLRVHXXXHXXXXXXXCXXCXXXXXQRAHLERHXXXHXXXXXXXCXXCXXXXXRSDNLVRHXXXHXXXXXXXCXXCXXXXXTSGHLVRHXXXHXXXXXXXCXXCXXXXXRSDKLVRHXXXHXXXXXXXCXXCXXXXXTSGHLVRHXXXHXXXXXXXXXXX

SEQ ID NO: 1989 - protein, 209 aa, Artificial Sequence
  source: /note="Description of Artificial Sequence: Synthetic polypeptide"
  MOD_RES (1)..(9): Any amino acid
  MOD_RES (11)..(12): Any amino acid
  MOD_RES (14)..(18): Any amino acid
  MOD_RES (27)..(29): Any amino acid
  MOD_RES (31)..(37): Any amino acid
  MOD_RES (39)..(40): Any amino acid
  MOD_RES (42)..(46): Any amino acid
  MOD_RES (55)..(57): Any amino acid
  MOD_RES (59)..(65): Any amino acid
  MOD_RES (67)..(68): Any amino acid
  MOD_RES (70)..(74): Any amino acid
  MOD_RES (83)..(85): Any amino acid
  MOD_RES (87)..(93): Any amino acid
  MOD_RES (95)..(96): Any amino acid
  MOD_RES (98)..(102): Any amino acid
  MOD_RES (111)..(113): Any amino acid
  MOD_RES (115)..(121): Any amino acid
  MOD_RES (123)..(124): Any amino acid
  MOD_RES (126)..(130): Any amino acid
  MOD_RES (139)..(141): Any amino acid
  MOD_RES (143)..(149): Any amino acid
  MOD_RES (151)..(152): Any amino acid
  MOD_RES (154)..(158): Any amino acid
  MOD_RES (167)..(169): Any amino acid
  MOD_RES (171)..(177): Any amino acid
  MOD_RES (179)..(180): Any amino acid
  MOD_RES (182)..(186): Any amino acid
  MOD_RES (195)..(197): Any amino acid
  MOD_RES (199)..(209): Any amino acid
XXXXXXXXXCXXCXXXXXQRAHLERHXXXHXXXXXXXCXXCXXXXXRSDNLVRHXXXHXXXXXXXCXXCXXXXXTSGHLVRHXXXHXXXXXXXCXXCXXXXXRSDKLVRHXXXHXXXXXXXCXXCXXXXXTSGHLVRHXXXHXXXXXXXCXXCXXXXXRSDKLVRHXXXHXXXXXXXCXXCXXXXXQRAHLERHXXXHXXXXXXXXXXX

SEQ ID NO: 1990 - protein, 209 aa, Artificial Sequence
  source: /note="Description of Artificial Sequence: Synthetic polypeptide"
  MOD_RES (1)..(9): Any amino acid
  MOD_RES (11)..(12): Any amino acid
  MOD_RES (14)..(18): Any amino acid
  MOD_RES (27)..(29): Any amino acid
  MOD_RES (31)..(37): Any amino acid
  MOD_RES (39)..(40): Any amino acid
  MOD_RES (42)..(46): Any amino acid
  MOD_RES (55)..(57): Any amino acid
  MOD_RES (59)..(65): Any amino acid
  MOD_RES (67)..(68): Any amino acid
  MOD_RES (70)..(74): Any amino acid
  MOD_RES (83)..(85): Any amino acid
  MOD_RES (87)..(93): Any amino acid
  MOD_RES (95)..(96): Any amino acid
  MOD_RES (98)..(102): Any amino acid
  MOD_RES (111)..(113): Any amino acid
  MOD_RES (115)..(121): Any amino acid
  MOD_RES (123)..(124): Any amino acid
  MOD_RES (126)..(130): Any amino acid
  MOD_RES (139)..(141): Any amino acid
  MOD_RES (143)..(149): Any amino acid
  MOD_RES (151)..(152): Any amino acid
  MOD_RES (154)..(158): Any amino acid
  MOD_RES (167)..(169): Any amino acid
  MOD_RES (171)..(177): Any amino acid
  MOD_RES (179)..(180): Any amino acid
  MOD_RES (182)..(186): Any amino acid
  MOD_RES (195)..(197): Any amino acid
  MOD_RES (199)..(209): Any amino acid
XXXXXXXXXCXXCXXXXXRSDNLVRHXXXHXXXXXXXCXXCXXXXXTSGHLVRHXXXHXXXXXXXCXXCXXXXXRSDKLVRHXXXHXXXXXXXCXXCXXXXXTSGHLVRHXXXHXXXXXXXCXXCXXXXXRSDKLVRHXXXHXXXXXXXCXXCXXXXXQRAHLERHXXXHXXXXXXXCXXCXXXXXRNDTLTEHXXXHXXXXXXXXXXX

SEQ ID NO: 1991 - protein, 209 aa, Artificial Sequence
  source: /note="Description of Artificial Sequence: Synthetic polypeptide"
  MOD_RES (1)..(9): Any amino acid
  MOD_RES (11)..(12): Any amino acid
  MOD_RES (14)..(18): Any amino acid
  MOD_RES (27)..(29): Any amino acid
  MOD_RES (31)..(37): Any amino acid
  MOD_RES (39)..(40): Any amino acid
  MOD_RES (42)..(46): Any amino acid
  MOD_RES (55)..(57): Any amino acid
  MOD_RES (59)..(65): Any amino acid
  MOD_RES (67)..(68): Any amino acid
  MOD_RES (70)..(74): Any amino acid
  MOD_RES (83)..(85): Any amino acid
  MOD_RES (87)..(93): Any amino acid
  MOD_RES (95)..(96): Any amino acid
  MOD_RES (98)..(102): Any amino acid
  MOD_RES (111)..(113): Any amino acid
  MOD_RES (115)..(121): Any amino acid
  MOD_RES (123)..(124): Any amino acid
  MOD_RES (126)..(130): Any amino acid
  MOD_RES (139)..(141): Any amino acid
  MOD_RES (143)..(149): Any amino acid
  MOD_RES (151)..(152): Any amino acid
  MOD_RES (154)..(158): Any amino acid
  MOD_RES (167)..(169): Any amino acid
  MOD_RES (171)..(177): Any amino acid
  MOD_RES (179)..(180): Any amino acid
  MOD_RES (182)..(186): Any amino acid
  MOD_RES (195)..(197): Any amino acid
  MOD_RES (199)..(209): Any amino acid
XXXXXXXXXCXXCXXXXXRSDHLTNHXXXHXXXXXXXCXXCXXXXXRSDELVRHXXXHXXXXXXXCXXCXXXXXRSDKLVRHXXXHXXXXXXXCXXCXXXXXRSDELVRHXXXHXXXXXXXCXXCXXXXXRSDKLVRHXXXHXXXXXXXCXXCXXXXXRSDNLVRHXXXHXXXXXXXCXXCXXXXXRSDKLTEHXXXHXXXXXXXXXXX

SEQ ID NO: 1992 - protein, 209 aa, Artificial Sequence
  source: /note="Description of Artificial Sequence: Synthetic polypeptide"
  MOD_RES (1)..(9): Any amino acid
  MOD_RES (11)..(12): Any amino acid
  MOD_RES (14)..(18): Any amino acid
  MOD_RES (27)..(29): Any amino acid
  MOD_RES (31)..(37): Any amino acid
  MOD_RES (39)..(40): Any amino acid
  MOD_RES (42)..(46): Any amino acid
  MOD_RES (55)..(57): Any amino acid
  MOD_RES (59)..(65): Any amino acid
  MOD_RES (67)..(68): Any amino acid
  MOD_RES (70)..(74): Any amino acid
  MOD_RES (83)..(85): Any amino acid
  MOD_RES (87)..(93): Any amino acid
  MOD_RES (95)..(96): Any amino acid
  MOD_RES (98)..(102): Any amino acid
  MOD_RES (111)..(113): Any amino acid
  MOD_RES (115)..(121): Any amino acid
  MOD_RES (123)..(124): Any amino acid
  MOD_RES (126)..(130): Any amino acid
  MOD_RES (139)..(141): Any amino acid
  MOD_RES (143)..(149): Any amino acid
  MOD_RES (151)..(152): Any amino acid
  MOD_RES (154)..(158): Any amino acid
  MOD_RES (167)..(169): Any amino acid
  MOD_RES (171)..(177): Any amino acid
  MOD_RES (179)..(180): Any amino acid
  MOD_RES (182)..(186): Any amino acid
  MOD_RES (195)..(197): Any amino acid
  MOD_RES (199)..(209): Any amino acid
XXXXXXXXXCXXCXXXXXQSSNLVRHXXXHXXXXXXXCXXCXXXXXRSDHLTNHXXXHXXXXXXXCXXCXXXXXRSDELVRHXXXHXXXXXXXCXXCXXXXXRSDKLVRHXXXHXXXXXXXCXXCXXXXXRSDELVRHXXXHXXXXXXXCXXCXXXXXRSDKLVRHXXXHXXXXXXXCXXCXXXXXRSDNLVRHXXXHXXXXXXXXXXX

SEQ ID NO: 1993 - protein, 209 aa, Artificial Sequence
  source: /note="Description of Artificial Sequence: Synthetic polypeptide"
  MOD_RES (1)..(9): Any amino acid
  MOD_RES (11)..(12): Any amino acid
  MOD_RES (14)..(18): Any amino acid
  MOD_RES (27)..(29): Any amino acid
  MOD_RES (31)..(37): Any amino acid
  MOD_RES (39)..(40): Any amino acid
  MOD_RES (42)..(46): Any amino acid
  MOD_RES (55)..(57): Any amino acid
  MOD_RES (59)..(65): Any amino acid
  MOD_RES (67)..(68): Any amino acid
  MOD_RES (70)..(74): Any amino acid
  MOD_RES (83)..(85): Any amino acid
  MOD_RES (87)..(93): Any amino acid
  MOD_RES (95)..(96): Any amino acid
  MOD_RES (98)..(102): Any amino acid
  MOD_RES (111)..(113): Any amino acid
  MOD_RES (115)..(121): Any amino acid
  MOD_RES (123)..(124): Any amino acid
  MOD_RES (126)..(130): Any amino acid
  MOD_RES (139)..(141): Any amino acid
  MOD_RES (143)..(149): Any amino acid
  MOD_RES (151)..(152): Any amino acid
  MOD_RES (154)..(158): Any amino acid
  MOD_RES (167)..(169): Any amino acid
  MOD_RES (171)..(177): Any amino acid
  MOD_RES (179)..(180): Any amino acid
  MOD_RES (182)..(186): Any amino acid
  MOD_RES (195)..(197): Any amino acid
  MOD_RES (199)..(209): Any amino acid
XXXXXXXXXCXXCXXXXXSPADLTRHXXXHXXXXXXXCXXCXXXXXQSSNLVRHXXXHXXXXXXXCXXCXXXXXRSDHLTNHXXXHXXXXXXXCXXCXXXXXRSDELVRHXXXHXXXXXXXCXXCXXXXXRSDKLVRHXXXHXXXXXXXCXXCXXXXXRSDELVRHXXXHXXXXXXXCXXCXXXXXRSDKLVRHXXXHXXXXXXXXXXX

SEQ ID NO: 1994 - protein, 209 aa, Artificial Sequence
  source: /note="Description of Artificial Sequence: Synthetic polypeptide"
  MOD_RES (1)..(9): Any amino acid
  MOD_RES (11)..(12): Any amino acid
  MOD_RES (14)..(18): Any amino acid
  MOD_RES (27)..(29): Any amino acid
  MOD_RES (31)..(37): Any amino acid
  MOD_RES (39)..(40): Any amino acid
  MOD_RES (42)..(46): Any amino acid
  MOD_RES (55)..(57): Any amino acid
  MOD_RES (59)..(65): Any amino acid
  MOD_RES (67)..(68): Any amino acid
  MOD_RES (70)..(74): Any amino acid
  MOD_RES (83)..(85): Any amino acid
  MOD_RES (87)..(93): Any amino acid
  MOD_RES (95)..(96): Any amino acid
  MOD_RES (98)..(102): Any amino acid
  MOD_RES (111)..(113): Any amino acid
  MOD_RES (115)..(121): Any amino acid
  MOD_RES (123)..(124): Any amino acid
  MOD_RES (126)..(130): Any amino acid
  MOD_RES (139)..(141): Any amino acid
  MOD_RES (143)..(149): Any amino acid
  MOD_RES (151)..(152): Any amino acid
  MOD_RES (154)..(158): Any amino acid
  MOD_RES (167)..(169): Any amino acid
  MOD_RES (171)..(177): Any amino acid
  MOD_RES (179)..(180): Any amino acid
  MOD_RES (182)..(186): Any amino acid
  MOD_RES (195)..(197): Any amino acid
  MOD_RES (199)..(209): Any amino acid
XXXXXXXXXCXXCXXXXXQRAHLERHXXXHXXXXXXXCXXCXXXXXSPADLTRHXXXHXXXXXXXCXXCXXXXXQSSNLVRHXXXHXXXXXXXCXXCXXXXXRSDHLTNHXXXHXXXXXXXCXXCXXXXXRSDELVRHXXXHXXXXXXXCXXCXXXXXRSDKLVRHXXXHXXXXXXXCXXCXXXXXRSDELVRHXXXHXXXXXXXXXXX

SEQ ID NO: 1995 - protein, 209 aa, Artificial Sequence
  source: /note="Description of Artificial Sequence: Synthetic polypeptide"
  MOD_RES (1)..(9): Any amino acid
  MOD_RES (11)..(12): Any amino acid
  MOD_RES (14)..(18): Any amino acid
  MOD_RES (27)..(29): Any amino acid
  MOD_RES (31)..(37): Any amino acid
  MOD_RES (39)..(40): Any amino acid
  MOD_RES (42)..(46): Any amino acid
  MOD_RES (55)..(57): Any amino acid
  MOD_RES (59)..(65): Any amino acid
  MOD_RES (67)..(68): Any amino acid
  MOD_RES (70)..(74): Any amino acid
  MOD_RES (83)..(85): Any amino acid
  MOD_RES (87)..(93): Any amino acid
  MOD_RES (95)..(96): Any amino acid
  MOD_RES (98)..(102): Any amino acid
  MOD_RES (111)..(113): Any amino acid
  MOD_RES (115)..(121): Any amino acid
  MOD_RES (123)..(124): Any amino acid
  MOD_RES (126)..(130): Any amino acid
  MOD_RES (139)..(141): Any amino acid
  MOD_RES (143)..(149): Any amino acid
  MOD_RES (151)..(152): Any amino acid
  MOD_RES (154)..(158): Any amino acid
  MOD_RES (167)..(169): Any amino acid
  MOD_RES (171)..(177): Any amino acid
  MOD_RES (179)..(180): Any amino acid
  MOD_RES (182)..(186): Any amino acid
  MOD_RES (195)..(197): Any amino acid
  MOD_RES (199)..(209): Any amino acid
XXXXXXXXXCXXCXXXXXQSSNLVRHXXXHXXXXXXXCXXCXXXXXQRAHLERHXXXHXXXXXXXCXXCXXXXXSPADLTRHXXXHXXXXXXXCXXCXXXXXQSSNLVRHXXXHXXXXXXXCXXCXXXXXRSDHLTNHXXXHXXXXXXXCXXCXXXXXRSDELVRHXXXHXXXXXXXCXXCXXXXXRSDKLVRHXXXHXXXXXXXXXXX

SEQ ID NO: 1996 - protein, 209 aa, Artificial Sequence
  source: /note="Description of Artificial Sequence: Synthetic polypeptide"
  MOD_RES (1)..(9): Any amino acid
  MOD_RES (11)..(12): Any amino acid
  MOD_RES (14)..(18): Any amino acid
  MOD_RES (27)..(29): Any amino acid
  MOD_RES (31)..(37): Any amino acid
  MOD_RES (39)..(40): Any amino acid
  MOD_RES (42)..(46): Any amino acid
  MOD_RES (55)..(57): Any amino acid
  MOD_RES (59)..(65): Any amino acid
  MOD_RES (67)..(68): Any amino acid
  MOD_RES (70)..(74): Any amino acid
  MOD_RES (83)..(85): Any amino acid
  MOD_RES (87)..(93): Any amino acid
  MOD_RES (95)..(96): Any amino acid
  MOD_RES (98)..(102): Any amino acid
  MOD_RES (111)..(113): Any amino acid
  MOD_RES (115)..(121): Any amino acid
  MOD_RES (123)..(124): Any amino acid
  MOD_RES (126)..(130): Any amino acid
  MOD_RES (139)..(141): Any amino acid
  MOD_RES (143)..(149): Any amino acid
  MOD_RES (151)..(152): Any amino acid
  MOD_RES (154)..(158): Any amino acid
  MOD_RES (167)..(169): Any amino acid
  MOD_RES (171)..(177): Any amino acid
  MOD_RES (179)..(180): Any amino acid
  MOD_RES (182)..(186): Any amino acid
  MOD_RES (195)..(197): Any amino acid
  MOD_RES (199)..(209): Any amino acid
XXXXXXXXXCXXCXXXXXTTGNLTVHXXXHXXXXXXXCXXCXXXXXRSDNLVRHXXXHXXXXXXXCXXCXXXXXRADNLTEHXXXHXXXXXXXCXXCXXXXXQRANLRAHXXXHXXXXXXXCXXCXXXXXRSDKLVRHXXXHXXXXXXXCXXCXXXXXQAGHLASHXXXHXXXXXXXCXXCXXXXXRSDKLVRHXXXHXXXXXXXXXXX

SEQ ID NO: 1997 - protein, 209 aa, Artificial Sequence
  source: /note="Description of Artificial Sequence: Synthetic polypeptide"
  MOD_RES (1)..(9): Any amino acid
  MOD_RES (11)..(12): Any amino acid
  MOD_RES (14)..(18): Any amino acid
  MOD_RES (27)..(29): Any amino acid
  MOD_RES (31)..(37): Any amino acid
  MOD_RES (39)..(40): Any amino acid
  MOD_RES (42)..(46): Any amino acid
  MOD_RES (55)..(57): Any amino acid
  MOD_RES (59)..(65): Any amino acid
  MOD_RES (67)..(68): Any amino acid
  MOD_RES (70)..(74): Any amino acid
  MOD_RES (83)..(85): Any amino acid
  MOD_RES (87)..(93): Any amino acid
  MOD_RES (95)..(96): Any amino acid
  MOD_RES (98)..(102): Any amino acid
  MOD_RES (111)..(113): Any amino acid
  MOD_RES (115)..(121): Any amino acid
  MOD_RES (123)..(124): Any amino acid
  MOD_RES (126)..(130): Any amino acid
  MOD_RES (139)..(141): Any amino acid
  MOD_RES (143)..(149): Any amino acid
  MOD_RES (151)..(152): Any amino acid
  MOD_RES (154)..(158): Any amino acid
  MOD_RES (167)..(169): Any amino acid
  MOD_RES (171)..(177): Any amino acid
  MOD_RES (179)..(180): Any amino acid
  MOD_RES (182)..(186): Any amino acid
  MOD_RES (195)..(197): Any amino acid
  MOD_RES (199)..(209): Any amino acid
XXXXXXXXXCXXCXXXXXRADNLTEHXXXHXXXXXXXCXXCXXXXXQRANLRAHXXXHXXXXXXXCXXCXXXXXRSDKLVRHXXXHXXXXXXXCXXCXXXXXQAGHLASHXXXHXXXXXXXCXXCXXXXXRSDKLVRHXXXHXXXXXXXCXXCXXXXXRSDHLTTHXXXHXXXXXXXCXXCXXXXXRSDKLVRHXXXHXXXXXXXXXXX

SEQ ID NO: 1998 - protein, 209 aa, Artificial Sequence
  source: /note="Description of Artificial Sequence: Synthetic polypeptide"
  MOD_RES (1)..(9): Any amino acid
  MOD_RES (11)..(12): Any amino acid
  MOD_RES (14)..(18): Any amino acid
  MOD_RES (27)..(29): Any amino acid
  MOD_RES (31)..(37): Any amino acid
  MOD_RES (39)..(40): Any amino acid
  MOD_RES (42)..(46): Any amino acid
  MOD_RES (55)..(57): Any amino acid
  MOD_RES (59)..(65): Any amino acid
  MOD_RES (67)..(68): Any amino acid
  MOD_RES (70)..(74): Any amino acid
  MOD_RES (83)..(85): Any amino acid
  MOD_RES (87)..(93): Any amino acid
  MOD_RES (95)..(96): Any amino acid
  MOD_RES (98)..(102): Any amino acid
  MOD_RES (111)..(113): Any amino acid
  MOD_RES (115)..(121): Any amino acid
  MOD_RES (123)..(124): Any amino acid
  MOD_RES (126)..(130): Any amino acid
  MOD_RES (139)..(141): Any amino acid
  MOD_RES (143)..(149): Any amino acid
  MOD_RES (151)..(152): Any amino acid
  MOD_RES (154)..(158): Any amino acid
  MOD_RES (167)..(169): Any amino acid
  MOD_RES (171)..(177): Any amino acid
  MOD_RES (179)..(180): Any amino acid
  MOD_RES (182)..(186): Any amino acid
  MOD_RES (195)..(197): Any amino acid
  MOD_RES (199)..(209): Any amino acid
XXXXXXXXXCXXCXXXXXRSDELVRHXXXHXXXXXXXCXXCXXXXXTTGNLTVHXXXHXXXXXXXCXXCXXXXXRSDNLVRHXXXHXXXXXXXCXXCXXXXXRADNLTEHXXXHXXXXXXXCXXCXXXXXQRANLRAHXXXHXXXXXXXCXXCXXXXXRSDKLVRHXXXHXXXXXXXCXXCXXXXXQAGHLASHXXXHXXXXXXXXXXX

SEQ ID NO: 1999 - protein, 209 aa, Artificial Sequence
  source: /note="Description of Artificial Sequence: Synthetic polypeptide"
  MOD_RES (1)..(9): Any amino acid
  MOD_RES (11)..(12): Any amino acid
  MOD_RES (14)..(18): Any amino acid
  MOD_RES (27)..(29): Any amino acid
  MOD_RES (31)..(37): Any amino acid
  MOD_RES (39)..(40): Any amino acid
  MOD_RES (42)..(46): Any amino acid
  MOD_RES (55)..(57): Any amino acid
  MOD_RES (59)..(65): Any amino acid
  MOD_RES (67)..(68): Any amino acid
  MOD_RES (70)..(74): Any amino acid
  MOD_RES (83)..(85): Any amino acid
  MOD_RES (87)..(93): Any amino acid
  MOD_RES (95)..(96): Any amino acid
  MOD_RES (98)..(102): Any amino acid
  MOD_RES (111)..(113): Any amino acid
  MOD_RES (115)..(121): Any amino acid
  MOD_RES (123)..(124): Any amino acid
  MOD_RES (126)..(130): Any amino acid
  MOD_RES (139)..(141): Any amino acid
  MOD_RES (143)..(149): Any amino acid
  MOD_RES (151)..(152): Any amino acid
  MOD_RES (154)..(158): Any amino acid
  MOD_RES (167)..(169): Any amino acid
  MOD_RES (171)..(177): Any amino acid
  MOD_RES (179)..(180): Any amino acid
  MOD_RES (182)..(186): Any amino acid
  MOD_RES (195)..(197): Any amino acid
  MOD_RES (199)..(209): Any amino acid
XXXXXXXXXCXXCXXXXXRSDNLVRHXXXHXXXXXXXCXXCXXXXXRADNLTEHXXXHXXXXXXXCXXCXXXXXQRANLRAHXXXHXXXXXXXCXXCXXXXXRSDKLVRHXXXHXXXXXXXCXXCXXXXXQAGHLASHXXXHXXXXXXXCXXCXXXXXRSDKLVRHXXXHXXXXXXXCXXCXXXXXRSDHLTTHXXXHXXXXXXXXXXX

SEQ ID NO: 2000 - protein, 209 aa, Artificial Sequence
  source: /note="Description of Artificial Sequence: Synthetic polypeptide"
  MOD_RES (1)..(9): Any amino acid
  MOD_RES (11)..(12): Any amino acid
  MOD_RES (14)..(18): Any amino acid
  MOD_RES (27)..(29): Any amino acid
  MOD_RES (31)..(37): Any amino acid
  MOD_RES (39)..(40): Any amino acid
  MOD_RES (42)..(46): Any amino acid
  MOD_RES (55)..(57): Any amino acid
  MOD_RES (59)..(65): Any amino acid
  MOD_RES (67)..(68): Any amino acid
  MOD_RES (70)..(74): Any amino acid
  MOD_RES (83)..(85): Any amino acid
  MOD_RES (87)..(93): Any amino acid
  MOD_RES (95)..(96): Any amino acid
  MOD_RES (98)..(102): Any amino acid
  MOD_RES (111)..(113): Any amino acid
  MOD_RES (115)..(121): Any amino acid
  MOD_RES (123)..(124): Any amino acid
  MOD_RES (126)..(130): Any amino acid
  MOD_RES (139)..(141): Any amino acid
  MOD_RES (143)..(149): Any amino acid
  MOD_RES (151)..(152): Any amino acid
  MOD_RES (154)..(158): Any amino acid
  MOD_RES (167)..(169): Any amino acid
  MOD_RES (171)..(177): Any amino acid
  MOD_RES (179)..(180): Any amino acid
  MOD_RES (182)..(186): Any amino acid
  MOD_RES (195)..(197): Any amino acid
  MOD_RES (199)..(209): Any amino acid
XXXXXXXXXCXXCXXXXXRSDKLVRHXXXHXXXXXXXCXXCXXXXXQAGHLASHXXXHXXXXXXXCXXCXXXXXRSDKLVRHXXXHXXXXXXXCXXCXXXXXRSDHLTTHXXXHXXXXXXXCXXCXXXXXRSDKLVRHXXXHXXXXXXXCXXCXXXXXRSDHLTNHXXXHXXXXXXXCXXCXXXXXRSDKLVRHXXXHXXXXXXXXXXX

SEQ ID NO: 2001 - protein, 209 aa, Artificial Sequence
  source: /note="Description of Artificial Sequence: Synthetic polypeptide"
  MOD_RES (1)..(9): Any amino acid
  MOD_RES (11)..(12): Any amino acid
  MOD_RES (14)..(18): Any amino acid
  MOD_RES (27)..(29): Any amino acid
  MOD_RES (31)..(37): Any amino acid
  MOD_RES (39)..(40): Any amino acid
  MOD_RES (42)..(46): Any amino acid
  MOD_RES (55)..(57): Any amino acid
  MOD_RES (59)..(65): Any amino acid
  MOD_RES (67)..(68): Any amino acid
  MOD_RES (70)..(74): Any amino acid
  MOD_RES (83)..(85): Any amino acid
  MOD_RES (87)..(93): Any amino acid
  MOD_RES (95)..(96): Any amino acid
  MOD_RES (98)..(102): Any amino acid
  MOD_RES (111)..(113): Any amino acid
  MOD_RES (115)..(121): Any amino acid
  MOD_RES (123)..(124): Any amino acid
  MOD_RES (126)..(130): Any amino acid
  MOD_RES (139)..(141): Any amino acid
  MOD_RES (143)..(149): Any amino acid
  MOD_RES (151)..(152): Any amino acid
  MOD_RES (154)..(158): Any amino acid
  MOD_RES (167)..(169): Any amino acid
  MOD_RES (171)..(177): Any amino acid
  MOD_RES (179)..(180): Any amino acid
  MOD_RES (182)..(186): Any amino acid
  MOD_RES (195)..(197): Any amino acid
  MOD_RES (199)..(209): Any amino acid
XXXXXXXXXCXXCXXXXXQRANLRAHXXXHXXXXXXXCXXCXXXXXRSDKLVRHXXXHXXXXXXXCXXCXXXXXQAGHLASHXXXHXXXXXXXCXXCXXXXXRSDKLVRHXXXHXXXXXXXCXXCXXXXXRSDHLTTHXXXHXXXXXXXCXXCXXXXXRSDKLVRHXXXHXXXXXXXCXXCXXXXXRSDHLTNHXXXHXXXXXXXXXXX

SEQ ID NO: 2002 - protein, 209 aa, Artificial Sequence
  source: /note="Description of Artificial Sequence: Synthetic polypeptide"
  MOD_RES (1)..(9): Any amino acid
  MOD_RES (11)..(12): Any amino acid
  MOD_RES (14)..(18): Any amino acid
  MOD_RES (27)..(29): Any amino acid
  MOD_RES (31)..(37): Any amino acid
  MOD_RES (39)..(40): Any amino acid
  MOD_RES (42)..(46): Any amino acid
  MOD_RES (55)..(57): Any amino acid
  MOD_RES (59)..(65): Any amino acid
  MOD_RES (67)..(68): Any amino acid
  MOD_RES (70)..(74): Any amino acid
  MOD_RES (83)..(85): Any amino acid
  MOD_RES (87)..(93): Any amino acid
  MOD_RES (95)..(96): Any amino acid
  MOD_RES (98)..(102): Any amino acid
  MOD_RES (111)..(113): Any amino acid
  MOD_RES (115)..(121): Any amino acid
  MOD_RES (123)..(124): Any amino acid
  MOD_RES (126)..(130): Any amino acid
  MOD_RES (139)..(141): Any amino acid
  MOD_RES (143)..(149): Any amino acid
  MOD_RES (151)..(152): Any amino acid
  MOD_RES (154)..(158): Any amino acid
  MOD_RES (167)..(169): Any amino acid
  MOD_RES (171)..(177): Any amino acid
  MOD_RES (179)..(180): Any amino acid
  MOD_RES (182)..(186): Any amino acid
  MOD_RES (195)..(197): Any amino acid
  MOD_RES (199)..(209): Any amino acid
XXXXXXXXXCXXCXXXXXRRDELNVHXXXHXXXXXXXCXXCXXXXXRSDELVRHXXXHXXXXXXXCXXCXXXXXTTGNLTVHXXXHXXXXXXXCXXCXXXXXRSDNLVRHXXXHXXXXXXXCXXCXXXXXRADNLTEHXXXHXXXXXXXCXXCXXXXXQRANLRAHXXXHXXXXXXXCXXCXXXXXRSDKLVRHXXXHXXXXXXXXXXX

SEQ ID NO: 2003 - protein, 209 aa, Artificial Sequence
  source: /note="Description of Artificial Sequence: Synthetic polypeptide"
  MOD_RES (1)..(9): Any amino acid
  MOD_RES (11)..(12): Any amino acid
  MOD_RES (14)..(18): Any amino acid
  MOD_RES (27)..(29): Any amino acid
  MOD_RES (31)..(37): Any amino acid
  MOD_RES (39)..(40): Any amino acid
  MOD_RES (42)..(46): Any amino acid
  MOD_RES (55)..(57): Any amino acid
  MOD_RES (59)..(65): Any amino acid
  MOD_RES (67)..(68): Any amino acid
  MOD_RES (70)..(74): Any amino acid
  MOD_RES (83)..(85): Any amino acid
  MOD_RES (87)..(93): Any amino acid
  MOD_RES (95)..(96): Any amino acid
  MOD_RES (98)..(102): Any amino acid
  MOD_RES (111)..(113): Any amino acid
  MOD_RES (115)..(121): Any amino acid
  MOD_RES (123)..(124): Any amino acid
  MOD_RES (126)..(130): Any amino acid
  MOD_RES (139)..(141): Any amino acid
  MOD_RES (143)..(149): Any amino acid
  MOD_RES (151)..(152): Any amino acid
  MOD_RES (154)..(158): Any amino acid
  MOD_RES (167)..(169): Any amino acid
  MOD_RES (171)..(177): Any amino acid
  MOD_RES (179)..(180): Any amino acid
  MOD_RES (182)..(186): Any amino acid
  MOD_RES (195)..(197): Any amino acid
  MOD_RES (199)..(209): Any amino acid
XXXXXXXXXCXXCXXXXXQRAHLERHXXXHXXXXXXXCXXCXXXXXRRDELNVHXXXHXXXXXXXCXXCXXXXXRSDELVRHXXXHXXXXXXXCXXCXXXXXTTGNLTVHXXXHXXXXXXXCXXCXXXXXRSDNLVRHXXXHXXXXXXXCXXCXXXXXRADNLTEHXXXHXXXXXXXCXXCXXXXXQRANLRAHXXXHXXXXXXXXXXX

SEQ ID NO: 2004 - protein, 209 aa, Artificial Sequence
  source: /note="Description of Artificial Sequence: Synthetic polypeptide"
  MOD_RES (1)..(9): Any amino acid
  MOD_RES (11)..(12): Any amino acid
  MOD_RES (14)..(18): Any amino acid
  MOD_RES (27)..(29): Any amino acid
  MOD_RES (31)..(37): Any amino acid
  MOD_RES (39)..(40): Any amino acid
  MOD_RES (42)..(46): Any amino acid
  MOD_RES (55)..(57): Any amino acid
  MOD_RES (59)..(65): Any amino acid
  MOD_RES (67)..(68): Any amino acid
  MOD_RES (70)..(74): Any amino acid
  MOD_RES (83)..(85): Any amino acid
  MOD_RES (87)..(93): Any amino acid
  MOD_RES (95)..(96): Any amino acid
  MOD_RES (98)..(102): Any amino acid
  MOD_RES (111)..(113): Any amino acid
  MOD_RES (115)..(121): Any amino acid
  MOD_RES (123)..(124): Any amino acid
  MOD_RES (126)..(130): Any amino acid
  MOD_RES (139)..(141): Any amino acid
  MOD_RES (143)..(149): Any amino acid
  MOD_RES (151)..(152): Any amino acid
  MOD_RES (154)..(158): Any amino acid
  MOD_RES (167)..(169): Any amino acid
  MOD_RES (171)..(177): Any amino acid
  MOD_RES (179)..(180): Any amino acid
  MOD_RES (182)..(186): Any amino acid
  MOD_RES (195)..(197): Any amino acid
  MOD_RES (199)..(209): Any amino acid
XXXXXXXXXCXXCXXXXXQRANLRAHXXXHXXXXXXXCXXCXXXXXQRAHLERHXXXHXXXXXXXCXXCXXXXXRRDELNVHXXXHXXXXXXXCXXCXXXXXRSDELVRHXXXHXXXXXXXCXXCXXXXXTTGNLTVHXXXHXXXXXXXCXXCXXXXXRSDNLVRHXXXHXXXXXXXCXXCXXXXXRADNLTEHXXXHXXXXXXXXXXX

SEQ ID NO: 2005 - protein, 209 aa, Artificial Sequence
  source: /note="Description of Artificial Sequence: Synthetic polypeptide"
  MOD_RES (1)..(9): Any amino acid
  MOD_RES (11)..(12): Any amino acid
  MOD_RES (14)..(18): Any amino acid
  MOD_RES (27)..(29): Any amino acid
  MOD_RES (31)..(37): Any amino acid
  MOD_RES (39)..(40): Any amino acid
  MOD_RES (42)..(46): Any amino acid
  MOD_RES (55)..(57): Any amino acid
  MOD_RES (59)..(65): Any amino acid
  MOD_RES (67)..(68): Any amino acid
  MOD_RES (70)..(74): Any amino acid
  MOD_RES (83)..(85): Any amino acid
  MOD_RES (87)..(93): Any amino acid
  MOD_RES (95)..(96): Any amino acid
  MOD_RES (98)..(102): Any amino acid
  MOD_RES (111)..(113): Any amino acid
  MOD_RES (115)..(121): Any amino acid
  MOD_RES (123)..(124): Any amino acid
  MOD_RES (126)..(130): Any amino acid
  MOD_RES (139)..(141): Any amino acid
  MOD_RES (143)..(149): Any amino acid
  MOD_RES (151)..(152): Any amino acid
  MOD_RES (154)..(158): Any amino acid
  MOD_RES (167)..(169): Any amino acid
  MOD_RES (171)..(177): Any amino acid
  MOD_RES (179)..(180): Any amino acid
  MOD_RES (182)..(186): Any amino acid
  MOD_RES (195)..(197): Any amino acid
  MOD_RES (199)..(209): Any amino acid
XXXXXXXXXCXXCXXXXXRNDALTEHXXXHXXXXXXXCXXCXXXXXRSDNLVRHXXXHXXXXXXXCXXCXXXXXRSDHLTTHXXXHXXXXXXXCXXCXXXXXSKKALTEHXXXHXXXXXXXCXXCXXXXXQRANLRAHXXXHXXXXXXXCXXCXXXXXRADNLTEHXXXHXXXXXXXCXXCXXXXXDPGHLVRHXXXHXXXXXXXXXXX

SEQ ID NO: 2006 - protein, 209 aa, Artificial Sequence
  source: /note="Description of Artificial Sequence: Synthetic polypeptide"
  MOD_RES (1)..(9): Any amino acid
  MOD_RES (11)..(12): Any amino acid
  MOD_RES (14)..(18): Any amino acid
  MOD_RES (27)..(29): Any amino acid
  MOD_RES (31)..(37): Any amino acid
  MOD_RES (39)..(40): Any amino acid
  MOD_RES (42)..(46): Any amino acid
  MOD_RES (55)..(57): Any amino acid
  MOD_RES (59)..(65): Any amino acid
  MOD_RES (67)..(68): Any amino acid
  MOD_RES (70)..(74): Any amino acid
  MOD_RES (83)..(85): Any amino acid
  MOD_RES (87)..(93): Any amino acid
  MOD_RES (95)..(96): Any amino acid
  MOD_RES (98)..(102): Any amino acid
  MOD_RES (111)..(113): Any amino acid
  MOD_RES (115)..(121): Any amino acid
  MOD_RES (123)..(124): Any amino acid
  MOD_RES (126)..(130): Any amino acid
  MOD_RES (139)..(141): Any amino acid
  MOD_RES (143)..(149): Any amino acid
  MOD_RES (151)..(152): Any amino acid
  MOD_RES (154)..(158): Any amino acid
  MOD_RES (167)..(169): Any amino acid
  MOD_RES (171)..(177): Any amino acid
  MOD_RES (179)..(180): Any amino acid
  MOD_RES (182)..(186): Any amino acid
  MOD_RES (195)..(197): Any amino acid
  MOD_RES (199)..(209): Any amino acid
XXXXXXXXXCXXCXXXXXRSDNLVRHXXXHXXXXXXXCXXCXXXXXRSDHLTTHXXXHXXXXXXXCXXCXXXXXSKKALTEHXXXHXXXXXXXCXXCXXXXXQRANLRAHXXXHXXXXXXXCXXCXXXXXRADNLTEHXXXHXXXXXXXCXXCXXXXXDPGHLVRHXXXHXXXXXXXCXXCXXXXXRNDALTEHXXXHXXXXXXXXXXX

SEQ ID NO: 2007 - protein, 209 aa, Artificial Sequence
  source: /note="Description of Artificial Sequence: Synthetic polypeptide"
  MOD_RES (1)..(9): Any amino acid
  MOD_RES (11)..(12): Any amino acid
  MOD_RES (14)..(18): Any amino acid
  MOD_RES (27)..(29): Any amino acid
  MOD_RES (31)..(37): Any amino acid
  MOD_RES (39)..(40): Any amino acid
  MOD_RES (42)..(46): Any amino acid
  MOD_RES (55)..(57): Any amino acid
  MOD_RES (59)..(65): Any amino acid
  MOD_RES (67)..(68): Any amino acid
  MOD_RES (70)..(74): Any amino acid
  MOD_RES (83)..(85): Any amino acid
  MOD_RES (87)..(93): Any amino acid
  MOD_RES (95)..(96): Any amino acid
  MOD_RES (98)..(102): Any amino acid
  MOD_RES (111)..(113): Any amino acid
  MOD_RES (115)..(121): Any amino acid
  MOD_RES (123)..(124): Any amino acid
  MOD_RES (126)..(130): Any amino acid
  MOD_RES (139)..(141): Any amino acid
  MOD_RES (143)..(149): Any amino acid
  MOD_RES (151)..(152): Any amino acid
  MOD_RES (154)..(158): Any amino acid
  MOD_RES (167)..(169): Any amino acid
  MOD_RES (171)..(177): Any amino acid
  MOD_RES (179)..(180): Any amino acid
  MOD_RES (182)..(186): Any amino acid
  MOD_RES (195)..(197): Any amino acid
  MOD_RES (199)..(209): Any amino acid
XXXXXXXXXCXXCXXXXXRSDNLVRHXXXHXXXXXXXCXXCXXXXXRSDHLTTHXXXHXXXXXXXCXXCXXXXXRNDALTEHXXXHXXXXXXXCXXCXXXXXRSDNLVRHXXXHXXXXXXXCXXCXXXXXRSDHLTTHXXXHXXXXXXXCXXCXXXXXSKKALTEHXXXHXXXXXXXCXXCXXXXXQRANLRAHXXXHXXXXXXXXXXX

SEQ ID NO: 2008 - protein, 209 aa, Artificial Sequence
  source: /note="Description of Artificial Sequence: Synthetic polypeptide"
  MOD_RES (1)..(9): Any amino acid
  MOD_RES (11)..(12): Any amino acid
  MOD_RES (14)..(18): Any amino acid
  MOD_RES (27)..(29): Any amino acid
  MOD_RES (31)..(37): Any amino acid
  MOD_RES (39)..(40): Any amino acid
  MOD_RES (42)..(46): Any amino acid
  MOD_RES (55)..(57): Any amino acid
  MOD_RES (59)..(65): Any amino acid
  MOD_RES (67)..(68): Any amino acid
  MOD_RES (70)..(74): Any amino acid
  MOD_RES (83)..(85): Any amino acid
  MOD_RES (87)..(93): Any amino acid
  MOD_RES (95)..(96): Any amino acid
  MOD_RES (98)..(102): Any amino acid
  MOD_RES (111)..(113): Any amino acid
  MOD_RES (115)..(121): Any amino acid
  MOD_RES (123)..(124): Any amino acid
  MOD_RES (126)..(130): Any amino acid
  MOD_RES (139)..(141): Any amino acid
  MOD_RES (143)..(149): Any amino acid
  MOD_RES (151)..(152): Any amino acid
  MOD_RES (154)..(158): Any amino acid
  MOD_RES (167)..(169): Any amino acid
  MOD_RES (171)..(177): Any amino acid
  MOD_RES (179)..(180): Any amino acid
  MOD_RES (182)..(186): Any amino acid
  MOD_RES (195)..(197): Any amino acid
  MOD_RES (199)..(209): Any amino acid
XXXXXXXXXCXXCXXXXXSKKALTEHXXXHXXXXXXXCXXCXXXXXQRANLRAHXXXHXXXXXXXCXXCXXXXXRADNLTEHXXXHXXXXXXXCXXCXXXXXDPGHLVRHXXXHXXXXXXXCXXCXXXXXRNDALTEHXXXHXXXXXXXCXXCXXXXXERSHLREHXXXHXXXXXXXCXXCXXXXXDCRDLARHXXXHXXXXXXXXXXX

SEQ ID NO: 2009 - protein, 209 aa, Artificial Sequence
  source: /note="Description of Artificial Sequence: Synthetic polypeptide"
  MOD_RES (1)..(9): Any amino acid
  MOD_RES (11)..(12): Any amino acid
  MOD_RES (14)..(18): Any amino acid
  MOD_RES (27)..(29): Any amino acid
  MOD_RES (31)..(37): Any amino acid
  MOD_RES (39)..(40): Any amino acid
  MOD_RES (42)..(46): Any amino acid
  MOD_RES (55)..(57): Any amino acid
  MOD_RES (59)..(65): Any amino acid
  MOD_RES (67)..(68): Any amino acid
  MOD_RES (70)..(74): Any amino acid
  MOD_RES (83)..(85): Any amino acid
  MOD_RES (87)..(93): Any amino acid
  MOD_RES (95)..(96): Any amino acid
  MOD_RES (98)..(102): Any amino acid
  MOD_RES (111)..(113): Any amino acid
  MOD_RES (115)..(121): Any amino acid
  MOD_RES (123)..(124): Any amino acid
  MOD_RES (126)..(130): Any amino acid
  MOD_RES (139)..(141): Any amino acid
  MOD_RES (143)..(149): Any amino acid
  MOD_RES (151)..(152): Any amino acid
  MOD_RES (154)..(158): Any amino acid
  MOD_RES (167)..(169): Any amino acid
  MOD_RES (171)..(177): Any amino acid
  MOD_RES (179)..(180): Any amino acid
  MOD_RES (182)..(186): Any amino acid
  MOD_RES (195)..(197): Any amino acid
  MOD_RES (199)..(209): Any amino acid
XXXXXXXXXCXXCXXXXXRSDHLTTHXXXHXXXXXXXCXXCXXXXXSKKALTEHXXXHXXXXXXXCXXCXXXXXQRANLRAHXXXHXXXXXXXCXXCXXXXXRADNLTEHXXXHXXXXXXXCXXCXXXXXDPGHLVRHXXXHXXXXXXXCXXCXXXXXRNDALTEHXXXHXXXXXXXCXXCXXXXXERSHLREHXXXHXXXXXXXXXXX

SEQ ID NO: 2010 - protein, 209 aa, Artificial Sequence
  source: /note="Description of Artificial Sequence: Synthetic polypeptide"
  MOD_RES (1)..(9): Any amino acid
  MOD_RES (11)..(12): Any amino acid
  MOD_RES (14)..(18): Any amino acid
  MOD_RES (27)..(29): Any amino acid
  MOD_RES (31)..(37): Any amino acid
  MOD_RES (39)..(40): Any amino acid
  MOD_RES (42)..(46): Any amino acid
  MOD_RES (55)..(57): Any amino acid
  MOD_RES (59)..(65): Any amino acid
  MOD_RES (67)..(68): Any amino acid
  MOD_RES (70)..(74): Any amino acid
  MOD_RES (83)..(85): Any amino acid
  MOD_RES (87)..(93): Any amino acid
  MOD_RES (95)..(96): Any amino acid
  MOD_RES (98)..(102): Any amino acid
  MOD_RES (111)..(113): Any amino acid
  MOD_RES (115)..(121): Any amino acid
  MOD_RES (123)..(124): Any amino acid
  MOD_RES (126)..(130): Any amino acid
  MOD_RES (139)..(141): Any amino acid
  MOD_RES (143)..(149): Any amino acid
  MOD_RES (151)..(152): Any amino acid
  MOD_RES (154)..(158): Any amino acid
  MOD_RES (167)..(169): Any amino acid
  MOD_RES (171)..(177): Any amino acid
  MOD_RES (179)..(180): Any amino acid
  MOD_RES (182)..(186): Any amino acid
  MOD_RES (195)..(197): Any amino acid
  MOD_RES (199)..(209): Any amino acid
XXXXXXXXXCXXCXXXXXRSDHLTTHXXXHXXXXXXXCXXCXXXXXRNDALTEHXXXHXXXXXXXCXXCXXXXXRSDNLVRHXXXHXXXXXXXCXXCXXXXXRSDHLTTHXXXHXXXXXXXCXXCXXXXXSKKALTEHXXXHXXXXXXXCXXCXXXXXQRANLRAHXXXHXXXXXXXCXXCXXXXXRADNLTEHXXXHXXXXXXXXXXX

SEQ ID NO: 2011 - protein, 209 aa, Artificial Sequence
  source: /note="Description of Artificial Sequence: Synthetic polypeptide"
  MOD_RES (1)..(9): Any amino acid
  MOD_RES (11)..(12): Any amino acid
  MOD_RES (14)..(18): Any amino acid
  MOD_RES (27)..(29): Any amino acid
  MOD_RES (31)..(37): Any amino acid
  MOD_RES (39)..(40): Any amino acid
  MOD_RES (42)..(46): Any amino acid
  MOD_RES (55)..(57): Any amino acid
  MOD_RES (59)..(65): Any amino acid
  MOD_RES (67)..(68): Any amino acid
  MOD_RES (70)..(74): Any amino acid
  MOD_RES (83)..(85): Any amino acid
  MOD_RES (87)..(93): Any amino acid
  MOD_RES (95)..(96): Any amino acid
  MOD_RES (98)..(102): Any amino acid
  MOD_RES (111)..(113): Any amino acid
  MOD_RES (115)..(121): Any amino acid
  MOD_RES (123)..(124): Any amino acid
  MOD_RES (126)..(130): Any amino acid
  MOD_RES (139)..(141): Any amino acid
  MOD_RES (143)..(149): Any amino acid
  MOD_RES (151)..(152): Any amino acid
  MOD_RES (154)..(158): Any amino acid
  MOD_RES (167)..(169): Any amino acid
  MOD_RES (171)..(177): Any amino acid
  MOD_RES (179)..(180): Any amino acid
  MOD_RES (182)..(186): Any amino acid
  MOD_RES (195)..(197): Any amino acid
  MOD_RES (199)..(209): Any amino acid
XXXXXXXXXCXXCXXXXXRADNLTEHXXXHXXXXXXXCXXCXXXXXDPGHLVRHXXXHXXXXXXXCXXCXXXXXRNDALTEHXXXHXXXXXXXCXXCXXXXXERSHLREHXXXHXXXXXXXCXXCXXXXXDCRDLARHXXXHXXXXXXXCXXCXXXXXQRAHLERHXXXHXXXXXXXCXXCXXXXXTSGNLVRHXXXHXXXXXXXXXXX

SEQ ID NO: 2012 - protein, 209 aa, Artificial Sequence
  source: /note="Description of Artificial Sequence: Synthetic polypeptide"
  MOD_RES (1)..(9): Any amino acid
  MOD_RES (11)..(12): Any amino acid
  MOD_RES (14)..(18): Any amino acid
  MOD_RES (27)..(29): Any amino acid
  MOD_RES (31)..(37): Any amino acid
  MOD_RES (39)..(40): Any amino acid
  MOD_RES (42)..(46): Any amino acid
  MOD_RES (55)..(57): Any amino acid
  MOD_RES (59)..(65): Any amino acid
  MOD_RES (67)..(68): Any amino acid
  MOD_RES (70)..(74): Any amino acid
  MOD_RES (83)..(85): Any amino acid
  MOD_RES (87)..(93): Any amino acid
  MOD_RES (95)..(96): Any amino acid
  MOD_RES (98)..(102): Any amino acid
  MOD_RES (111)..(113): Any amino acid
  MOD_RES (115)..(121): Any amino acid
  MOD_RES (123)..(124): Any amino acid
  MOD_RES (126)..(130): Any amino acid
  MOD_RES (139)..(141): Any amino acid
  MOD_RES (143)..(149): Any amino acid
  MOD_RES (151)..(152): Any amino acid
  MOD_RES (154)..(158): Any amino acid
  MOD_RES (167)..(169): Any amino acid
  MOD_RES (171)..(177): Any amino acid
  MOD_RES (179)..(180): Any amino acid
  MOD_RES (182)..(186): Any amino acid
  MOD_RES (195)..(197): Any amino acid
  MOD_RES (199)..(209): Any amino acid
XXXXXXXXXCXXCXXXXXQRANLRAHXXXHXXXXXXXCXXCXXXXXRADNLTEHXXXHXXXXXXXCXXCXXXXXDPGHLVRHXXXHXXXXXXXCXXCXXXXXRNDALTEHXXXHXXXXXXXCXXCXXXXXERSHLREHXXXHXXXXXXXCXXCXXXXXDCRDLARHXXXHXXXXXXXCXXCXXXXXQRAHLERHXXXHXXXXXXXXXXX

SEQ ID NO: 2013 - protein, 209 aa, Artificial Sequence
  source: /note="Description of Artificial Sequence: Synthetic polypeptide"
  MOD_RES (1)..(9): Any amino acid
  MOD_RES (11)..(12): Any amino acid
  MOD_RES (14)..(18): Any amino acid
  MOD_RES (27)..(29): Any amino acid
  MOD_RES (31)..(37): Any amino acid
  MOD_RES (39)..(40): Any amino acid
  MOD_RES (42)..(46): Any amino acid
  MOD_RES (55)..(57): Any amino acid
  MOD_RES (59)..(65): Any amino acid
  MOD_RES (67)..(68): Any amino acid
  MOD_RES (70)..(74): Any amino acid
  MOD_RES (83)..(85): Any amino acid
  MOD_RES (87)..(93): Any amino acid
  MOD_RES (95)..(96): Any amino acid
  MOD_RES (98)..(102): Any amino acid
  MOD_RES (111)..(113): Any amino acid
  MOD_RES (115)..(121): Any amino acid
  MOD_RES (123)..(124): Any amino acid
  MOD_RES (126)..(130): Any amino acid
  MOD_RES (139)..(141): Any amino acid
  MOD_RES (143)..(149): Any amino acid
  MOD_RES (151)..(152): Any amino acid
  MOD_RES (154)..(158): Any amino acid
  MOD_RES (167)..(169): Any amino acid
  MOD_RES (171)..(177): Any amino acid
  MOD_RES (179)..(180): Any amino acid
  MOD_RES (182)..(186): Any amino acid
  MOD_RES (195)..(197): Any amino acid
  MOD_RES (199)..(209): Any amino acid
XXXXXXXXXCXXCXXXXXRSDNLVRHXXXHXXXXXXXCXXCXXXXXRTDTLRDHXXXHXXXXXXXCXXCXXXXXRSDNLVRHXXXHXXXXXXXCXXCXXXXXRSDHLTTHXXXHXXXXXXXCXXCXXXXXRNDALTEHXXXHXXXXXXXCXXCXXXXXRSDNLVRHXXXHXXXXXXXCXXCXXXXXRSDHLTTHXXXHXXXXXXXXXXX

SEQ ID NO: 2014 - protein, 209 aa, Artificial Sequence
  source: /note="Description of Artificial Sequence: Synthetic polypeptide"
  MOD_RES (1)..(9): Any amino acid
  MOD_RES (11)..(12): Any amino acid
  MOD_RES (14)..(18): Any amino acid
  MOD_RES (27)..(29): Any amino acid
  MOD_RES (31)..(37): Any amino acid
  MOD_RES (39)..(40): Any amino acid
  MOD_RES (42)..(46): Any amino acid
  MOD_RES (55)..(57): Any amino acid
  MOD_RES (59)..(65): Any amino acid
  MOD_RES (67)..(68): Any amino acid
  MOD_RES (70)..(74): Any amino acid
  MOD_RES (83)..(85): Any amino acid
  MOD_RES (87)..(93): Any amino acid
  MOD_RES (95)..(96): Any amino acid
  MOD_RES (98)..(102): Any amino acid
  MOD_RES (111)..(113): Any amino acid
  MOD_RES (115)..(121): Any amino acid
  MOD_RES (123)..(124): Any amino acid
  MOD_RES (126)..(130): Any amino acid
  MOD_RES (139)..(141): Any amino acid
  MOD_RES (143)..(149): Any amino acid
  MOD_RES (151)..(152): Any amino acid
  MOD_RES (154)..(158): Any amino acid
  MOD_RES (167)..(169): Any amino acid
  MOD_RES (171)..(177): Any amino acid
  MOD_RES (179)..(180): Any amino acid
  MOD_RES (182)..(186): Any amino acid
  MOD_RES (195)..(197): Any amino acid
  MOD_RES (199)..(209): Any amino acid
XXXXXXXXXCXXCXXXXXRSDHLTNHXXXHXXXXXXXCXXCXXXXXRSDNLVRHXXXHXXXXXXXCXXCXXXXXRTDTLRDHXXXHXXXXXXXCXXCXXXXXRSDNLVRHXXXHXXXXXXXCXXCXXXXXRSDHLTTHXXXHXXXXXXXCXXCXXXXXRNDALTEHXXXHXXXXXXXCXXCXXXXXRSDNLVRHXXXHXXXXXXXXXXX

SEQ ID NO: 2015 - protein, 209 aa, Artificial Sequence
  source: /note="Description of Artificial Sequence: Synthetic polypeptide"
  MOD_RES (1)..(9): Any amino acid
  MOD_RES (11)..(12): Any amino acid
  MOD_RES (14)..(18): Any amino acid
  MOD_RES (27)..(29): Any amino acid
  MOD_RES (31)..(37): Any amino acid
  MOD_RES (39)..(40): Any amino acid
  MOD_RES (42)..(46): Any amino acid
  MOD_RES (55)..(57): Any amino acid
  MOD_RES (59)..(65): Any amino acid
  MOD_RES (67)..(68): Any amino acid
  MOD_RES (70)..(74): Any amino acid
  MOD_RES (83)..(85): Any amino acid
  MOD_RES (87)..(93): Any amino acid
  MOD_RES (95)..(96): Any amino acid
  MOD_RES (98)..(102): Any amino acid
  MOD_RES (111)..(113): Any amino acid
  MOD_RES (115)..(121): Any amino acid
  MOD_RES (123)..(124): Any amino acid
  MOD_RES (126)..(130): Any amino acid
  MOD_RES (139)..(141): Any amino acid
  MOD_RES (143)..(149): Any amino acid
  MOD_RES (151)..(152): Any amino acid
  MOD_RES (154)..(158): Any amino acid
  MOD_RES (167)..(169): Any amino acid
  MOD_RES (171)..(177): Any amino acid
  MOD_RES (179)..(180): Any amino acid
  MOD_RES (182)..(186): Any amino acid
  MOD_RES (195)..(197): Any amino acid
  MOD_RES (199)..(209): Any amino acid
XXXXXXXXXCXXCXXXXXDPGHLVRHXXXHXXXXXXXCXXCXXXXXRSDHLTNHXXXHXXXXXXXCXXCXXXXXRSDNLVRHXXXHXXXXXXXCXXCXXXXXRTDTLRDHXXXHXXXXXXXCXXCXXXXXRSDNLVRHXXXHXXXXXXXCXXCXXXXXRSDHLTTHXXXHXXXXXXXCXXCXXXXXRNDALTEHXXXHXXXXXXXXXXX

SEQ ID NO: 2016 - protein, 209 aa, Artificial Sequence
  source: /note="Description of Artificial Sequence: Synthetic polypeptide"
  MOD_RES (1)..(9): Any amino acid
  MOD_RES (11)..(12): Any amino acid
  MOD_RES (14)..(18): Any amino acid
  MOD_RES (27)..(29): Any amino acid
  MOD_RES (31)..(37): Any amino acid
  MOD_RES (39)..(40): Any amino acid
  MOD_RES (42)..(46): Any amino acid
  MOD_RES (55)..(57): Any amino acid
  MOD_RES (59)..(65): Any amino acid
  MOD_RES (67)..(68): Any amino acid
  MOD_RES (70)..(74): Any amino acid
  MOD_RES (83)..(85): Any amino acid
  MOD_RES (87)..(93): Any amino acid
  MOD_RES (95)..(96): Any amino acid
  MOD_RES (98)..(102): Any amino acid
  MOD_RES (111)..(113): Any amino acid
  MOD_RES (115)..(121): Any amino acid
  MOD_RES (123)..(124): Any amino acid
  MOD_RES (126)..(130): Any amino acid
  MOD_RES (139)..(141): Any amino acid
  MOD_RES (143)..(149): Any amino acid
  MOD_RES (151)..(152): Any amino acid
  MOD_RES (154)..(158): Any amino acid
  MOD_RES (167)..(169): Any amino acid
  MOD_RES (171)..(177): Any amino acid
  MOD_RES (179)..(180): Any amino acid
  MOD_RES (182)..(186): Any amino acid
  MOD_RES (195)..(197): Any amino acid
  MOD_RES (199)..(209): Any amino acid
XXXXXXXXXCXXCXXXXXRSDELVRHXXXHXXXXXXXCXXCXXXXXRSDHLTNHXXXHXXXXXXXCXXCXXXXXDPGHLVRHXXXHXXXXXXXCXXCXXXXXRSDHLTNHXXXHXXXXXXXCXXCXXXXXRSDNLVRHXXXHXXXXXXXCXXCXXXXXRTDTLRDHXXXHXXXXXXXCXXCXXXXXRSDNLVRHXXXHXXXXXXXXXXX

SEQ ID NO: 2017 - protein, 209 aa, Artificial Sequence
  source: /note="Description of Artificial Sequence: Synthetic polypeptide"
  MOD_RES (1)..(9): Any amino acid
  MOD_RES (11)..(12): Any amino acid
  MOD_RES (14)..(18): Any amino acid
  MOD_RES (27)..(29): Any amino acid
  MOD_RES (31)..(37): Any amino acid
  MOD_RES (39)..(40): Any amino acid
  MOD_RES (42)..(46): Any amino acid
  MOD_RES (55)..(57): Any amino acid
  MOD_RES (59)..(65): Any amino acid
  MOD_RES (67)..(68): Any amino acid
  MOD_RES (70)..(74): Any amino acid
  MOD_RES (83)..(85): Any amino acid
  MOD_RES (87)..(93): Any amino acid
  MOD_RES (95)..(96): Any amino acid
  MOD_RES (98)..(102): Any amino acid
  MOD_RES (111)..(113): Any amino acid
  MOD_RES (115)..(121): Any amino acid
  MOD_RES (123)..(124): Any amino acid
  MOD_RES (126)..(130): Any amino acid
  MOD_RES (139)..(141): Any amino acid
  MOD_RES (143)..(149): Any amino acid
  MOD_RES (151)..(152): Any amino acid
  MOD_RES (154)..(158): Any amino acid
  MOD_RES (167)..(169): Any amino acid
  MOD_RES (171)..(177): Any amino acid
  MOD_RES (179)..(180): Any amino acid
  MOD_RES (182)..(186): Any amino acid
  MOD_RES (195)..(197): Any amino acid
  MOD_RES (199)..(209): Any amino acid
XXXXXXXXXCXXCXXXXXRSDHLTNHXXXHXXXXXXXCXXCXXXXXDPGHLVRHXXXHXXXXXXXCXXCXXXXXRSDHLTNHXXXHXXXXXXXCXXCXXXXXRSDNLVRHXXXHXXXXXXXCXXCXXXXXRTDTLRDHXXXHXXXXXXXCXXCXXXXXRSDNLVRHXXXHXXXXXXXCXXCXXXXXRSDHLTTHXXXHXXXXXXXXXXX

SEQ ID NO: 2018 - protein, 209 aa, Artificial Sequence
  source: /note="Description of Artificial Sequence: Synthetic polypeptide"
  MOD_RES (1)..(9): Any amino acid
  MOD_RES (11)..(12): Any amino acid
  MOD_RES (14)..(18): Any amino acid
  MOD_RES (27)..(29): Any amino acid
  MOD_RES (31)..(37): Any amino acid
  MOD_RES (39)..(40): Any amino acid
  MOD_RES (42)..(46): Any amino acid
  MOD_RES (55)..(57): Any amino acid
  MOD_RES (59)..(65): Any amino acid
  MOD_RES (67)..(68): Any amino acid
  MOD_RES (70)..(74): Any amino acid
  MOD_RES (83)..(85): Any amino acid
  MOD_RES (87)..(93): Any amino acid
  MOD_RES (95)..(96): Any amino acid
  MOD_RES (98)..(102): Any amino acid
  MOD_RES (111)..(113): Any amino acid
  MOD_RES (115)..(121): Any amino acid
  MOD_RES (123)..(124): Any amino acid
  MOD_RES (126)..(130): Any amino acid
  MOD_RES (139)..(141): Any amino acid
  MOD_RES (143)..(149): Any amino acid
  MOD_RES (151)..(152): Any amino acid
  MOD_RES (154)..(158): Any amino acid
  MOD_RES (167)..(169): Any amino acid
  MOD_RES (171)..(177): Any amino acid
  MOD_RES (179)..(180): Any amino acid
  MOD_RES (182)..(186): Any amino acid
  MOD_RES (195)..(197): Any amino acid
  MOD_RES (199)..(209): Any amino acid
XXXXXXXXXCXXCXXXXXRTDTLRDHXXXHXXXXXXXCXXCXXXXXRSDNLVRHXXXHXXXXXXXCXXCXXXXXRSDHLTTHXXXHXXXXXXXCXXCXXXXXRNDALTEHXXXHXXXXXXXCXXCXXXXXRSDNLVRHXXXHXXXXXXXCXXCXXXXXRSDHLTTHXXXHXXXXXXXCXXCXXXXXSKKALTEHXXXHXXXXXXXXXXX

SEQ ID NO: 2019 - protein, 209 aa, Artificial Sequence
  source: /note="Description of Artificial Sequence: Synthetic polypeptide"
  MOD_RES (1)..(9): Any amino acid
  MOD_RES (11)..(12): Any amino acid
  MOD_RES (14)..(18): Any amino acid
  MOD_RES (27)..(29): Any amino acid
  MOD_RES (31)..(37): Any amino acid
  MOD_RES (39)..(40): Any amino acid
  MOD_RES (42)..(46): Any amino acid
  MOD_RES (55)..(57): Any amino acid
  MOD_RES (59)..(65): Any amino acid
  MOD_RES (67)..(68): Any amino acid
  MOD_RES (70)..(74): Any amino acid
  MOD_RES (83)..(85): Any amino acid
  MOD_RES (87)..(93): Any amino acid
  MOD_RES (95)..(96): Any amino acid
  MOD_RES (98)..(102): Any amino acid
  MOD_RES (111)..(113): Any amino acid
  MOD_RES (115)..(121): Any amino acid
  MOD_RES (123)..(124): Any amino acid
  MOD_RES (126)..(130): Any amino acid
  MOD_RES (139)..(141): Any amino acid
  MOD_RES (143)..(149): Any amino acid
  MOD_RES (151)..(152): Any amino acid
  MOD_RES (154)..(158): Any amino acid
  MOD_RES (167)..(169): Any amino acid
  MOD_RES (171)..(177): Any amino acid
  MOD_RES (179)..(180): Any amino acid
  MOD_RES (182)..(186): Any amino acid
  MOD_RES (195)..(197): Any amino acid
  MOD_RES (199)..(209): Any amino acid
XXXXXXXXXCXXCXXXXXQRAHLERHXXXHXXXXXXXCXXCXXXXXRSDELVRHXXXHXXXXXXXCXXCXXXXXRSDHLTNHXXXHXXXXXXXCXXCXXXXXDPGHLVRHXXXHXXXXXXXCXXCXXXXXRSDHLTNHXXXHXXXXXXXCXXCXXXXXRSDNLVRHXXXHXXXXXXXCXXCXXXXXRTDTLRDHXXXHXXXXXXXXXXX

SEQ ID NO: 2020 - protein, 209 aa, Artificial Sequence
  source: /note="Description of Artificial Sequence: Synthetic polypeptide"
  MOD_RES (1)..(9): Any amino acid
  MOD_RES (11)..(12): Any amino acid
  MOD_RES (14)..(18): Any amino acid
  MOD_RES (27)..(29): Any amino acid
  MOD_RES (31)..(37): Any amino acid
  MOD_RES (39)..(40): Any amino acid
  MOD_RES (42)..(46): Any amino acid
  MOD_RES (55)..(57): Any amino acid
  MOD_RES (59)..(65): Any amino acid
  MOD_RES (67)..(68): Any amino acid
  MOD_RES (70)..(74): Any amino acid
  MOD_RES (83)..(85): Any amino acid
  MOD_RES (87)..(93): Any amino acid
  MOD_RES (95)..(96): Any amino acid
  MOD_RES (98)..(102): Any amino acid
  MOD_RES (111)..(113): Any amino acid
  MOD_RES (115)..(121): Any amino acid
  MOD_RES (123)..(124): Any amino acid
  MOD_RES (126)..(130): Any amino acid
  MOD_RES (139)..(141): Any amino acid
  MOD_RES (143)..(149): Any amino acid
  MOD_RES (151)..(152): Any amino acid
  MOD_RES (154)..(158): Any amino acid
  MOD_RES (167)..(169): Any amino acid
  MOD_RES (171)..(177): Any amino acid
  MOD_RES (179)..(180): Any amino acid
  MOD_RES (182)..(186): Any amino acid
  MOD_RES (195)..(197): Any amino acid
  MOD_RES (199)..(209): Any amino acid
XXXXXXXXXCXXCXXXXXDPGHLVRHXXXHXXXXXXXCXXCXXXXXRNDALTEHXXXHXXXXXXXCXXCXXXXXERSHLREHXXXHXXXXXXXCXXCXXXXXDCRDLARHXXXHXXXXXXXCXXCXXXXXQRAHLERHXXXHXXXXXXXCXXCXXXXXTSGNLVRHXXXHXXXXXXXCXXCXXXXXQSGHLTEHXXXHXXXXXXXXXXX

SEQ ID NO: 2021 - protein, 209 aa, Artificial Sequence
  source: /note="Description of Artificial Sequence: Synthetic polypeptide"
  MOD_RES (1)..(9): Any amino acid
  MOD_RES (11)..(12): Any amino acid
  MOD_RES (14)..(18): Any amino acid
  MOD_RES (27)..(29): Any amino acid
  MOD_RES (31)..(37): Any amino acid
  MOD_RES (39)..(40): Any amino acid
  MOD_RES (42)..(46): Any amino acid
  MOD_RES (55)..(57): Any amino acid
  MOD_RES (59)..(65): Any amino acid
  MOD_RES (67)..(68): Any amino acid
  MOD_RES (70)..(74): Any amino acid
  MOD_RES (83)..(85): Any amino acid
  MOD_RES (87)..(93): Any amino acid
  MOD_RES (95)..(96): Any amino acid
  MOD_RES (98)..(102): Any amino acid
  MOD_RES (111)..(113): Any amino acid
  MOD_RES (115)..(121): Any amino acid
  MOD_RES (123)..(124): Any amino acid
  MOD_RES (126)..(130): Any amino acid
  MOD_RES (139)..(141): Any amino acid
  MOD_RES (143)..(149): Any amino acid
  MOD_RES (151)..(152): Any amino acid
  MOD_RES (154)..(158): Any amino acid
  MOD_RES (167)..(169): Any amino acid
  MOD_RES (171)..(177): Any amino acid
  MOD_RES (179)..(180): Any amino acid
  MOD_RES (182)..(186): Any amino acid
  MOD_RES (195)..(197): Any amino acid
  MOD_RES (199)..(209): Any amino acid
XXXXXXXXXCXXCXXXXXRSDKLVRHXXXHXXXXXXXCXXCXXXXXTHLDLIRHXXXHXXXXXXXCXXCXXXXXDSGNLRVHXXXHXXXXXXXCXXCXXXXXQLAHLRAHXXXHXXXXXXXCXXCXXXXXDCRDLARHXXXHXXXXXXXCXXCXXXXXRSDHLTTHXXXHXXXXXXXCXXCXXXXXDCRDLARHXXXHXXXXXXXXXXX

SEQ ID NO: 2022 - protein, 209 aa, Artificial Sequence
  source: /note="Description of Artificial Sequence: Synthetic polypeptide"
  MOD_RES (1)..(9): Any amino acid
  MOD_RES (11)..(12): Any amino acid
  MOD_RES (14)..(18): Any amino acid
  MOD_RES (27)..(29): Any amino acid
  MOD_RES (31)..(37): Any amino acid
  MOD_RES (39)..(40): Any amino acid
  MOD_RES (42)..(46): Any amino acid
  MOD_RES (55)..(57): Any amino acid
  MOD_RES (59)..(65): Any amino acid
  MOD_RES (67)..(68): Any amino acid
  MOD_RES (70)..(74): Any amino acid
  MOD_RES (83)..(85): Any amino acid
  MOD_RES (87)..(93): Any amino acid
  MOD_RES (95)..(96): Any amino acid
  MOD_RES (98)..(102): Any amino acid
  MOD_RES (111)..(113): Any amino acid
  MOD_RES (115)..(121): Any amino acid
  MOD_RES (123)..(124): Any amino acid
  MOD_RES (126)..(130): Any amino acid
  MOD_RES (139)..(141): Any amino acid
  MOD_RES (143)..(149): Any amino acid
  MOD_RES (151)..(152): Any amino acid
  MOD_RES (154)..(158): Any amino acid
  MOD_RES (167)..(169): Any amino acid
  MOD_RES (171)..(177): Any amino acid
  MOD_RES (179)..(180): Any amino acid
  MOD_RES (182)..(186): Any amino acid
  MOD_RES (195)..(197): Any amino acid
  MOD_RES (199)..(209): Any amino acid
XXXXXXXXXCXXCXXXXXTHLDLIRHXXXHXXXXXXXCXXCXXXXXDSGNLRVHXXXHXXXXXXXCXXCXXXXXQLAHLRAHXXXHXXXXXXXCXXCXXXXXDCRDLARHXXXHXXXXXXXCXXCXXXXXRSDHLTTHXXXHXXXXXXXCXXCXXXXXDCRDLARHXXXHXXXXXXXCXXCXXXXXTSHSLTEHXXXHXXXXXXXXXXX

SEQ ID NO: 2023 - protein, 209 aa, Artificial Sequence
  source: /note="Description of Artificial Sequence: Synthetic polypeptide"
  MOD_RES (1)..(9): Any amino acid
  MOD_RES (11)..(12): Any amino acid
  MOD_RES (14)..(18): Any amino acid
  MOD_RES (27)..(29): Any amino acid
  MOD_RES (31)..(37): Any amino acid
  MOD_RES (39)..(40): Any amino acid
  MOD_RES (42)..(46): Any amino acid
  MOD_RES (55)..(57): Any amino acid
  MOD_RES (59)..(65): Any amino acid
  MOD_RES (67)..(68): Any amino acid
  MOD_RES (70)..(74): Any amino acid
  MOD_RES (83)..(85): Any amino acid
  MOD_RES (87)..(93): Any amino acid
  MOD_RES (95)..(96): Any amino acid
  MOD_RES (98)..(102): Any amino acid
  MOD_RES (111)..(113): Any amino acid
  MOD_RES (115)..(121): Any amino acid
  MOD_RES (123)..(124): Any amino acid
  MOD_RES (126)..(130): Any amino acid
  MOD_RES (139)..(141): Any amino acid
  MOD_RES (143)..(149): Any amino acid
  MOD_RES (151)..(152): Any amino acid
  MOD_RES (154)..(158): Any amino acid
  MOD_RES (167)..(169): Any amino acid
  MOD_RES (171)..(177): Any amino acid
  MOD_RES (179)..(180): Any amino acid
  MOD_RES (182)..(186): Any amino acid
  MOD_RES (195)..(197): Any amino acid
  MOD_RES (199)..(209): Any amino acid
XXXXXXXXXCXXCXXXXXERSHLREHXXXHXXXXXXXCXXCXXXXXRSDKLVRHXXXHXXXXXXXCXXCXXXXXTHLDLIRHXXXHXXXXXXXCXXCXXXXXDSGNLRVHXXXHXXXXXXXCXXCXXXXXQLAHLRAHXXXHXXXXXXXCXXCXXXXXDCRDLARHXXXHXXXXXXXCXXCXXXXXRSDHLTTHXXXHXXXXXXXXXXX

SEQ ID NO: 2024 - protein, 209 aa, Artificial Sequence
  source: /note="Description of Artificial Sequence: Synthetic polypeptide"
  MOD_RES (1)..(9): Any amino acid
  MOD_RES (11)..(12): Any amino acid
  MOD_RES (14)..(18): Any amino acid
  MOD_RES (27)..(29): Any amino acid
  MOD_RES (31)..(37): Any amino acid
  MOD_RES (39)..(40): Any amino acid
  MOD_RES (42)..(46): Any amino acid
  MOD_RES (55)..(57): Any amino acid
  MOD_RES (59)..(65): Any amino acid
  MOD_RES (67)..(68): Any amino acid
  MOD_RES (70)..(74): Any amino acid
  MOD_RES (83)..(85): Any amino acid
  MOD_RES (87)..(93): Any amino acid
  MOD_RES (95)..(96): Any amino acid
  MOD_RES (98)..(102): Any amino acid
  MOD_RES (111)..(113): Any amino acid
  MOD_RES (115)..(121): Any amino acid
  MOD_RES (123)..(124): Any amino acid
  MOD_RES (126)..(130): Any amino acid
  MOD_RES (139)..(141): Any amino acid
  MOD_RES (143)..(149): Any amino acid
  MOD_RES (151)..(152): Any amino acid
  MOD_RES (154)..(158): Any amino acid
  MOD_RES (167)..(169): Any amino acid
  MOD_RES (171)..(177): Any amino acid
  MOD_RES (179)..(180): Any amino acid
  MOD_RES (182)..(186): Any amino acid
  MOD_RES (195)..(197): Any amino acid
  MOD_RES (199)..(209): Any amino acid
XXXXXXXXXCXXCXXXXXDSGNLRVHXXXHXXXXXXXCXXCXXXXXQLAHLRAHXXXHXXXXXXXCXXCXXXXXDCRDLARHXXXHXXXXXXXCXXCXXXXXRSDHLTTHXXXHXXXXXXXCXXCXXXXXDCRDLARHXXXHXXXXXXXCXXCXXXXXTSHSLTEHXXXHXXXXXXXCXXCXXXXXRSDNLVRHXXXHXXXXXXXXXXX

SEQ ID NO: 2025 - protein, 209 aa, Artificial Sequence
  source: /note="Description of Artificial Sequence: Synthetic polypeptide"
  MOD_RES (1)..(9): Any amino acid
  MOD_RES (11)..(12): Any amino acid
  MOD_RES (14)..(18): Any amino acid
  MOD_RES (27)..(29): Any amino acid
  MOD_RES (31)..(37): Any amino acid
  MOD_RES (39)..(40): Any amino acid
  MOD_RES (42)..(46): Any amino acid
  MOD_RES (55)..(57): Any amino acid
  MOD_RES (59)..(65): Any amino acid
  MOD_RES (67)..(68): Any amino acid
  MOD_RES (70)..(74): Any amino acid
  MOD_RES (83)..(85): Any amino acid
  MOD_RES (87)..(93): Any amino acid
  MOD_RES (95)..(96): Any amino acid
  MOD_RES (98)..(102): Any amino acid
  MOD_RES (111)..(113): Any amino acid
  MOD_RES (115)..(121): Any amino acid
  MOD_RES (123)..(124): Any amino acid
  MOD_RES (126)..(130): Any amino acid
  MOD_RES (139)..(141): Any amino acid
  MOD_RES (143)..(149): Any amino acid
  MOD_RES (151)..(152): Any amino acid
  MOD_RES (154)..(158): Any amino acid
  MOD_RES (167)..(169): Any amino acid
  MOD_RES (171)..(177): Any amino acid
  MOD_RES (179)..(180): Any amino acid
  MOD_RES (182)..(186): Any amino acid
  MOD_RES (195)..(197): Any amino acid
  MOD_RES (199)..(209): Any amino acid
XXXXXXXXXCXXCXXXXXQLAHLRAHXXXHXXXXXXXCXXCXXXXXDCRDLARHXXXHXXXXXXXCXXCXXXXXRSDHLTTHXXXHXXXXXXXCXXCXXXXXDCRDLARHXXXHXXXXXXXCXXCXXXXXTSHSLTEHXXXHXXXXXXXCXXCXXXXXRSDNLVRHXXXHXXXXXXXCXXCXXXXXRRDELNVHXXXHXXXXXXXXXXX

SEQ ID NO: 2026 - protein, 209 aa, Artificial Sequence
  source: /note="Description of Artificial Sequence: Synthetic polypeptide"
  MOD_RES (1)..(9): Any amino acid
  MOD_RES (11)..(12): Any amino acid
  MOD_RES (14)..(18): Any amino acid
  MOD_RES (27)..(29): Any amino acid
  MOD_RES (31)..(37): Any amino acid
  MOD_RES (39)..(40): Any amino acid
  MOD_RES (42)..(46): Any amino acid
  MOD_RES (55)..(57): Any amino acid
  MOD_RES (59)..(65): Any amino acid
  MOD_RES (67)..(68): Any amino acid
  MOD_RES (70)..(74): Any amino acid
  MOD_RES (83)..(85): Any amino acid
  MOD_RES (87)..(93): Any amino acid
  MOD_RES (95)..(96): Any amino acid
  MOD_RES (98)..(102): Any amino acid
  MOD_RES (111)..(113): Any amino acid
  MOD_RES (115)..(121): Any amino acid
  MOD_RES (123)..(124): Any amino acid
  MOD_RES (126)..(130): Any amino acid
  MOD_RES (139)..(141): Any amino acid
  MOD_RES (143)..(149): Any amino acid
  MOD_RES (151)..(152): Any amino acid
  MOD_RES (154)..(158): Any amino acid
  MOD_RES (167)..(169): Any amino acid
  MOD_RES (171)..(177): Any amino acid
  MOD_RES (179)..(180): Any amino acid
  MOD_RES (182)..(186): Any amino acid
  MOD_RES (195)..(197): Any amino acid
  MOD_RES (199)..(209): Any amino acid
XXXXXXXXXCXXCXXXXXDCRDLARHXXXHXXXXXXXCXXCXXXXXRSDHLTTHXXXHXXXXXXXCXXCXXXXXDCRDLARHXXXHXXXXXXXCXXCXXXXXTSHSLTEHXXXHXXXXXXXCXXCXXXXXRSDNLVRHXXXHXXXXXXXCXXCXXXXXRRDELNVHXXXHXXXXXXXCXXCXXXXXRSDNLVRHXXXHXXXXXXXXXXX

SEQ ID NO: 2027 - protein, 209 aa, Artificial Sequence
  source: /note="Description of Artificial Sequence: Synthetic polypeptide"
  MOD_RES (1)..(9): Any amino acid
  MOD_RES (11)..(12): Any amino acid
  MOD_RES (14)..(18): Any amino acid
  MOD_RES (27)..(29): Any amino acid
  MOD_RES (31)..(37): Any amino acid
  MOD_RES (39)..(40): Any amino acid
  MOD_RES (42)..(46): Any amino acid
  MOD_RES (55)..(57): Any amino acid
  MOD_RES (59)..(65): Any amino acid
  MOD_RES (67)..(68): Any amino acid
  MOD_RES (70)..(74): Any amino acid
  MOD_RES (83)..(85): Any amino acid
  MOD_RES (87)..(93): Any amino acid
  MOD_RES (95)..(96): Any amino acid
  MOD_RES (98)..(102): Any amino acid
  MOD_RES (111)..(113): Any amino acid
  MOD_RES (115)..(121): Any amino acid
  MOD_RES (123)..(124): Any amino acid
  MOD_RES (126)..(130): Any amino acid
  MOD_RES (139)..(141): Any amino acid
  MOD_RES (143)..(149): Any amino acid
  MOD_RES (151)..(152): Any amino acid
  MOD_RES (154)..(158): Any amino acid
  MOD_RES (167)..(169): Any amino acid
  MOD_RES (171)..(177): Any amino acid
  MOD_RES (179)..(180): Any amino acid
  MOD_RES (182)..(186): Any amino acid
  MOD_RES (195)..(197): Any amino acid
  MOD_RES (199)..(209): Any amino acid
XXXXXXXXXCXXCXXXXXRSDKLVRHXXXHXXXXXXXCXXCXXXXXQSGDLRRHXXXHXXXXXXXCXXCXXXXXRSDKLVRHXXXHXXXXXXXCXXCXXXXXQLAHLRAHXXXHXXXXXXXCXXCXXXXXRSDKLTEHXXXHXXXXXXXCXXCXXXXXQLAHLRAHXXXHXXXXXXXCXXCXXXXXRSDKLVRHXXXHXXXXXXXXXXX

SEQ ID NO: 2028 - protein, 209 aa, Artificial Sequence
  source: /note="Description of Artificial Sequence: Synthetic polypeptide"
  MOD_RES (1)..(9): Any amino acid
  MOD_RES (11)..(12): Any amino acid
  MOD_RES (14)..(18): Any amino acid
  MOD_RES (27)..(29): Any amino acid
  MOD_RES (31)..(37): Any amino acid
  MOD_RES (39)..(40): Any amino acid
  MOD_RES (42)..(46): Any amino acid
  MOD_RES (55)..(57): Any amino acid
  MOD_RES (59)..(65): Any amino acid
  MOD_RES (67)..(68): Any amino acid
  MOD_RES (70)..(74): Any amino acid
  MOD_RES (83)..(85): Any amino acid
  MOD_RES (87)..(93): Any amino acid
  MOD_RES (95)..(96): Any amino acid
  MOD_RES (98)..(102): Any amino acid
  MOD_RES (111)..(113): Any amino acid
  MOD_RES (115)..(121): Any amino acid
  MOD_RES (123)..(124): Any amino acid
  MOD_RES (126)..(130): Any amino acid
  MOD_RES (139)..(141): Any amino acid
  MOD_RES (143)..(149): Any amino acid
  MOD_RES (151)..(152): Any amino acid
  MOD_RES (154)..(158): Any amino acid
  MOD_RES (167)..(169): Any amino acid
  MOD_RES (171)..(177): Any amino acid
  MOD_RES (179)..(180): Any amino acid
  MOD_RES (182)..(186): Any amino acid
  MOD_RES (195)..(197): Any amino acid
  MOD_RES (199)..(209): Any amino acid
XXXXXXXXXCXXCXXXXXRSDHLTTHXXXHXXXXXXXCXXCXXXXXRSDKLVRHXXXHXXXXXXXCXXCXXXXXQSGDLRRHXXXHXXXXXXXCXXCXXXXXRSDKLVRHXXXHXXXXXXXCXXCXXXXXQLAHLRAHXXXHXXXXXXXCXXCXXXXXRSDKLTEHXXXHXXXXXXXCXXCXXXXXQLAHLRAHXXXHXXXXXXXXXXX

SEQ ID NO: 2029 - protein, 209 aa, Artificial Sequence
  source: /note="Description of Artificial Sequence: Synthetic polypeptide"
  MOD_RES (1)..(9): Any amino acid
  MOD_RES (11)..(12): Any amino acid
  MOD_RES (14)..(18): Any amino acid
  MOD_RES (27)..(29): Any amino acid
  MOD_RES (31)..(37): Any amino acid
  MOD_RES (39)..(40): Any amino acid
  MOD_RES (42)..(46): Any amino acid
  MOD_RES (55)..(57): Any amino acid
  MOD_RES (59)..(65): Any amino acid
  MOD_RES (67)..(68): Any amino acid
  MOD_RES (70)..(74): Any amino acid
  MOD_RES (83)..(85): Any amino acid
  MOD_RES (87)..(93): Any amino acid
  MOD_RES (95)..(96): Any amino acid
  MOD_RES (98)..(102): Any amino acid
  MOD_RES (111)..(113): Any amino acid
  MOD_RES (115)..(121): Any amino acid
  MOD_RES (123)..(124): Any amino acid
  MOD_RES (126)..(130): Any amino acid
  MOD_RES (139)..(141): Any amino acid
  MOD_RES (143)..(149): Any amino acid
  MOD_RES (151)..(152): Any amino acid
  MOD_RES (154)..(158): Any amino acid
  MOD_RES (167)..(169): Any amino acid
  MOD_RES (171)..(177): Any amino acid
  MOD_RES (179)..(180): Any amino acid
  MOD_RES (182)..(186): Any amino acid
  MOD_RES (195)..(197): Any amino acid
  MOD_RES (199)..(209): Any amino acid
XXXXXXXXXCXXCXXXXXTSGNLVRHXXXHXXXXXXXCXXCXXXXXRSDHLTTHXXXHXXXXXXXCXXCXXXXXRSDKLVRHXXXHXXXXXXXCXXCXXXXXQSGDLRRHXXXHXXXXXXXCXXCXXXXXRSDKLVRHXXXHXXXXXXXCXXCXXXXXQLAHLRAHXXXHXXXXXXXCXXCXXXXXRSDKLTEHXXXHXXXXXXXXXXX

SEQ ID NO: 2030 - protein, 209 aa, Artificial Sequence
  source: /note="Description of Artificial Sequence: Synthetic polypeptide"
  MOD_RES (1)..(9): Any amino acid
  MOD_RES (11)..(12): Any amino acid
  MOD_RES (14)..(18): Any amino acid
  MOD_RES (27)..(29): Any amino acid
  MOD_RES (31)..(37): Any amino acid
  MOD_RES (39)..(40): Any amino acid
  MOD_RES (42)..(46): Any amino acid
  MOD_RES (55)..(57): Any amino acid
  MOD_RES (59)..(65): Any amino acid
  MOD_RES (67)..(68): Any amino acid
  MOD_RES (70)..(74): Any amino acid
  MOD_RES (83)..(85): Any amino acid
  MOD_RES (87)..(93): Any amino acid
  MOD_RES (95)..(96): Any amino acid
  MOD_RES (98)..(102): Any amino acid
  MOD_RES (111)..(113): Any amino acid
  MOD_RES (115)..(121): Any amino acid
  MOD_RES (123)..(124): Any amino acid
  MOD_RES (126)..(130): Any amino acid
  MOD_RES (139)..(141): Any amino acid
  MOD_RES (143)..(149): Any amino acid
  MOD_RES (151)..(152): Any amino acid
  MOD_RES (154)..(158): Any amino acid
  MOD_RES (167)..(169): Any amino acid
  MOD_RES (171)..(177): Any amino acid
  MOD_RES (179)..(180): Any amino acid
  MOD_RES (182)..(186): Any amino acid
  MOD_RES (195)..(197): Any amino acid
  MOD_RES (199)..(209): Any amino acid
XXXXXXXXXCXXCXXXXXSKKALTEHXXXHXXXXXXXCXXCXXXXXTSGNLVRHXXXHXXXXXXXCXXCXXXXXRSDHLTTHXXXHXXXXXXXCXXCXXXXXRSDKLVRHXXXHXXXXXXXCXXCXXXXXQSGDLRRHXXXHXXXXXXXCXXCXXXXXRSDKLVRHXXXHXXXXXXXCXXCXXXXXQLAHLRAHXXXHXXXXXXXXXXX

SEQ ID NO: 2031 - protein, 209 aa, Artificial Sequence
  source: /note="Description of Artificial Sequence: Synthetic polypeptide"
  MOD_RES (1)..(9): Any amino acid
  MOD_RES (11)..(12): Any amino acid
  MOD_RES (14)..(18): Any amino acid
  MOD_RES (27)..(29): Any amino acid
  MOD_RES (31)..(37): Any amino acid
  MOD_RES (39)..(40): Any amino acid
  MOD_RES (42)..(46): Any amino acid
  MOD_RES (55)..(57): Any amino acid
  MOD_RES (59)..(65): Any amino acid
  MOD_RES (67)..(68): Any amino acid
  MOD_RES (70)..(74): Any amino acid
  MOD_RES (83)..(85): Any amino acid
  MOD_RES (87)..(93): Any amino acid
  MOD_RES (95)..(96): Any amino acid
  MOD_RES (98)..(102): Any amino acid
  MOD_RES (111)..(113): Any amino acid
  MOD_RES (115)..(121): Any amino acid
  MOD_RES (123)..(124): Any amino acid
  MOD_RES (126)..(130): Any amino acid
  MOD_RES (139)..(141): Any amino acid
  MOD_RES (143)..(149): Any amino acid
  MOD_RES (151)..(152): Any amino acid
  MOD_RES (154)..(158): Any amino acid
  MOD_RES (167)..(169): Any amino acid
  MOD_RES (171)..(177): Any amino acid
  MOD_RES (179)..(180): Any amino acid
  MOD_RES (182)..(186): Any amino acid
  MOD_RES (195)..(197): Any amino acid
  MOD_RES (199)..(209): Any amino acid
XXXXXXXXXCXXCXXXXXRSDKLTEHXXXHXXXXXXXCXXCXXXXXRSDNLVRHXXXHXXXXXXXCXXCXXXXXRADNLTEHXXXHXXXXXXXCXXCXXXXXRSDNLVRHXXXHXXXXXXXCXXCXXXXXRSDHLTNHXXXHXXXXXXXCXXCXXXXXSKKALTEHXXXHXXXXXXXCXXCXXXXXTSGNLVRHXXXHXXXXXXXXXXX

SEQ ID NO: 2032 - protein, 209 aa, Artificial Sequence
  source: /note="Description of Artificial Sequence: Synthetic polypeptide"
  MOD_RES (1)..(9): Any amino acid
  MOD_RES (11)..(12): Any amino acid
  MOD_RES (14)..(18): Any amino acid
  MOD_RES (27)..(29): Any amino acid
  MOD_RES (31)..(37): Any amino acid
  MOD_RES (39)..(40): Any amino acid
  MOD_RES (42)..(46): Any amino acid
  MOD_RES (55)..(57): Any amino acid
  MOD_RES (59)..(65): Any amino acid
  MOD_RES (67)..(68): Any amino acid
  MOD_RES (70)..(74): Any amino acid
  MOD_RES (83)..(85): Any amino acid
  MOD_RES (87)..(93): Any amino acid
  MOD_RES (95)..(96): Any amino acid
  MOD_RES (98)..(102): Any amino acid
  MOD_RES (111)..(113): Any amino acid
  MOD_RES (115)..(121): Any amino acid
  MOD_RES (123)..(124): Any amino acid
  MOD_RES (126)..(130): Any amino acid
  MOD_RES (139)..(141): Any amino acid
  MOD_RES (143)..(149): Any amino acid
  MOD_RES (151)..(152): Any amino acid
  MOD_RES (154)..(158): Any amino acid
  MOD_RES (167)..(169): Any amino acid
  MOD_RES (171)..(177): Any amino acid
  MOD_RES (179)..(180): Any amino acid
  MOD_RES (182)..(186): Any amino acid
  MOD_RES (195)..(197): Any amino acid
  MOD_RES (199)..(209): Any amino acid
XXXXXXXXXCXXCXXXXXRSDHLTNHXXXHXXXXXXXCXXCXXXXXSKKALTEHXXXHXXXXXXXCXXCXXXXXTSGNLVRHXXXHXXXXXXXCXXCXXXXXRSDHLTTHXXXHXXXXXXXCXXCXXXXXRSDKLVRHXXXHXXXXXXXCXXCXXXXXQSGDLRRHXXXHXXXXXXXCXXCXXXXXRSDKLVRHXXXHXXXXXXXXXXX

SEQ ID NO: 2033 - protein, 209 aa, Artificial Sequence
  source: /note="Description of Artificial Sequence: Synthetic polypeptide"
  MOD_RES (1)..(9): Any amino acid
  MOD_RES (11)..(12): Any amino acid
  MOD_RES (14)..(18): Any amino acid
  MOD_RES (27)..(29): Any amino acid
  MOD_RES (31)..(37): Any amino acid
  MOD_RES (39)..(40): Any amino acid
  MOD_RES (42)..(46): Any amino acid
  MOD_RES (55)..(57): Any amino acid
  MOD_RES (59)..(65): Any amino acid
  MOD_RES (67)..(68): Any amino acid
  MOD_RES (70)..(74): Any amino acid
  MOD_RES (83)..(85): Any amino acid
  MOD_RES (87)..(93): Any amino acid
  MOD_RES (95)..(96): Any amino acid
  MOD_RES (98)..(102): Any amino acid
  MOD_RES (111)..(113): Any amino acid
  MOD_RES (115)..(121): Any amino acid
  MOD_RES (123)..(124): Any amino acid
  MOD_RES (126)..(130): Any amino acid
  MOD_RES (139)..(141): Any amino acid
  MOD_RES (143)..(149): Any amino acid
  MOD_RES (151)..(152): Any amino acid
  MOD_RES (154)..(158): Any amino acid
  MOD_RES (167)..(169): Any amino acid
  MOD_RES (171)..(177): Any amino acid
  MOD_RES (179)..(180): Any amino acid
  MOD_RES (182)..(186): Any amino acid
  MOD_RES (195)..(197): Any amino acid
  MOD_RES (199)..(209): Any amino acid
XXXXXXXXXCXXCXXXXXRADNLTEHXXXHXXXXXXXCXXCXXXXXRSDNLVRHXXXHXXXXXXXCXXCXXXXXRSDHLTNHXXXHXXXXXXXCXXCXXXXXSKKALTEHXXXHXXXXXXXCXXCXXXXXTSGNLVRHXXXHXXXXXXXCXXCXXXXXRSDHLTTHXXXHXXXXXXXCXXCXXXXXRSDKLVRHXXXHXXXXXXXXXXX

SEQ ID NO: 2034 - protein, 209 aa, Artificial Sequence
  source: /note="Description of Artificial Sequence: Synthetic polypeptide"
  MOD_RES (1)..(9): Any amino acid
  MOD_RES (11)..(12): Any amino acid
  MOD_RES (14)..(18): Any amino acid
  MOD_RES (27)..(29): Any amino acid
  MOD_RES (31)..(37): Any amino acid
  MOD_RES (39)..(40): Any amino acid
  MOD_RES (42)..(46): Any amino acid
  MOD_RES (55)..(57): Any amino acid
  MOD_RES (59)..(65): Any amino acid
  MOD_RES (67)..(68): Any amino acid
  MOD_RES (70)..(74): Any amino acid
  MOD_RES (83)..(85): Any amino acid
  MOD_RES (87)..(93): Any amino acid
  MOD_RES (95)..(96): Any amino acid
  MOD_RES (98)..(102): Any amino acid
  MOD_RES (111)..(113): Any amino acid
  MOD_RES (115)..(121): Any amino acid
  MOD_RES (123)..(124): Any amino acid
  MOD_RES (126)..(130): Any amino acid
  MOD_RES (139)..(141): Any amino acid
  MOD_RES (143)..(149): Any amino acid
  MOD_RES (151)..(152): Any amino acid
  MOD_RES (154)..(158): Any amino acid
  MOD_RES (167)..(169): Any amino acid
  MOD_RES (171)..(177): Any amino acid
  MOD_RES (179)..(180): Any amino acid
  MOD_RES (182)..(186): Any amino acid
  MOD_RES (195)..(197): Any amino acid
  MOD_RES (199)..(209): Any amino acid
XXXXXXXXXCXXCXXXXXRSDNLVRHXXXHXXXXXXXCXXCXXXXXRADNLTEHXXXHXXXXXXXCXXCXXXXXRSDNLVRHXXXHXXXXXXXCXXCXXXXXRSDHLTNHXXXHXXXXXXXCXXCXXXXXSKKALTEHXXXHXXXXXXXCXXCXXXXXTSGNLVRHXXXHXXXXXXXCXXCXXXXXRSDHLTTHXXXHXXXXXXXXXXX

SEQ ID NO: 2035 - protein, 209 aa, Artificial Sequence
  source: /note="Description of Artificial Sequence: Synthetic polypeptide"
  MOD_RES (1)..(9): Any amino acid
  MOD_RES (11)..(12): Any amino acid
  MOD_RES (14)..(18): Any amino acid
  MOD_RES (27)..(29): Any amino acid
  MOD_RES (31)..(37): Any amino acid
  MOD_RES (39)..(40): Any amino acid
  MOD_RES (42)..(46): Any amino acid
  MOD_RES (55)..(57): Any amino acid
  MOD_RES (59)..(65): Any amino acid
  MOD_RES (67)..(68): Any amino acid
  MOD_RES (70)..(74): Any amino acid
  MOD_RES (83)..(85): Any amino acid
  MOD_RES (87)..(93): Any amino acid
  MOD_RES (95)..(96): Any amino acid
  MOD_RES (98)..(102): Any amino acid
  MOD_RES (111)..(113): Any amino acid
  MOD_RES (115)..(121): Any amino acid
  MOD_RES (123)..(124): Any amino acid
  MOD_RES (126)..(130): Any amino acid
  MOD_RES (139)..(141): Any amino acid
  MOD_RES (143)..(149): Any amino acid
  MOD_RES (151)..(152): Any amino acid
  MOD_RES (154)..(158): Any amino acid
  MOD_RES (167)..(169): Any amino acid
  MOD_RES (171)..(177): Any amino acid
  MOD_RES (179)..(180): Any amino acid
  MOD_RES (182)..(186): Any amino acid
  MOD_RES (195)..(197): Any amino acid
  MOD_RES (199)..(209): Any amino acid
XXXXXXXXXCXXCXXXXXRSDNLVRHXXXHXXXXXXXCXXCXXXXXRSDHLTNHXXXHXXXXXXXCXXCXXXXXSKKALTEHXXXHXXXXXXXCXXCXXXXXTSGNLVRHXXXHXXXXXXXCXXCXXXXXRSDHLTTHXXXHXXXXXXXCXXCXXXXXRSDKLVRHXXXHXXXXXXXCXXCXXXXXQSGDLRRHXXXHXXXXXXXXXXX

SEQ ID NO: 2036 - protein, 209 aa, Artificial Sequence
  source: /note="Description of Artificial Sequence: Synthetic polypeptide"
  MOD_RES (1)..(9): Any amino acid
  MOD_RES (11)..(12): Any amino acid
  MOD_RES (14)..(18): Any amino acid
  MOD_RES (27)..(29): Any amino acid
  MOD_RES (31)..(37): Any amino acid
  MOD_RES (39)..(40): Any amino acid
  MOD_RES (42)..(46): Any amino acid
  MOD_RES (55)..(57): Any amino acid
  MOD_RES (59)..(65): Any amino acid
  MOD_RES (67)..(68): Any amino acid
  MOD_RES (70)..(74): Any amino acid
  MOD_RES (83)..(85): Any amino acid
  MOD_RES (87)..(93): Any amino acid
  MOD_RES (95)..(96): Any amino acid
  MOD_RES (98)..(102): Any amino acid
  MOD_RES (111)..(113): Any amino acid
  MOD_RES (115)..(121): Any amino acid
  MOD_RES (123)..(124): Any amino acid
  MOD_RES (126)..(130): Any amino acid
  MOD_RES (139)..(141): Any amino acid
  MOD_RES (143)..(149): Any amino acid
  MOD_RES (151)..(152): Any amino acid
  MOD_RES (154)..(158): Any amino acid
  MOD_RES (167)..(169): Any amino acid
  MOD_RES (171)..(177): Any amino acid
  MOD_RES (179)..(180): Any amino acid
  MOD_RES (182)..(186): Any amino acid
  MOD_RES (195)..(197): Any amino acid
  MOD_RES (199)..(209): Any amino acid
XXXXXXXXXCXXCXXXXXHKNALQNHXXXHXXXXXXXCXXCXXXXXQRAHLERHXXXHXXXXXXXCXXCXXXXXRSDKLTEHXXXHXXXXXXXCXXCXXXXXRSDNLVRHXXXHXXXXXXXCXXCXXXXXRADNLTEHXXXHXXXXXXXCXXCXXXXXRSDNLVRHXXXHXXXXXXXCXXCXXXXXRSDHLTNHXXXHXXXXXXXXXXX

SEQ ID NO: 2037 - protein, 209 aa, Artificial Sequence
  source: /note="Description of Artificial Sequence: Synthetic polypeptide"
  MOD_RES (1)..(9): Any amino acid
  MOD_RES (11)..(12): Any amino acid
  MOD_RES (14)..(18): Any amino acid
  MOD_RES (27)..(29): Any amino acid
  MOD_RES (31)..(37): Any amino acid
  MOD_RES (39)..(40): Any amino acid
  MOD_RES (42)..(46): Any amino acid
  MOD_RES (55)..(57): Any amino acid
  MOD_RES (59)..(65): Any amino acid
  MOD_RES (67)..(68): Any amino acid
  MOD_RES (70)..(74): Any amino acid
  MOD_RES (83)..(85): Any amino acid
  MOD_RES (87)..(93): Any amino acid
  MOD_RES (95)..(96): Any amino acid
  MOD_RES (98)..(102): Any amino acid
  MOD_RES (111)..(113): Any amino acid
  MOD_RES (115)..(121): Any amino acid
  MOD_RES (123)..(124): Any amino acid
  MOD_RES (126)..(130): Any amino acid
  MOD_RES (139)..(141): Any amino acid
  MOD_RES (143)..(149): Any amino acid
  MOD_RES (151)..(152): Any amino acid
  MOD_RES (154)..(158): Any amino acid
  MOD_RES (167)..(169): Any amino acid
  MOD_RES (171)..(177): Any amino acid
  MOD_RES (179)..(180): Any amino acid
  MOD_RES (182)..(186): Any amino acid
  MOD_RES (195)..(197): Any amino acid
  MOD_RES (199)..(209): Any amino acid
XXXXXXXXXCXXCXXXXXQRAHLERHXXXHXXXXXXXCXXCXXXXXRSDKLTEHXXXHXXXXXXXCXXCXXXXXRSDNLVRHXXXHXXXXXXXCXXCXXXXXRADNLTEHXXXHXXXXXXXCXXCXXXXXRSDNLVRHXXXHXXXXXXXCXXCXXXXXRSDHLTNHXXXHXXXXXXXCXXCXXXXXSKKALTEHXXXHXXXXXXXXXXX

SEQ ID NO: 2038 - protein, 209 aa, Artificial Sequence
  source: /note="Description of Artificial Sequence: Synthetic polypeptide"
  MOD_RES (1)..(9): Any amino acid
  MOD_RES (11)..(12): Any amino acid
  MOD_RES (14)..(18): Any amino acid
  MOD_RES (27)..(29): Any amino acid
  MOD_RES (31)..(37): Any amino acid
  MOD_RES (39)..(40): Any amino acid
  MOD_RES (42)..(46): Any amino acid
  MOD_RES (55)..(57): Any amino acid
  MOD_RES (59)..(65): Any amino acid
  MOD_RES (67)..(68): Any amino acid
  MOD_RES (70)..(74): Any amino acid
  MOD_RES (83)..(85): Any amino acid
  MOD_RES (87)..(93): Any amino acid
  MOD_RES (95)..(96): Any amino acid
  MOD_RES (98)..(102): Any amino acid
  MOD_RES (111)..(113): Any amino acid
  MOD_RES (115)..(121): Any amino acid
  MOD_RES (123)..(124): Any amino acid
  MOD_RES (126)..(130): Any amino acid
  MOD_RES (139)..(141): Any amino acid
  MOD_RES (143)..(149): Any amino acid
  MOD_RES (151)..(152): Any amino acid
  MOD_RES (154)..(158): Any amino acid
  MOD_RES (167)..(169): Any amino acid
  MOD_RES (171)..(177): Any amino acid
  MOD_RES (179)..(180): Any amino acid
  MOD_RES (182)..(186): Any amino acid
  MOD_RES (195)..(197): Any amino acid
  MOD_RES (199)..(209): Any amino acid
XXXXXXXXXCXXCXXXXXQRAHLERHXXXHXXXXXXXCXXCXXXXXHKNALQNHXXXHXXXXXXXCXXCXXXXXQRAHLERHXXXHXXXXXXXCXXCXXXXXRSDKLTEHXXXHXXXXXXXCXXCXXXXXRSDNLVRHXXXHXXXXXXXCXXCXXXXXRADNLTEHXXXHXXXXXXXCXXCXXXXXRSDNLVRHXXXHXXXXXXXXXXX

SEQ ID NO: 2039 - protein, 209 aa, Artificial Sequence
  source: /note="Description of Artificial Sequence: Synthetic polypeptide"
  MOD_RES (1)..(9): Any amino acid
  MOD_RES (11)..(12): Any amino acid
  MOD_RES (14)..(18): Any amino acid
  MOD_RES (27)..(29): Any amino acid
  MOD_RES (31)..(37): Any amino acid
  MOD_RES (39)..(40): Any amino acid
  MOD_RES (42)..(46): Any amino acid
  MOD_RES (55)..(57): Any amino acid
  MOD_RES (59)..(65): Any amino acid
  MOD_RES (67)..(68): Any amino acid
  MOD_RES (70)..(74): Any amino acid
  MOD_RES (83)..(85): Any amino acid
  MOD_RES (87)..(93): Any amino acid
  MOD_RES (95)..(96): Any amino acid
  MOD_RES (98)..(102): Any amino acid
  MOD_RES (111)..(113): Any amino acid
  MOD_RES (115)..(121): Any amino acid
  MOD_RES (123)..(124): Any amino acid
  MOD_RES (126)..(130): Any amino acid
  MOD_RES (139)..(141): Any amino acid
  MOD_RES (143)..(149): Any amino acid
  MOD_RES (151)..(152): Any amino acid
  MOD_RES (154)..(158): Any amino acid
  MOD_RES (167)..(169): Any amino acid
  MOD_RES (171)..(177): Any amino acid
  MOD_RES (179)..(180): Any amino acid
  MOD_RES (182)..(186): Any amino acid
  MOD_RES (195)..(197): Any amino acid
  MOD_RES (199)..(209): Any amino acid
XXXXXXXXXCXXCXXXXXTSGHLVRHXXXHXXXXXXXCXXCXXXXXQRAHLERHXXXHXXXXXXXCXXCXXXXXHKNALQNHXXXHXXXXXXXCXXCXXXXXQRAHLERHXXXHXXXXXXXCXXCXXXXXRSDKLTEHXXXHXXXXXXXCXXCXXXXXRSDNLVRHXXXHXXXXXXXCXXCXXXXXRADNLTEHXXXHXXXXXXXXXXX

SEQ ID NO: 2040 - protein, 209 aa, Artificial Sequence
  source: /note="Description of Artificial Sequence: Synthetic polypeptide"
  MOD_RES (1)..(9): Any amino acid
  MOD_RES (11)..(12): Any amino acid
  MOD_RES (14)..(18): Any amino acid
  MOD_RES (27)..(29): Any amino acid
  MOD_RES (31)..(37): Any amino acid
  MOD_RES (39)..(40): Any amino acid
  MOD_RES (42)..(46): Any amino acid
  MOD_RES (55)..(57): Any amino acid
  MOD_RES (59)..(65): Any amino acid
  MOD_RES (67)..(68): Any amino acid
  MOD_RES (70)..(74): Any amino acid
  MOD_RES (83)..(85): Any amino acid
  MOD_RES (87)..(93): Any amino acid
  MOD_RES (95)..(96): Any amino acid
  MOD_RES (98)..(102): Any amino acid
  MOD_RES (111)..(113): Any amino acid
  MOD_RES (115)..(121): Any amino acid
  MOD_RES (123)..(124): Any amino acid
  MOD_RES (126)..(130): Any amino acid
  MOD_RES (139)..(141): Any amino acid
  MOD_RES (143)..(149): Any amino acid
  MOD_RES (151)..(152): Any amino acid
  MOD_RES (154)..(158): Any amino acid
  MOD_RES (167)..(169): Any amino acid
  MOD_RES (171)..(177): Any amino acid
  MOD_RES (179)..(180): Any amino acid
  MOD_RES (182)..(186): Any amino acid
  MOD_RES (195)..(197): Any amino acid
  MOD_RES (199)..(209): Any amino acid
XXXXXXXXXCXXCXXXXXQSSNLVRHXXXHXXXXXXXCXXCXXXXXTSGHLVRHXXXHXXXXXXXCXXCXXXXXQRAHLERHXXXHXXXXXXXCXXCXXXXXHKNALQNHXXXHXXXXXXXCXXCXXXXXQRAHLERHXXXHXXXXXXXCXXCXXXXXRSDKLTEHXXXHXXXXXXXCXXCXXXXXRSDNLVRHXXXHXXXXXXXXXXX

SEQ ID NO: 2041 - protein, 209 aa, Artificial Sequence
  source: /note="Description of Artificial Sequence: Synthetic polypeptide"
  MOD_RES (1)..(9): Any amino acid
  MOD_RES (11)..(12): Any amino acid
  MOD_RES (14)..(18): Any amino acid
  MOD_RES (27)..(29): Any amino acid
  MOD_RES (31)..(37): Any amino acid
  MOD_RES (39)..(40): Any amino acid
  MOD_RES (42)..(46): Any amino acid
  MOD_RES (55)..(57): Any amino acid
  MOD_RES (59)..(65): Any amino acid
  MOD_RES (67)..(68): Any amino acid
  MOD_RES (70)..(74): Any amino acid
  MOD_RES (83)..(85): Any amino acid
  MOD_RES (87)..(93): Any amino acid
  MOD_RES (95)..(96): Any amino acid
  MOD_RES (98)..(102): Any amino acid
  MOD_RES (111)..(113): Any amino acid
  MOD_RES (115)..(121): Any amino acid
  MOD_RES (123)..(124): Any amino acid
  MOD_RES (126)..(130): Any amino acid
  MOD_RES (139)..(141): Any amino acid
  MOD_RES (143)..(149): Any amino acid
  MOD_RES (151)..(152): Any amino acid
  MOD_RES (154)..(158): Any amino acid
  MOD_RES (167)..(169): Any amino acid
  MOD_RES (171)..(177): Any amino acid
  MOD_RES (179)..(180): Any amino acid
  MOD_RES (182)..(186): Any amino acid
  MOD_RES (195)..(197): Any amino acid
  MOD_RES (199)..(209): Any amino acid
XXXXXXXXXCXXCXXXXXQSSNLVRHXXXHXXXXXXXCXXCXXXXXRSDKLVRHXXXHXXXXXXXCXXCXXXXXERSHLREHXXXHXXXXXXXCXXCXXXXXRSDHLTNHXXXHXXXXXXXCXXCXXXXXERSHLREHXXXHXXXXXXXCXXCXXXXXRSDKLVRHXXXHXXXXXXXCXXCXXXXXSPADLTRHXXXHXXXXXXXXXXX

SEQ ID NO: 2042 - protein, 209 aa, Artificial Sequence
  source: /note="Description of Artificial Sequence: Synthetic polypeptide"
  MOD_RES (1)..(9): Any amino acid
  MOD_RES (11)..(12): Any amino acid
  MOD_RES (14)..(18): Any amino acid
  MOD_RES (27)..(29): Any amino acid
  MOD_RES (31)..(37): Any amino acid
  MOD_RES (39)..(40): Any amino acid
  MOD_RES (42)..(46): Any amino acid
  MOD_RES (55)..(57): Any amino acid
  MOD_RES (59)..(65): Any amino acid
  MOD_RES (67)..(68): Any amino acid
  MOD_RES (70)..(74): Any amino acid
  MOD_RES (83)..(85): Any amino acid
  MOD_RES (87)..(93): Any amino acid
  MOD_RES (95)..(96): Any amino acid
  MOD_RES (98)..(102): Any amino acid
  MOD_RES (111)..(113): Any amino acid
  MOD_RES (115)..(121): Any amino acid
  MOD_RES (123)..(124): Any amino acid
  MOD_RES (126)..(130): Any amino acid
  MOD_RES (139)..(141): Any amino acid
  MOD_RES (143)..(149): Any amino acid
  MOD_RES (151)..(152): Any amino acid
  MOD_RES (154)..(158): Any amino acid
  MOD_RES (167)..(169): Any amino acid
  MOD_RES (171)..(177): Any amino acid
  MOD_RES (179)..(180): Any amino acid
  MOD_RES (182)..(186): Any amino acid
  MOD_RES (195)..(197): Any amino acid
  MOD_RES (199)..(209): Any amino acid
XXXXXXXXXCXXCXXXXXRSDHLTNHXXXHXXXXXXXCXXCXXXXXRSDHLTTHXXXHXXXXXXXCXXCXXXXXTTGNLTVHXXXHXXXXXXXCXXCXXXXXRSDKLVRHXXXHXXXXXXXCXXCXXXXXRSDDLVRHXXXHXXXXXXXCXXCXXXXXQRAHLERHXXXHXXXXXXXCXXCXXXXXQSGDLRRHXXXHXXXXXXXXXXX

SEQ ID NO: 2043 - protein, 209 aa, Artificial Sequence
  source: /note="Description of Artificial Sequence: Synthetic polypeptide"
  MOD_RES (1)..(9): Any amino acid
  MOD_RES (11)..(12): Any amino acid
  MOD_RES (14)..(18): Any amino acid
  MOD_RES (27)..(29): Any amino acid
  MOD_RES (31)..(37): Any amino acid
  MOD_RES (39)..(40): Any amino acid
  MOD_RES (42)..(46): Any amino acid
  MOD_RES (55)..(57): Any amino acid
  MOD_RES (59)..(65): Any amino acid
  MOD_RES (67)..(68): Any amino acid
  MOD_RES (70)..(74): Any amino acid
  MOD_RES (83)..(85): Any amino acid
  MOD_RES (87)..(93): Any amino acid
  MOD_RES (95)..(96): Any amino acid
  MOD_RES (98)..(102): Any amino acid
  MOD_RES (111)..(113): Any amino acid
  MOD_RES (115)..(121): Any amino acid
  MOD_RES (123)..(124): Any amino acid
  MOD_RES (126)..(130): Any amino acid
  MOD_RES (139)..(141): Any amino acid
  MOD_RES (143)..(149): Any amino acid
  MOD_RES (151)..(152): Any amino acid
  MOD_RES (154)..(158): Any amino acid
  MOD_RES (167)..(169): Any amino acid
  MOD_RES (171)..(177): Any amino acid
  MOD_RES (179)..(180): Any amino acid
  MOD_RES (182)..(186): Any amino acid
  MOD_RES (195)..(197): Any amino acid
  MOD_RES (199)..(209): Any amino acid
XXXXXXXXXCXXCXXXXXQAGHLASHXXXHXXXXXXXCXXCXXXXXRSDHLTNHXXXHXXXXXXXCXXCXXXXXRSDHLTTHXXXHXXXXXXXCXXCXXXXXTTGNLTVHXXXHXXXXXXXCXXCXXXXXRSDKLVRHXXXHXXXXXXXCXXCXXXXXRSDDLVRHXXXHXXXXXXXCXXCXXXXXQRAHLERHXXXHXXXXXXXXXXX

SEQ ID NO: 2044 - protein, 209 aa, Artificial Sequence
  source: /note="Description of Artificial Sequence: Synthetic polypeptide"
  MOD_RES (1)..(9): Any amino acid
  MOD_RES (11)..(12): Any amino acid
  MOD_RES (14)..(18): Any amino acid
  MOD_RES (27)..(29): Any amino acid
  MOD_RES (31)..(37): Any amino acid
  MOD_RES (39)..(40): Any amino acid
  MOD_RES (42)..(46): Any amino acid
  MOD_RES (55)..(57): Any amino acid
  MOD_RES (59)..(65): Any amino acid
  MOD_RES (67)..(68): Any amino acid
  MOD_RES (70)..(74): Any amino acid
  MOD_RES (83)..(85): Any amino acid
  MOD_RES (87)..(93): Any amino acid
  MOD_RES (95)..(96): Any amino acid
  MOD_RES (98)..(102): Any amino acid
  MOD_RES (111)..(113): Any amino acid
  MOD_RES (115)..(121): Any amino acid
  MOD_RES (123)..(124): Any amino acid
  MOD_RES (126)..(130): Any amino acid
  MOD_RES (139)..(141): Any amino acid
  MOD_RES (143)..(149): Any amino acid
  MOD_RES (151)..(152): Any amino acid
  MOD_RES (154)..(158): Any amino acid
  MOD_RES (167)..(169): Any amino acid
  MOD_RES (171)..(177): Any amino acid
  MOD_RES (179)..(180): Any amino acid
  MOD_RES (182)..(186): Any amino acid
  MOD_RES (195)..(197): Any amino acid
  MOD_RES (199)..(209): Any amino acid
XXXXXXXXXCXXCXXXXXTTGNLTVHXXXHXXXXXXXCXXCXXXXXRSDKLVRHXXXHXXXXXXXCXXCXXXXXRSDDLVRHXXXHXXXXXXXCXXCXXXXXQRAHLERHXXXHXXXXXXXCXXCXXXXXQSGDLRRHXXXHXXXXXXXCXXCXXXXXQRAHLERHXXXHXXXXXXXCXXCXXXXXRADNLTEHXXXHXXXXXXXXXXX

SEQ ID NO: 2045 - protein, 209 aa, Artificial Sequence
  source: /note="Description of Artificial Sequence: Synthetic polypeptide"
  MOD_RES (1)..(9): Any amino acid
  MOD_RES (11)..(12): Any amino acid
  MOD_RES (14)..(18): Any amino acid
  MOD_RES (27)..(29): Any amino acid
  MOD_RES (31)..(37): Any amino acid
  MOD_RES (39)..(40): Any amino acid
  MOD_RES (42)..(46): Any amino acid
  MOD_RES (55)..(57): Any amino acid
  MOD_RES (59)..(65): Any amino acid
  MOD_RES (67)..(68): Any amino acid
  MOD_RES (70)..(74): Any amino acid
  MOD_RES (83)..(85): Any amino acid
  MOD_RES (87)..(93): Any amino acid
  MOD_RES (95)..(96): Any amino acid
  MOD_RES (98)..(102): Any amino acid
  MOD_RES (111)..(113): Any amino acid
  MOD_RES (115)..(121): Any amino acid
  MOD_RES (123)..(124): Any amino acid
  MOD_RES (126)..(130): Any amino acid
  MOD_RES (139)..(141): Any amino acid
  MOD_RES (143)..(149): Any amino acid
  MOD_RES (151)..(152): Any amino acid
  MOD_RES (154)..(158): Any amino acid
  MOD_RES (167)..(169): Any amino acid
  MOD_RES (171)..(177): Any amino acid
  MOD_RES (179)..(180): Any amino acid
  MOD_RES (182)..(186): Any amino acid
  MOD_RES (195)..(197): Any amino acid
  MOD_RES (199)..(209): Any amino acid
XXXXXXXXXCXXCXXXXXRSDHLTTHXXXHXXXXXXXCXXCXXXXXTTGNLTVHXXXHXXXXXXXCXXCXXXXXRSDKLVRHXXXHXXXXXXXCXXCXXXXXRSDDLVRHXXXHXXXXXXXCXXCXXXXXQRAHLERHXXXHXXXXXXXCXXCXXXXXQSGDLRRHXXXHXXXXXXXCXXCXXXXXQRAHLERHXXXHXXXXXXXXXXX

SEQ ID NO: 2046 - protein, 209 aa, Artificial Sequence
  source: /note="Description of Artificial Sequence: Synthetic polypeptide"
  MOD_RES (1)..(9): Any amino acid
  MOD_RES (11)..(12): Any amino acid
  MOD_RES (14)..(18): Any amino acid
  MOD_RES (27)..(29): Any amino acid
  MOD_RES (31)..(37): Any amino acid
  MOD_RES (39)..(40): Any amino acid
  MOD_RES (42)..(46): Any amino acid
  MOD_RES (55)..(57): Any amino acid
  MOD_RES (59)..(65): Any amino acid
  MOD_RES (67)..(68): Any amino acid
  MOD_RES (70)..(74): Any amino acid
  MOD_RES (83)..(85): Any amino acid
  MOD_RES (87)..(93): Any amino acid
  MOD_RES (95)..(96): Any amino acid
  MOD_RES (98)..(102): Any amino acid
  MOD_RES (111)..(113): Any amino acid
  MOD_RES (115)..(121): Any amino acid
  MOD_RES (123)..(124): Any amino acid
  MOD_RES (126)..(130): Any amino acid
  MOD_RES (139)..(141): Any amino acid
  MOD_RES (143)..(149): Any amino acid
  MOD_RES (151)..(152): Any amino acid
  MOD_RES (154)..(158): Any amino acid
  MOD_RES (167)..(169): Any amino acid
  MOD_RES (171)..(177): Any amino acid
  MOD_RES (179)..(180): Any amino acid
  MOD_RES (182)..(186): Any amino acid
  MOD_RES (195)..(197): Any amino acid
  MOD_RES (199)..(209): Any amino acid
XXXXXXXXXCXXCXXXXXDPGALVRHXXXHXXXXXXXCXXCXXXXXTSHSLTEHXXXHXXXXXXXCXXCXXXXXTTGALTEHXXXHXXXXXXXCXXCXXXXXQRANLRAHXXXHXXXXXXXCXXCXXXXXSKKHLAEHXXXHXXXXXXXCXXCXXXXXTKNSLTEHXXXHXXXXXXXCXXCXXXXXDPGHLVRHXXXHXXXXXXXXXXX

SEQ ID NO: 2047 - protein, 209 aa, Artificial Sequence
  source: /note="Description of Artificial Sequence: Synthetic polypeptide"
  MOD_RES (1)..(9): Any amino acid
  MOD_RES (11)..(12): Any amino acid
  MOD_RES (14)..(18): Any amino acid
  MOD_RES (27)..(29): Any amino acid
  MOD_RES (31)..(37): Any amino acid
  MOD_RES (39)..(40): Any amino acid
  MOD_RES (42)..(46): Any amino acid
  MOD_RES (55)..(57): Any amino acid
  MOD_RES (59)..(65): Any amino acid
  MOD_RES (67)..(68): Any amino acid
  MOD_RES (70)..(74): Any amino acid
  MOD_RES (83)..(85): Any amino acid
  MOD_RES (87)..(93): Any amino acid
  MOD_RES (95)..(96): Any amino acid
  MOD_RES (98)..(102): Any amino acid
  MOD_RES (111)..(113): Any amino acid
  MOD_RES (115)..(121): Any amino acid
  MOD_RES (123)..(124): Any amino acid
  MOD_RES (126)..(130): Any amino acid
  MOD_RES (139)..(141): Any amino acid
  MOD_RES (143)..(149): Any amino acid
  MOD_RES (151)..(152): Any amino acid
  MOD_RES (154)..(158): Any amino acid
  MOD_RES (167)..(169): Any amino acid
  MOD_RES (171)..(177): Any amino acid
  MOD_RES (179)..(180): Any amino acid
  MOD_RES (182)..(186): Any amino acid
  MOD_RES (195)..(197): Any amino acid
  MOD_RES (199)..(209): Any amino acid
XXXXXXXXXCXXCXXXXXTSGNLTEHXXXHXXXXXXXCXXCXXXXXDPGALVRHXXXHXXXXXXXCXXCXXXXXTSHSLTEHXXXHXXXXXXXCXXCXXXXXTTGALTEHXXXHXXXXXXXCXXCXXXXXQRANLRAHXXXHXXXXXXXCXXCXXXXXSKKHLAEHXXXHXXXXXXXCXXCXXXXXTKNSLTEHXXXHXXXXXXXXXXX

SEQ ID NO: 2048 - protein, 209 aa, Artificial Sequence
  source: /note="Description of Artificial Sequence: Synthetic polypeptide"
  MOD_RES (1)..(9): Any amino acid
  MOD_RES (11)..(12): Any amino acid
  MOD_RES (14)..(18): Any amino acid
  MOD_RES (27)..(29): Any amino acid
  MOD_RES (31)..(37): Any amino acid
  MOD_RES (39)..(40): Any amino acid
  MOD_RES (42)..(46): Any amino acid
  MOD_RES (55)..(57): Any amino acid
  MOD_RES (59)..(65): Any amino acid
  MOD_RES (67)..(68): Any amino acid
  MOD_RES (70)..(74): Any amino acid
  MOD_RES (83)..(85): Any amino acid
  MOD_RES (87)..(93): Any amino acid
  MOD_RES (95)..(96): Any amino acid
  MOD_RES (98)..(102): Any amino acid
  MOD_RES (111)..(113): Any amino acid
  MOD_RES (115)..(121): Any amino acid
  MOD_RES (123)..(124): Any amino acid
  MOD_RES (126)..(130): Any amino acid
  MOD_RES (139)..(141): Any amino acid
  MOD_RES (143)..(149): Any amino acid
  MOD_RES (151)..(152): Any amino acid
  MOD_RES (154)..(158): Any amino acid
  MOD_RES (167)..(169): Any amino acid
  MOD_RES (171)..(177): Any amino acid
  MOD_RES (179)..(180): Any amino acid
  MOD_RES (182)..(186): Any amino acid
  MOD_RES (195)..(197): Any amino acid
  MOD_RES (199)..(209): Any amino acid
XXXXXXXXXCXXCXXXXXRSDHLTTHXXXHXXXXXXXCXXCXXXXXDSGNLRVHXXXHXXXXXXXCXXCXXXXXRSDKLVRHXXXHXXXXXXXCXXCXXXXXRSDKLTEHXXXHXXXXXXXCXXCXXXXXRNDALTEHXXXHXXXXXXXCXXCXXXXXQRANLRAHXXXHXXXXXXXCXXCXXXXXRSDKLVRHXXXHXXXXXXXXXXX

SEQ ID NO: 2049 - protein, 209 aa, Artificial Sequence
  source: /note="Description of Artificial Sequence: Synthetic polypeptide"
  MOD_RES (1)..(9): Any amino acid
  MOD_RES (11)..(12): Any amino acid
  MOD_RES (14)..(18): Any amino acid
  MOD_RES (27)..(29): Any amino acid
  MOD_RES (31)..(37): Any amino acid
  MOD_RES (39)..(40): Any amino acid
  MOD_RES (42)..(46): Any amino acid
  MOD_RES (55)..(57): Any amino acid
  MOD_RES (59)..(65): Any amino acid
  MOD_RES (67)..(68): Any amino acid
  MOD_RES (70)..(74): Any amino acid
  MOD_RES (83)..(85): Any amino acid
  MOD_RES (87)..(93): Any amino acid
  MOD_RES (95)..(96): Any amino acid
  MOD_RES (98)..(102): Any amino acid
  MOD_RES (111)..(113): Any amino acid
  MOD_RES (115)..(121): Any amino acid
  MOD_RES (123)..(124): Any amino acid
  MOD_RES (126)..(130): Any amino acid
  MOD_RES (139)..(141): Any amino acid
  MOD_RES (143)..(149): Any amino acid
  MOD_RES (151)..(152): Any amino acid
  MOD_RES (154)..(158): Any amino acid
  MOD_RES (167)..(169): Any amino acid
  MOD_RES (171)..(177): Any amino acid
  MOD_RES (179)..(180): Any amino acid
  MOD_RES (182)..(186): Any amino acid
  MOD_RES (195)..(197): Any amino acid
  MOD_RES (199)..(209): Any amino acid
XXXXXXXXXCXXCXXXXXDSGNLRVHXXXHXXXXXXXCXXCXXXXXRSDKLVRHXXXHXXXXXXXCXXCXXXXXRSDKLTEHXXXHXXXXXXXCXXCXXXXXRNDALTEHXXXHXXXXXXXCXXCXXXXXQRANLRAHXXXHXXXXXXXCXXCXXXXXRSDKLVRHXXXHXXXXXXXCXXCXXXXXDKKDLTRHXXXHXXXXXXXXXXX

SEQ ID NO: 2050 - protein, 209 aa, Artificial Sequence
  source: /note="Description of Artificial Sequence: Synthetic polypeptide"
  MOD_RES (1)..(9): Any amino acid
  MOD_RES (11)..(12): Any amino acid
  MOD_RES (14)..(18): Any amino acid
  MOD_RES (27)..(29): Any amino acid
  MOD_RES (31)..(37): Any amino acid
  MOD_RES (39)..(40): Any amino acid
  MOD_RES (42)..(46): Any amino acid
  MOD_RES (55)..(57): Any amino acid
  MOD_RES (59)..(65): Any amino acid
  MOD_RES (67)..(68): Any amino acid
  MOD_RES (70)..(74): Any amino acid
  MOD_RES (83)..(85): Any amino acid
  MOD_RES (87)..(93): Any amino acid
  MOD_RES (95)..(96): Any amino acid
  MOD_RES (98)..(102): Any amino acid
  MOD_RES (111)..(113): Any amino acid
  MOD_RES (115)..(121): Any amino acid
  MOD_RES (123)..(124): Any amino acid
  MOD_RES (126)..(130): Any amino acid
  MOD_RES (139)..(141): Any amino acid
  MOD_RES (143)..(149): Any amino acid
  MOD_RES (151)..(152): Any amino acid
  MOD_RES (154)..(158): Any amino acid
  MOD_RES (167)..(169): Any amino acid
  MOD_RES (171)..(177): Any amino acid
  MOD_RES (179)..(180): Any amino acid
  MOD_RES (182)..(186): Any amino acid
  MOD_RES (195)..(197): Any amino acid
  MOD_RES (199)..(209): Any amino acid
XXXXXXXXXCXXCXXXXXRKDNLKNHXXXHXXXXXXXCXXCXXXXXRSDHLTTHXXXHXXXXXXXCXXCXXXXXDSGNLRVHXXXHXXXXXXXCXXCXXXXXRSDKLVRHXXXHXXXXXXXCXXCXXXXXRSDKLTEHXXXHXXXXXXXCXXCXXXXXRNDALTEHXXXHXXXXXXXCXXCXXXXXQRANLRAHXXXHXXXXXXXXXXX

SEQ ID NO: 2051 - protein, 209 aa, Artificial Sequence
  source: /note="Description of Artificial Sequence: Synthetic polypeptide"
  MOD_RES (1)..(9): Any amino acid
  MOD_RES (11)..(12): Any amino acid
  MOD_RES (14)..(18): Any amino acid
  MOD_RES (27)..(29): Any amino acid
  MOD_RES (31)..(37): Any amino acid
  MOD_RES (39)..(40): Any amino acid
  MOD_RES (42)..(46): Any amino acid
  MOD_RES (55)..(57): Any amino acid
  MOD_RES (59)..(65): Any amino acid
  MOD_RES (67)..(68): Any amino acid
  MOD_RES (70)..(74): Any amino acid
  MOD_RES (83)..(85): Any amino acid
  MOD_RES (87)..(93): Any amino acid
  MOD_RES (95)..(96): Any amino acid
  MOD_RES (98)..(102): Any amino acid
  MOD_RES (111)..(113): Any amino acid
  MOD_RES (115)..(121): Any amino acid
  MOD_RES (123)..(124): Any amino acid
  MOD_RES (126)..(130): Any amino acid
  MOD_RES (139)..(141): Any amino acid
  MOD_RES (143)..(149): Any amino acid
  MOD_RES (151)..(152): Any amino acid
  MOD_RES (154)..(158): Any amino acid
  MOD_RES (167)..(169): Any amino acid
  MOD_RES (171)..(177): Any amino acid
  MOD_RES (179)..(180): Any amino acid
  MOD_RES (182)..(186): Any amino acid
  MOD_RES (195)..(197): Any amino acid
  MOD_RES (199)..(209): Any amino acid
XXXXXXXXXCXXCXXXXXRSDKLVRHXXXHXXXXXXXCXXCXXXXXRSDKLTEHXXXHXXXXXXXCXXCXXXXXRNDALTEHXXXHXXXXXXXCXXCXXXXXQRANLRAHXXXHXXXXXXXCXXCXXXXXRSDKLVRHXXXHXXXXXXXCXXCXXXXXDKKDLTRHXXXHXXXXXXXCXXCXXXXXQRAHLERHXXXHXXXXXXXXXXX

SEQ ID NO: 2052 - protein, 209 aa, Artificial Sequence
  source: /note="Description of Artificial Sequence: Synthetic polypeptide"
  MOD_RES (1)..(9): Any amino acid
  MOD_RES (11)..(12): Any amino acid
  MOD_RES (14)..(18): Any amino acid
  MOD_RES (27)..(29): Any amino acid
  MOD_RES (31)..(37): Any amino acid
  MOD_RES (39)..(40): Any amino acid
  MOD_RES (42)..(46): Any amino acid
  MOD_RES (55)..(57): Any amino acid
  MOD_RES (59)..(65): Any amino acid
  MOD_RES (67)..(68): Any amino acid
  MOD_RES (70)..(74): Any amino acid
  MOD_RES (83)..(85): Any amino acid
  MOD_RES (87)..(93): Any amino acid
  MOD_RES (95)..(96): Any amino acid
  MOD_RES (98)..(102): Any amino acid
  MOD_RES (111)..(113): Any amino acid
  MOD_RES (115)..(121): Any amino acid
  MOD_RES (123)..(124): Any amino acid
  MOD_RES (126)..(130): Any amino acid
  MOD_RES (139)..(141): Any amino acid
  MOD_RES (143)..(149): Any amino acid
  MOD_RES (151)..(152): Any amino acid
  MOD_RES (154)..(158): Any amino acid
  MOD_RES (167)..(169): Any amino acid
  MOD_RES (171)..(177): Any amino acid
  MOD_RES (179)..(180): Any amino acid
  MOD_RES (182)..(186): Any amino acid
  MOD_RES (195)..(197): Any amino acid
  MOD_RES (199)..(209): Any amino acid
XXXXXXXXXCXXCXXXXXRSDKLTEHXXXHXXXXXXXCXXCXXXXXRNDALTEHXXXHXXXXXXXCXXCXXXXXQRANLRAHXXXHXXXXXXXCXXCXXXXXRSDKLVRHXXXHXXXXXXXCXXCXXXXXDKKDLTRHXXXHXXXXXXXCXXCXXXXXQRAHLERHXXXHXXXXXXXCXXCXXXXXRSDHLTNHXXXHXXXXXXXXXXX

SEQ ID NO: 2053 - protein, 209 aa, Artificial Sequence
  source: /note="Description of Artificial Sequence: Synthetic polypeptide"
  MOD_RES (1)..(9): Any amino acid
  MOD_RES (11)..(12): Any amino acid
  MOD_RES (14)..(18): Any amino acid
  MOD_RES (27)..(29): Any amino acid
  MOD_RES (31)..(37): Any amino acid
  MOD_RES (39)..(40): Any amino acid
  MOD_RES (42)..(46): Any amino acid
  MOD_RES (55)..(57): Any amino acid
  MOD_RES (59)..(65): Any amino acid
  MOD_RES (67)..(68): Any amino acid
  MOD_RES (70)..(74): Any amino acid
  MOD_RES (83)..(85): Any amino acid
  MOD_RES (87)..(93): Any amino acid
  MOD_RES (95)..(96): Any amino acid
  MOD_RES (98)..(102): Any amino acid
  MOD_RES (111)..(113): Any amino acid
  MOD_RES (115)..(121): Any amino acid
  MOD_RES (123)..(124): Any amino acid
  MOD_RES (126)..(130): Any amino acid
  MOD_RES (139)..(141): Any amino acid
  MOD_RES (143)..(149): Any amino acid
  MOD_RES (151)..(152): Any amino acid
  MOD_RES (154)..(158): Any amino acid
  MOD_RES (167)..(169): Any amino acid
  MOD_RES (171)..(177): Any amino acid
  MOD_RES (179)..(180): Any amino acid
  MOD_RES (182)..(186): Any amino acid
  MOD_RES (195)..(197): Any amino acid
  MOD_RES (199)..(209): Any amino acid
XXXXXXXXXCXXCXXXXXQRAHLERHXXXHXXXXXXXCXXCXXXXXRKDNLKNHXXXHXXXXXXXCXXCXXXXXRSDHLTTHXXXHXXXXXXXCXXCXXXXXDSGNLRVHXXXHXXXXXXXCXXCXXXXXRSDKLVRHXXXHXXXXXXXCXXCXXXXXRSDKLTEHXXXHXXXXXXXCXXCXXXXXRNDALTEHXXXHXXXXXXXXXXX

SEQ ID NO: 2054 - protein, 209 aa, Artificial Sequence
  source: /note="Description of Artificial Sequence: Synthetic polypeptide"
  MOD_RES (1)..(9): Any amino acid
  MOD_RES (11)..(12): Any amino acid
  MOD_RES (14)..(18): Any amino acid
  MOD_RES (27)..(29): Any amino acid
  MOD_RES (31)..(37): Any amino acid
  MOD_RES (39)..(40): Any amino acid
  MOD_RES (42)..(46): Any amino acid
  MOD_RES (55)..(57): Any amino acid
  MOD_RES (59)..(65): Any amino acid
  MOD_RES (67)..(68): Any amino acid
  MOD_RES (70)..(74): Any amino acid
  MOD_RES (83)..(85): Any amino acid
  MOD_RES (87)..(93): Any amino acid
  MOD_RES (95)..(96): Any amino acid
  MOD_RES (98)..(102): Any amino acid
  MOD_RES (111)..(113): Any amino acid
  MOD_RES (115)..(121): Any amino acid
  MOD_RES (123)..(124): Any amino acid
  MOD_RES (126)..(130): Any amino acid
  MOD_RES (139)..(141): Any amino acid
  MOD_RES (143)..(149): Any amino acid
  MOD_RES (151)..(152): Any amino acid
  MOD_RES (154)..(158): Any amino acid
  MOD_RES (167)..(169): Any amino acid
  MOD_RES (171)..(177): Any amino acid
  MOD_RES (179)..(180): Any amino acid
  MOD_RES (182)..(186): Any amino acid
  MOD_RES (195)..(197): Any amino acid
  MOD_RES (199)..(209): Any amino acid
XXXXXXXXXCXXCXXXXXTSGELVRHXXXHXXXXXXXCXXCXXXXXQRAHLERHXXXHXXXXXXXCXXCXXXXXRKDNLKNHXXXHXXXXXXXCXXCXXXXXRSDHLTTHXXXHXXXXXXXCXXCXXXXXDSGNLRVHXXXHXXXXXXXCXXCXXXXXRSDKLVRHXXXHXXXXXXXCXXCXXXXXRSDKLTEHXXXHXXXXXXXXXXX

SEQ ID NO: 2055 - protein, 209 aa, Artificial Sequence
  source: /note="Description of Artificial Sequence: Synthetic polypeptide"
  MOD_RES (1)..(9): Any amino acid
  MOD_RES (11)..(12): Any amino acid
  MOD_RES (14)..(18): Any amino acid
  MOD_RES (27)..(29): Any amino acid
  MOD_RES (31)..(37): Any amino acid
  MOD_RES (39)..(40): Any amino acid
  MOD_RES (42)..(46): Any amino acid
  MOD_RES (55)..(57): Any amino acid
  MOD_RES (59)..(65): Any amino acid
  MOD_RES (67)..(68): Any amino acid
  MOD_RES (70)..(74): Any amino acid
  MOD_RES (83)..(85): Any amino acid
  MOD_RES (87)..(93): Any amino acid
  MOD_RES (95)..(96): Any amino acid
  MOD_RES (98)..(102): Any amino acid
  MOD_RES (111)..(113): Any amino acid
  MOD_RES (115)..(121): Any amino acid
  MOD_RES (123)..(124): Any amino acid
  MOD_RES (126)..(130): Any amino acid
  MOD_RES (139)..(141): Any amino acid
  MOD_RES (143)..(149): Any amino acid
  MOD_RES (151)..(152): Any amino acid
  MOD_RES (154)..(158): Any amino acid
  MOD_RES (167)..(169): Any amino acid
  MOD_RES (171)..(177): Any amino acid
  MOD_RES (179)..(180): Any amino acid
  MOD_RES (182)..(186): Any amino acid
  MOD_RES (195)..(197): Any amino acid
  MOD_RES (199)..(209): Any amino acid
XXXXXXXXXCXXCXXXXXRNDALTEHXXXHXXXXXXXCXXCXXXXXQRANLRAHXXXHXXXXXXXCXXCXXXXXRSDKLVRHXXXHXXXXXXXCXXCXXXXXDKKDLTRHXXXHXXXXXXXCXXCXXXXXQRAHLERHXXXHXXXXXXXCXXCXXXXXRSDHLTNHXXXHXXXXXXXCXXCXXXXXSKKHLAEHXXXHXXXXXXXXXXX

SEQ ID NO: 2056 - protein, 209 aa, Artificial Sequence
  source: /note="Description of Artificial Sequence: Synthetic polypeptide"
  MOD_RES (1)..(9): Any amino acid
  MOD_RES (11)..(12): Any amino acid
  MOD_RES (14)..(18): Any amino acid
  MOD_RES (27)..(29): Any amino acid
  MOD_RES (31)..(37): Any amino acid
  MOD_RES (39)..(40): Any amino acid
  MOD_RES (42)..(46): Any amino acid
  MOD_RES (55)..(57): Any amino acid
  MOD_RES (59)..(65): Any amino acid
  MOD_RES (67)..(68): Any amino acid
  MOD_RES (70)..(74): Any amino acid
  MOD_RES (83)..(85): Any amino acid
  MOD_RES (87)..(93): Any amino acid
  MOD_RES (95)..(96): Any amino acid
  MOD_RES (98)..(102): Any amino acid
  MOD_RES (111)..(113): Any amino acid
  MOD_RES (115)..(121): Any amino acid
  MOD_RES (123)..(124): Any amino acid
  MOD_RES (126)..(130): Any amino acid
  MOD_RES (139)..(141): Any amino acid
  MOD_RES (143)..(149): Any amino acid
  MOD_RES (151)..(152): Any amino acid
  MOD_RES (154)..(158): Any amino acid
  MOD_RES (167)..(169): Any amino acid
  MOD_RES (171)..(177): Any amino acid
  MOD_RES (179)..(180): Any amino acid
  MOD_RES (182)..(186): Any amino acid
  MOD_RES (195)..(197): Any amino acid
  MOD_RES (199)..(209): Any amino acid
XXXXXXXXXCXXCXXXXXQRANLRAHXXXHXXXXXXXCXXCXXXXXRSDKLVRHXXXHXXXXXXXCXXCXXXXXDKKDLTRHXXXHXXXXXXXCXXCXXXXXQRAHLERHXXXHXXXXXXXCXXCXXXXXRSDHLTNHXXXHXXXXXXXCXXCXXXXXSKKHLAEHXXXHXXXXXXXCXXCXXXXXTSGELVRHXXXHXXXXXXXXXXX

SEQ ID NO: 2057 - protein, 209 aa, Artificial Sequence
  source: /note="Description of Artificial Sequence: Synthetic polypeptide"
  MOD_RES (1)..(9): Any amino acid
  MOD_RES (11)..(12): Any amino acid
  MOD_RES (14)..(18): Any amino acid
  MOD_RES (27)..(29): Any amino acid
  MOD_RES (31)..(37): Any amino acid
  MOD_RES (39)..(40): Any amino acid
  MOD_RES (42)..(46): Any amino acid
  MOD_RES (55)..(57): Any amino acid
  MOD_RES (59)..(65): Any amino acid
  MOD_RES (67)..(68): Any amino acid
  MOD_RES (70)..(74): Any amino acid
  MOD_RES (83)..(85): Any amino acid
  MOD_RES (87)..(93): Any amino acid
  MOD_RES (95)..(96): Any amino acid
  MOD_RES (98)..(102): Any amino acid
  MOD_RES (111)..(113): Any amino acid
  MOD_RES (115)..(121): Any amino acid
  MOD_RES (123)..(124): Any amino acid
  MOD_RES (126)..(130): Any amino acid
  MOD_RES (139)..(141): Any amino acid
  MOD_RES (143)..(149): Any amino acid
  MOD_RES (151)..(152): Any amino acid
  MOD_RES (154)..(158): Any amino acid
  MOD_RES (167)..(169): Any amino acid
  MOD_RES (171)..(177): Any amino acid
  MOD_RES (179)..(180): Any amino acid
  MOD_RES (182)..(186): Any amino acid
  MOD_RES (195)..(197): Any amino acid
  MOD_RES (199)..(209): Any amino acid
XXXXXXXXXCXXCXXXXXSKKHLAEHXXXHXXXXXXXCXXCXXXXXTSGELVRHXXXHXXXXXXXCXXCXXXXXQRAHLERHXXXHXXXXXXXCXXCXXXXXRKDNLKNHXXXHXXXXXXXCXXCXXXXXRSDHLTTHXXXHXXXXXXXCXXCXXXXXDSGNLRVHXXXHXXXXXXXCXXCXXXXXRSDKLVRHXXXHXXXXXXXXXXX

SEQ ID NO: 2058 - protein, 209 aa, Artificial Sequence
  source: /note="Description of Artificial Sequence: Synthetic polypeptide"
  MOD_RES (1)..(9): Any amino acid
  MOD_RES (11)..(12): Any amino acid
  MOD_RES (14)..(18): Any amino acid
  MOD_RES (27)..(29): Any amino acid
  MOD_RES (31)..(37): Any amino acid
  MOD_RES (39)..(40): Any amino acid
  MOD_RES (42)..(46): Any amino acid
  MOD_RES (55)..(57): Any amino acid
  MOD_RES (59)..(65): Any amino acid
  MOD_RES (67)..(68): Any amino acid
  MOD_RES (70)..(74): Any amino acid
  MOD_RES (83)..(85): Any amino acid
  MOD_RES (87)..(93): Any amino acid
  MOD_RES (95)..(96): Any amino acid
  MOD_RES (98)..(102): Any amino acid
  MOD_RES (111)..(113): Any amino acid
  MOD_RES (115)..(121): Any amino acid
  MOD_RES (123)..(124): Any amino acid
  MOD_RES (126)..(130): Any amino acid
  MOD_RES (139)..(141): Any amino acid
  MOD_RES (143)..(149): Any amino acid
  MOD_RES (151)..(152): Any amino acid
  MOD_RES (154)..(158): Any amino acid
  MOD_RES (167)..(169): Any amino acid
  MOD_RES (171)..(177): Any amino acid
  MOD_RES (179)..(180): Any amino acid
  MOD_RES (182)..(186): Any amino acid
  MOD_RES (195)..(197): Any amino acid
  MOD_RES (199)..(209): Any amino acid
XXXXXXXXXCXXCXXXXXQLAHLRAHXXXHXXXXXXXCXXCXXXXXSKKHLAEHXXXHXXXXXXXCXXCXXXXXTSGELVRHXXXHXXXXXXXCXXCXXXXXQRAHLERHXXXHXXXXXXXCXXCXXXXXRKDNLKNHXXXHXXXXXXXCXXCXXXXXRSDHLTTHXXXHXXXXXXXCXXCXXXXXDSGNLRVHXXXHXXXXXXXXXXX

SEQ ID NO: 2059 - protein, 209 aa, Artificial Sequence
  source: /note="Description of Artificial Sequence: Synthetic polypeptide"
  MOD_RES (1)..(9): Any amino acid
  MOD_RES (11)..(12): Any amino acid
  MOD_RES (14)..(18): Any amino acid
  MOD_RES (27)..(29): Any amino acid
  MOD_RES (31)..(37): Any amino acid
  MOD_RES (39)..(40): Any amino acid
  MOD_RES (42)..(46): Any amino acid
  MOD_RES (55)..(57): Any amino acid
  MOD_RES (59)..(65): Any amino acid
  MOD_RES (67)..(68): Any amino acid
  MOD_RES (70)..(74): Any amino acid
  MOD_RES (83)..(85): Any amino acid
  MOD_RES (87)..(93): Any amino acid
  MOD_RES (95)..(96): Any amino acid
  MOD_RES (98)..(102): Any amino acid
  MOD_RES (111)..(113): Any amino acid
  MOD_RES (115)..(121): Any amino acid
  MOD_RES (123)..(124): Any amino acid
  MOD_RES (126)..(130): Any amino acid
  MOD_RES (139)..(141): Any amino acid
  MOD_RES (143)..(149): Any amino acid
  MOD_RES (151)..(152): Any amino acid
  MOD_RES (154)..(158): Any amino acid
  MOD_RES (167)..(169): Any amino acid
  MOD_RES (171)..(177): Any amino acid
  MOD_RES (179)..(180): Any amino acid
  MOD_RES (182)..(186): Any amino acid
  MOD_RES (195)..(197): Any amino acid
  MOD_RES (199)..(209): Any amino acid
XXXXXXXXXCXXCXXXXXSPADLTRHXXXHXXXXXXXCXXCXXXXXQLAHLRAHXXXHXXXXXXXCXXCXXXXXSKKHLAEHXXXHXXXXXXXCXXCXXXXXTSGELVRHXXXHXXXXXXXCXXCXXXXXQRAHLERHXXXHXXXXXXXCXXCXXXXXRKDNLKNHXXXHXXXXXXXCXXCXXXXXRSDHLTTHXXXHXXXXXXXXXXX

SEQ ID NO: 2060 - protein, 209 aa, Artificial Sequence
  source: /note="Description of Artificial Sequence: Synthetic polypeptide"
  MOD_RES (1)..(9): Any amino acid
  MOD_RES (11)..(12): Any amino acid
  MOD_RES (14)..(18): Any amino acid
  MOD_RES (27)..(29): Any amino acid
  MOD_RES (31)..(37): Any amino acid
  MOD_RES (39)..(40): Any amino acid
  MOD_RES (42)..(46): Any amino acid
  MOD_RES (55)..(57): Any amino acid
  MOD_RES (59)..(65): Any amino acid
  MOD_RES (67)..(68): Any amino acid
  MOD_RES (70)..(74): Any amino acid
  MOD_RES (83)..(85): Any amino acid
  MOD_RES (87)..(93): Any amino acid
  MOD_RES (95)..(96): Any amino acid
  MOD_RES (98)..(102): Any amino acid
  MOD_RES (111)..(113): Any amino acid
  MOD_RES (115)..(121): Any amino acid
  MOD_RES (123)..(124): Any amino acid
  MOD_RES (126)..(130): Any amino acid
  MOD_RES (139)..(141): Any amino acid
  MOD_RES (143)..(149): Any amino acid
  MOD_RES (151)..(152): Any amino acid
  MOD_RES (154)..(158): Any amino acid
  MOD_RES (167)..(169): Any amino acid
  MOD_RES (171)..(177): Any amino acid
  MOD_RES (179)..(180): Any amino acid
  MOD_RES (182)..(186): Any amino acid
  MOD_RES (195)..(197): Any amino acid
  MOD_RES (199)..(209): Any amino acid
XXXXXXXXXCXXCXXXXXRSDHLTNHXXXHXXXXXXXCXXCXXXXXSPADLTRHXXXHXXXXXXXCXXCXXXXXQLAHLRAHXXXHXXXXXXXCXXCXXXXXSKKHLAEHXXXHXXXXXXXCXXCXXXXXTSGELVRHXXXHXXXXXXXCXXCXXXXXQRAHLERHXXXHXXXXXXXCXXCXXXXXRKDNLKNHXXXHXXXXXXXXXXX

SEQ ID NO: 2061 - protein, 209 aa, Artificial Sequence
  source: /note="Description of Artificial Sequence: Synthetic polypeptide"
  MOD_RES (1)..(9): Any amino acid
  MOD_RES (11)..(12): Any amino acid
  MOD_RES (14)..(18): Any amino acid
  MOD_RES (27)..(29): Any amino acid
  MOD_RES (31)..(37): Any amino acid
  MOD_RES (39)..(40): Any amino acid
  MOD_RES (42)..(46): Any amino acid
  MOD_RES (55)..(57): Any amino acid
  MOD_RES (59)..(65): Any amino acid
  MOD_RES (67)..(68): Any amino acid
  MOD_RES (70)..(74): Any amino acid
  MOD_RES (83)..(85): Any amino acid
  MOD_RES (87)..(93): Any amino acid
  MOD_RES (95)..(96): Any amino acid
  MOD_RES (98)..(102): Any amino acid
  MOD_RES (111)..(113): Any amino acid
  MOD_RES (115)..(121): Any amino acid
  MOD_RES (123)..(124): Any amino acid
  MOD_RES (126)..(130): Any amino acid
  MOD_RES (139)..(141): Any amino acid
  MOD_RES (143)..(149): Any amino acid
  MOD_RES (151)..(152): Any amino acid
  MOD_RES (154)..(158): Any amino acid
  MOD_RES (167)..(169): Any amino acid
  MOD_RES (171)..(177): Any amino acid
  MOD_RES (179)..(180): Any amino acid
  MOD_RES (182)..(186): Any amino acid
  MOD_RES (195)..(197): Any amino acid
  MOD_RES (199)..(209): Any amino acid
XXXXXXXXXCXXCXXXXXRSDDLVRHXXXHXXXXXXXCXXCXXXXXTHLDLIRHXXXHXXXXXXXCXXCXXXXXQSSNLVRHXXXHXXXXXXXCXXCXXXXXRSDKLTEHXXXHXXXXXXXCXXCXXXXXDSGNLRVHXXXHXXXXXXXCXXCXXXXXRSDKLVRHXXXHXXXXXXXCXXCXXXXXRADNLTEHXXXHXXXXXXXXXXX

SEQ ID NO: 2062 - protein, 209 aa, Artificial Sequence
  source: /note="Description of Artificial Sequence: Synthetic polypeptide"
  MOD_RES (1)..(9): Any amino acid
  MOD_RES (11)..(12): Any amino acid
  MOD_RES (14)..(18): Any amino acid
  MOD_RES (27)..(29): Any amino acid
  MOD_RES (31)..(37): Any amino acid
  MOD_RES (39)..(40): Any amino acid
  MOD_RES (42)..(46): Any amino acid
  MOD_RES (55)..(57): Any amino acid
  MOD_RES (59)..(65): Any amino acid
  MOD_RES (67)..(68): Any amino acid
  MOD_RES (70)..(74): Any amino acid
  MOD_RES (83)..(85): Any amino acid
  MOD_RES (87)..(93): Any amino acid
  MOD_RES (95)..(96): Any amino acid
  MOD_RES (98)..(102): Any amino acid
  MOD_RES (111)..(113): Any amino acid
  MOD_RES (115)..(121): Any amino acid
  MOD_RES (123)..(124): Any amino acid
  MOD_RES (126)..(130): Any amino acid
  MOD_RES (139)..(141): Any amino acid
  MOD_RES (143)..(149): Any amino acid
  MOD_RES (151)..(152): Any amino acid
  MOD_RES (154)..(158): Any amino acid
  MOD_RES (167)..(169): Any amino acid
  MOD_RES (171)..(177): Any amino acid
  MOD_RES (179)..(180): Any amino acid
  MOD_RES (182)..(186): Any amino acid
  MOD_RES (195)..(197): Any amino acid
  MOD_RES (199)..(209): Any amino acid
XXXXXXXXXCXXCXXXXXRSDKLVRHXXXHXXXXXXXCXXCXXXXXRSDDLVRHXXXHXXXXXXXCXXCXXXXXTHLDLIRHXXXHXXXXXXXCXXCXXXXXQSSNLVRHXXXHXXXXXXXCXXCXXXXXRSDKLTEHXXXHXXXXXXXCXXCXXXXXDSGNLRVHXXXHXXXXXXXCXXCXXXXXRSDKLVRHXXXHXXXXXXXXXXX

SEQ ID NO: 2063 - protein, 209 aa, Artificial Sequence
  source: /note="Description of Artificial Sequence: Synthetic polypeptide"
  MOD_RES (1)..(9): Any amino acid
  MOD_RES (11)..(12): Any amino acid
  MOD_RES (14)..(18): Any amino acid
  MOD_RES (27)..(29): Any amino acid
  MOD_RES (31)..(37): Any amino acid
  MOD_RES (39)..(40): Any amino acid
  MOD_RES (42)..(46): Any amino acid
  MOD_RES (55)..(57): Any amino acid
  MOD_RES (59)..(65): Any amino acid
  MOD_RES (67)..(68): Any amino acid
  MOD_RES (70)..(74): Any amino acid
  MOD_RES (83)..(85): Any amino acid
  MOD_RES (87)..(93): Any amino acid
  MOD_RES (95)..(96): Any amino acid
  MOD_RES (98)..(102): Any amino acid
  MOD_RES (111)..(113): Any amino acid
  MOD_RES (115)..(121): Any amino acid
  MOD_RES (123)..(124): Any amino acid
  MOD_RES (126)..(130): Any amino acid
  MOD_RES (139)..(141): Any amino acid
  MOD_RES (143)..(149): Any amino acid
  MOD_RES (151)..(152): Any amino acid
  MOD_RES (154)..(158): Any amino acid
  MOD_RES (167)..(169): Any amino acid
  MOD_RES (171)..(177): Any amino acid
  MOD_RES (179)..(180): Any amino acid
  MOD_RES (182)..(186): Any amino acid
  MOD_RES (195)..(197): Any amino acid
  MOD_RES (199)..(209): Any amino acid
XXXXXXXXXCXXCXXXXXQSSNLVRHXXXHXXXXXXXCXXCXXXXXRSDKLVRHXXXHXXXXXXXCXXCXXXXXRSDDLVRHXXXHXXXXXXXCXXCXXXXXTHLDLIRHXXXHXXXXXXXCXXCXXXXXQSSNLVRHXXXHXXXXXXXCXXCXXXXXRSDKLTEHXXXHXXXXXXXCXXCXXXXXDSGNLRVHXXXHXXXXXXXXXXX

SEQ ID NO: 2064 - protein, 209 aa, Artificial Sequence
  source: /note="Description of Artificial Sequence: Synthetic polypeptide"
  MOD_RES (1)..(9): Any amino acid
  MOD_RES (11)..(12): Any amino acid
  MOD_RES (14)..(18): Any amino acid
  MOD_RES (27)..(29): Any amino acid
  MOD_RES (31)..(37): Any amino acid
  MOD_RES (39)..(40): Any amino acid
  MOD_RES (42)..(46): Any amino acid
  MOD_RES (55)..(57): Any amino acid
  MOD_RES (59)..(65): Any amino acid
  MOD_RES (67)..(68): Any amino acid
  MOD_RES (70)..(74): Any amino acid
  MOD_RES (83)..(85): Any amino acid
  MOD_RES (87)..(93): Any amino acid
  MOD_RES (95)..(96): Any amino acid
  MOD_RES (98)..(102): Any amino acid
  MOD_RES (111)..(113): Any amino acid
  MOD_RES (115)..(121): Any amino acid
  MOD_RES (123)..(124): Any amino acid
  MOD_RES (126)..(130): Any amino acid
  MOD_RES (139)..(141): Any amino acid
  MOD_RES (143)..(149): Any amino acid
  MOD_RES (151)..(152): Any amino acid
  MOD_RES (154)..(158): Any amino acid
  MOD_RES (167)..(169): Any amino acid
  MOD_RES (171)..(177): Any amino acid
  MOD_RES (179)..(180): Any amino acid
  MOD_RES (182)..(186): Any amino acid
  MOD_RES (195)..(197): Any amino acid
  MOD_RES (199)..(209): Any amino acid
XXXXXXXXXCXXCXXXXXERSHLREHXXXHXXXXXXXCXXCXXXXXRSDKLVRHXXXHXXXXXXXCXXCXXXXXQSSNLVRHXXXHXXXXXXXCXXCXXXXXRNDALTEHXXXHXXXXXXXCXXCXXXXXQSSNLVRHXXXHXXXXXXXCXXCXXXXXRSDKLVRHXXXHXXXXXXXCXXCXXXXXRSDDLVRHXXXHXXXXXXXXXXX

SEQ ID NO: 2065 - protein, 209 aa, Artificial Sequence
  source: /note="Description of Artificial Sequence: Synthetic polypeptide"
  MOD_RES (1)..(9): Any amino acid
  MOD_RES (11)..(12): Any amino acid
  MOD_RES (14)..(18): Any amino acid
  MOD_RES (27)..(29): Any amino acid
  MOD_RES (31)..(37): Any amino acid
  MOD_RES (39)..(40): Any amino acid
  MOD_RES (42)..(46): Any amino acid
  MOD_RES (55)..(57): Any amino acid
  MOD_RES (59)..(65): Any amino acid
  MOD_RES (67)..(68): Any amino acid
  MOD_RES (70)..(74): Any amino acid
  MOD_RES (83)..(85): Any amino acid
  MOD_RES (87)..(93): Any amino acid
  MOD_RES (95)..(96): Any amino acid
  MOD_RES (98)..(102): Any amino acid
  MOD_RES (111)..(113): Any amino acid
  MOD_RES (115)..(121): Any amino acid
  MOD_RES (123)..(124): Any amino acid
  MOD_RES (126)..(130): Any amino acid
  MOD_RES (139)..(141): Any amino acid
  MOD_RES (143)..(149): Any amino acid
  MOD_RES (151)..(152): Any amino acid
  MOD_RES (154)..(158): Any amino acid
  MOD_RES (167)..(169): Any amino acid
  MOD_RES (171)..(177): Any amino acid
  MOD_RES (179)..(180): Any amino acid
  MOD_RES (182)..(186): Any amino acid
  MOD_RES (195)..(197): Any amino acid
  MOD_RES (199)..(209): Any amino acid
XXXXXXXXXCXXCXXXXXRSDKLVRHXXXHXXXXXXXCXXCXXXXXQSSNLVRHXXXHXXXXXXXCXXCXXXXXRNDALTEHXXXHXXXXXXXCXXCXXXXXQSSNLVRHXXXHXXXXXXXCXXCXXXXXRSDKLVRHXXXHXXXXXXXCXXCXXXXXRSDDLVRHXXXHXXXXXXXCXXCXXXXXTHLDLIRHXXXHXXXXXXXXXXX

SEQ ID NO: 2066 - protein, 209 aa, Artificial Sequence
  source: /note="Description of Artificial Sequence: Synthetic polypeptide"
  MOD_RES (1)..(9): Any amino acid
  MOD_RES (11)..(12): Any amino acid
  MOD_RES (14)..(18): Any amino acid
  MOD_RES (27)..(29): Any amino acid
  MOD_RES (31)..(37): Any amino acid
  MOD_RES (39)..(40): Any amino acid
  MOD_RES (42)..(46): Any amino acid
  MOD_RES (55)..(57): Any amino acid
  MOD_RES (59)..(65): Any amino acid
  MOD_RES (67)..(68): Any amino acid
  MOD_RES (70)..(74): Any amino acid
  MOD_RES (83)..(85): Any amino acid
  MOD_RES (87)..(93): Any amino acid
  MOD_RES (95)..(96): Any amino acid
  MOD_RES (98)..(102): Any amino acid
  MOD_RES (111)..(113): Any amino acid
  MOD_RES (115)..(121): Any amino acid
  MOD_RES (123)..(124): Any amino acid
  MOD_RES (126)..(130): Any amino acid
  MOD_RES (139)..(141): Any amino acid
  MOD_RES (143)..(149): Any amino acid
  MOD_RES (151)..(152): Any amino acid
  MOD_RES (154)..(158): Any amino acid
  MOD_RES (167)..(169): Any amino acid
  MOD_RES (171)..(177): Any amino acid
  MOD_RES (179)..(180): Any amino acid
  MOD_RES (182)..(186): Any amino acid
  MOD_RES (195)..(197): Any amino acid
  MOD_RES (199)..(209): Any amino acid
XXXXXXXXXCXXCXXXXXRNDALTEHXXXHXXXXXXXCXXCXXXXXQSSNLVRHXXXHXXXXXXXCXXCXXXXXRSDKLVRHXXXHXXXXXXXCXXCXXXXXRSDDLVRHXXXHXXXXXXXCXXCXXXXXTHLDLIRHXXXHXXXXXXXCXXCXXXXXQSSNLVRHXXXHXXXXXXXCXXCXXXXXRSDKLTEHXXXHXXXXXXXXXXX

SEQ ID NO: 2067 - protein, 209 aa, Artificial Sequence
  source: /note="Description of Artificial Sequence: Synthetic polypeptide"
  MOD_RES (1)..(9): Any amino acid
  MOD_RES (11)..(12): Any amino acid
  MOD_RES (14)..(18): Any amino acid
  MOD_RES (27)..(29): Any amino acid
  MOD_RES (31)..(37): Any amino acid
  MOD_RES (39)..(40): Any amino acid
  MOD_RES (42)..(46): Any amino acid
  MOD_RES (55)..(57): Any amino acid
  MOD_RES (59)..(65): Any amino acid
  MOD_RES (67)..(68): Any amino acid
  MOD_RES (70)..(74): Any amino acid
  MOD_RES (83)..(85): Any amino acid
  MOD_RES (87)..(93): Any amino acid
  MOD_RES (95)..(96): Any amino acid
  MOD_RES (98)..(102): Any amino acid
  MOD_RES (111)..(113): Any amino acid
  MOD_RES (115)..(121): Any amino acid
  MOD_RES (123)..(124): Any amino acid
  MOD_RES (126)..(130): Any amino acid
  MOD_RES (139)..(141): Any amino acid
  MOD_RES (143)..(149): Any amino acid
  MOD_RES (151)..(152): Any amino acid
  MOD_RES (154)..(158): Any amino acid
  MOD_RES (167)..(169): Any amino acid
  MOD_RES (171)..(177): Any amino acid
  MOD_RES (179)..(180): Any amino acid
  MOD_RES (182)..(186): Any amino acid
  MOD_RES (195)..(197): Any amino acid
  MOD_RES (199)..(209): Any amino acid
XXXXXXXXXCXXCXXXXXQSSNLVRHXXXHXXXXXXXCXXCXXXXXRNDALTEHXXXHXXXXXXXCXXCXXXXXQSSNLVRHXXXHXXXXXXXCXXCXXXXXRSDKLVRHXXXHXXXXXXXCXXCXXXXXRSDDLVRHXXXHXXXXXXXCXXCXXXXXTHLDLIRHXXXHXXXXXXXCXXCXXXXXQSSNLVRHXXXHXXXXXXXXXXX

SEQ ID NO: 2068 - protein, 209 aa, Artificial Sequence
  source: /note="Description of Artificial Sequence: Synthetic polypeptide"
  MOD_RES (1)..(9): Any amino acid
  MOD_RES (11)..(12): Any amino acid
  MOD_RES (14)..(18): Any amino acid
  MOD_RES (27)..(29): Any amino acid
  MOD_RES (31)..(37): Any amino acid
  MOD_RES (39)..(40): Any amino acid
  MOD_RES (42)..(46): Any amino acid
  MOD_RES (55)..(57): Any amino acid
  MOD_RES (59)..(65): Any amino acid
  MOD_RES (67)..(68): Any amino acid
  MOD_RES (70)..(74): Any amino acid
  MOD_RES (83)..(85): Any amino acid
  MOD_RES (87)..(93): Any amino acid
  MOD_RES (95)..(96): Any amino acid
  MOD_RES (98)..(102): Any amino acid
  MOD_RES (111)..(113): Any amino acid
  MOD_RES (115)..(121): Any amino acid
  MOD_RES (123)..(124): Any amino acid
  MOD_RES (126)..(130): Any amino acid
  MOD_RES (139)..(141): Any amino acid
  MOD_RES (143)..(149): Any amino acid
  MOD_RES (151)..(152): Any amino acid
  MOD_RES (154)..(158): Any amino acid
  MOD_RES (167)..(169): Any amino acid
  MOD_RES (171)..(177): Any amino acid
  MOD_RES (179)..(180): Any amino acid
  MOD_RES (182)..(186): Any amino acid
  MOD_RES (195)..(197): Any amino acid
  MOD_RES (199)..(209): Any amino acid
XXXXXXXXXCXXCXXXXXREDNLHTHXXXHXXXXXXXCXXCXXXXXHKNALQNHXXXHXXXXXXXCXXCXXXXXRSDKLVRHXXXHXXXXXXXCXXCXXXXXTKNSLTEHXXXHXXXXXXXCXXCXXXXXRSDKLVRHXXXHXXXXXXXCXXCXXXXXRNDALTEHXXXHXXXXXXXCXXCXXXXXTSGNLTEHXXXHXXXXXXXXXXX

SEQ ID NO: 2069 - protein, 209 aa, Artificial Sequence
  source: /note="Description of Artificial Sequence: Synthetic polypeptide"
  MOD_RES (1)..(9): Any amino acid
  MOD_RES (11)..(12): Any amino acid
  MOD_RES (14)..(18): Any amino acid
  MOD_RES (27)..(29): Any amino acid
  MOD_RES (31)..(37): Any amino acid
  MOD_RES (39)..(40): Any amino acid
  MOD_RES (42)..(46): Any amino acid
  MOD_RES (55)..(57): Any amino acid
  MOD_RES (59)..(65): Any amino acid
  MOD_RES (67)..(68): Any amino acid
  MOD_RES (70)..(74): Any amino acid
  MOD_RES (83)..(85): Any amino acid
  MOD_RES (87)..(93): Any amino acid
  MOD_RES (95)..(96): Any amino acid
  MOD_RES (98)..(102): Any amino acid
  MOD_RES (111)..(113): Any amino acid
  MOD_RES (115)..(121): Any amino acid
  MOD_RES (123)..(124): Any amino acid
  MOD_RES (126)..(130): Any amino acid
  MOD_RES (139)..(141): Any amino acid
  MOD_RES (143)..(149): Any amino acid
  MOD_RES (151)..(152): Any amino acid
  MOD_RES (154)..(158): Any amino acid
  MOD_RES (167)..(169): Any amino acid
  MOD_RES (171)..(177): Any amino acid
  MOD_RES (179)..(180): Any amino acid
  MOD_RES (182)..(186): Any amino acid
  MOD_RES (195)..(197): Any amino acid
  MOD_RES (199)..(209): Any amino acid
XXXXXXXXXCXXCXXXXXRSDKLVRHXXXHXXXXXXXCXXCXXXXXTKNSLTEHXXXHXXXXXXXCXXCXXXXXRSDKLVRHXXXHXXXXXXXCXXCXXXXXRNDALTEHXXXHXXXXXXXCXXCXXXXXTSGNLTEHXXXHXXXXXXXCXXCXXXXXRSDHLTTHXXXHXXXXXXXCXXCXXXXXTSGNLVRHXXXHXXXXXXXXXXX

SEQ ID NO: 2070 - protein, 209 aa, Artificial Sequence
  source: /note="Description of Artificial Sequence: Synthetic polypeptide"
  MOD_RES (1)..(9): Any amino acid
  MOD_RES (11)..(12): Any amino acid
  MOD_RES (14)..(18): Any amino acid
  MOD_RES (27)..(29): Any amino acid
  MOD_RES (31)..(37): Any amino acid
  MOD_RES (39)..(40): Any amino acid
  MOD_RES (42)..(46): Any amino acid
  MOD_RES (55)..(57): Any amino acid
  MOD_RES (59)..(65): Any amino acid
  MOD_RES (67)..(68): Any amino acid
  MOD_RES (70)..(74): Any amino acid
  MOD_RES (83)..(85): Any amino acid
  MOD_RES (87)..(93): Any amino acid
  MOD_RES (95)..(96): Any amino acid
  MOD_RES (98)..(102): Any amino acid
  MOD_RES (111)..(113): Any amino acid
  MOD_RES (115)..(121): Any amino acid
  MOD_RES (123)..(124): Any amino acid
  MOD_RES (126)..(130): Any amino acid
  MOD_RES (139)..(141): Any amino acid
  MOD_RES (143)..(149): Any amino acid
  MOD_RES (151)..(152): Any amino acid
  MOD_RES (154)..(158): Any amino acid
  MOD_RES (167)..(169): Any amino acid
  MOD_RES (171)..(177): Any amino acid
  MOD_RES (179)..(180): Any amino acid
  MOD_RES (182)..(186): Any amino acid
  MOD_RES (195)..(197): Any amino acid
  MOD_RES (199)..(209): Any amino acid
XXXXXXXXXCXXCXXXXXHKNALQNHXXXHXXXXXXXCXXCXXXXXRSDKLVRHXXXHXXXXXXXCXXCXXXXXTKNSLTEHXXXHXXXXXXXCXXCXXXXXRSDKLVRHXXXHXXXXXXXCXXCXXXXXRNDALTEHXXXHXXXXXXXCXXCXXXXXTSGNLTEHXXXHXXXXXXXCXXCXXXXXRSDHLTTHXXXHXXXXXXXXXXX

SEQ ID NO: 2071 - protein, 209 aa, Artificial Sequence
  source: /note="Description of Artificial Sequence: Synthetic polypeptide"
  MOD_RES (1)..(9): Any amino acid
  MOD_RES (11)..(12): Any amino acid
  MOD_RES (14)..(18): Any amino acid
  MOD_RES (27)..(29): Any amino acid
  MOD_RES (31)..(37): Any amino acid
  MOD_RES (39)..(40): Any amino acid
  MOD_RES (42)..(46): Any amino acid
  MOD_RES (55)..(57): Any amino acid
  MOD_RES (59)..(65): Any amino acid
  MOD_RES (67)..(68): Any amino acid
  MOD_RES (70)..(74): Any amino acid
  MOD_RES (83)..(85): Any amino acid
  MOD_RES (87)..(93): Any amino acid
  MOD_RES (95)..(96): Any amino acid
  MOD_RES (98)..(102): Any amino acid
  MOD_RES (111)..(113): Any amino acid
  MOD_RES (115)..(121): Any amino acid
  MOD_RES (123)..(124): Any amino acid
  MOD_RES (126)..(130): Any amino acid
  MOD_RES (139)..(141): Any amino acid
  MOD_RES (143)..(149): Any amino acid
  MOD_RES (151)..(152): Any amino acid
  MOD_RES (154)..(158): Any amino acid
  MOD_RES (167)..(169): Any amino acid
  MOD_RES (171)..(177): Any amino acid
  MOD_RES (179)..(180): Any amino acid
  MOD_RES (182)..(186): Any amino acid
  MOD_RES (195)..(197): Any amino acid
  MOD_RES (199)..(209): Any amino acid
XXXXXXXXXCXXCXXXXXTSGNLVRHXXXHXXXXXXXCXXCXXXXXQSSNLVRHXXXHXXXXXXXCXXCXXXXXTSHSLTEHXXXHXXXXXXXCXXCXXXXXTSGNLVRHXXXHXXXXXXXCXXCXXXXXRKDNLKNHXXXHXXXXXXXCXXCXXXXXDSGNLRVHXXXHXXXXXXXCXXCXXXXXRADNLTEHXXXHXXXXXXXXXXX

SEQ ID NO: 2072 - protein, 209 aa, Artificial Sequence
  source: /note="Description of Artificial Sequence: Synthetic polypeptide"
  MOD_RES (1)..(9): Any amino acid
  MOD_RES (11)..(12): Any amino acid
  MOD_RES (14)..(18): Any amino acid
  MOD_RES (27)..(29): Any amino acid
  MOD_RES (31)..(37): Any amino acid
  MOD_RES (39)..(40): Any amino acid
  MOD_RES (42)..(46): Any amino acid
  MOD_RES (55)..(57): Any amino acid
  MOD_RES (59)..(65): Any amino acid
  MOD_RES (67)..(68): Any amino acid
  MOD_RES (70)..(74): Any amino acid
  MOD_RES (83)..(85): Any amino acid
  MOD_RES (87)..(93): Any amino acid
  MOD_RES (95)..(96): Any amino acid
  MOD_RES (98)..(102): Any amino acid
  MOD_RES (111)..(113): Any amino acid
  MOD_RES (115)..(121): Any amino acid
  MOD_RES (123)..(124): Any amino acid
  MOD_RES (126)..(130): Any amino acid
  MOD_RES (139)..(141): Any amino acid
  MOD_RES (143)..(149): Any amino acid
  MOD_RES (151)..(152): Any amino acid
  MOD_RES (154)..(158): Any amino acid
  MOD_RES (167)..(169): Any amino acid
  MOD_RES (171)..(177): Any amino acid
  MOD_RES (179)..(180): Any amino acid
  MOD_RES (182)..(186): Any amino acid
  MOD_RES (195)..(197): Any amino acid
  MOD_RES (199)..(209): Any amino acid
XXXXXXXXXCXXCXXXXXTKNSLTEHXXXHXXXXXXXCXXCXXXXXRSDKLVRHXXXHXXXXXXXCXXCXXXXXRNDALTEHXXXHXXXXXXXCXXCXXXXXTSGNLTEHXXXHXXXXXXXCXXCXXXXXRSDHLTTHXXXHXXXXXXXCXXCXXXXXTSGNLVRHXXXHXXXXXXXCXXCXXXXXQSSNLVRHXXXHXXXXXXXXXXX

SEQ ID NO: 2073 - protein, 209 aa, Artificial Sequence
  source: /note="Description of Artificial Sequence: Synthetic polypeptide"
  MOD_RES (1)..(9): Any amino acid
  MOD_RES (11)..(12): Any amino acid
  MOD_RES (14)..(18): Any amino acid
  MOD_RES (27)..(29): Any amino acid
  MOD_RES (31)..(37): Any amino acid
  MOD_RES (39)..(40): Any amino acid
  MOD_RES (42)..(46): Any amino acid
  MOD_RES (55)..(57): Any amino acid
  MOD_RES (59)..(65): Any amino acid
  MOD_RES (67)..(68): Any amino acid
  MOD_RES (70)..(74): Any amino acid
  MOD_RES (83)..(85): Any amino acid
  MOD_RES (87)..(93): Any amino acid
  MOD_RES (95)..(96): Any amino acid
  MOD_RES (98)..(102): Any amino acid
  MOD_RES (111)..(113): Any amino acid
  MOD_RES (115)..(121): Any amino acid
  MOD_RES (123)..(124): Any amino acid
  MOD_RES (126)..(130): Any amino acid
  MOD_RES (139)..(141): Any amino acid
  MOD_RES (143)..(149): Any amino acid
  MOD_RES (151)..(152): Any amino acid
  MOD_RES (154)..(158): Any amino acid
  MOD_RES (167)..(169): Any amino acid
  MOD_RES (171)..(177): Any amino acid
  MOD_RES (179)..(180): Any amino acid
  MOD_RES (182)..(186): Any amino acid
  MOD_RES (195)..(197): Any amino acid
  MOD_RES (199)..(209): Any amino acid
XXXXXXXXXCXXCXXXXXRSDHLTTHXXXHXXXXXXXCXXCXXXXXTSGNLVRHXXXHXXXXXXXCXXCXXXXXQSSNLVRHXXXHXXXXXXXCXXCXXXXXTSHSLTEHXXXHXXXXXXXCXXCXXXXXTSGNLVRHXXXHXXXXXXXCXXCXXXXXRKDNLKNHXXXHXXXXXXXCXXCXXXXXDSGNLRVHXXXHXXXXXXXXXXX

SEQ ID NO: 2074 - protein, 209 aa, Artificial Sequence
  source: /note="Description of Artificial Sequence: Synthetic polypeptide"
  MOD_RES (1)..(9): Any amino acid
  MOD_RES (11)..(12): Any amino acid
  MOD_RES (14)..(18): Any amino acid
  MOD_RES (27)..(29): Any amino acid
  MOD_RES (31)..(37): Any amino acid
  MOD_RES (39)..(40): Any amino acid
  MOD_RES (42)..(46): Any amino acid
  MOD_RES (55)..(57): Any amino acid
  MOD_RES (59)..(65): Any amino acid
  MOD_RES (67)..(68): Any amino acid
  MOD_RES (70)..(74): Any amino acid
  MOD_RES (83)..(85): Any amino acid
  MOD_RES (87)..(93): Any amino acid
  MOD_RES (95)..(96): Any amino acid
  MOD_RES (98)..(102): Any amino acid
  MOD_RES (111)..(113): Any amino acid
  MOD_RES (115)..(121): Any amino acid
  MOD_RES (123)..(124): Any amino acid
  MOD_RES (126)..(130): Any amino acid
  MOD_RES (139)..(141): Any amino acid
  MOD_RES (143)..(149): Any amino acid
  MOD_RES (151)..(152): Any amino acid
  MOD_RES (154)..(158): Any amino acid
  MOD_RES (167)..(169): Any amino acid
  MOD_RES (171)..(177): Any amino acid
  MOD_RES (179)..(180): Any amino acid
  MOD_RES (182)..(186): Any amino acid
  MOD_RES (195)..(197): Any amino acid
  MOD_RES (199)..(209): Any amino acid
XXXXXXXXXCXXCXXXXXRSDKLVRHXXXHXXXXXXXCXXCXXXXXRNDALTEHXXXHXXXXXXXCXXCXXXXXTSGNLTEHXXXHXXXXXXXCXXCXXXXXRSDHLTTHXXXHXXXXXXXCXXCXXXXXTSGNLVRHXXXHXXXXXXXCXXCXXXXXQSSNLVRHXXXHXXXXXXXCXXCXXXXXTSHSLTEHXXXHXXXXXXXXXXX

SEQ ID NO: 2075 - protein, 209 aa, Artificial Sequence
  source: /note="Description of Artificial Sequence: Synthetic polypeptide"
  MOD_RES (1)..(9): Any amino acid
  MOD_RES (11)..(12): Any amino acid
  MOD_RES (14)..(18): Any amino acid
  MOD_RES (27)..(29): Any amino acid
  MOD_RES (31)..(37): Any amino acid
  MOD_RES (39)..(40): Any amino acid
  MOD_RES (42)..(46): Any amino acid
  MOD_RES (55)..(57): Any amino acid
  MOD_RES (59)..(65): Any amino acid
  MOD_RES (67)..(68): Any amino acid
  MOD_RES (70)..(74): Any amino acid
  MOD_RES (83)..(85): Any amino acid
  MOD_RES (87)..(93): Any amino acid
  MOD_RES (95)..(96): Any amino acid
  MOD_RES (98)..(102): Any amino acid
  MOD_RES (111)..(113): Any amino acid
  MOD_RES (115)..(121): Any amino acid
  MOD_RES (123)..(124): Any amino acid
  MOD_RES (126)..(130): Any amino acid
  MOD_RES (139)..(141): Any amino acid
  MOD_RES (143)..(149): Any amino acid
  MOD_RES (151)..(152): Any amino acid
  MOD_RES (154)..(158): Any amino acid
  MOD_RES (167)..(169): Any amino acid
  MOD_RES (171)..(177): Any amino acid
  MOD_RES (179)..(180): Any amino acid
  MOD_RES (182)..(186): Any amino acid
  MOD_RES (195)..(197): Any amino acid
  MOD_RES (199)..(209): Any amino acid
XXXXXXXXXCXXCXXXXXRNDALTEHXXXHXXXXXXXCXXCXXXXXTSGNLTEHXXXHXXXXXXXCXXCXXXXXRSDHLTTHXXXHXXXXXXXCXXCXXXXXTSGNLVRHXXXHXXXXXXXCXXCXXXXXQSSNLVRHXXXHXXXXXXXCXXCXXXXXTSHSLTEHXXXHXXXXXXXCXXCXXXXXTSGNLVRHXXXHXXXXXXXXXXX

SEQ ID NO: 2076 - protein, 209 aa, Artificial Sequence
  source: /note="Description of Artificial Sequence: Synthetic polypeptide"
  MOD_RES (1)..(9): Any amino acid
  MOD_RES (11)..(12): Any amino acid
  MOD_RES (14)..(18): Any amino acid
  MOD_RES (27)..(29): Any amino acid
  MOD_RES (31)..(37): Any amino acid
  MOD_RES (39)..(40): Any amino acid
  MOD_RES (42)..(46): Any amino acid
  MOD_RES (55)..(57): Any amino acid
  MOD_RES (59)..(65): Any amino acid
  MOD_RES (67)..(68): Any amino acid
  MOD_RES (70)..(74): Any amino acid
  MOD_RES (83)..(85): Any amino acid
  MOD_RES (87)..(93): Any amino acid
  MOD_RES (95)..(96): Any amino acid
  MOD_RES (98)..(102): Any amino acid
  MOD_RES (111)..(113): Any amino acid
  MOD_RES (115)..(121): Any amino acid
  MOD_RES (123)..(124): Any amino acid
  MOD_RES (126)..(130): Any amino acid
  MOD_RES (139)..(141): Any amino acid
  MOD_RES (143)..(149): Any amino acid
  MOD_RES (151)..(152): Any amino acid
  MOD_RES (154)..(158): Any amino acid
  MOD_RES (167)..(169): Any amino acid
  MOD_RES (171)..(177): Any amino acid
  MOD_RES (179)..(180): Any amino acid
  MOD_RES (182)..(186): Any amino acid
  MOD_RES (195)..(197): Any amino acid
  MOD_RES (199)..(209): Any amino acid
XXXXXXXXXCXXCXXXXXTSGNLTEHXXXHXXXXXXXCXXCXXXXXRSDHLTTHXXXHXXXXXXXCXXCXXXXXTSGNLVRHXXXHXXXXXXXCXXCXXXXXQSSNLVRHXXXHXXXXXXXCXXCXXXXXTSHSLTEHXXXHXXXXXXXCXXCXXXXXTSGNLVRHXXXHXXXXXXXCXXCXXXXXRKDNLKNHXXXHXXXXXXXXXXX

SEQ ID NO: 2077 - protein, 209 aa, Artificial Sequence
  source: /note="Description of Artificial Sequence: Synthetic polypeptide"
  MOD_RES (1)..(9): Any amino acid
  MOD_RES (11)..(12): Any amino acid
  MOD_RES (14)..(18): Any amino acid
  MOD_RES (27)..(29): Any amino acid
  MOD_RES (31)..(37): Any amino acid
  MOD_RES (39)..(40): Any amino acid
  MOD_RES (42)..(46): Any amino acid
  MOD_RES (55)..(57): Any amino acid
  MOD_RES (59)..(65): Any amino acid
  MOD_RES (67)..(68): Any amino acid
  MOD_RES (70)..(74): Any amino acid
  MOD_RES (83)..(85): Any amino acid
  MOD_RES (87)..(93): Any amino acid
  MOD_RES (95)..(96): Any amino acid
  MOD_RES (98)..(102): Any amino acid
  MOD_RES (111)..(113): Any amino acid
  MOD_RES (115)..(121): Any amino acid
  MOD_RES (123)..(124): Any amino acid
  MOD_RES (126)..(130): Any amino acid
  MOD_RES (139)..(141): Any amino acid
  MOD_RES (143)..(149): Any amino acid
  MOD_RES (151)..(152): Any amino acid
  MOD_RES (154)..(158): Any amino acid
  MOD_RES (167)..(169): Any amino acid
  MOD_RES (171)..(177): Any amino acid
  MOD_RES (179)..(180): Any amino acid
  MOD_RES (182)..(186): Any amino acid
  MOD_RES (195)..(197): Any amino acid
  MOD_RES (199)..(209): Any amino acid
XXXXXXXXXCXXCXXXXXTSGSLVRHXXXHXXXXXXXCXXCXXXXXREDNLHTHXXXHXXXXXXXCXXCXXXXXHKNALQNHXXXHXXXXXXXCXXCXXXXXRSDKLVRHXXXHXXXXXXXCXXCXXXXXTKNSLTEHXXXHXXXXXXXCXXCXXXXXRSDKLVRHXXXHXXXXXXXCXXCXXXXXRNDALTEHXXXHXXXXXXXXXXX

SEQ ID NO: 2078 - protein, 209 aa, Artificial Sequence
  source: /note="Description of Artificial Sequence: Synthetic polypeptide"
  MOD_RES (1)..(9): Any amino acid
  MOD_RES (11)..(12): Any amino acid
  MOD_RES (14)..(18): Any amino acid
  MOD_RES (27)..(29): Any amino acid
  MOD_RES (31)..(37): Any amino acid
  MOD_RES (39)..(40): Any amino acid
  MOD_RES (42)..(46): Any amino acid
  MOD_RES (55)..(57): Any amino acid
  MOD_RES (59)..(65): Any amino acid
  MOD_RES (67)..(68): Any amino acid
  MOD_RES (70)..(74): Any amino acid
  MOD_RES (83)..(85): Any amino acid
  MOD_RES (87)..(93): Any amino acid
  MOD_RES (95)..(96): Any amino acid
  MOD_RES (98)..(102): Any amino acid
  MOD_RES (111)..(113): Any amino acid
  MOD_RES (115)..(121): Any amino acid
  MOD_RES (123)..(124): Any amino acid
  MOD_RES (126)..(130): Any amino acid
  MOD_RES (139)..(141): Any amino acid
  MOD_RES (143)..(149): Any amino acid
  MOD_RES (151)..(152): Any amino acid
  MOD_RES (154)..(158): Any amino acid
  MOD_RES (167)..(169): Any amino acid
  MOD_RES (171)..(177): Any amino acid
  MOD_RES (179)..(180): Any amino acid
  MOD_RES (182)..(186): Any amino acid
  MOD_RES (195)..(197): Any amino acid
  MOD_RES (199)..(209): Any amino acid
XXXXXXXXXCXXCXXXXXDPGHLVRHXXXHXXXXXXXCXXCXXXXXRSDHLTTHXXXHXXXXXXXCXXCXXXXXTSHSLTEHXXXHXXXXXXXCXXCXXXXXRSDKLVRHXXXHXXXXXXXCXXCXXXXXSRRTCRAHXXXHXXXXXXXCXXCXXXXXTTGNLTVHXXXHXXXXXXXCXXCXXXXXQNSTLTEHXXXHXXXXXXXXXXX

SEQ ID NO: 2079 - protein, 209 aa, Artificial Sequence
  source: /note="Description of Artificial Sequence: Synthetic polypeptide"
  MOD_RES (1)..(9): Any amino acid
  MOD_RES (11)..(12): Any amino acid
  MOD_RES (14)..(18): Any amino acid
  MOD_RES (27)..(29): Any amino acid
  MOD_RES (31)..(37): Any amino acid
  MOD_RES (39)..(40): Any amino acid
  MOD_RES (42)..(46): Any amino acid
  MOD_RES (55)..(57): Any amino acid
  MOD_RES (59)..(65): Any amino acid
  MOD_RES (67)..(68): Any amino acid
  MOD_RES (70)..(74): Any amino acid
  MOD_RES (83)..(85): Any amino acid
  MOD_RES (87)..(93): Any amino acid
  MOD_RES (95)..(96): Any amino acid
  MOD_RES (98)..(102): Any amino acid
  MOD_RES (111)..(113): Any amino acid
  MOD_RES (115)..(121): Any amino acid
  MOD_RES (123)..(124): Any amino acid
  MOD_RES (126)..(130): Any amino acid
  MOD_RES (139)..(141): Any amino acid
  MOD_RES (143)..(149): Any amino acid
  MOD_RES (151)..(152): Any amino acid
  MOD_RES (154)..(158): Any amino acid
  MOD_RES (167)..(169): Any amino acid
  MOD_RES (171)..(177): Any amino acid
  MOD_RES (179)..(180): Any amino acid
  MOD_RES (182)..(186): Any amino acid
  MOD_RES (195)..(197): Any amino acid
  MOD_RES (199)..(209): Any amino acid
XXXXXXXXXCXXCXXXXXERSHLREHXXXHXXXXXXXCXXCXXXXXDPGHLVRHXXXHXXXXXXXCXXCXXXXXRSDHLTTHXXXHXXXXXXXCXXCXXXXXTSHSLTEHXXXHXXXXXXXCXXCXXXXXRSDKLVRHXXXHXXXXXXXCXXCXXXXXSRRTCRAHXXXHXXXXXXXCXXCXXXXXTTGNLTVHXXXHXXXXXXXXXXX

SEQ ID NO: 2080 - protein, 209 aa, Artificial Sequence
  source: /note="Description of Artificial Sequence: Synthetic polypeptide"
  MOD_RES (1)..(9): Any amino acid
  MOD_RES (11)..(12): Any amino acid
  MOD_RES (14)..(18): Any amino acid
  MOD_RES (27)..(29): Any amino acid
  MOD_RES (31)..(37): Any amino acid
  MOD_RES (39)..(40): Any amino acid
  MOD_RES (42)..(46): Any amino acid
  MOD_RES (55)..(57): Any amino acid
  MOD_RES (59)..(65): Any amino acid
  MOD_RES (67)..(68): Any amino acid
  MOD_RES (70)..(74): Any amino acid
  MOD_RES (83)..(85): Any amino acid
  MOD_RES (87)..(93): Any amino acid
  MOD_RES (95)..(96): Any amino acid
  MOD_RES (98)..(102): Any amino acid
  MOD_RES (111)..(113): Any amino acid
  MOD_RES (115)..(121): Any amino acid
  MOD_RES (123)..(124): Any amino acid
  MOD_RES (126)..(130): Any amino acid
  MOD_RES (139)..(141): Any amino acid
  MOD_RES (143)..(149): Any amino acid
  MOD_RES (151)..(152): Any amino acid
  MOD_RES (154)..(158): Any amino acid
  MOD_RES (167)..(169): Any amino acid
  MOD_RES (171)..(177): Any amino acid
  MOD_RES (179)..(180): Any amino acid
  MOD_RES (182)..(186): Any amino acid
  MOD_RES (195)..(197): Any amino acid
  MOD_RES (199)..(209): Any amino acid
XXXXXXXXXCXXCXXXXXTTGALTEHXXXHXXXXXXXCXXCXXXXXERSHLREHXXXHXXXXXXXCXXCXXXXXDPGHLVRHXXXHXXXXXXXCXXCXXXXXRSDHLTTHXXXHXXXXXXXCXXCXXXXXTSHSLTEHXXXHXXXXXXXCXXCXXXXXRSDKLVRHXXXHXXXXXXXCXXCXXXXXSRRTCRAHXXXHXXXXXXXXXXX

SEQ ID NO: 2081 - protein, 209 aa, Artificial Sequence
  source: /note="Description of Artificial Sequence: Synthetic polypeptide"
  MOD_RES (1)..(9): Any amino acid
  MOD_RES (11)..(12): Any amino acid
  MOD_RES (14)..(18): Any amino acid
  MOD_RES (27)..(29): Any amino acid
  MOD_RES (31)..(37): Any amino acid
  MOD_RES (39)..(40): Any amino acid
  MOD_RES (42)..(46): Any amino acid
  MOD_RES (55)..(57): Any amino acid
  MOD_RES (59)..(65): Any amino acid
  MOD_RES (67)..(68): Any amino acid
  MOD_RES (70)..(74): Any amino acid
  MOD_RES (83)..(85): Any amino acid
  MOD_RES (87)..(93): Any amino acid
  MOD_RES (95)..(96): Any amino acid
  MOD_RES (98)..(102): Any amino acid
  MOD_RES (111)..(113): Any amino acid
  MOD_RES (115)..(121): Any amino acid
  MOD_RES (123)..(124): Any amino acid
  MOD_RES (126)..(130): Any amino acid
  MOD_RES (139)..(141): Any amino acid
  MOD_RES (143)..(149): Any amino acid
  MOD_RES (151)..(152): Any amino acid
  MOD_RES (154)..(158): Any amino acid
  MOD_RES (167)..(169): Any amino acid
  MOD_RES (171)..(177): Any amino acid
  MOD_RES (179)..(180): Any amino acid
  MOD_RES (182)..(186): Any amino acid
  MOD_RES (195)..(197): Any amino acid
  MOD_RES (199)..(209): Any amino acid
XXXXXXXXXCXXCXXXXXREDNLHTHXXXHXXXXXXXCXXCXXXXXRSDKLVRHXXXHXXXXXXXCXXCXXXXXQAGHLASHXXXHXXXXXXXCXXCXXXXXTSGNLTEHXXXHXXXXXXXCXXCXXXXXRKDNLKNHXXXHXXXXXXXCXXCXXXXXQSGNLTEHXXXHXXXXXXXCXXCXXXXXRNDALTEHXXXHXXXXXXXXXXX

SEQ ID NO: 2082 - protein, 209 aa, Artificial Sequence
  source: /note="Description of Artificial Sequence: Synthetic polypeptide"
  MOD_RES (1)..(9): Any amino acid
  MOD_RES (11)..(12): Any amino acid
  MOD_RES (14)..(18): Any amino acid
  MOD_RES (27)..(29): Any amino acid
  MOD_RES (31)..(37): Any amino acid
  MOD_RES (39)..(40): Any amino acid
  MOD_RES (42)..(46): Any amino acid
  MOD_RES (55)..(57): Any amino acid
  MOD_RES (59)..(65): Any amino acid
  MOD_RES (67)..(68): Any amino acid
  MOD_RES (70)..(74): Any amino acid
  MOD_RES (83)..(85): Any amino acid
  MOD_RES (87)..(93): Any amino acid
  MOD_RES (95)..(96): Any amino acid
  MOD_RES (98)..(102): Any amino acid
  MOD_RES (111)..(113): Any amino acid
  MOD_RES (115)..(121): Any amino acid
  MOD_RES (123)..(124): Any amino acid
  MOD_RES (126)..(130): Any amino acid
  MOD_RES (139)..(141): Any amino acid
  MOD_RES (143)..(149): Any amino acid
  MOD_RES (151)..(152): Any amino acid
  MOD_RES (154)..(158): Any amino acid
  MOD_RES (167)..(169): Any amino acid
  MOD_RES (171)..(177): Any amino acid
  MOD_RES (179)..(180): Any amino acid
  MOD_RES (182)..(186): Any amino acid
  MOD_RES (195)..(197): Any amino acid
  MOD_RES (199)..(209): Any amino acid
XXXXXXXXXCXXCXXXXXRKDNLKNHXXXHXXXXXXXCXXCXXXXXREDNLHTHXXXHXXXXXXXCXXCXXXXXRSDKLVRHXXXHXXXXXXXCXXCXXXXXQAGHLASHXXXHXXXXXXXCXXCXXXXXTSGNLTEHXXXHXXXXXXXCXXCXXXXXRKDNLKNHXXXHXXXXXXXCXXCXXXXXQSGNLTEHXXXHXXXXXXXXXXX

SEQ ID NO: 2083 - protein, 209 aa, Artificial Sequence
  source: /note="Description of Artificial Sequence: Synthetic polypeptide"
  MOD_RES (1)..(9): Any amino acid
  MOD_RES (11)..(12): Any amino acid
  MOD_RES (14)..(18): Any amino acid
  MOD_RES (27)..(29): Any amino acid
  MOD_RES (31)..(37): Any amino acid
  MOD_RES (39)..(40): Any amino acid
  MOD_RES (42)..(46): Any amino acid
  MOD_RES (55)..(57): Any amino acid
  MOD_RES (59)..(65): Any amino acid
  MOD_RES (67)..(68): Any amino acid
  MOD_RES (70)..(74): Any amino acid
  MOD_RES (83)..(85): Any amino acid
  MOD_RES (87)..(93): Any amino acid
  MOD_RES (95)..(96): Any amino acid
  MOD_RES (98)..(102): Any amino acid
  MOD_RES (111)..(113): Any amino acid
  MOD_RES (115)..(121): Any amino acid
  MOD_RES (123)..(124): Any amino acid
  MOD_RES (126)..(130): Any amino acid
  MOD_RES (139)..(141): Any amino acid
  MOD_RES (143)..(149): Any amino acid
  MOD_RES (151)..(152): Any amino acid
  MOD_RES (154)..(158): Any amino acid
  MOD_RES (167)..(169): Any amino acid
  MOD_RES (171)..(177): Any amino acid
  MOD_RES (179)..(180): Any amino acid
  MOD_RES (182)..(186): Any amino acid
  MOD_RES (195)..(197): Any amino acid
  MOD_RES (199)..(209): Any amino acid
XXXXXXXXXCXXCXXXXXHRTTLTNHXXXHXXXXXXXCXXCXXXXXQLAHLRAHXXXHXXXXXXXCXXCXXXXXTSGHLVRHXXXHXXXXXXXCXXCXXXXXRSDNLVRHXXXHXXXXXXXCXXCXXXXXHKNALQNHXXXHXXXXXXXCXXCXXXXXERSHLREHXXXHXXXXXXXCXXCXXXXXQRANLRAHXXXHXXXXXXXXXXX

SEQ ID NO: 2084 - protein, 209 aa, Artificial Sequence
  source: /note="Description of Artificial Sequence: Synthetic polypeptide"
  MOD_RES (1)..(9): Any amino acid
  MOD_RES (11)..(12): Any amino acid
  MOD_RES (14)..(18): Any amino acid
  MOD_RES (27)..(29): Any amino acid
  MOD_RES (31)..(37): Any amino acid
  MOD_RES (39)..(40): Any amino acid
  MOD_RES (42)..(46): Any amino acid
  MOD_RES (55)..(57): Any amino acid
  MOD_RES (59)..(65): Any amino acid
  MOD_RES (67)..(68): Any amino acid
  MOD_RES (70)..(74): Any amino acid
  MOD_RES (83)..(85): Any amino acid
  MOD_RES (87)..(93): Any amino acid
  MOD_RES (95)..(96): Any amino acid
  MOD_RES (98)..(102): Any amino acid
  MOD_RES (111)..(113): Any amino acid
  MOD_RES (115)..(121): Any amino acid
  MOD_RES (123)..(124): Any amino acid
  MOD_RES (126)..(130): Any amino acid
  MOD_RES (139)..(141): Any amino acid
  MOD_RES (143)..(149): Any amino acid
  MOD_RES (151)..(152): Any amino acid
  MOD_RES (154)..(158): Any amino acid
  MOD_RES (167)..(169): Any amino acid
  MOD_RES (171)..(177): Any amino acid
  MOD_RES (179)..(180): Any amino acid
  MOD_RES (182)..(186): Any amino acid
  MOD_RES (195)..(197): Any amino acid
  MOD_RES (199)..(209): Any amino acid
XXXXXXXXXCXXCXXXXXQAGHLASHXXXHXXXXXXXCXXCXXXXXQSGNLTEHXXXHXXXXXXXCXXCXXXXXHRTTLTNHXXXHXXXXXXXCXXCXXXXXQLAHLRAHXXXHXXXXXXXCXXCXXXXXTSGHLVRHXXXHXXXXXXXCXXCXXXXXRSDNLVRHXXXHXXXXXXXCXXCXXXXXHKNALQNHXXXHXXXXXXXXXXX

SEQ ID NO: 2085 - protein, 209 aa, Artificial Sequence
  source: /note="Description of Artificial Sequence: Synthetic polypeptide"
  MOD_RES (1)..(9): Any amino acid
  MOD_RES (11)..(12): Any amino acid
  MOD_RES (14)..(18): Any amino acid
  MOD_RES (27)..(29): Any amino acid
  MOD_RES (31)..(37): Any amino acid
  MOD_RES (39)..(40): Any amino acid
  MOD_RES (42)..(46): Any amino acid
  MOD_RES (55)..(57): Any amino acid
  MOD_RES (59)..(65): Any amino acid
  MOD_RES (67)..(68): Any amino acid
  MOD_RES (70)..(74): Any amino acid
  MOD_RES (83)..(85): Any amino acid
  MOD_RES (87)..(93): Any amino acid
  MOD_RES (95)..(96): Any amino acid
  MOD_RES (98)..(102): Any amino acid
  MOD_RES (111)..(113): Any amino acid
  MOD_RES (115)..(121): Any amino acid
  MOD_RES (123)..(124): Any amino acid
  MOD_RES (126)..(130): Any amino acid
  MOD_RES (139)..(141): Any amino acid
  MOD_RES (143)..(149): Any amino acid
  MOD_RES (151)..(152): Any amino acid
  MOD_RES (154)..(158): Any amino acid
  MOD_RES (167)..(169): Any amino acid
  MOD_RES (171)..(177): Any amino acid
  MOD_RES (179)..(180): Any amino acid
  MOD_RES (182)..(186): Any amino acid
  MOD_RES (195)..(197): Any amino acid
  MOD_RES (199)..(209): Any amino acid
XXXXXXXXXCXXCXXXXXQSGNLTEHXXXHXXXXXXXCXXCXXXXXHRTTLTNHXXXHXXXXXXXCXXCXXXXXQLAHLRAHXXXHXXXXXXXCXXCXXXXXTSGHLVRHXXXHXXXXXXXCXXCXXXXXRSDNLVRHXXXHXXXXXXXCXXCXXXXXHKNALQNHXXXHXXXXXXXCXXCXXXXXERSHLREHXXXHXXXXXXXXXXX

SEQ ID NO: 2086 - protein, 209 aa, Artificial Sequence
  source: /note="Description of Artificial Sequence: Synthetic polypeptide"
  MOD_RES (1)..(9): Any amino acid
  MOD_RES (11)..(12): Any amino acid
  MOD_RES (14)..(18): Any amino acid
  MOD_RES (27)..(29): Any amino acid
  MOD_RES (31)..(37): Any amino acid
  MOD_RES (39)..(40): Any amino acid
  MOD_RES (42)..(46): Any amino acid
  MOD_RES (55)..(57): Any amino acid
  MOD_RES (59)..(65): Any amino acid
  MOD_RES (67)..(68): Any amino acid
  MOD_RES (70)..(74): Any amino acid
  MOD_RES (83)..(85): Any amino acid
  MOD_RES (87)..(93): Any amino acid
  MOD_RES (95)..(96): Any amino acid
  MOD_RES (98)..(102): Any amino acid
  MOD_RES (111)..(113): Any amino acid
  MOD_RES (115)..(121): Any amino acid
  MOD_RES (123)..(124): Any amino acid
  MOD_RES (126)..(130): Any amino acid
  MOD_RES (139)..(141): Any amino acid
  MOD_RES (143)..(149): Any amino acid
  MOD_RES (151)..(152): Any amino acid
  MOD_RES (154)..(158): Any amino acid
  MOD_RES (167)..(169): Any amino acid
  MOD_RES (171)..(177): Any amino acid
  MOD_RES (179)..(180): Any amino acid
  MOD_RES (182)..(186): Any amino acid
  MOD_RES (195)..(197): Any amino acid
  MOD_RES (199)..(209): Any amino acid
XXXXXXXXXCXXCXXXXXQSSNLVRHXXXHXXXXXXXCXXCXXXXXHKNALQNHXXXHXXXXXXXCXXCXXXXXTSGSLVRHXXXHXXXXXXXCXXCXXXXXQSSNLVRHXXXHXXXXXXXCXXCXXXXXRSDHLTTHXXXHXXXXXXXCXXCXXXXXHKNALQNHXXXHXXXXXXXCXXCXXXXXRRDELNVHXXXHXXXXXXXXXXX

SEQ ID NO: 2087 - protein, 209 aa, Artificial Sequence
  source: /note="Description of Artificial Sequence: Synthetic polypeptide"
  MOD_RES (1)..(9): Any amino acid
  MOD_RES (11)..(12): Any amino acid
  MOD_RES (14)..(18): Any amino acid
  MOD_RES (27)..(29): Any amino acid
  MOD_RES (31)..(37): Any amino acid
  MOD_RES (39)..(40): Any amino acid
  MOD_RES (42)..(46): Any amino acid
  MOD_RES (55)..(57): Any amino acid
  MOD_RES (59)..(65): Any amino acid
  MOD_RES (67)..(68): Any amino acid
  MOD_RES (70)..(74): Any amino acid
  MOD_RES (83)..(85): Any amino acid
  MOD_RES (87)..(93): Any amino acid
  MOD_RES (95)..(96): Any amino acid
  MOD_RES (98)..(102): Any amino acid
  MOD_RES (111)..(113): Any amino acid
  MOD_RES (115)..(121): Any amino acid
  MOD_RES (123)..(124): Any amino acid
  MOD_RES (126)..(130): Any amino acid
  MOD_RES (139)..(141): Any amino acid
  MOD_RES (143)..(149): Any amino acid
  MOD_RES (151)..(152): Any amino acid
  MOD_RES (154)..(158): Any amino acid
  MOD_RES (167)..(169): Any amino acid
  MOD_RES (171)..(177): Any amino acid
  MOD_RES (179)..(180): Any amino acid
  MOD_RES (182)..(186): Any amino acid
  MOD_RES (195)..(197): Any amino acid
  MOD_RES (199)..(209): Any amino acid
XXXXXXXXXCXXCXXXXXREDNLHTHXXXHXXXXXXXCXXCXXXXXQAGHLASHXXXHXXXXXXXCXXCXXXXXDCRDLARHXXXHXXXXXXXCXXCXXXXXHRTTLTNHXXXHXXXXXXXCXXCXXXXXDPGALVRHXXXHXXXXXXXCXXCXXXXXTSGELVRHXXXHXXXXXXXCXXCXXXXXREDNLHTHXXXHXXXXXXXXXXX

SEQ ID NO: 2088 - protein, 209 aa, Artificial Sequence
  source: /note="Description of Artificial Sequence: Synthetic polypeptide"
  MOD_RES (1)..(9): Any amino acid
  MOD_RES (11)..(12): Any amino acid
  MOD_RES (14)..(18): Any amino acid
  MOD_RES (27)..(29): Any amino acid
  MOD_RES (31)..(37): Any amino acid
  MOD_RES (39)..(40): Any amino acid
  MOD_RES (42)..(46): Any amino acid
  MOD_RES (55)..(57): Any amino acid
  MOD_RES (59)..(65): Any amino acid
  MOD_RES (67)..(68): Any amino acid
  MOD_RES (70)..(74): Any amino acid
  MOD_RES (83)..(85): Any amino acid
  MOD_RES (87)..(93): Any amino acid
  MOD_RES (95)..(96): Any amino acid
  MOD_RES (98)..(102): Any amino acid
  MOD_RES (111)..(113): Any amino acid
  MOD_RES (115)..(121): Any amino acid
  MOD_RES (123)..(124): Any amino acid
  MOD_RES (126)..(130): Any amino acid
  MOD_RES (139)..(141): Any amino acid
  MOD_RES (143)..(149): Any amino acid
  MOD_RES (151)..(152): Any amino acid
  MOD_RES (154)..(158): Any amino acid
  MOD_RES (167)..(169): Any amino acid
  MOD_RES (171)..(177): Any amino acid
  MOD_RES (179)..(180): Any amino acid
  MOD_RES (182)..(186): Any amino acid
  MOD_RES (195)..(197): Any amino acid
  MOD_RES (199)..(209): Any amino acid
XXXXXXXXXCXXCXXXXXQAGHLASHXXXHXXXXXXXCXXCXXXXXDCRDLARHXXXHXXXXXXXCXXCXXXXXHRTTLTNHXXXHXXXXXXXCXXCXXXXXDPGALVRHXXXHXXXXXXXCXXCXXXXXTSGELVRHXXXHXXXXXXXCXXCXXXXXREDNLHTHXXXHXXXXXXXCXXCXXXXXRSDHLTNHXXXHXXXXXXXXXXX

SEQ ID NO: 2089 - protein, 209 aa, Artificial Sequence
  source: /note="Description of Artificial Sequence: Synthetic polypeptide"
  MOD_RES (1)..(9): Any amino acid
  MOD_RES (11)..(12): Any amino acid
  MOD_RES (14)..(18): Any amino acid
  MOD_RES (27)..(29): Any amino acid
  MOD_RES (31)..(37): Any amino acid
  MOD_RES (39)..(40): Any amino acid
  MOD_RES (42)..(46): Any amino acid
  MOD_RES (55)..(57): Any amino acid
  MOD_RES (59)..(65): Any amino acid
  MOD_RES (67)..(68): Any amino acid
  MOD_RES (70)..(74): Any amino acid
  MOD_RES (83)..(85): Any amino acid
  MOD_RES (87)..(93): Any amino acid
  MOD_RES (95)..(96): Any amino acid
  MOD_RES (98)..(102): Any amino acid
  MOD_RES (111)..(113): Any amino acid
  MOD_RES (115)..(121): Any amino acid
  MOD_RES (123)..(124): Any amino acid
  MOD_RES (126)..(130): Any amino acid
  MOD_RES (139)..(141): Any amino acid
  MOD_RES (143)..(149): Any amino acid
  MOD_RES (151)..(152): Any amino acid
  MOD_RES (154)..(158): Any amino acid
  MOD_RES (167)..(169): Any amino acid
  MOD_RES (171)..(177): Any amino acid
  MOD_RES (179)..(180): Any amino acid
  MOD_RES (182)..(186): Any amino acid
  MOD_RES (195)..(197): Any amino acid
  MOD_RES (199)..(209): Any amino acid
XXXXXXXXXCXXCXXXXXDCRDLARHXXXHXXXXXXXCXXCXXXXXHRTTLTNHXXXHXXXXXXXCXXCXXXXXDPGALVRHXXXHXXXXXXXCXXCXXXXXTSGELVRHXXXHXXXXXXXCXXCXXXXXREDNLHTHXXXHXXXXXXXCXXCXXXXXRSDHLTNHXXXHXXXXXXXCXXCXXXXXRSDKLTEHXXXHXXXXXXXXXXX

SEQ ID NO: 2090 - protein, 209 aa, Artificial Sequence
  source: /note="Description of Artificial Sequence: Synthetic polypeptide"
  MOD_RES (1)..(9): Any amino acid
  MOD_RES (11)..(12): Any amino acid
  MOD_RES (14)..(18): Any amino acid
  MOD_RES (27)..(29): Any amino acid
  MOD_RES (31)..(37): Any amino acid
  MOD_RES (39)..(40): Any amino acid
  MOD_RES (42)..(46): Any amino acid
  MOD_RES (55)..(57): Any amino acid
  MOD_RES (59)..(65): Any amino acid
  MOD_RES (67)..(68): Any amino acid
  MOD_RES (70)..(74): Any amino acid
  MOD_RES (83)..(85): Any amino acid
  MOD_RES (87)..(93): Any amino acid
  MOD_RES (95)..(96): Any amino acid
  MOD_RES (98)..(102): Any amino acid
  MOD_RES (111)..(113): Any amino acid
  MOD_RES (115)..(121): Any amino acid
  MOD_RES (123)..(124): Any amino acid
  MOD_RES (126)..(130): Any amino acid
  MOD_RES (139)..(141): Any amino acid
  MOD_RES (143)..(149): Any amino acid
  MOD_RES (151)..(152): Any amino acid
  MOD_RES (154)..(158): Any amino acid
  MOD_RES (167)..(169): Any amino acid
  MOD_RES (171)..(177): Any amino acid
  MOD_RES (179)..(180): Any amino acid
  MOD_RES (182)..(186): Any amino acid
  MOD_RES (195)..(197): Any amino acid
  MOD_RES (199)..(209): Any amino acid
XXXXXXXXXCXXCXXXXXRSDELVRHXXXHXXXXXXXCXXCXXXXXRSDKLVRHXXXHXXXXXXXCXXCXXXXXTTGALTEHXXXHXXXXXXXCXXCXXXXXQAGHLASHXXXHXXXXXXXCXXCXXXXXDCRDLARHXXXHXXXXXXXCXXCXXXXXTTGNLTVHXXXHXXXXXXXCXXCXXXXXREDNLHTHXXXHXXXXXXXXXXX

SEQ ID NO: 2091 - protein, 209 aa, Artificial Sequence
  source: /note="Description of Artificial Sequence: Synthetic polypeptide"
  MOD_RES (1)..(9): Any amino acid
  MOD_RES (11)..(12): Any amino acid
  MOD_RES (14)..(18): Any amino acid
  MOD_RES (27)..(29): Any amino acid
  MOD_RES (31)..(37): Any amino acid
  MOD_RES (39)..(40): Any amino acid
  MOD_RES (42)..(46): Any amino acid
  MOD_RES (55)..(57): Any amino acid
  MOD_RES (59)..(65): Any amino acid
  MOD_RES (67)..(68): Any amino acid
  MOD_RES (70)..(74): Any amino acid
  MOD_RES (83)..(85): Any amino acid
  MOD_RES (87)..(93): Any amino acid
  MOD_RES (95)..(96): Any amino acid
  MOD_RES (98)..(102): Any amino acid
  MOD_RES (111)..(113): Any amino acid
  MOD_RES (115)..(121): Any amino acid
  MOD_RES (123)..(124): Any amino acid
  MOD_RES (126)..(130): Any amino acid
  MOD_RES (139)..(141): Any amino acid
  MOD_RES (143)..(149): Any amino acid
  MOD_RES (151)..(152): Any amino acid
  MOD_RES (154)..(158): Any amino acid
  MOD_RES (167)..(169): Any amino acid
  MOD_RES (171)..(177): Any amino acid
  MOD_RES (179)..(180): Any amino acid
  MOD_RES (182)..(186): Any amino acid
  MOD_RES (195)..(197): Any amino acid
  MOD_RES (199)..(209): Any amino acid
XXXXXXXXXCXXCXXXXXSPADLTRHXXXHXXXXXXXCXXCXXXXXRSDELVRHXXXHXXXXXXXCXXCXXXXXRSDKLVRHXXXHXXXXXXXCXXCXXXXXTTGALTEHXXXHXXXXXXXCXXCXXXXXQAGHLASHXXXHXXXXXXXCXXCXXXXXDCRDLARHXXXHXXXXXXXCXXCXXXXXTTGNLTVHXXXHXXXXXXXXXXX

SEQ ID NO: 2092 - protein, 209 aa, Artificial Sequence
  source: /note="Description of Artificial Sequence: Synthetic polypeptide"
  MOD_RES (1)..(9): Any amino acid
  MOD_RES (11)..(12): Any amino acid
  MOD_RES (14)..(18): Any amino acid
  MOD_RES (27)..(29): Any amino acid
  MOD_RES (31)..(37): Any amino acid
  MOD_RES (39)..(40): Any amino acid
  MOD_RES (42)..(46): Any amino acid
  MOD_RES (55)..(57): Any amino acid
  MOD_RES (59)..(65): Any amino acid
  MOD_RES (67)..(68): Any amino acid
  MOD_RES (70)..(74): Any amino acid
  MOD_RES (83)..(85): Any amino acid
  MOD_RES (87)..(93): Any amino acid
  MOD_RES (95)..(96): Any amino acid
  MOD_RES (98)..(102): Any amino acid
  MOD_RES (111)..(113): Any amino acid
  MOD_RES (115)..(121): Any amino acid
  MOD_RES (123)..(124): Any amino acid
  MOD_RES (126)..(130): Any amino acid
  MOD_RES (139)..(141): Any amino acid
  MOD_RES (143)..(149): Any amino acid
  MOD_RES (151)..(152): Any amino acid
  MOD_RES (154)..(158): Any amino acid
  MOD_RES (167)..(169): Any amino acid
  MOD_RES (171)..(177): Any amino acid
  MOD_RES (179)..(180): Any amino acid
  MOD_RES (182)..(186): Any amino acid
  MOD_RES (195)..(197): Any amino acid
  MOD_RES (199)..(209): Any amino acid
XXXXXXXXXCXXCXXXXXRSDKLVRHXXXHXXXXXXXCXXCXXXXXTTGALTEHXXXHXXXXXXXCXXCXXXXXQAGHLASHXXXHXXXXXXXCXXCXXXXXDCRDLARHXXXHXXXXXXXCXXCXXXXXTTGNLTVHXXXHXXXXXXXCXXCXXXXXREDNLHTHXXXHXXXXXXXCXXCXXXXXHRTTLTNHXXXHXXXXXXXXXXX

SEQ ID NO: 2093 - protein, 209 aa, Artificial Sequence
  source: /note="Description of Artificial Sequence: Synthetic polypeptide"
  MOD_RES (1)..(9): Any amino acid
  MOD_RES (11)..(12): Any amino acid
  MOD_RES (14)..(18): Any amino acid
  MOD_RES (27)..(29): Any amino acid
  MOD_RES (31)..(37): Any amino acid
  MOD_RES (39)..(40): Any amino acid
  MOD_RES (42)..(46): Any amino acid
  MOD_RES (55)..(57): Any amino acid
  MOD_RES (59)..(65): Any amino acid
  MOD_RES (67)..(68): Any amino acid
  MOD_RES (70)..(74): Any amino acid
  MOD_RES (83)..(85): Any amino acid
  MOD_RES (87)..(93): Any amino acid
  MOD_RES (95)..(96): Any amino acid
  MOD_RES (98)..(102): Any amino acid
  MOD_RES (111)..(113): Any amino acid
  MOD_RES (115)..(121): Any amino acid
  MOD_RES (123)..(124): Any amino acid
  MOD_RES (126)..(130): Any amino acid
  MOD_RES (139)..(141): Any amino acid
  MOD_RES (143)..(149): Any amino acid
  MOD_RES (151)..(152): Any amino acid
  MOD_RES (154)..(158): Any amino acid
  MOD_RES (167)..(169): Any amino acid
  MOD_RES (171)..(177): Any amino acid
  MOD_RES (179)..(180): Any amino acid
  MOD_RES (182)..(186): Any amino acid
  MOD_RES (195)..(197): Any amino acid
  MOD_RES (199)..(209): Any amino acid
XXXXXXXXXCXXCXXXXXRRDELNVHXXXHXXXXXXXCXXCXXXXXSPADLTRHXXXHXXXXXXXCXXCXXXXXRSDELVRHXXXHXXXXXXXCXXCXXXXXRSDKLVRHXXXHXXXXXXXCXXCXXXXXTTGALTEHXXXHXXXXXXXCXXCXXXXXQAGHLASHXXXHXXXXXXXCXXCXXXXXDCRDLARHXXXHXXXXXXXXXXX

SEQ ID NO: 2094 - protein, 209 aa, Artificial Sequence
  source: /note="Description of Artificial Sequence: Synthetic polypeptide"
  MOD_RES (1)..(9): Any amino acid
  MOD_RES (11)..(12): Any amino acid
  MOD_RES (14)..(18): Any amino acid
  MOD_RES (27)..(29): Any amino acid
  MOD_RES (31)..(37): Any amino acid
  MOD_RES (39)..(40): Any amino acid
  MOD_RES (42)..(46): Any amino acid
  MOD_RES (55)..(57): Any amino acid
  MOD_RES (59)..(65): Any amino acid
  MOD_RES (67)..(68): Any amino acid
  MOD_RES (70)..(74): Any amino acid
  MOD_RES (83)..(85): Any amino acid
  MOD_RES (87)..(93): Any amino acid
  MOD_RES (95)..(96): Any amino acid
  MOD_RES (98)..(102): Any amino acid
  MOD_RES (111)..(113): Any amino acid
  MOD_RES (115)..(121): Any amino acid
  MOD_RES (123)..(124): Any amino acid
  MOD_RES (126)..(130): Any amino acid
  MOD_RES (139)..(141): Any amino acid
  MOD_RES (143)..(149): Any amino acid
  MOD_RES (151)..(152): Any amino acid
  MOD_RES (154)..(158): Any amino acid
  MOD_RES (167)..(169): Any amino acid
  MOD_RES (171)..(177): Any amino acid
  MOD_RES (179)..(180): Any amino acid
  MOD_RES (182)..(186): Any amino acid
  MOD_RES (195)..(197): Any amino acid
  MOD_RES (199)..(209): Any amino acid
XXXXXXXXXCXXCXXXXXRSDHLTNHXXXHXXXXXXXCXXCXXXXXRSDHLTTHXXXHXXXXXXXCXXCXXXXXTSGELVRHXXXHXXXXXXXCXXCXXXXXRRDELNVHXXXHXXXXXXXCXXCXXXXXSPADLTRHXXXHXXXXXXXCXXCXXXXXRSDELVRHXXXHXXXXXXXCXXCXXXXXRSDKLVRHXXXHXXXXXXXXXXX

SEQ ID NO: 2095 - protein, 209 aa, Artificial Sequence
  source: /note="Description of Artificial Sequence: Synthetic polypeptide"
  MOD_RES (1)..(9): Any amino acid
  MOD_RES (11)..(12): Any amino acid
  MOD_RES (14)..(18): Any amino acid
  MOD_RES (27)..(29): Any amino acid
  MOD_RES (31)..(37): Any amino acid
  MOD_RES (39)..(40): Any amino acid
  MOD_RES (42)..(46): Any amino acid
  MOD_RES (55)..(57): Any amino acid
  MOD_RES (59)..(65): Any amino acid
  MOD_RES (67)..(68): Any amino acid
  MOD_RES (70)..(74): Any amino acid
  MOD_RES (83)..(85): Any amino acid
  MOD_RES (87)..(93): Any amino acid
  MOD_RES (95)..(96): Any amino acid
  MOD_RES (98)..(102): Any amino acid
  MOD_RES (111)..(113): Any amino acid
  MOD_RES (115)..(121): Any amino acid
  MOD_RES (123)..(124): Any amino acid
  MOD_RES (126)..(130): Any amino acid
  MOD_RES (139)..(141): Any amino acid
  MOD_RES (143)..(149): Any amino acid
  MOD_RES (151)..(152): Any amino acid
  MOD_RES (154)..(158): Any amino acid
  MOD_RES (167)..(169): Any amino acid
  MOD_RES (171)..(177): Any amino acid
  MOD_RES (179)..(180): Any amino acid
  MOD_RES (182)..(186): Any amino acid
  MOD_RES (195)..(197): Any amino acid
  MOD_RES (199)..(209): Any amino acid
XXXXXXXXXCXXCXXXXXTSGELVRHXXXHXXXXXXXCXXCXXXXXRRDELNVHXXXHXXXXXXXCXXCXXXXXSPADLTRHXXXHXXXXXXXCXXCXXXXXRSDELVRHXXXHXXXXXXXCXXCXXXXXRSDKLVRHXXXHXXXXXXXCXXCXXXXXTTGALTEHXXXHXXXXXXXCXXCXXXXXQAGHLASHXXXHXXXXXXXXXXX

SEQ ID NO: 2096 - protein, 209 aa, Artificial Sequence
  source: /note="Description of Artificial Sequence: Synthetic polypeptide"
  MOD_RES (1)..(9): Any amino acid
  MOD_RES (11)..(12): Any amino acid
  MOD_RES (14)..(18): Any amino acid
  MOD_RES (27)..(29): Any amino acid
  MOD_RES (31)..(37): Any amino acid
  MOD_RES (39)..(40): Any amino acid
  MOD_RES (42)..(46): Any amino acid
  MOD_RES (55)..(57): Any amino acid
  MOD_RES (59)..(65): Any amino acid
  MOD_RES (67)..(68): Any amino acid
  MOD_RES (70)..(74): Any amino acid
  MOD_RES (83)..(85): Any amino acid
  MOD_RES (87)..(93): Any amino acid
  MOD_RES (95)..(96): Any amino acid
  MOD_RES (98)..(102): Any amino acid
  MOD_RES (111)..(113): Any amino acid
  MOD_RES (115)..(121): Any amino acid
  MOD_RES (123)..(124): Any amino acid
  MOD_RES (126)..(130): Any amino acid
  MOD_RES (139)..(141): Any amino acid
  MOD_RES (143)..(149): Any amino acid
  MOD_RES (151)..(152): Any amino acid
  MOD_RES (154)..(158): Any amino acid
  MOD_RES (167)..(169): Any amino acid
  MOD_RES (171)..(177): Any amino acid
  MOD_RES (179)..(180): Any amino acid
  MOD_RES (182)..(186): Any amino acid
  MOD_RES (195)..(197): Any amino acid
  MOD_RES (199)..(209): Any amino acid
XXXXXXXXXCXXCXXXXXDPGALVRHXXXHXXXXXXXCXXCXXXXXQAGHLASHXXXHXXXXXXXCXXCXXXXXRSDKLVRHXXXHXXXXXXXCXXCXXXXXTSGHLVRHXXXHXXXXXXXCXXCXXXXXRSDHLTNHXXXHXXXXXXXCXXCXXXXXRSDHLTTHXXXHXXXXXXXCXXCXXXXXTSGELVRHXXXHXXXXXXXXXXX

SEQ ID NO: 2097 - protein, 209 aa, Artificial Sequence
  source: /note="Description of Artificial Sequence: Synthetic polypeptide"
  MOD_RES (1)..(9): Any amino acid
  MOD_RES (11)..(12): Any amino acid
  MOD_RES (14)..(18): Any amino acid
  MOD_RES (27)..(29): Any amino acid
  MOD_RES (31)..(37): Any amino acid
  MOD_RES (39)..(40): Any amino acid
  MOD_RES (42)..(46): Any amino acid
  MOD_RES (55)..(57): Any amino acid
  MOD_RES (59)..(65): Any amino acid
  MOD_RES (67)..(68): Any amino acid
  MOD_RES (70)..(74): Any amino acid
  MOD_RES (83)..(85): Any amino acid
  MOD_RES (87)..(93): Any amino acid
  MOD_RES (95)..(96): Any amino acid
  MOD_RES (98)..(102): Any amino acid
  MOD_RES (111)..(113): Any amino acid
  MOD_RES (115)..(121): Any amino acid
  MOD_RES (123)..(124): Any amino acid
  MOD_RES (126)..(130): Any amino acid
  MOD_RES (139)..(141): Any amino acid
  MOD_RES (143)..(149): Any amino acid
  MOD_RES (151)..(152): Any amino acid
  MOD_RES (154)..(158): Any amino acid
  MOD_RES (167)..(169): Any amino acid
  MOD_RES (171)..(177): Any amino acid
  MOD_RES (179)..(180): Any amino acid
  MOD_RES (182)..(186): Any amino acid
  MOD_RES (195)..(197): Any amino acid
  MOD_RES (199)..(209): Any amino acid
XXXXXXXXXCXXCXXXXXRKDNLKNHXXXHXXXXXXXCXXCXXXXXDPGALVRHXXXHXXXXXXXCXXCXXXXXQAGHLASHXXXHXXXXXXXCXXCXXXXXRSDKLVRHXXXHXXXXXXXCXXCXXXXXTSGHLVRHXXXHXXXXXXXCXXCXXXXXRSDHLTNHXXXHXXXXXXXCXXCXXXXXRSDHLTTHXXXHXXXXXXXXXXX

SEQ ID NO: 2098 - protein, 209 aa, Artificial Sequence
  source: /note="Description of Artificial Sequence: Synthetic polypeptide"
  MOD_RES (1)..(9): Any amino acid
  MOD_RES (11)..(12): Any amino acid
  MOD_RES (14)..(18): Any amino acid
  MOD_RES (27)..(29): Any amino acid
  MOD_RES (31)..(37): Any amino acid
  MOD_RES (39)..(40): Any amino acid
  MOD_RES (42)..(46): Any amino acid
  MOD_RES (55)..(57): Any amino acid
  MOD_RES (59)..(65): Any amino acid
  MOD_RES (67)..(68): Any amino acid
  MOD_RES (70)..(74): Any amino acid
  MOD_RES (83)..(85): Any amino acid
  MOD_RES (87)..(93): Any amino acid
  MOD_RES (95)..(96): Any amino acid
  MOD_RES (98)..(102): Any amino acid
  MOD_RES (111)..(113): Any amino acid
  MOD_RES (115)..(121): Any amino acid
  MOD_RES (123)..(124): Any amino acid
  MOD_RES (126)..(130): Any amino acid
  MOD_RES (139)..(141): Any amino acid
  MOD_RES (143)..(149): Any amino acid
  MOD_RES (151)..(152): Any amino acid
  MOD_RES (154)..(158): Any amino acid
  MOD_RES (167)..(169): Any amino acid
  MOD_RES (171)..(177): Any amino acid
  MOD_RES (179)..(180): Any amino acid
  MOD_RES (182)..(186): Any amino acid
  MOD_RES (195)..(197): Any amino acid
  MOD_RES (199)..(209): Any amino acid
XXXXXXXXXCXXCXXXXXTSGHLVRHXXXHXXXXXXXCXXCXXXXXRSDHLTNHXXXHXXXXXXXCXXCXXXXXRSDHLTTHXXXHXXXXXXXCXXCXXXXXTSGELVRHXXXHXXXXXXXCXXCXXXXXRRDELNVHXXXHXXXXXXXCXXCXXXXXSPADLTRHXXXHXXXXXXXCXXCXXXXXRSDELVRHXXXHXXXXXXXXXXX

SEQ ID NO: 2099 - protein, 209 aa, Artificial Sequence
  source: /note="Description of Artificial Sequence: Synthetic polypeptide"
  MOD_RES (1)..(9): Any amino acid
  MOD_RES (11)..(12): Any amino acid
  MOD_RES (14)..(18): Any amino acid
  MOD_RES (27)..(29): Any amino acid
  MOD_RES (31)..(37): Any amino acid
  MOD_RES (39)..(40): Any amino acid
  MOD_RES (42)..(46): Any amino acid
  MOD_RES (55)..(57): Any amino acid
  MOD_RES (59)..(65): Any amino acid
  MOD_RES (67)..(68): Any amino acid
  MOD_RES (70)..(74): Any amino acid
  MOD_RES (83)..(85): Any amino acid
  MOD_RES (87)..(93): Any amino acid
  MOD_RES (95)..(96): Any amino acid
  MOD_RES (98)..(102): Any amino acid
  MOD_RES (111)..(113): Any amino acid
  MOD_RES (115)..(121): Any amino acid
  MOD_RES (123)..(124): Any amino acid
  MOD_RES (126)..(130): Any amino acid
  MOD_RES (139)..(141): Any amino acid
  MOD_RES (143)..(149): Any amino acid
  MOD_RES (151)..(152): Any amino acid
  MOD_RES (154)..(158): Any amino acid
  MOD_RES (167)..(169): Any amino acid
  MOD_RES (171)..(177): Any amino acid
  MOD_RES (179)..(180): Any amino acid
  MOD_RES (182)..(186): Any amino acid
  MOD_RES (195)..(197): Any amino acid
  MOD_RES (199)..(209): Any amino acid
XXXXXXXXXCXXCXXXXXQAGHLASHXXXHXXXXXXXCXXCXXXXXRSDKLVRHXXXHXXXXXXXCXXCXXXXXTSGHLVRHXXXHXXXXXXXCXXCXXXXXRSDHLTNHXXXHXXXXXXXCXXCXXXXXRSDHLTTHXXXHXXXXXXXCXXCXXXXXTSGELVRHXXXHXXXXXXXCXXCXXXXXRRDELNVHXXXHXXXXXXXXXXX

SEQ ID NO: 2100 - protein, 209 aa, Artificial Sequence
  source: /note="Description of Artificial Sequence: Synthetic polypeptide"
  MOD_RES (1)..(9): Any amino acid
  MOD_RES (11)..(12): Any amino acid
  MOD_RES (14)..(18): Any amino acid
  MOD_RES (27)..(29): Any amino acid
  MOD_RES (31)..(37): Any amino acid
  MOD_RES (39)..(40): Any amino acid
  MOD_RES (42)..(46): Any amino acid
  MOD_RES (55)..(57): Any amino acid
  MOD_RES (59)..(65): Any amino acid
  MOD_RES (67)..(68): Any amino acid
  MOD_RES (70)..(74): Any amino acid
  MOD_RES (83)..(85): Any amino acid
  MOD_RES (87)..(93): Any amino acid
  MOD_RES (95)..(96): Any amino acid
  MOD_RES (98)..(102): Any amino acid
  MOD_RES (111)..(113): Any amino acid
  MOD_RES (115)..(121): Any amino acid
  MOD_RES (123)..(124): Any amino acid
  MOD_RES (126)..(130): Any amino acid
  MOD_RES (139)..(141): Any amino acid
  MOD_RES (143)..(149): Any amino acid
  MOD_RES (151)..(152): Any amino acid
  MOD_RES (154)..(158): Any amino acid
  MOD_RES (167)..(169): Any amino acid
  MOD_RES (171)..(177): Any amino acid
  MOD_RES (179)..(180): Any amino acid
  MOD_RES (182)..(186): Any amino acid
  MOD_RES (195)..(197): Any amino acid
  MOD_RES (199)..(209): Any amino acid
XXXXXXXXXCXXCXXXXXRSDKLVRHXXXHXXXXXXXCXXCXXXXXTSGHLVRHXXXHXXXXXXXCXXCXXXXXRSDHLTNHXXXHXXXXXXXCXXCXXXXXRSDHLTTHXXXHXXXXXXXCXXCXXXXXTSGELVRHXXXHXXXXXXXCXXCXXXXXRRDELNVHXXXHXXXXXXXCXXCXXXXXSPADLTRHXXXHXXXXXXXXXXX

SEQ ID NO: 2101 - protein, 209 aa, Artificial Sequence
  source: /note="Description of Artificial Sequence: Synthetic polypeptide"
  MOD_RES (1)..(9): Any amino acid
  MOD_RES (11)..(12): Any amino acid
  MOD_RES (14)..(18): Any amino acid
  MOD_RES (27)..(29): Any amino acid
  MOD_RES (31)..(37): Any amino acid
  MOD_RES (39)..(40): Any amino acid
  MOD_RES (42)..(46): Any amino acid
  MOD_RES (55)..(57): Any amino acid
  MOD_RES (59)..(65): Any amino acid
  MOD_RES (67)..(68): Any amino acid
  MOD_RES (70)..(74): Any amino acid
  MOD_RES (83)..(85): Any amino acid
  MOD_RES (87)..(93): Any amino acid
  MOD_RES (95)..(96): Any amino acid
  MOD_RES (98)..(102): Any amino acid
  MOD_RES (111)..(113): Any amino acid
  MOD_RES (115)..(121): Any amino acid
  MOD_RES (123)..(124): Any amino acid
  MOD_RES (126)..(130): Any amino acid
  MOD_RES (139)..(141): Any amino acid
  MOD_RES (143)..(149): Any amino acid
  MOD_RES (151)..(152): Any amino acid
  MOD_RES (154)..(158): Any amino acid
  MOD_RES (167)..(169): Any amino acid
  MOD_RES (171)..(177): Any amino acid
  MOD_RES (179)..(180): Any amino acid
  MOD_RES (182)..(186): Any amino acid
  MOD_RES (195)..(197): Any amino acid
  MOD_RES (199)..(209): Any amino acid
XXXXXXXXXCXXCXXXXXRRDELNVHXXXHXXXXXXXCXXCXXXXXQSGNLTEHXXXHXXXXXXXCXXCXXXXXTSGHLVRHXXXHXXXXXXXCXXCXXXXXRKDNLKNHXXXHXXXXXXXCXXCXXXXXDPGALVRHXXXHXXXXXXXCXXCXXXXXQAGHLASHXXXHXXXXXXXCXXCXXXXXRSDKLVRHXXXHXXXXXXXXXXX

SEQ ID NO: 2102 - protein, 209 aa, Artificial Sequence
  source: /note="Description of Artificial Sequence: Synthetic polypeptide"
  MOD_RES (1)..(9): Any amino acid
  MOD_RES (11)..(12): Any amino acid
  MOD_RES (14)..(18): Any amino acid
  MOD_RES (27)..(29): Any amino acid
  MOD_RES (31)..(37): Any amino acid
  MOD_RES (39)..(40): Any amino acid
  MOD_RES (42)..(46): Any amino acid
  MOD_RES (55)..(57): Any amino acid
  MOD_RES (59)..(65): Any amino acid
  MOD_RES (67)..(68): Any amino acid
  MOD_RES (70)..(74): Any amino acid
  MOD_RES (83)..(85): Any amino acid
  MOD_RES (87)..(93): Any amino acid
  MOD_RES (95)..(96): Any amino acid
  MOD_RES (98)..(102): Any amino acid
  MOD_RES (111)..(113): Any amino acid
  MOD_RES (115)..(121): Any amino acid
  MOD_RES (123)..(124): Any amino acid
  MOD_RES (126)..(130): Any amino acid
  MOD_RES (139)..(141): Any amino acid
  MOD_RES (143)..(149): Any amino acid
  MOD_RES (151)..(152): Any amino acid
  MOD_RES (154)..(158): Any amino acid
  MOD_RES (167)..(169): Any amino acid
  MOD_RES (171)..(177): Any amino acid
  MOD_RES (179)..(180): Any amino acid
  MOD_RES (182)..(186): Any amino acid
  MOD_RES (195)..(197): Any amino acid
  MOD_RES (199)..(209): Any amino acid
XXXXXXXXXCXXCXXXXXRSDNLVRHXXXHXXXXXXXCXXCXXXXXSRRTCRAHXXXHXXXXXXXCXXCXXXXXDCRDLARHXXXHXXXXXXXCXXCXXXXXHRTTLTNHXXXHXXXXXXXCXXCXXXXXRRDELNVHXXXHXXXXXXXCXXCXXXXXQSGNLTEHXXXHXXXXXXXCXXCXXXXXTSGHLVRHXXXHXXXXXXXXXXX

SEQ ID NO: 2103 - protein, 209 aa, Artificial Sequence
  source: /note="Description of Artificial Sequence: Synthetic polypeptide"
  MOD_RES (1)..(9): Any amino acid
  MOD_RES (11)..(12): Any amino acid
  MOD_RES (14)..(18): Any amino acid
  MOD_RES (27)..(29): Any amino acid
  MOD_RES (31)..(37): Any amino acid
  MOD_RES (39)..(40): Any amino acid
  MOD_RES (42)..(46): Any amino acid
  MOD_RES (55)..(57): Any amino acid
  MOD_RES (59)..(65): Any amino acid
  MOD_RES (67)..(68): Any amino acid
  MOD_RES (70)..(74): Any amino acid
  MOD_RES (83)..(85): Any amino acid
  MOD_RES (87)..(93): Any amino acid
  MOD_RES (95)..(96): Any amino acid
  MOD_RES (98)..(102): Any amino acid
  MOD_RES (111)..(113): Any amino acid
  MOD_RES (115)..(121): Any amino acid
  MOD_RES (123)..(124): Any amino acid
  MOD_RES (126)..(130): Any amino acid
  MOD_RES (139)..(141): Any amino acid
  MOD_RES (143)..(149): Any amino acid
  MOD_RES (151)..(152): Any amino acid
  MOD_RES (154)..(158): Any amino acid
  MOD_RES (167)..(169): Any amino acid
  MOD_RES (171)..(177): Any amino acid
  MOD_RES (179)..(180): Any amino acid
  MOD_RES (182)..(186): Any amino acid
  MOD_RES (195)..(197): Any amino acid
  MOD_RES (199)..(209): Any amino acid
XXXXXXXXXCXXCXXXXXHRTTLTNHXXXHXXXXXXXCXXCXXXXXRRDELNVHXXXHXXXXXXXCXXCXXXXXQSGNLTEHXXXHXXXXXXXCXXCXXXXXTSGHLVRHXXXHXXXXXXXCXXCXXXXXRKDNLKNHXXXHXXXXXXXCXXCXXXXXDPGALVRHXXXHXXXXXXXCXXCXXXXXQAGHLASHXXXHXXXXXXXXXXX

SEQ ID NO: 2104 - protein, 209 aa, Artificial Sequence
  source: /note="Description of Artificial Sequence: Synthetic polypeptide"
  MOD_RES (1)..(9): Any amino acid
  MOD_RES (11)..(12): Any amino acid
  MOD_RES (14)..(18): Any amino acid
  MOD_RES (27)..(29): Any amino acid
  MOD_RES (31)..(37): Any amino acid
  MOD_RES (39)..(40): Any amino acid
  MOD_RES (42)..(46): Any amino acid
  MOD_RES (55)..(57): Any amino acid
  MOD_RES (59)..(65): Any amino acid
  MOD_RES (67)..(68): Any amino acid
  MOD_RES (70)..(74): Any amino acid
  MOD_RES (83)..(85): Any amino acid
  MOD_RES (87)..(93): Any amino acid
  MOD_RES (95)..(96): Any amino acid
  MOD_RES (98)..(102): Any amino acid
  MOD_RES (111)..(113): Any amino acid
  MOD_RES (115)..(121): Any amino acid
  MOD_RES (123)..(124): Any amino acid
  MOD_RES (126)..(130): Any amino acid
  MOD_RES (139)..(141): Any amino acid
  MOD_RES (143)..(149): Any amino acid
  MOD_RES (151)..(152): Any amino acid
  MOD_RES (154)..(158): Any amino acid
  MOD_RES (167)..(169): Any amino acid
  MOD_RES (171)..(177): Any amino acid
  MOD_RES (179)..(180): Any amino acid
  MOD_RES (182)..(186): Any amino acid
  MOD_RES (195)..(197): Any amino acid
  MOD_RES (199)..(209): Any amino acid
XXXXXXXXXCXXCXXXXXDCRDLARHXXXHXXXXXXXCXXCXXXXXHRTTLTNHXXXHXXXXXXXCXXCXXXXXRRDELNVHXXXHXXXXXXXCXXCXXXXXQSGNLTEHXXXHXXXXXXXCXXCXXXXXTSGHLVRHXXXHXXXXXXXCXXCXXXXXRKDNLKNHXXXHXXXXXXXCXXCXXXXXDPGALVRHXXXHXXXXXXXXXXX

SEQ ID NO: 2105 - protein, 209 aa, Artificial Sequence
  source: /note="Description of Artificial Sequence: Synthetic polypeptide"
  MOD_RES (1)..(9): Any amino acid
  MOD_RES (11)..(12): Any amino acid
  MOD_RES (14)..(18): Any amino acid
  MOD_RES (27)..(29): Any amino acid
  MOD_RES (31)..(37): Any amino acid
  MOD_RES (39)..(40): Any amino acid
  MOD_RES (42)..(46): Any amino acid
  MOD_RES (55)..(57): Any amino acid
  MOD_RES (59)..(65): Any amino acid
  MOD_RES (67)..(68): Any amino acid
  MOD_RES (70)..(74): Any amino acid
  MOD_RES (83)..(85): Any amino acid
  MOD_RES (87)..(93): Any amino acid
  MOD_RES (95)..(96): Any amino acid
  MOD_RES (98)..(102): Any amino acid
  MOD_RES (111)..(113): Any amino acid
  MOD_RES (115)..(121): Any amino acid
  MOD_RES (123)..(124): Any amino acid
  MOD_RES (126)..(130): Any amino acid
  MOD_RES (139)..(141): Any amino acid
  MOD_RES (143)..(149): Any amino acid
  MOD_RES (151)..(152): Any amino acid
  MOD_RES (154)..(158): Any amino acid
  MOD_RES (167)..(169): Any amino acid
  MOD_RES (171)..(177): Any amino acid
  MOD_RES (179)..(180): Any amino acid
  MOD_RES (182)..(186): Any amino acid
  MOD_RES (195)..(197): Any amino acid
  MOD_RES (199)..(209): Any amino acid
XXXXXXXXXCXXCXXXXXSRRTCRAHXXXHXXXXXXXCXXCXXXXXDCRDLARHXXXHXXXXXXXCXXCXXXXXHRTTLTNHXXXHXXXXXXXCXXCXXXXXRRDELNVHXXXHXXXXXXXCXXCXXXXXQSGNLTEHXXXHXXXXXXXCXXCXXXXXTSGHLVRHXXXHXXXXXXXCXXCXXXXXRKDNLKNHXXXHXXXXXXXXXXX

SEQ ID NO: 2106 - protein, 209 aa, Artificial Sequence
  source: /note="Description of Artificial Sequence: Synthetic polypeptide"
  MOD_RES (1)..(9): Any amino acid
  MOD_RES (11)..(12): Any amino acid
  MOD_RES (14)..(18): Any amino acid
  MOD_RES (27)..(29): Any amino acid
  MOD_RES (31)..(37): Any amino acid
  MOD_RES (39)..(40): Any amino acid
  MOD_RES (42)..(46): Any amino acid
  MOD_RES (55)..(57): Any amino acid
  MOD_RES (59)..(65): Any amino acid
  MOD_RES (67)..(68): Any amino acid
  MOD_RES (70)..(74): Any amino acid
  MOD_RES (83)..(85): Any amino acid
  MOD_RES (87)..(93): Any amino acid
  MOD_RES (95)..(96): Any amino acid
  MOD_RES (98)..(102): Any amino acid
  MOD_RES (111)..(113): Any amino acid
  MOD_RES (115)..(121): Any amino acid
  MOD_RES (123)..(124): Any amino acid
  MOD_RES (126)..(130): Any amino acid
  MOD_RES (139)..(141): Any amino acid
  MOD_RES (143)..(149): Any amino acid
  MOD_RES (151)..(152): Any amino acid
  MOD_RES (154)..(158): Any amino acid
  MOD_RES (167)..(169): Any amino acid
  MOD_RES (171)..(177): Any amino acid
  MOD_RES (179)..(180): Any amino acid
  MOD_RES (182)..(186): Any amino acid
  MOD_RES (195)..(197): Any amino acid
  MOD_RES (199)..(209): Any amino acid
XXXXXXXXXCXXCXXXXXTSGHLVRHXXXHXXXXXXXCXXCXXXXXRKDNLKNHXXXHXXXXXXXCXXCXXXXXDPGALVRHXXXHXXXXXXXCXXCXXXXXQAGHLASHXXXHXXXXXXXCXXCXXXXXRSDKLVRHXXXHXXXXXXXCXXCXXXXXTSGHLVRHXXXHXXXXXXXCXXCXXXXXRSDHLTNHXXXHXXXXXXXXXXX

SEQ ID NO: 2107 - protein, 209 aa, Artificial Sequence
  source: /note="Description of Artificial Sequence: Synthetic polypeptide"
  MOD_RES (1)..(9): Any amino acid
  MOD_RES (11)..(12): Any amino acid
  MOD_RES (14)..(18): Any amino acid
  MOD_RES (27)..(29): Any amino acid
  MOD_RES (31)..(37): Any amino acid
  MOD_RES (39)..(40): Any amino acid
  MOD_RES (42)..(46): Any amino acid
  MOD_RES (55)..(57): Any amino acid
  MOD_RES (59)..(65): Any amino acid
  MOD_RES (67)..(68): Any amino acid
  MOD_RES (70)..(74): Any amino acid
  MOD_RES (83)..(85): Any amino acid
  MOD_RES (87)..(93): Any amino acid
  MOD_RES (95)..(96): Any amino acid
  MOD_RES (98)..(102): Any amino acid
  MOD_RES (111)..(113): Any amino acid
  MOD_RES (115)..(121): Any amino acid
  MOD_RES (123)..(124): Any amino acid
  MOD_RES (126)..(130): Any amino acid
  MOD_RES (139)..(141): Any amino acid
  MOD_RES (143)..(149): Any amino acid
  MOD_RES (151)..(152): Any amino acid
  MOD_RES (154)..(158): Any amino acid
  MOD_RES (167)..(169): Any amino acid
  MOD_RES (171)..(177): Any amino acid
  MOD_RES (179)..(180): Any amino acid
  MOD_RES (182)..(186): Any amino acid
  MOD_RES (195)..(197): Any amino acid
  MOD_RES (199)..(209): Any amino acid
XXXXXXXXXCXXCXXXXXQSGNLTEHXXXHXXXXXXXCXXCXXXXXTSGHLVRHXXXHXXXXXXXCXXCXXXXXRKDNLKNHXXXHXXXXXXXCXXCXXXXXDPGALVRHXXXHXXXXXXXCXXCXXXXXQAGHLASHXXXHXXXXXXXCXXCXXXXXRSDKLVRHXXXHXXXXXXXCXXCXXXXXTSGHLVRHXXXHXXXXXXXXXXX

SEQ ID NO: 2108 - protein, 209 aa, Artificial Sequence
  source: /note="Description of Artificial Sequence: Synthetic polypeptide"
  MOD_RES (1)..(9): Any amino acid
  MOD_RES (11)..(12): Any amino acid
  MOD_RES (14)..(18): Any amino acid
  MOD_RES (27)..(29): Any amino acid
  MOD_RES (31)..(37): Any amino acid
  MOD_RES (39)..(40): Any amino acid
  MOD_RES (42)..(46): Any amino acid
  MOD_RES (55)..(57): Any amino acid
  MOD_RES (59)..(65): Any amino acid
  MOD_RES (67)..(68): Any amino acid
  MOD_RES (70)..(74): Any amino acid
  MOD_RES (83)..(85): Any amino acid
  MOD_RES (87)..(93): Any amino acid
  MOD_RES (95)..(96): Any amino acid
  MOD_RES (98)..(102): Any amino acid
  MOD_RES (111)..(113): Any amino acid
  MOD_RES (115)..(121): Any amino acid
  MOD_RES (123)..(124): Any amino acid
  MOD_RES (126)..(130): Any amino acid
  MOD_RES (139)..(141): Any amino acid
  MOD_RES (143)..(149): Any amino acid
  MOD_RES (151)..(152): Any amino acid
  MOD_RES (154)..(158): Any amino acid
  MOD_RES (167)..(169): Any amino acid
  MOD_RES (171)..(177): Any amino acid
  MOD_RES (179)..(180): Any amino acid
  MOD_RES (182)..(186): Any amino acid
  MOD_RES (195)..(197): Any amino acid
  MOD_RES (199)..(209): Any amino acid
XXXXXXXXXCXXCXXXXXDPGHLVRHXXXHXXXXXXXCXXCXXXXXTTGNLTVHXXXHXXXXXXXCXXCXXXXXDPGNLVRHXXXHXXXXXXXCXXCXXXXXTSGHLVRHXXXHXXXXXXXCXXCXXXXXRSDHLTTHXXXHXXXXXXXCXXCXXXXXTHLDLIRHXXXHXXXXXXXCXXCXXXXXRNDALTEHXXXHXXXXXXXXXXX

SEQ ID NO: 2109 - protein, 209 aa, Artificial Sequence
  source: /note="Description of Artificial Sequence: Synthetic polypeptide"
  MOD_RES (1)..(9): Any amino acid
  MOD_RES (11)..(12): Any amino acid
  MOD_RES (14)..(18): Any amino acid
  MOD_RES (27)..(29): Any amino acid
  MOD_RES (31)..(37): Any amino acid
  MOD_RES (39)..(40): Any amino acid
  MOD_RES (42)..(46): Any amino acid
  MOD_RES (55)..(57): Any amino acid
  MOD_RES (59)..(65): Any amino acid
  MOD_RES (67)..(68): Any amino acid
  MOD_RES (70)..(74): Any amino acid
  MOD_RES (83)..(85): Any amino acid
  MOD_RES (87)..(93): Any amino acid
  MOD_RES (95)..(96): Any amino acid
  MOD_RES (98)..(102): Any amino acid
  MOD_RES (111)..(113): Any amino acid
  MOD_RES (115)..(121): Any amino acid
  MOD_RES (123)..(124): Any amino acid
  MOD_RES (126)..(130): Any amino acid
  MOD_RES (139)..(141): Any amino acid
  MOD_RES (143)..(149): Any amino acid
  MOD_RES (151)..(152): Any amino acid
  MOD_RES (154)..(158): Any amino acid
  MOD_RES (167)..(169): Any amino acid
  MOD_RES (171)..(177): Any amino acid
  MOD_RES (179)..(180): Any amino acid
  MOD_RES (182)..(186): Any amino acid
  MOD_RES (195)..(197): Any amino acid
  MOD_RES (199)..(209): Any amino acid
XXXXXXXXXCXXCXXXXXRSDKLVRHXXXHXXXXXXXCXXCXXXXXQRAHLERHXXXHXXXXXXXCXXCXXXXXTTGALTEHXXXHXXXXXXXCXXCXXXXXRSDHLTTHXXXHXXXXXXXCXXCXXXXXQSGNLTEHXXXHXXXXXXXCXXCXXXXXQAGHLASHXXXHXXXXXXXCXXCXXXXXRSDKLVRHXXXHXXXXXXXXXXX

SEQ ID NO: 2110 - protein, 209 aa, Artificial Sequence
  source: /note="Description of Artificial Sequence: Synthetic polypeptide"
  MOD_RES (1)..(9): Any amino acid
  MOD_RES (11)..(12): Any amino acid
  MOD_RES (14)..(18): Any amino acid
  MOD_RES (27)..(29): Any amino acid
  MOD_RES (31)..(37): Any amino acid
  MOD_RES (39)..(40): Any amino acid
  MOD_RES (42)..(46): Any amino acid
  MOD_RES (55)..(57): Any amino acid
  MOD_RES (59)..(65): Any amino acid
  MOD_RES (67)..(68): Any amino acid
  MOD_RES (70)..(74): Any amino acid
  MOD_RES (83)..(85): Any amino acid
  MOD_RES (87)..(93): Any amino acid
  MOD_RES (95)..(96): Any amino acid
  MOD_RES (98)..(102): Any amino acid
  MOD_RES (111)..(113): Any amino acid
  MOD_RES (115)..(121): Any amino acid
  MOD_RES (123)..(124): Any amino acid
  MOD_RES (126)..(130): Any amino acid
  MOD_RES (139)..(141): Any amino acid
  MOD_RES (143)..(149): Any amino acid
  MOD_RES (151)..(152): Any amino acid
  MOD_RES (154)..(158): Any amino acid
  MOD_RES (167)..(169): Any amino acid
  MOD_RES (171)..(177): Any amino acid
  MOD_RES (179)..(180): Any amino acid
  MOD_RES (182)..(186): Any amino acid
  MOD_RES (195)..(197): Any amino acid
  MOD_RES (199)..(209): Any amino acid
XXXXXXXXXCXXCXXXXXRSDELVRHXXXHXXXXXXXCXXCXXXXXRSDKLVRHXXXHXXXXXXXCXXCXXXXXQRAHLERHXXXHXXXXXXXCXXCXXXXXTTGALTEHXXXHXXXXXXXCXXCXXXXXRSDHLTTHXXXHXXXXXXXCXXCXXXXXQSGNLTEHXXXHXXXXXXXCXXCXXXXXQAGHLASHXXXHXXXXXXXXXXX

SEQ ID NO: 2111 - protein, 209 aa, Artificial Sequence
  source: /note="Description of Artificial Sequence: Synthetic polypeptide"
  MOD_RES (1)..(9): Any amino acid
  MOD_RES (11)..(12): Any amino acid
  MOD_RES (14)..(18): Any amino acid
  MOD_RES (27)..(29): Any amino acid
  MOD_RES (31)..(37): Any amino acid
  MOD_RES (39)..(40): Any amino acid
  MOD_RES (42)..(46): Any amino acid
  MOD_RES (55)..(57): Any amino acid
  MOD_RES (59)..(65): Any amino acid
  MOD_RES (67)..(68): Any amino acid
  MOD_RES (70)..(74): Any amino acid
  MOD_RES (83)..(85): Any amino acid
  MOD_RES (87)..(93): Any amino acid
  MOD_RES (95)..(96): Any amino acid
  MOD_RES (98)..(102): Any amino acid
  MOD_RES (111)..(113): Any amino acid
  MOD_RES (115)..(121): Any amino acid
  MOD_RES (123)..(124): Any amino acid
  MOD_RES (126)..(130): Any amino acid
  MOD_RES (139)..(141): Any amino acid
  MOD_RES (143)..(149): Any amino acid
  MOD_RES (151)..(152): Any amino acid
  MOD_RES (154)..(158): Any amino acid
  MOD_RES (167)..(169): Any amino acid
  MOD_RES (171)..(177): Any amino acid
  MOD_RES (179)..(180): Any amino acid
  MOD_RES (182)..(186): Any amino acid
  MOD_RES (195)..(197): Any amino acid
  MOD_RES (199)..(209): Any amino acid
XXXXXXXXXCXXCXXXXXRSDNLVRHXXXHXXXXXXXCXXCXXXXXTSGHLVRHXXXHXXXXXXXCXXCXXXXXRSDELVRHXXXHXXXXXXXCXXCXXXXXRSDKLVRHXXXHXXXXXXXCXXCXXXXXQRAHLERHXXXHXXXXXXXCXXCXXXXXTTGALTEHXXXHXXXXXXXCXXCXXXXXRSDHLTTHXXXHXXXXXXXXXXX

SEQ ID NO: 2112 - protein, 209 aa, Artificial Sequence
  source: /note="Description of Artificial Sequence: Synthetic polypeptide"
  MOD_RES (1)..(9): Any amino acid
  MOD_RES (11)..(12): Any amino acid
  MOD_RES (14)..(18): Any amino acid
  MOD_RES (27)..(29): Any amino acid
  MOD_RES (31)..(37): Any amino acid
  MOD_RES (39)..(40): Any amino acid
  MOD_RES (42)..(46): Any amino acid
  MOD_RES (55)..(57): Any amino acid
  MOD_RES (59)..(65): Any amino acid
  MOD_RES (67)..(68): Any amino acid
  MOD_RES (70)..(74): Any amino acid
  MOD_RES (83)..(85): Any amino acid
  MOD_RES (87)..(93): Any amino acid
  MOD_RES (95)..(96): Any amino acid
  MOD_RES (98)..(102): Any amino acid
  MOD_RES (111)..(113): Any amino acid
  MOD_RES (115)..(121): Any amino acid
  MOD_RES (123)..(124): Any amino acid
  MOD_RES (126)..(130): Any amino acid
  MOD_RES (139)..(141): Any amino acid
  MOD_RES (143)..(149): Any amino acid
  MOD_RES (151)..(152): Any amino acid
  MOD_RES (154)..(158): Any amino acid
  MOD_RES (167)..(169): Any amino acid
  MOD_RES (171)..(177): Any amino acid
  MOD_RES (179)..(180): Any amino acid
  MOD_RES (182)..(186): Any amino acid
  MOD_RES (195)..(197): Any amino acid
  MOD_RES (199)..(209): Any amino acid
XXXXXXXXXCXXCXXXXXTSGHLVRHXXXHXXXXXXXCXXCXXXXXRSDELVRHXXXHXXXXXXXCXXCXXXXXRSDKLVRHXXXHXXXXXXXCXXCXXXXXQRAHLERHXXXHXXXXXXXCXXCXXXXXTTGALTEHXXXHXXXXXXXCXXCXXXXXRSDHLTTHXXXHXXXXXXXCXXCXXXXXQSGNLTEHXXXHXXXXXXXXXXX

SEQ ID NO: 2113 - protein, 209 aa, Artificial Sequence
  source: /note="Description of Artificial Sequence: Synthetic polypeptide"
  MOD_RES (1)..(9): Any amino acid
  MOD_RES (11)..(12): Any amino acid
  MOD_RES (14)..(18): Any amino acid
  MOD_RES (27)..(29): Any amino acid
  MOD_RES (31)..(37): Any amino acid
  MOD_RES (39)..(40): Any amino acid
  MOD_RES (42)..(46): Any amino acid
  MOD_RES (55)..(57): Any amino acid
  MOD_RES (59)..(65): Any amino acid
  MOD_RES (67)..(68): Any amino acid
  MOD_RES (70)..(74): Any amino acid
  MOD_RES (83)..(85): Any amino acid
  MOD_RES (87)..(93): Any amino acid
  MOD_RES (95)..(96): Any amino acid
  MOD_RES (98)..(102): Any amino acid
  MOD_RES (111)..(113): Any amino acid
  MOD_RES (115)..(121): Any amino acid
  MOD_RES (123)..(124): Any amino acid
  MOD_RES (126)..(130): Any amino acid
  MOD_RES (139)..(141): Any amino acid
  MOD_RES (143)..(149): Any amino acid
  MOD_RES (151)..(152): Any amino acid
  MOD_RES (154)..(158): Any amino acid
  MOD_RES (167)..(169): Any amino acid
  MOD_RES (171)..(177): Any amino acid
  MOD_RES (179)..(180): Any amino acid
  MOD_RES (182)..(186): Any amino acid
  MOD_RES (195)..(197): Any amino acid
  MOD_RES (199)..(209): Any amino acid
XXXXXXXXXCXXCXXXXXRSDKLVRHXXXHXXXXXXXCXXCXXXXXQSGNLTEHXXXHXXXXXXXCXXCXXXXXHRTTLTNHXXXHXXXXXXXCXXCXXXXXRSDELVRHXXXHXXXXXXXCXXCXXXXXRSDHLTTHXXXHXXXXXXXCXXCXXXXXRSDKLVRHXXXHXXXXXXXCXXCXXXXXRSDNLVRHXXXHXXXXXXXXXXX

SEQ ID NO: 2114 - protein, 209 aa, Artificial Sequence
  source: /note="Description of Artificial Sequence: Synthetic polypeptide"
  MOD_RES (1)..(9): Any amino acid
  MOD_RES (11)..(12): Any amino acid
  MOD_RES (14)..(18): Any amino acid
  MOD_RES (27)..(29): Any amino acid
  MOD_RES (31)..(37): Any amino acid
  MOD_RES (39)..(40): Any amino acid
  MOD_RES (42)..(46): Any amino acid
  MOD_RES (55)..(57): Any amino acid
  MOD_RES (59)..(65): Any amino acid
  MOD_RES (67)..(68): Any amino acid
  MOD_RES (70)..(74): Any amino acid
  MOD_RES (83)..(85): Any amino acid
  MOD_RES (87)..(93): Any amino acid
  MOD_RES (95)..(96): Any amino acid
  MOD_RES (98)..(102): Any amino acid
  MOD_RES (111)..(113): Any amino acid
  MOD_RES (115)..(121): Any amino acid
  MOD_RES (123)..(124): Any amino acid
  MOD_RES (126)..(130): Any amino acid
  MOD_RES (139)..(141): Any amino acid
  MOD_RES (143)..(149): Any amino acid
  MOD_RES (151)..(152): Any amino acid
  MOD_RES (154)..(158): Any amino acid
  MOD_RES (167)..(169): Any amino acid
  MOD_RES (171)..(177): Any amino acid
  MOD_RES (179)..(180): Any amino acid
  MOD_RES (182)..(186): Any amino acid
  MOD_RES (195)..(197): Any amino acid
  MOD_RES (199)..(209): Any amino acid
XXXXXXXXXCXXCXXXXXRSDELVRHXXXHXXXXXXXCXXCXXXXXSKKHLAEHXXXHXXXXXXXCXXCXXXXXRSDELVRHXXXHXXXXXXXCXXCXXXXXQAGHLASHXXXHXXXXXXXCXXCXXXXXQRANLRAHXXXHXXXXXXXCXXCXXXXXDPGALVRHXXXHXXXXXXXCXXCXXXXXRSDHLTNHXXXHXXXXXXXXXXX

SEQ ID NO: 2115 - protein, 209 aa, Artificial Sequence
  source: /note="Description of Artificial Sequence: Synthetic polypeptide"
  MOD_RES (1)..(9): Any amino acid
  MOD_RES (11)..(12): Any amino acid
  MOD_RES (14)..(18): Any amino acid
  MOD_RES (27)..(29): Any amino acid
  MOD_RES (31)..(37): Any amino acid
  MOD_RES (39)..(40): Any amino acid
  MOD_RES (42)..(46): Any amino acid
  MOD_RES (55)..(57): Any amino acid
  MOD_RES (59)..(65): Any amino acid
  MOD_RES (67)..(68): Any amino acid
  MOD_RES (70)..(74): Any amino acid
  MOD_RES (83)..(85): Any amino acid
  MOD_RES (87)..(93): Any amino acid
  MOD_RES (95)..(96): Any amino acid
  MOD_RES (98)..(102): Any amino acid
  MOD_RES (111)..(113): Any amino acid
  MOD_RES (115)..(121): Any amino acid
  MOD_RES (123)..(124): Any amino acid
  MOD_RES (126)..(130): Any amino acid
  MOD_RES (139)..(141): Any amino acid
  MOD_RES (143)..(149): Any amino acid
  MOD_RES (151)..(152): Any amino acid
  MOD_RES (154)..(158): Any amino acid
  MOD_RES (167)..(169): Any amino acid
  MOD_RES (171)..(177): Any amino acid
  MOD_RES (179)..(180): Any amino acid
  MOD_RES (182)..(186): Any amino acid
  MOD_RES (195)..(197): Any amino acid
  MOD_RES (199)..(209): Any amino acid
XXXXXXXXXCXXCXXXXXHRTTLTNHXXXHXXXXXXXCXXCXXXXXRSDELVRHXXXHXXXXXXXCXXCXXXXXSKKHLAEHXXXHXXXXXXXCXXCXXXXXRSDELVRHXXXHXXXXXXXCXXCXXXXXQAGHLASHXXXHXXXXXXXCXXCXXXXXQRANLRAHXXXHXXXXXXXCXXCXXXXXDPGALVRHXXXHXXXXXXXXXXX

SEQ ID NO: 2116 - protein, 209 aa, Artificial Sequence
  source: /note="Description of Artificial Sequence: Synthetic polypeptide"
  MOD_RES (1)..(9): Any amino acid
  MOD_RES (11)..(12): Any amino acid
  MOD_RES (14)..(18): Any amino acid
  MOD_RES (27)..(29): Any amino acid
  MOD_RES (31)..(37): Any amino acid
  MOD_RES (39)..(40): Any amino acid
  MOD_RES (42)..(46): Any amino acid
  MOD_RES (55)..(57): Any amino acid
  MOD_RES (59)..(65): Any amino acid
  MOD_RES (67)..(68): Any amino acid
  MOD_RES (70)..(74): Any amino acid
  MOD_RES (83)..(85): Any amino acid
  MOD_RES (87)..(93): Any amino acid
  MOD_RES (95)..(96): Any amino acid
  MOD_RES (98)..(102): Any amino acid
  MOD_RES (111)..(113): Any amino acid
  MOD_RES (115)..(121): Any amino acid
  MOD_RES (123)..(124): Any amino acid
  MOD_RES (126)..(130): Any amino acid
  MOD_RES (139)..(141): Any amino acid
  MOD_RES (143)..(149): Any amino acid
  MOD_RES (151)..(152): Any amino acid
  MOD_RES (154)..(158): Any amino acid
  MOD_RES (167)..(169): Any amino acid
  MOD_RES (171)..(177): Any amino acid
  MOD_RES (179)..(180): Any amino acid
  MOD_RES (182)..(186): Any amino acid
  MOD_RES (195)..(197): Any amino acid
  MOD_RES (199)..(209): Any amino acid
XXXXXXXXXCXXCXXXXXTSGNLTEHXXXHXXXXXXXCXXCXXXXXHRTTLTNHXXXHXXXXXXXCXXCXXXXXRSDELVRHXXXHXXXXXXXCXXCXXXXXSKKHLAEHXXXHXXXXXXXCXXCXXXXXRSDELVRHXXXHXXXXXXXCXXCXXXXXQAGHLASHXXXHXXXXXXXCXXCXXXXXQRANLRAHXXXHXXXXXXXXXXX

SEQ ID NO: 2117 - protein, 209 aa, Artificial Sequence
  source: /note="Description of Artificial Sequence: Synthetic polypeptide"
  MOD_RES (1)..(9): Any amino acid
  MOD_RES (11)..(12): Any amino acid
  MOD_RES (14)..(18): Any amino acid
  MOD_RES (27)..(29): Any amino acid
  MOD_RES (31)..(37): Any amino acid
  MOD_RES (39)..(40): Any amino acid
  MOD_RES (42)..(46): Any amino acid
  MOD_RES (55)..(57): Any amino acid
  MOD_RES (59)..(65): Any amino acid
  MOD_RES (67)..(68): Any amino acid
  MOD_RES (70)..(74): Any amino acid
  MOD_RES (83)..(85): Any amino acid
  MOD_RES (87)..(93): Any amino acid
  MOD_RES (95)..(96): Any amino acid
  MOD_RES (98)..(102): Any amino acid
  MOD_RES (111)..(113): Any amino acid
  MOD_RES (115)..(121): Any amino acid
  MOD_RES (123)..(124): Any amino acid
  MOD_RES (126)..(130): Any amino acid
  MOD_RES (139)..(141): Any amino acid
  MOD_RES (143)..(149): Any amino acid
  MOD_RES (151)..(152): Any amino acid
  MOD_RES (154)..(158): Any amino acid
  MOD_RES (167)..(169): Any amino acid
  MOD_RES (171)..(177): Any amino acid
  MOD_RES (179)..(180): Any amino acid
  MOD_RES (182)..(186): Any amino acid
  MOD_RES (195)..(197): Any amino acid
  MOD_RES (199)..(209): Any amino acid
XXXXXXXXXCXXCXXXXXTSGNLVRHXXXHXXXXXXXCXXCXXXXXTSGNLTEHXXXHXXXXXXXCXXCXXXXXHRTTLTNHXXXHXXXXXXXCXXCXXXXXRSDELVRHXXXHXXXXXXXCXXCXXXXXSKKHLAEHXXXHXXXXXXXCXXCXXXXXRSDELVRHXXXHXXXXXXXCXXCXXXXXQAGHLASHXXXHXXXXXXXXXXX

SEQ ID NO: 2118 - protein, 209 aa, Artificial Sequence
  source: /note="Description of Artificial Sequence: Synthetic polypeptide"
  MOD_RES (1)..(9): Any amino acid
  MOD_RES (11)..(12): Any amino acid
  MOD_RES (14)..(18): Any amino acid
  MOD_RES (27)..(29): Any amino acid
  MOD_RES (31)..(37): Any amino acid
  MOD_RES (39)..(40): Any amino acid
  MOD_RES (42)..(46): Any amino acid
  MOD_RES (55)..(57): Any amino acid
  MOD_RES (59)..(65): Any amino acid
  MOD_RES (67)..(68): Any amino acid
  MOD_RES (70)..(74): Any amino acid
  MOD_RES (83)..(85): Any amino acid
  MOD_RES (87)..(93): Any amino acid
  MOD_RES (95)..(96): Any amino acid
  MOD_RES (98)..(102): Any amino acid
  MOD_RES (111)..(113): Any amino acid
  MOD_RES (115)..(121): Any amino acid
  MOD_RES (123)..(124): Any amino acid
  MOD_RES (126)..(130): Any amino acid
  MOD_RES (139)..(141): Any amino acid
  MOD_RES (143)..(149): Any amino acid
  MOD_RES (151)..(152): Any amino acid
  MOD_RES (154)..(158): Any amino acid
  MOD_RES (167)..(169): Any amino acid
  MOD_RES (171)..(177): Any amino acid
  MOD_RES (179)..(180): Any amino acid
  MOD_RES (182)..(186): Any amino acid
  MOD_RES (195)..(197): Any amino acid
  MOD_RES (199)..(209): Any amino acid
XXXXXXXXXCXXCXXXXXDCRDLARHXXXHXXXXXXXCXXCXXXXXTSGNLVRHXXXHXXXXXXXCXXCXXXXXTSGNLTEHXXXHXXXXXXXCXXCXXXXXHRTTLTNHXXXHXXXXXXXCXXCXXXXXRSDELVRHXXXHXXXXXXXCXXCXXXXXSKKHLAEHXXXHXXXXXXXCXXCXXXXXRSDELVRHXXXHXXXXXXXXXXX

SEQ ID NO: 2119 - protein, 209 aa, Artificial Sequence
  source: /note="Description of Artificial Sequence: Synthetic polypeptide"
  MOD_RES (1)..(9): Any amino acid
  MOD_RES (11)..(12): Any amino acid
  MOD_RES (14)..(18): Any amino acid
  MOD_RES (27)..(29): Any amino acid
  MOD_RES (31)..(37): Any amino acid
  MOD_RES (39)..(40): Any amino acid
  MOD_RES (42)..(46): Any amino acid
  MOD_RES (55)..(57): Any amino acid
  MOD_RES (59)..(65): Any amino acid
  MOD_RES (67)..(68): Any amino acid
  MOD_RES (70)..(74): Any amino acid
  MOD_RES (83)..(85): Any amino acid
  MOD_RES (87)..(93): Any amino acid
  MOD_RES (95)..(96): Any amino acid
  MOD_RES (98)..(102): Any amino acid
  MOD_RES (111)..(113): Any amino acid
  MOD_RES (115)..(121): Any amino acid
  MOD_RES (123)..(124): Any amino acid
  MOD_RES (126)..(130): Any amino acid
  MOD_RES (139)..(141): Any amino acid
  MOD_RES (143)..(149): Any amino acid
  MOD_RES (151)..(152): Any amino acid
  MOD_RES (154)..(158): Any amino acid
  MOD_RES (167)..(169): Any amino acid
  MOD_RES (171)..(177): Any amino acid
  MOD_RES (179)..(180): Any amino acid
  MOD_RES (182)..(186): Any amino acid
  MOD_RES (195)..(197): Any amino acid
  MOD_RES (199)..(209): Any amino acid
XXXXXXXXXCXXCXXXXXDCRDLARHXXXHXXXXXXXCXXCXXXXXTKNSLTEHXXXHXXXXXXXCXXCXXXXXRRDELNVHXXXHXXXXXXXCXXCXXXXXRRDELNVHXXXHXXXXXXXCXXCXXXXXDPGALVRHXXXHXXXXXXXCXXCXXXXXQAGHLASHXXXHXXXXXXXCXXCXXXXXRNDTLTEHXXXHXXXXXXXXXXX

SEQ ID NO: 2120 - protein, 209 aa, Artificial Sequence
  source: /note="Description of Artificial Sequence: Synthetic polypeptide"
  MOD_RES (1)..(9): Any amino acid
  MOD_RES (11)..(12): Any amino acid
  MOD_RES (14)..(18): Any amino acid
  MOD_RES (27)..(29): Any amino acid
  MOD_RES (31)..(37): Any amino acid
  MOD_RES (39)..(40): Any amino acid
  MOD_RES (42)..(46): Any amino acid
  MOD_RES (55)..(57): Any amino acid
  MOD_RES (59)..(65): Any amino acid
  MOD_RES (67)..(68): Any amino acid
  MOD_RES (70)..(74): Any amino acid
  MOD_RES (83)..(85): Any amino acid
  MOD_RES (87)..(93): Any amino acid
  MOD_RES (95)..(96): Any amino acid
  MOD_RES (98)..(102): Any amino acid
  MOD_RES (111)..(113): Any amino acid
  MOD_RES (115)..(121): Any amino acid
  MOD_RES (123)..(124): Any amino acid
  MOD_RES (126)..(130): Any amino acid
  MOD_RES (139)..(141): Any amino acid
  MOD_RES (143)..(149): Any amino acid
  MOD_RES (151)..(152): Any amino acid
  MOD_RES (154)..(158): Any amino acid
  MOD_RES (167)..(169): Any amino acid
  MOD_RES (171)..(177): Any amino acid
  MOD_RES (179)..(180): Any amino acid
  MOD_RES (182)..(186): Any amino acid
  MOD_RES (195)..(197): Any amino acid
  MOD_RES (199)..(209): Any amino acid
XXXXXXXXXCXXCXXXXXDSGNLRVHXXXHXXXXXXXCXXCXXXXXSPADLTRHXXXHXXXXXXXCXXCXXXXXTSHSLTEHXXXHXXXXXXXCXXCXXXXXQRANLRAHXXXHXXXXXXXCXXCXXXXXRADNLTEHXXXHXXXXXXXCXXCXXXXXERSHLREHXXXHXXXXXXXCXXCXXXXXDPGALVRHXXXHXXXXXXXXXXX

SEQ ID NO: 2121 - protein, 209 aa, Artificial Sequence
  source: /note="Description of Artificial Sequence: Synthetic polypeptide"
  MOD_RES (1)..(9): Any amino acid
  MOD_RES (11)..(12): Any amino acid
  MOD_RES (14)..(18): Any amino acid
  MOD_RES (27)..(29): Any amino acid
  MOD_RES (31)..(37): Any amino acid
  MOD_RES (39)..(40): Any amino acid
  MOD_RES (42)..(46): Any amino acid
  MOD_RES (55)..(57): Any amino acid
  MOD_RES (59)..(65): Any amino acid
  MOD_RES (67)..(68): Any amino acid
  MOD_RES (70)..(74): Any amino acid
  MOD_RES (83)..(85): Any amino acid
  MOD_RES (87)..(93): Any amino acid
  MOD_RES (95)..(96): Any amino acid
  MOD_RES (98)..(102): Any amino acid
  MOD_RES (111)..(113): Any amino acid
  MOD_RES (115)..(121): Any amino acid
  MOD_RES (123)..(124): Any amino acid
  MOD_RES (126)..(130): Any amino acid
  MOD_RES (139)..(141): Any amino acid
  MOD_RES (143)..(149): Any amino acid
  MOD_RES (151)..(152): Any amino acid
  MOD_RES (154)..(158): Any amino acid
  MOD_RES (167)..(169): Any amino acid
  MOD_RES (171)..(177): Any amino acid
  MOD_RES (179)..(180): Any amino acid
  MOD_RES (182)..(186): Any amino acid
  MOD_RES (195)..(197): Any amino acid
  MOD_RES (199)..(209): Any amino acid
XXXXXXXXXCXXCXXXXXERSHLREHXXXHXXXXXXXCXXCXXXXXDSGNLRVHXXXHXXXXXXXCXXCXXXXXSPADLTRHXXXHXXXXXXXCXXCXXXXXTSHSLTEHXXXHXXXXXXXCXXCXXXXXQRANLRAHXXXHXXXXXXXCXXCXXXXXRADNLTEHXXXHXXXXXXXCXXCXXXXXERSHLREHXXXHXXXXXXXXXXX

SEQ ID NO: 2122 - protein, 209 aa, Artificial Sequence
  source: /note="Description of Artificial Sequence: Synthetic polypeptide"
  MOD_RES (1)..(9): Any amino acid
  MOD_RES (11)..(12): Any amino acid
  MOD_RES (14)..(18): Any amino acid
  MOD_RES (27)..(29): Any amino acid
  MOD_RES (31)..(37): Any amino acid
  MOD_RES (39)..(40): Any amino acid
  MOD_RES (42)..(46): Any amino acid
  MOD_RES (55)..(57): Any amino acid
  MOD_RES (59)..(65): Any amino acid
  MOD_RES (67)..(68): Any amino acid
  MOD_RES (70)..(74): Any amino acid
  MOD_RES (83)..(85): Any amino acid
  MOD_RES (87)..(93): Any amino acid
  MOD_RES (95)..(96): Any amino acid
  MOD_RES (98)..(102): Any amino acid
  MOD_RES (111)..(113): Any amino acid
  MOD_RES (115)..(121): Any amino acid
  MOD_RES (123)..(124): Any amino acid
  MOD_RES (126)..(130): Any amino acid
  MOD_RES (139)..(141): Any amino acid
  MOD_RES (143)..(149): Any amino acid
  MOD_RES (151)..(152): Any amino acid
  MOD_RES (154)..(158): Any amino acid
  MOD_RES (167)..(169): Any amino acid
  MOD_RES (171)..(177): Any amino acid
  MOD_RES (179)..(180): Any amino acid
  MOD_RES (182)..(186): Any amino acid
  MOD_RES (195)..(197): Any amino acid
  MOD_RES (199)..(209): Any amino acid
XXXXXXXXXCXXCXXXXXQSGNLTEHXXXHXXXXXXXCXXCXXXXXERSHLREHXXXHXXXXXXXCXXCXXXXXDSGNLRVHXXXHXXXXXXXCXXCXXXXXSPADLTRHXXXHXXXXXXXCXXCXXXXXTSHSLTEHXXXHXXXXXXXCXXCXXXXXQRANLRAHXXXHXXXXXXXCXXCXXXXXRADNLTEHXXXHXXXXXXXXXXX

SEQ ID NO: 2123 - protein, 209 aa, Artificial Sequence
  source: /note="Description of Artificial Sequence: Synthetic polypeptide"
  MOD_RES (1)..(9): Any amino acid
  MOD_RES (11)..(12): Any amino acid
  MOD_RES (14)..(18): Any amino acid
  MOD_RES (27)..(29): Any amino acid
  MOD_RES (31)..(37): Any amino acid
  MOD_RES (39)..(40): Any amino acid
  MOD_RES (42)..(46): Any amino acid
  MOD_RES (55)..(57): Any amino acid
  MOD_RES (59)..(65): Any amino acid
  MOD_RES (67)..(68): Any amino acid
  MOD_RES (70)..(74): Any amino acid
  MOD_RES (83)..(85): Any amino acid
  MOD_RES (87)..(93): Any amino acid
  MOD_RES (95)..(96): Any amino acid
  MOD_RES (98)..(102): Any amino acid
  MOD_RES (111)..(113): Any amino acid
  MOD_RES (115)..(121): Any amino acid
  MOD_RES (123)..(124): Any amino acid
  MOD_RES (126)..(130): Any amino acid
  MOD_RES (139)..(141): Any amino acid
  MOD_RES (143)..(149): Any amino acid
  MOD_RES (151)..(152): Any amino acid
  MOD_RES (154)..(158): Any amino acid
  MOD_RES (167)..(169): Any amino acid
  MOD_RES (171)..(177): Any amino acid
  MOD_RES (179)..(180): Any amino acid
  MOD_RES (182)..(186): Any amino acid
  MOD_RES (195)..(197): Any amino acid
  MOD_RES (199)..(209): Any amino acid
XXXXXXXXXCXXCXXXXXERSHLREHXXXHXXXXXXXCXXCXXXXXHKNALQNHXXXHXXXXXXXCXXCXXXXXQSSSLVRHXXXHXXXXXXXCXXCXXXXXTSGSLVRHXXXHXXXXXXXCXXCXXXXXQSGDLRRHXXXHXXXXXXXCXXCXXXXXTSHSLTEHXXXHXXXXXXXCXXCXXXXXDCRDLARHXXXHXXXXXXXXXXX

SEQ ID NO: 2124 - protein, 209 aa, Artificial Sequence
  source: /note="Description of Artificial Sequence: Synthetic polypeptide"
  MOD_RES (1)..(9): Any amino acid
  MOD_RES (11)..(12): Any amino acid
  MOD_RES (14)..(18): Any amino acid
  MOD_RES (27)..(29): Any amino acid
  MOD_RES (31)..(37): Any amino acid
  MOD_RES (39)..(40): Any amino acid
  MOD_RES (42)..(46): Any amino acid
  MOD_RES (55)..(57): Any amino acid
  MOD_RES (59)..(65): Any amino acid
  MOD_RES (67)..(68): Any amino acid
  MOD_RES (70)..(74): Any amino acid
  MOD_RES (83)..(85): Any amino acid
  MOD_RES (87)..(93): Any amino acid
  MOD_RES (95)..(96): Any amino acid
  MOD_RES (98)..(102): Any amino acid
  MOD_RES (111)..(113): Any amino acid
  MOD_RES (115)..(121): Any amino acid
  MOD_RES (123)..(124): Any amino acid
  MOD_RES (126)..(130): Any amino acid
  MOD_RES (139)..(141): Any amino acid
  MOD_RES (143)..(149): Any amino acid
  MOD_RES (151)..(152): Any amino acid
  MOD_RES (154)..(158): Any amino acid
  MOD_RES (167)..(169): Any amino acid
  MOD_RES (171)..(177): Any amino acid
  MOD_RES (179)..(180): Any amino acid
  MOD_RES (182)..(186): Any amino acid
  MOD_RES (195)..(197): Any amino acid
  MOD_RES (199)..(209): Any amino acid
XXXXXXXXXCXXCXXXXXQSGDLRRHXXXHXXXXXXXCXXCXXXXXTSHSLTEHXXXHXXXXXXXCXXCXXXXXDCRDLARHXXXHXXXXXXXCXXCXXXXXRSDHLTNHXXXHXXXXXXXCXXCXXXXXTSGSLVRHXXXHXXXXXXXCXXCXXXXXQAGHLASHXXXHXXXXXXXCXXCXXXXXRSDKLTEHXXXHXXXXXXXXXXX

SEQ ID NO: 2125 - protein, 209 aa, Artificial Sequence
  source: /note="Description of Artificial Sequence: Synthetic polypeptide"
  MOD_RES (1)..(9): Any amino acid
  MOD_RES (11)..(12): Any amino acid
  MOD_RES (14)..(18): Any amino acid
  MOD_RES (27)..(29): Any amino acid
  MOD_RES (31)..(37): Any amino acid
  MOD_RES (39)..(40): Any amino acid
  MOD_RES (42)..(46): Any amino acid
  MOD_RES (55)..(57): Any amino acid
  MOD_RES (59)..(65): Any amino acid
  MOD_RES (67)..(68): Any amino acid
  MOD_RES (70)..(74): Any amino acid
  MOD_RES (83)..(85): Any amino acid
  MOD_RES (87)..(93): Any amino acid
  MOD_RES (95)..(96): Any amino acid
  MOD_RES (98)..(102): Any amino acid
  MOD_RES (111)..(113): Any amino acid
  MOD_RES (115)..(121): Any amino acid
  MOD_RES (123)..(124): Any amino acid
  MOD_RES (126)..(130): Any amino acid
  MOD_RES (139)..(141): Any amino acid
  MOD_RES (143)..(149): Any amino acid
  MOD_RES (151)..(152): Any amino acid
  MOD_RES (154)..(158): Any amino acid
  MOD_RES (167)..(169): Any amino acid
  MOD_RES (171)..(177): Any amino acid
  MOD_RES (179)..(180): Any amino acid
  MOD_RES (182)..(186): Any amino acid
  MOD_RES (195)..(197): Any amino acid
  MOD_RES (199)..(209): Any amino acid
XXXXXXXXXCXXCXXXXXSPADLTRHXXXHXXXXXXXCXXCXXXXXTSHSLTEHXXXHXXXXXXXCXXCXXXXXQRANLRAHXXXHXXXXXXXCXXCXXXXXRADNLTEHXXXHXXXXXXXCXXCXXXXXERSHLREHXXXHXXXXXXXCXXCXXXXXDPGALVRHXXXHXXXXXXXCXXCXXXXXTSGHLVRHXXXHXXXXXXXXXXX

SEQ ID NO: 2126 - protein, 209 aa, Artificial Sequence
  source: /note="Description of Artificial Sequence: Synthetic polypeptide"
  MOD_RES (1)..(9): Any amino acid
  MOD_RES (11)..(12): Any amino acid
  MOD_RES (14)..(18): Any amino acid
  MOD_RES (27)..(29): Any amino acid
  MOD_RES (31)..(37): Any amino acid
  MOD_RES (39)..(40): Any amino acid
  MOD_RES (42)..(46): Any amino acid
  MOD_RES (55)..(57): Any amino acid
  MOD_RES (59)..(65): Any amino acid
  MOD_RES (67)..(68): Any amino acid
  MOD_RES (70)..(74): Any amino acid
  MOD_RES (83)..(85): Any amino acid
  MOD_RES (87)..(93): Any amino acid
  MOD_RES (95)..(96): Any amino acid
  MOD_RES (98)..(102): Any amino acid
  MOD_RES (111)..(113): Any amino acid
  MOD_RES (115)..(121): Any amino acid
  MOD_RES (123)..(124): Any amino acid
  MOD_RES (126)..(130): Any amino acid
  MOD_RES (139)..(141): Any amino acid
  MOD_RES (143)..(149): Any amino acid
  MOD_RES (151)..(152): Any amino acid
  MOD_RES (154)..(158): Any amino acid
  MOD_RES (167)..(169): Any amino acid
  MOD_RES (171)..(177): Any amino acid
  MOD_RES (179)..(180): Any amino acid
  MOD_RES (182)..(186): Any amino acid
  MOD_RES (195)..(197): Any amino acid
  MOD_RES (199)..(209): Any amino acid
XXXXXXXXXCXXCXXXXXHKNALQNHXXXHXXXXXXXCXXCXXXXXQSSSLVRHXXXHXXXXXXXCXXCXXXXXTSGSLVRHXXXHXXXXXXXCXXCXXXXXQSGDLRRHXXXHXXXXXXXCXXCXXXXXTSHSLTEHXXXHXXXXXXXCXXCXXXXXDCRDLARHXXXHXXXXXXXCXXCXXXXXRSDHLTNHXXXHXXXXXXXXXXX

SEQ ID NO: 2127 - protein, 209 aa, Artificial Sequence
  source: /note="Description of Artificial Sequence: Synthetic polypeptide"
  MOD_RES (1)..(9): Any amino acid
  MOD_RES (11)..(12): Any amino acid
  MOD_RES (14)..(18): Any amino acid
  MOD_RES (27)..(29): Any amino acid
  MOD_RES (31)..(37): Any amino acid
  MOD_RES (39)..(40): Any amino acid
  MOD_RES (42)..(46): Any amino acid
  MOD_RES (55)..(57): Any amino acid
  MOD_RES (59)..(65): Any amino acid
  MOD_RES (67)..(68): Any amino acid
  MOD_RES (70)..(74): Any amino acid
  MOD_RES (83)..(85): Any amino acid
  MOD_RES (87)..(93): Any amino acid
  MOD_RES (95)..(96): Any amino acid
  MOD_RES (98)..(102): Any amino acid
  MOD_RES (111)..(113): Any amino acid
  MOD_RES (115)..(121): Any amino acid
  MOD_RES (123)..(124): Any amino acid
  MOD_RES (126)..(130): Any amino acid
  MOD_RES (139)..(141): Any amino acid
  MOD_RES (143)..(149): Any amino acid
  MOD_RES (151)..(152): Any amino acid
  MOD_RES (154)..(158): Any amino acid
  MOD_RES (167)..(169): Any amino acid
  MOD_RES (171)..(177): Any amino acid
  MOD_RES (179)..(180): Any amino acid
  MOD_RES (182)..(186): Any amino acid
  MOD_RES (195)..(197): Any amino acid
  MOD_RES (199)..(209): Any amino acid
XXXXXXXXXCXXCXXXXXDKKDLTRHXXXHXXXXXXXCXXCXXXXXERSHLREHXXXHXXXXXXXCXXCXXXXXHKNALQNHXXXHXXXXXXXCXXCXXXXXQSSSLVRHXXXHXXXXXXXCXXCXXXXXTSGSLVRHXXXHXXXXXXXCXXCXXXXXQSGDLRRHXXXHXXXXXXXCXXCXXXXXTSHSLTEHXXXHXXXXXXXXXXX

SEQ ID NO: 2128 - protein, 209 aa, Artificial Sequence
  source: /note="Description of Artificial Sequence: Synthetic polypeptide"
  MOD_RES (1)..(9): Any amino acid
  MOD_RES (11)..(12): Any amino acid
  MOD_RES (14)..(18): Any amino acid
  MOD_RES (27)..(29): Any amino acid
  MOD_RES (31)..(37): Any amino acid
  MOD_RES (39)..(40): Any amino acid
  MOD_RES (42)..(46): Any amino acid
  MOD_RES (55)..(57): Any amino acid
  MOD_RES (59)..(65): Any amino acid
  MOD_RES (67)..(68): Any amino acid
  MOD_RES (70)..(74): Any amino acid
  MOD_RES (83)..(85): Any amino acid
  MOD_RES (87)..(93): Any amino acid
  MOD_RES (95)..(96): Any amino acid
  MOD_RES (98)..(102): Any amino acid
  MOD_RES (111)..(113): Any amino acid
  MOD_RES (115)..(121): Any amino acid
  MOD_RES (123)..(124): Any amino acid
  MOD_RES (126)..(130): Any amino acid
  MOD_RES (139)..(141): Any amino acid
  MOD_RES (143)..(149): Any amino acid
  MOD_RES (151)..(152): Any amino acid
  MOD_RES (154)..(158): Any amino acid
  MOD_RES (167)..(169): Any amino acid
  MOD_RES (171)..(177): Any amino acid
  MOD_RES (179)..(180): Any amino acid
  MOD_RES (182)..(186): Any amino acid
  MOD_RES (195)..(197): Any amino acid
  MOD_RES (199)..(209): Any amino acid
XXXXXXXXXCXXCXXXXXTSGSLVRHXXXHXXXXXXXCXXCXXXXXQAGHLASHXXXHXXXXXXXCXXCXXXXXRSDKLTEHXXXHXXXXXXXCXXCXXXXXTSGNLTEHXXXHXXXXXXXCXXCXXXXXQSSNLVRHXXXHXXXXXXXCXXCXXXXXTHLDLIRHXXXHXXXXXXXCXXCXXXXXQKSSLIAHXXXHXXXXXXXXXXX

SEQ ID NO: 2129 - protein, 209 aa, Artificial Sequence
  source: /note="Description of Artificial Sequence: Synthetic polypeptide"
  MOD_RES (1)..(9): Any amino acid
  MOD_RES (11)..(12): Any amino acid
  MOD_RES (14)..(18): Any amino acid
  MOD_RES (27)..(29): Any amino acid
  MOD_RES (31)..(37): Any amino acid
  MOD_RES (39)..(40): Any amino acid
  MOD_RES (42)..(46): Any amino acid
  MOD_RES (55)..(57): Any amino acid
  MOD_RES (59)..(65): Any amino acid
  MOD_RES (67)..(68): Any amino acid
  MOD_RES (70)..(74): Any amino acid
  MOD_RES (83)..(85): Any amino acid
  MOD_RES (87)..(93): Any amino acid
  MOD_RES (95)..(96): Any amino acid
  MOD_RES (98)..(102): Any amino acid
  MOD_RES (111)..(113): Any amino acid
  MOD_RES (115)..(121): Any amino acid
  MOD_RES (123)..(124): Any amino acid
  MOD_RES (126)..(130): Any amino acid
  MOD_RES (139)..(141): Any amino acid
  MOD_RES (143)..(149): Any amino acid
  MOD_RES (151)..(152): Any amino acid
  MOD_RES (154)..(158): Any amino acid
  MOD_RES (167)..(169): Any amino acid
  MOD_RES (171)..(177): Any amino acid
  MOD_RES (179)..(180): Any amino acid
  MOD_RES (182)..(186): Any amino acid
  MOD_RES (195)..(197): Any amino acid
  MOD_RES (199)..(209): Any amino acid
XXXXXXXXXCXXCXXXXXTSHSLTEHXXXHXXXXXXXCXXCXXXXXDCRDLARHXXXHXXXXXXXCXXCXXXXXRSDHLTNHXXXHXXXXXXXCXXCXXXXXTSGSLVRHXXXHXXXXXXXCXXCXXXXXQAGHLASHXXXHXXXXXXXCXXCXXXXXRSDKLTEHXXXHXXXXXXXCXXCXXXXXTSGNLTEHXXXHXXXXXXXXXXX

SEQ ID NO: 2130 - protein, 209 aa, Artificial Sequence
  source: /note="Description of Artificial Sequence: Synthetic polypeptide"
  MOD_RES (1)..(9): Any amino acid
  MOD_RES (11)..(12): Any amino acid
  MOD_RES (14)..(18): Any amino acid
  MOD_RES (27)..(29): Any amino acid
  MOD_RES (31)..(37): Any amino acid
  MOD_RES (39)..(40): Any amino acid
  MOD_RES (42)..(46): Any amino acid
  MOD_RES (55)..(57): Any amino acid
  MOD_RES (59)..(65): Any amino acid
  MOD_RES (67)..(68): Any amino acid
  MOD_RES (70)..(74): Any amino acid
  MOD_RES (83)..(85): Any amino acid
  MOD_RES (87)..(93): Any amino acid
  MOD_RES (95)..(96): Any amino acid
  MOD_RES (98)..(102): Any amino acid
  MOD_RES (111)..(113): Any amino acid
  MOD_RES (115)..(121): Any amino acid
  MOD_RES (123)..(124): Any amino acid
  MOD_RES (126)..(130): Any amino acid
  MOD_RES (139)..(141): Any amino acid
  MOD_RES (143)..(149): Any amino acid
  MOD_RES (151)..(152): Any amino acid
  MOD_RES (154)..(158): Any amino acid
  MOD_RES (167)..(169): Any amino acid
  MOD_RES (171)..(177): Any amino acid
  MOD_RES (179)..(180): Any amino acid
  MOD_RES (182)..(186): Any amino acid
  MOD_RES (195)..(197): Any amino acid
  MOD_RES (199)..(209): Any amino acid
XXXXXXXXXCXXCXXXXXDCRDLARHXXXHXXXXXXXCXXCXXXXXRSDHLTNHXXXHXXXXXXXCXXCXXXXXTSGSLVRHXXXHXXXXXXXCXXCXXXXXQAGHLASHXXXHXXXXXXXCXXCXXXXXRSDKLTEHXXXHXXXXXXXCXXCXXXXXTSGNLTEHXXXHXXXXXXXCXXCXXXXXQSSNLVRHXXXHXXXXXXXXXXX

SEQ ID NO: 2131 - protein, 209 aa, Artificial Sequence
  source: /note="Description of Artificial Sequence: Synthetic polypeptide"
  MOD_RES (1)..(9): Any amino acid
  MOD_RES (11)..(12): Any amino acid
  MOD_RES (14)..(18): Any amino acid
  MOD_RES (27)..(29): Any amino acid
  MOD_RES (31)..(37): Any amino acid
  MOD_RES (39)..(40): Any amino acid
  MOD_RES (42)..(46): Any amino acid
  MOD_RES (55)..(57): Any amino acid
  MOD_RES (59)..(65): Any amino acid
  MOD_RES (67)..(68): Any amino acid
  MOD_RES (70)..(74): Any amino acid
  MOD_RES (83)..(85): Any amino acid
  MOD_RES (87)..(93): Any amino acid
  MOD_RES (95)..(96): Any amino acid
  MOD_RES (98)..(102): Any amino acid
  MOD_RES (111)..(113): Any amino acid
  MOD_RES (115)..(121): Any amino acid
  MOD_RES (123)..(124): Any amino acid
  MOD_RES (126)..(130): Any amino acid
  MOD_RES (139)..(141): Any amino acid
  MOD_RES (143)..(149): Any amino acid
  MOD_RES (151)..(152): Any amino acid
  MOD_RES (154)..(158): Any amino acid
  MOD_RES (167)..(169): Any amino acid
  MOD_RES (171)..(177): Any amino acid
  MOD_RES (179)..(180): Any amino acid
  MOD_RES (182)..(186): Any amino acid
  MOD_RES (195)..(197): Any amino acid
  MOD_RES (199)..(209): Any amino acid
XXXXXXXXXCXXCXXXXXQRANLRAHXXXHXXXXXXXCXXCXXXXXRADNLTEHXXXHXXXXXXXCXXCXXXXXERSHLREHXXXHXXXXXXXCXXCXXXXXDPGALVRHXXXHXXXXXXXCXXCXXXXXTSGHLVRHXXXHXXXXXXXCXXCXXXXXRNDTLTEHXXXHXXXXXXXCXXCXXXXXDKKDLTRHXXXHXXXXXXXXXXX

SEQ ID NO: 2132 - protein, 209 aa, Artificial Sequence
  source: /note="Description of Artificial Sequence: Synthetic polypeptide"
  MOD_RES (1)..(9): Any amino acid
  MOD_RES (11)..(12): Any amino acid
  MOD_RES (14)..(18): Any amino acid
  MOD_RES (27)..(29): Any amino acid
  MOD_RES (31)..(37): Any amino acid
  MOD_RES (39)..(40): Any amino acid
  MOD_RES (42)..(46): Any amino acid
  MOD_RES (55)..(57): Any amino acid
  MOD_RES (59)..(65): Any amino acid
  MOD_RES (67)..(68): Any amino acid
  MOD_RES (70)..(74): Any amino acid
  MOD_RES (83)..(85): Any amino acid
  MOD_RES (87)..(93): Any amino acid
  MOD_RES (95)..(96): Any amino acid
  MOD_RES (98)..(102): Any amino acid
  MOD_RES (111)..(113): Any amino acid
  MOD_RES (115)..(121): Any amino acid
  MOD_RES (123)..(124): Any amino acid
  MOD_RES (126)..(130): Any amino acid
  MOD_RES (139)..(141): Any amino acid
  MOD_RES (143)..(149): Any amino acid
  MOD_RES (151)..(152): Any amino acid
  MOD_RES (154)..(158): Any amino acid
  MOD_RES (167)..(169): Any amino acid
  MOD_RES (171)..(177): Any amino acid
  MOD_RES (179)..(180): Any amino acid
  MOD_RES (182)..(186): Any amino acid
  MOD_RES (195)..(197): Any amino acid
  MOD_RES (199)..(209): Any amino acid
XXXXXXXXXCXXCXXXXXRADNLTEHXXXHXXXXXXXCXXCXXXXXERSHLREHXXXHXXXXXXXCXXCXXXXXDPGALVRHXXXHXXXXXXXCXXCXXXXXTSGHLVRHXXXHXXXXXXXCXXCXXXXXRNDTLTEHXXXHXXXXXXXCXXCXXXXXDKKDLTRHXXXHXXXXXXXCXXCXXXXXERSHLREHXXXHXXXXXXXXXXX

SEQ ID NO: 2133 - protein, 209 aa, Artificial Sequence
  source: /note="Description of Artificial Sequence: Synthetic polypeptide"
  MOD_RES (1)..(9): Any amino acid
  MOD_RES (11)..(12): Any amino acid
  MOD_RES (14)..(18): Any amino acid
  MOD_RES (27)..(29): Any amino acid
  MOD_RES (31)..(37): Any amino acid
  MOD_RES (39)..(40): Any amino acid
  MOD_RES (42)..(46): Any amino acid
  MOD_RES (55)..(57): Any amino acid
  MOD_RES (59)..(65): Any amino acid
  MOD_RES (67)..(68): Any amino acid
  MOD_RES (70)..(74): Any amino acid
  MOD_RES (83)..(85): Any amino acid
  MOD_RES (87)..(93): Any amino acid
  MOD_RES (95)..(96): Any amino acid
  MOD_RES (98)..(102): Any amino acid
  MOD_RES (111)..(113): Any amino acid
  MOD_RES (115)..(121): Any amino acid
  MOD_RES (123)..(124): Any amino acid
  MOD_RES (126)..(130): Any amino acid
  MOD_RES (139)..(141): Any amino acid
  MOD_RES (143)..(149): Any amino acid
  MOD_RES (151)..(152): Any amino acid
  MOD_RES (154)..(158): Any amino acid
  MOD_RES (167)..(169): Any amino acid
  MOD_RES (171)..(177): Any amino acid
  MOD_RES (179)..(180): Any amino acid
  MOD_RES (182)..(186): Any amino acid
  MOD_RES (195)..(197): Any amino acid
  MOD_RES (199)..(209): Any amino acid
XXXXXXXXXCXXCXXXXXRNDTLTEHXXXHXXXXXXXCXXCXXXXXDKKDLTRHXXXHXXXXXXXCXXCXXXXXERSHLREHXXXHXXXXXXXCXXCXXXXXHKNALQNHXXXHXXXXXXXCXXCXXXXXQSSSLVRHXXXHXXXXXXXCXXCXXXXXTSGSLVRHXXXHXXXXXXXCXXCXXXXXQSGDLRRHXXXHXXXXXXXXXXX

SEQ ID NO: 2134 - protein, 209 aa, Artificial Sequence
  source: /note="Description of Artificial Sequence: Synthetic polypeptide"
  MOD_RES (1)..(9): Any amino acid
  MOD_RES (11)..(12): Any amino acid
  MOD_RES (14)..(18): Any amino acid
  MOD_RES (27)..(29): Any amino acid
  MOD_RES (31)..(37): Any amino acid
  MOD_RES (39)..(40): Any amino acid
  MOD_RES (42)..(46): Any amino acid
  MOD_RES (55)..(57): Any amino acid
  MOD_RES (59)..(65): Any amino acid
  MOD_RES (67)..(68): Any amino acid
  MOD_RES (70)..(74): Any amino acid
  MOD_RES (83)..(85): Any amino acid
  MOD_RES (87)..(93): Any amino acid
  MOD_RES (95)..(96): Any amino acid
  MOD_RES (98)..(102): Any amino acid
  MOD_RES (111)..(113): Any amino acid
  MOD_RES (115)..(121): Any amino acid
  MOD_RES (123)..(124): Any amino acid
  MOD_RES (126)..(130): Any amino acid
  MOD_RES (139)..(141): Any amino acid
  MOD_RES (143)..(149): Any amino acid
  MOD_RES (151)..(152): Any amino acid
  MOD_RES (154)..(158): Any amino acid
  MOD_RES (167)..(169): Any amino acid
  MOD_RES (171)..(177): Any amino acid
  MOD_RES (179)..(180): Any amino acid
  MOD_RES (182)..(186): Any amino acid
  MOD_RES (195)..(197): Any amino acid
  MOD_RES (199)..(209): Any amino acid
XXXXXXXXXCXXCXXXXXERSHLREHXXXHXXXXXXXCXXCXXXXXDPGALVRHXXXHXXXXXXXCXXCXXXXXTSGHLVRHXXXHXXXXXXXCXXCXXXXXRNDTLTEHXXXHXXXXXXXCXXCXXXXXDKKDLTRHXXXHXXXXXXXCXXCXXXXXERSHLREHXXXHXXXXXXXCXXCXXXXXHKNALQNHXXXHXXXXXXXXXXX

SEQ ID NO: 2135 - protein, 209 aa, Artificial Sequence
  source: /note="Description of Artificial Sequence: Synthetic polypeptide"
  MOD_RES (1)..(9): Any amino acid
  MOD_RES (11)..(12): Any amino acid
  MOD_RES (14)..(18): Any amino acid
  MOD_RES (27)..(29): Any amino acid
  MOD_RES (31)..(37): Any amino acid
  MOD_RES (39)..(40): Any amino acid
  MOD_RES (42)..(46): Any amino acid
  MOD_RES (55)..(57): Any amino acid
  MOD_RES (59)..(65): Any amino acid
  MOD_RES (67)..(68): Any amino acid
  MOD_RES (70)..(74): Any amino acid
  MOD_RES (83)..(85): Any amino acid
  MOD_RES (87)..(93): Any amino acid
  MOD_RES (95)..(96): Any amino acid
  MOD_RES (98)..(102): Any amino acid
  MOD_RES (111)..(113): Any amino acid
  MOD_RES (115)..(121): Any amino acid
  MOD_RES (123)..(124): Any amino acid
  MOD_RES (126)..(130): Any amino acid
  MOD_RES (139)..(141): Any amino acid
  MOD_RES (143)..(149): Any amino acid
  MOD_RES (151)..(152): Any amino acid
  MOD_RES (154)..(158): Any amino acid
  MOD_RES (167)..(169): Any amino acid
  MOD_RES (171)..(177): Any amino acid
  MOD_RES (179)..(180): Any amino acid
  MOD_RES (182)..(186): Any amino acid
  MOD_RES (195)..(197): Any amino acid
  MOD_RES (199)..(209): Any amino acid
XXXXXXXXXCXXCXXXXXDPGALVRHXXXHXXXXXXXCXXCXXXXXTSGHLVRHXXXHXXXXXXXCXXCXXXXXRNDTLTEHXXXHXXXXXXXCXXCXXXXXDKKDLTRHXXXHXXXXXXXCXXCXXXXXERSHLREHXXXHXXXXXXXCXXCXXXXXHKNALQNHXXXHXXXXXXXCXXCXXXXXQSSSLVRHXXXHXXXXXXXXXXX

SEQ ID NO: 2136 - protein, 209 aa, Artificial Sequence
  source: /note="Description of Artificial Sequence: Synthetic polypeptide"
  MOD_RES (1)..(9): Any amino acid
  MOD_RES (11)..(12): Any amino acid
  MOD_RES (14)..(18): Any amino acid
  MOD_RES (27)..(29): Any amino acid
  MOD_RES (31)..(37): Any amino acid
  MOD_RES (39)..(40): Any amino acid
  MOD_RES (42)..(46): Any amino acid
  MOD_RES (55)..(57): Any amino acid
  MOD_RES (59)..(65): Any amino acid
  MOD_RES (67)..(68): Any amino acid
  MOD_RES (70)..(74): Any amino acid
  MOD_RES (83)..(85): Any amino acid
  MOD_RES (87)..(93): Any amino acid
  MOD_RES (95)..(96): Any amino acid
  MOD_RES (98)..(102): Any amino acid
  MOD_RES (111)..(113): Any amino acid
  MOD_RES (115)..(121): Any amino acid
  MOD_RES (123)..(124): Any amino acid
  MOD_RES (126)..(130): Any amino acid
  MOD_RES (139)..(141): Any amino acid
  MOD_RES (143)..(149): Any amino acid
  MOD_RES (151)..(152): Any amino acid
  MOD_RES (154)..(158): Any amino acid
  MOD_RES (167)..(169): Any amino acid
  MOD_RES (171)..(177): Any amino acid
  MOD_RES (179)..(180): Any amino acid
  MOD_RES (182)..(186): Any amino acid
  MOD_RES (195)..(197): Any amino acid
  MOD_RES (199)..(209): Any amino acid
XXXXXXXXXCXXCXXXXXTSGSLVRHXXXHXXXXXXXCXXCXXXXXQSGDLRRHXXXHXXXXXXXCXXCXXXXXTSHSLTEHXXXHXXXXXXXCXXCXXXXXDCRDLARHXXXHXXXXXXXCXXCXXXXXRSDHLTNHXXXHXXXXXXXCXXCXXXXXTSGSLVRHXXXHXXXXXXXCXXCXXXXXQAGHLASHXXXHXXXXXXXXXXX

SEQ ID NO: 2137 - protein, 209 aa, Artificial Sequence
  source: /note="Description of Artificial Sequence: Synthetic polypeptide"
  MOD_RES (1)..(9): Any amino acid
  MOD_RES (11)..(12): Any amino acid
  MOD_RES (14)..(18): Any amino acid
  MOD_RES (27)..(29): Any amino acid
  MOD_RES (31)..(37): Any amino acid
  MOD_RES (39)..(40): Any amino acid
  MOD_RES (42)..(46): Any amino acid
  MOD_RES (55)..(57): Any amino acid
  MOD_RES (59)..(65): Any amino acid
  MOD_RES (67)..(68): Any amino acid
  MOD_RES (70)..(74): Any amino acid
  MOD_RES (83)..(85): Any amino acid
  MOD_RES (87)..(93): Any amino acid
  MOD_RES (95)..(96): Any amino acid
  MOD_RES (98)..(102): Any amino acid
  MOD_RES (111)..(113): Any amino acid
  MOD_RES (115)..(121): Any amino acid
  MOD_RES (123)..(124): Any amino acid
  MOD_RES (126)..(130): Any amino acid
  MOD_RES (139)..(141): Any amino acid
  MOD_RES (143)..(149): Any amino acid
  MOD_RES (151)..(152): Any amino acid
  MOD_RES (154)..(158): Any amino acid
  MOD_RES (167)..(169): Any amino acid
  MOD_RES (171)..(177): Any amino acid
  MOD_RES (179)..(180): Any amino acid
  MOD_RES (182)..(186): Any amino acid
  MOD_RES (195)..(197): Any amino acid
  MOD_RES (199)..(209): Any amino acid
XXXXXXXXXCXXCXXXXXQSSSLVRHXXXHXXXXXXXCXXCXXXXXTSGSLVRHXXXHXXXXXXXCXXCXXXXXQSGDLRRHXXXHXXXXXXXCXXCXXXXXTSHSLTEHXXXHXXXXXXXCXXCXXXXXDCRDLARHXXXHXXXXXXXCXXCXXXXXRSDHLTNHXXXHXXXXXXXCXXCXXXXXTSGSLVRHXXXHXXXXXXXXXXX

SEQ ID NO: 2138 - protein, 209 aa, Artificial Sequence
  source: /note="Description of Artificial Sequence: Synthetic polypeptide"
  MOD_RES (1)..(9): Any amino acid
  MOD_RES (11)..(12): Any amino acid
  MOD_RES (14)..(18): Any amino acid
  MOD_RES (27)..(29): Any amino acid
  MOD_RES (31)..(37): Any amino acid
  MOD_RES (39)..(40): Any amino acid
  MOD_RES (42)..(46): Any amino acid
  MOD_RES (55)..(57): Any amino acid
  MOD_RES (59)..(65): Any amino acid
  MOD_RES (67)..(68): Any amino acid
  MOD_RES (70)..(74): Any amino acid
  MOD_RES (83)..(85): Any amino acid
  MOD_RES (87)..(93): Any amino acid
  MOD_RES (95)..(96): Any amino acid
  MOD_RES (98)..(102): Any amino acid
  MOD_RES (111)..(113): Any amino acid
  MOD_RES (115)..(121): Any amino acid
  MOD_RES (123)..(124): Any amino acid
  MOD_RES (126)..(130): Any amino acid
  MOD_RES (139)..(141): Any amino acid
  MOD_RES (143)..(149): Any amino acid
  MOD_RES (151)..(152): Any amino acid
  MOD_RES (154)..(158): Any amino acid
  MOD_RES (167)..(169): Any amino acid
  MOD_RES (171)..(177): Any amino acid
  MOD_RES (179)..(180): Any amino acid
  MOD_RES (182)..(186): Any amino acid
  MOD_RES (195)..(197): Any amino acid
  MOD_RES (199)..(209): Any amino acid
XXXXXXXXXCXXCXXXXXTSGHLVRHXXXHXXXXXXXCXXCXXXXXRNDTLTEHXXXHXXXXXXXCXXCXXXXXDKKDLTRHXXXHXXXXXXXCXXCXXXXXERSHLREHXXXHXXXXXXXCXXCXXXXXHKNALQNHXXXHXXXXXXXCXXCXXXXXQSSSLVRHXXXHXXXXXXXCXXCXXXXXTSGSLVRHXXXHXXXXXXXXXXX

SEQ ID NO: 2139 - protein, 209 aa, Artificial Sequence
  source: /note="Description of Artificial Sequence: Synthetic polypeptide"
  MOD_RES (1)..(9): Any amino acid
  MOD_RES (11)..(12): Any amino acid
  MOD_RES (14)..(18): Any amino acid
  MOD_RES (27)..(29): Any amino acid
  MOD_RES (31)..(37): Any amino acid
  MOD_RES (39)..(40): Any amino acid
  MOD_RES (42)..(46): Any amino acid
  MOD_RES (55)..(57): Any amino acid
  MOD_RES (59)..(65): Any amino acid
  MOD_RES (67)..(68): Any amino acid
  MOD_RES (70)..(74): Any amino acid
  MOD_RES (83)..(85): Any amino acid
  MOD_RES (87)..(93): Any amino acid
  MOD_RES (95)..(96): Any amino acid
  MOD_RES (98)..(102): Any amino acid
  MOD_RES (111)..(113): Any amino acid
  MOD_RES (115)..(121): Any amino acid
  MOD_RES (123)..(124): Any amino acid
  MOD_RES (126)..(130): Any amino acid
  MOD_RES (139)..(141): Any amino acid
  MOD_RES (143)..(149): Any amino acid
  MOD_RES (151)..(152): Any amino acid
  MOD_RES (154)..(158): Any amino acid
  MOD_RES (167)..(169): Any amino acid
  MOD_RES (171)..(177): Any amino acid
  MOD_RES (179)..(180): Any amino acid
  MOD_RES (182)..(186): Any amino acid
  MOD_RES (195)..(197): Any amino acid
  MOD_RES (199)..(209): Any amino acid
XXXXXXXXXCXXCXXXXXHRTTLTNHXXXHXXXXXXXCXXCXXXXXERSHLREHXXXHXXXXXXXCXXCXXXXXSKKHLAEHXXXHXXXXXXXCXXCXXXXXDPGHLVRHXXXHXXXXXXXCXXCXXXXXREDNLHTHXXXHXXXXXXXCXXCXXXXXHRTTLTNHXXXHXXXXXXXCXXCXXXXXRSDELVRHXXXHXXXXXXXXXXX

SEQ ID NO: 2140 - protein, 209 aa, Artificial Sequence
  source: /note="Description of Artificial Sequence: Synthetic polypeptide"
  MOD_RES (1)..(9): Any amino acid
  MOD_RES (11)..(12): Any amino acid
  MOD_RES (14)..(18): Any amino acid
  MOD_RES (27)..(29): Any amino acid
  MOD_RES (31)..(37): Any amino acid
  MOD_RES (39)..(40): Any amino acid
  MOD_RES (42)..(46): Any amino acid
  MOD_RES (55)..(57): Any amino acid
  MOD_RES (59)..(65): Any amino acid
  MOD_RES (67)..(68): Any amino acid
  MOD_RES (70)..(74): Any amino acid
  MOD_RES (83)..(85): Any amino acid
  MOD_RES (87)..(93): Any amino acid
  MOD_RES (95)..(96): Any amino acid
  MOD_RES (98)..(102): Any amino acid
  MOD_RES (111)..(113): Any amino acid
  MOD_RES (115)..(121): Any amino acid
  MOD_RES (123)..(124): Any amino acid
  MOD_RES (126)..(130): Any amino acid
  MOD_RES (139)..(141): Any amino acid
  MOD_RES (143)..(149): Any amino acid
  MOD_RES (151)..(152): Any amino acid
  MOD_RES (154)..(158): Any amino acid
  MOD_RES (167)..(169): Any amino acid
  MOD_RES (171)..(177): Any amino acid
  MOD_RES (179)..(180): Any amino acid
  MOD_RES (182)..(186): Any amino acid
  MOD_RES (195)..(197): Any amino acid
  MOD_RES (199)..(209): Any amino acid
XXXXXXXXXCXXCXXXXXRADNLTEHXXXHXXXXXXXCXXCXXXXXQRANLRAHXXXHXXXXXXXCXXCXXXXXDSGNLRVHXXXHXXXXXXXCXXCXXXXXDKKDLTRHXXXHXXXXXXXCXXCXXXXXQSSNLVRHXXXHXXXXXXXCXXCXXXXXTSHSLTEHXXXHXXXXXXXCXXCXXXXXRADNLTEHXXXHXXXXXXXXXXX

SEQ ID NO: 2141 - protein, 209 aa, Artificial Sequence
  source: /note="Description of Artificial Sequence: Synthetic polypeptide"
  MOD_RES (1)..(9): Any amino acid
  MOD_RES (11)..(12): Any amino acid
  MOD_RES (14)..(18): Any amino acid
  MOD_RES (27)..(29): Any amino acid
  MOD_RES (31)..(37): Any amino acid
  MOD_RES (39)..(40): Any amino acid
  MOD_RES (42)..(46): Any amino acid
  MOD_RES (55)..(57): Any amino acid
  MOD_RES (59)..(65): Any amino acid
  MOD_RES (67)..(68): Any amino acid
  MOD_RES (70)..(74): Any amino acid
  MOD_RES (83)..(85): Any amino acid
  MOD_RES (87)..(93): Any amino acid
  MOD_RES (95)..(96): Any amino acid
  MOD_RES (98)..(102): Any amino acid
  MOD_RES (111)..(113): Any amino acid
  MOD_RES (115)..(121): Any amino acid
  MOD_RES (123)..(124): Any amino acid
  MOD_RES (126)..(130): Any amino acid
  MOD_RES (139)..(141): Any amino acid
  MOD_RES (143)..(149): Any amino acid
  MOD_RES (151)..(152): Any amino acid
  MOD_RES (154)..(158): Any amino acid
  MOD_RES (167)..(169): Any amino acid
  MOD_RES (171)..(177): Any amino acid
  MOD_RES (179)..(180): Any amino acid
  MOD_RES (182)..(186): Any amino acid
  MOD_RES (195)..(197): Any amino acid
  MOD_RES (199)..(209): Any amino acid
XXXXXXXXXCXXCXXXXXTTGNLTVHXXXHXXXXXXXCXXCXXXXXTSHSLTEHXXXHXXXXXXXCXXCXXXXXRADNLTEHXXXHXXXXXXXCXXCXXXXXQRANLRAHXXXHXXXXXXXCXXCXXXXXDSGNLRVHXXXHXXXXXXXCXXCXXXXXDKKDLTRHXXXHXXXXXXXCXXCXXXXXQSSNLVRHXXXHXXXXXXXXXXX

SEQ ID NO: 2142 - protein, 209 aa, Artificial Sequence
  source: /note="Description of Artificial Sequence: Synthetic polypeptide"
  MOD_RES (1)..(9): Any amino acid
  MOD_RES (11)..(12): Any amino acid
  MOD_RES (14)..(18): Any amino acid
  MOD_RES (27)..(29): Any amino acid
  MOD_RES (31)..(37): Any amino acid
  MOD_RES (39)..(40): Any amino acid
  MOD_RES (42)..(46): Any amino acid
  MOD_RES (55)..(57): Any amino acid
  MOD_RES (59)..(65): Any amino acid
  MOD_RES (67)..(68): Any amino acid
  MOD_RES (70)..(74): Any amino acid
  MOD_RES (83)..(85): Any amino acid
  MOD_RES (87)..(93): Any amino acid
  MOD_RES (95)..(96): Any amino acid
  MOD_RES (98)..(102): Any amino acid
  MOD_RES (111)..(113): Any amino acid
  MOD_RES (115)..(121): Any amino acid
  MOD_RES (123)..(124): Any amino acid
  MOD_RES (126)..(130): Any amino acid
  MOD_RES (139)..(141): Any amino acid
  MOD_RES (143)..(149): Any amino acid
  MOD_RES (151)..(152): Any amino acid
  MOD_RES (154)..(158): Any amino acid
  MOD_RES (167)..(169): Any amino acid
  MOD_RES (171)..(177): Any amino acid
  MOD_RES (179)..(180): Any amino acid
  MOD_RES (182)..(186): Any amino acid
  MOD_RES (195)..(197): Any amino acid
  MOD_RES (199)..(209): Any amino acid
XXXXXXXXXCXXCXXXXXTSHSLTEHXXXHXXXXXXXCXXCXXXXXRADNLTEHXXXHXXXXXXXCXXCXXXXXQRANLRAHXXXHXXXXXXXCXXCXXXXXDSGNLRVHXXXHXXXXXXXCXXCXXXXXDKKDLTRHXXXHXXXXXXXCXXCXXXXXQSSNLVRHXXXHXXXXXXXCXXCXXXXXTSHSLTEHXXXHXXXXXXXXXXX

SEQ ID NO: 2143 - protein, 209 aa, Artificial Sequence
  source: /note="Description of Artificial Sequence: Synthetic polypeptide"
  MOD_RES (1)..(9): Any amino acid
  MOD_RES (11)..(12): Any amino acid
  MOD_RES (14)..(18): Any amino acid
  MOD_RES (27)..(29): Any amino acid
  MOD_RES (31)..(37): Any amino acid
  MOD_RES (39)..(40): Any amino acid
  MOD_RES (42)..(46): Any amino acid
  MOD_RES (55)..(57): Any amino acid
  MOD_RES (59)..(65): Any amino acid
  MOD_RES (67)..(68): Any amino acid
  MOD_RES (70)..(74): Any amino acid
  MOD_RES (83)..(85): Any amino acid
  MOD_RES (87)..(93): Any amino acid
  MOD_RES (95)..(96): Any amino acid
  MOD_RES (98)..(102): Any amino acid
  MOD_RES (111)..(113): Any amino acid
  MOD_RES (115)..(121): Any amino acid
  MOD_RES (123)..(124): Any amino acid
  MOD_RES (126)..(130): Any amino acid
  MOD_RES (139)..(141): Any amino acid
  MOD_RES (143)..(149): Any amino acid
  MOD_RES (151)..(152): Any amino acid
  MOD_RES (154)..(158): Any amino acid
  MOD_RES (167)..(169): Any amino acid
  MOD_RES (171)..(177): Any amino acid
  MOD_RES (179)..(180): Any amino acid
  MOD_RES (182)..(186): Any amino acid
  MOD_RES (195)..(197): Any amino acid
  MOD_RES (199)..(209): Any amino acid
XXXXXXXXXCXXCXXXXXSKKHLAEHXXXHXXXXXXXCXXCXXXXXTTGNLTVHXXXHXXXXXXXCXXCXXXXXTSHSLTEHXXXHXXXXXXXCXXCXXXXXRADNLTEHXXXHXXXXXXXCXXCXXXXXQRANLRAHXXXHXXXXXXXCXXCXXXXXDSGNLRVHXXXHXXXXXXXCXXCXXXXXDKKDLTRHXXXHXXXXXXXXXXX

SEQ ID NO: 2144 - protein, 209 aa, Artificial Sequence
  source: /note="Description of Artificial Sequence: Synthetic polypeptide"
  MOD_RES (1)..(9): Any amino acid
  MOD_RES (11)..(12): Any amino acid
  MOD_RES (14)..(18): Any amino acid
  MOD_RES (27)..(29): Any amino acid
  MOD_RES (31)..(37): Any amino acid
  MOD_RES (39)..(40): Any amino acid
  MOD_RES (42)..(46): Any amino acid
  MOD_RES (55)..(57): Any amino acid
  MOD_RES (59)..(65): Any amino acid
  MOD_RES (67)..(68): Any amino acid
  MOD_RES (70)..(74): Any amino acid
  MOD_RES (83)..(85): Any amino acid
  MOD_RES (87)..(93): Any amino acid
  MOD_RES (95)..(96): Any amino acid
  MOD_RES (98)..(102): Any amino acid
  MOD_RES (111)..(113): Any amino acid
  MOD_RES (115)..(121): Any amino acid
  MOD_RES (123)..(124): Any amino acid
  MOD_RES (126)..(130): Any amino acid
  MOD_RES (139)..(141): Any amino acid
  MOD_RES (143)..(149): Any amino acid
  MOD_RES (151)..(152): Any amino acid
  MOD_RES (154)..(158): Any amino acid
  MOD_RES (167)..(169): Any amino acid
  MOD_RES (171)..(177): Any amino acid
  MOD_RES (179)..(180): Any amino acid
  MOD_RES (182)..(186): Any amino acid
  MOD_RES (195)..(197): Any amino acid
  MOD_RES (199)..(209): Any amino acid
XXXXXXXXXCXXCXXXXXDCRDLARHXXXHXXXXXXXCXXCXXXXXSPADLTRHXXXHXXXXXXXCXXCXXXXXQSGNLTEHXXXHXXXXXXXCXXCXXXXXQSGNLTEHXXXHXXXXXXXCXXCXXXXXDSGNLRVHXXXHXXXXXXXCXXCXXXXXQLAHLRAHXXXHXXXXXXXCXXCXXXXXDCRDLARHXXXHXXXXXXXXXXX

SEQ ID NO: 2145 - protein, 209 aa, Artificial Sequence
  source: /note="Description of Artificial Sequence: Synthetic polypeptide"
  MOD_RES (1)..(9): Any amino acid
  MOD_RES (11)..(12): Any amino acid
  MOD_RES (14)..(18): Any amino acid
  MOD_RES (27)..(29): Any amino acid
  MOD_RES (31)..(37): Any amino acid
  MOD_RES (39)..(40): Any amino acid
  MOD_RES (42)..(46): Any amino acid
  MOD_RES (55)..(57): Any amino acid
  MOD_RES (59)..(65): Any amino acid
  MOD_RES (67)..(68): Any amino acid
  MOD_RES (70)..(74): Any amino acid
  MOD_RES (83)..(85): Any amino acid
  MOD_RES (87)..(93): Any amino acid
  MOD_RES (95)..(96): Any amino acid
  MOD_RES (98)..(102): Any amino acid
  MOD_RES (111)..(113): Any amino acid
  MOD_RES (115)..(121): Any amino acid
  MOD_RES (123)..(124): Any amino acid
  MOD_RES (126)..(130): Any amino acid
  MOD_RES (139)..(141): Any amino acid
  MOD_RES (143)..(149): Any amino acid
  MOD_RES (151)..(152): Any amino acid
  MOD_RES (154)..(158): Any amino acid
  MOD_RES (167)..(169): Any amino acid
  MOD_RES (171)..(177): Any amino acid
  MOD_RES (179)..(180): Any amino acid
  MOD_RES (182)..(186): Any amino acid
  MOD_RES (195)..(197): Any amino acid
  MOD_RES (199)..(209): Any amino acid
XXXXXXXXXCXXCXXXXXQRANLRAHXXXHXXXXXXXCXXCXXXXXDCRDLARHXXXHXXXXXXXCXXCXXXXXSPADLTRHXXXHXXXXXXXCXXCXXXXXQSGNLTEHXXXHXXXXXXXCXXCXXXXXQSGNLTEHXXXHXXXXXXXCXXCXXXXXDSGNLRVHXXXHXXXXXXXCXXCXXXXXQLAHLRAHXXXHXXXXXXXXXXX

SEQ ID NO: 2146 - protein, 209 aa, Artificial Sequence
  source: /note="Description of Artificial Sequence: Synthetic polypeptide"
  MOD_RES (1)..(9): Any amino acid
  MOD_RES (11)..(12): Any amino acid
  MOD_RES (14)..(18): Any amino acid
  MOD_RES (27)..(29): Any amino acid
  MOD_RES (31)..(37): Any amino acid
  MOD_RES (39)..(40): Any amino acid
  MOD_RES (42)..(46): Any amino acid
  MOD_RES (55)..(57): Any amino acid
  MOD_RES (59)..(65): Any amino acid
  MOD_RES (67)..(68): Any amino acid
  MOD_RES (70)..(74): Any amino acid
  MOD_RES (83)..(85): Any amino acid
  MOD_RES (87)..(93): Any amino acid
  MOD_RES (95)..(96): Any amino acid
  MOD_RES (98)..(102): Any amino acid
  MOD_RES (111)..(113): Any amino acid
  MOD_RES (115)..(121): Any amino acid
  MOD_RES (123)..(124): Any amino acid
  MOD_RES (126)..(130): Any amino acid
  MOD_RES (139)..(141): Any amino acid
  MOD_RES (143)..(149): Any amino acid
  MOD_RES (151)..(152): Any amino acid
  MOD_RES (154)..(158): Any amino acid
  MOD_RES (167)..(169): Any amino acid
  MOD_RES (171)..(177): Any amino acid
  MOD_RES (179)..(180): Any amino acid
  MOD_RES (182)..(186): Any amino acid
  MOD_RES (195)..(197): Any amino acid
  MOD_RES (199)..(209): Any amino acid
XXXXXXXXXCXXCXXXXXDSGNLRVHXXXHXXXXXXXCXXCXXXXXHKNALQNHXXXHXXXXXXXCXXCXXXXXRNDTLTEHXXXHXXXXXXXCXXCXXXXXQRAHLERHXXXHXXXXXXXCXXCXXXXXRSDKLVRHXXXHXXXXXXXCXXCXXXXXDPGHLVRHXXXHXXXXXXXCXXCXXXXXDKKDLTRHXXXHXXXXXXXXXXX

SEQ ID NO: 2147 - protein, 209 aa, Artificial Sequence
  source: /note="Description of Artificial Sequence: Synthetic polypeptide"
  MOD_RES (1)..(9): Any amino acid
  MOD_RES (11)..(12): Any amino acid
  MOD_RES (14)..(18): Any amino acid
  MOD_RES (27)..(29): Any amino acid
  MOD_RES (31)..(37): Any amino acid
  MOD_RES (39)..(40): Any amino acid
  MOD_RES (42)..(46): Any amino acid
  MOD_RES (55)..(57): Any amino acid
  MOD_RES (59)..(65): Any amino acid
  MOD_RES (67)..(68): Any amino acid
  MOD_RES (70)..(74): Any amino acid
  MOD_RES (83)..(85): Any amino acid
  MOD_RES (87)..(93): Any amino acid
  MOD_RES (95)..(96): Any amino acid
  MOD_RES (98)..(102): Any amino acid
  MOD_RES (111)..(113): Any amino acid
  MOD_RES (115)..(121): Any amino acid
  MOD_RES (123)..(124): Any amino acid
  MOD_RES (126)..(130): Any amino acid
  MOD_RES (139)..(141): Any amino acid
  MOD_RES (143)..(149): Any amino acid
  MOD_RES (151)..(152): Any amino acid
  MOD_RES (154)..(158): Any amino acid
  MOD_RES (167)..(169): Any amino acid
  MOD_RES (171)..(177): Any amino acid
  MOD_RES (179)..(180): Any amino acid
  MOD_RES (182)..(186): Any amino acid
  MOD_RES (195)..(197): Any amino acid
  MOD_RES (199)..(209): Any amino acid
XXXXXXXXXCXXCXXXXXRADNLTEHXXXHXXXXXXXCXXCXXXXXRSDKLTEHXXXHXXXXXXXCXXCXXXXXSKKHLAEHXXXHXXXXXXXCXXCXXXXXTKNSLTEHXXXHXXXXXXXCXXCXXXXXDKKDLTRHXXXHXXXXXXXCXXCXXXXXSKKHLAEHXXXHXXXXXXXCXXCXXXXXDKKDLTRHXXXHXXXXXXXXXXX

SEQ ID NO: 2148 - protein, 209 aa, Artificial Sequence
  source: /note="Description of Artificial Sequence: Synthetic polypeptide"
  MOD_RES (1)..(9): Any amino acid
  MOD_RES (11)..(12): Any amino acid
  MOD_RES (14)..(18): Any amino acid
  MOD_RES (27)..(29): Any amino acid
  MOD_RES (31)..(37): Any amino acid
  MOD_RES (39)..(40): Any amino acid
  MOD_RES (42)..(46): Any amino acid
  MOD_RES (55)..(57): Any amino acid
  MOD_RES (59)..(65): Any amino acid
  MOD_RES (67)..(68): Any amino acid
  MOD_RES (70)..(74): Any amino acid
  MOD_RES (83)..(85): Any amino acid
  MOD_RES (87)..(93): Any amino acid
  MOD_RES (95)..(96): Any amino acid
  MOD_RES (98)..(102): Any amino acid
  MOD_RES (111)..(113): Any amino acid
  MOD_RES (115)..(121): Any amino acid
  MOD_RES (123)..(124): Any amino acid
  MOD_RES (126)..(130): Any amino acid
  MOD_RES (139)..(141): Any amino acid
  MOD_RES (143)..(149): Any amino acid
  MOD_RES (151)..(152): Any amino acid
  MOD_RES (154)..(158): Any amino acid
  MOD_RES (167)..(169): Any amino acid
  MOD_RES (171)..(177): Any amino acid
  MOD_RES (179)..(180): Any amino acid
  MOD_RES (182)..(186): Any amino acid
  MOD_RES (195)..(197): Any amino acid
  MOD_RES (199)..(209): Any amino acid
XXXXXXXXXCXXCXXXXXTHLDLIRHXXXHXXXXXXXCXXCXXXXXRKDNLKNHXXXHXXXXXXXCXXCXXXXXDCRDLARHXXXHXXXXXXXCXXCXXXXXREDNLHTHXXXHXXXXXXXCXXCXXXXXDPGHLVRHXXXHXXXXXXXCXXCXXXXXQLAHLRAHXXXHXXXXXXXCXXCXXXXXSKKALTEHXXXHXXXXXXXXXXX

SEQ ID NO: 2149 - protein, 209 aa, Artificial Sequence
  source: /note="Description of Artificial Sequence: Synthetic polypeptide"
  MOD_RES (1)..(9): Any amino acid
  MOD_RES (11)..(12): Any amino acid
  MOD_RES (14)..(18): Any amino acid
  MOD_RES (27)..(29): Any amino acid
  MOD_RES (31)..(37): Any amino acid
  MOD_RES (39)..(40): Any amino acid
  MOD_RES (42)..(46): Any amino acid
  MOD_RES (55)..(57): Any amino acid
  MOD_RES (59)..(65): Any amino acid
  MOD_RES (67)..(68): Any amino acid
  MOD_RES (70)..(74): Any amino acid
  MOD_RES (83)..(85): Any amino acid
  MOD_RES (87)..(93): Any amino acid
  MOD_RES (95)..(96): Any amino acid
  MOD_RES (98)..(102): Any amino acid
  MOD_RES (111)..(113): Any amino acid
  MOD_RES (115)..(121): Any amino acid
  MOD_RES (123)..(124): Any amino acid
  MOD_RES (126)..(130): Any amino acid
  MOD_RES (139)..(141): Any amino acid
  MOD_RES (143)..(149): Any amino acid
  MOD_RES (151)..(152): Any amino acid
  MOD_RES (154)..(158): Any amino acid
  MOD_RES (167)..(169): Any amino acid
  MOD_RES (171)..(177): Any amino acid
  MOD_RES (179)..(180): Any amino acid
  MOD_RES (182)..(186): Any amino acid
  MOD_RES (195)..(197): Any amino acid
  MOD_RES (199)..(209): Any amino acid
XXXXXXXXXCXXCXXXXXRKDNLKNHXXXHXXXXXXXCXXCXXXXXDCRDLARHXXXHXXXXXXXCXXCXXXXXREDNLHTHXXXHXXXXXXXCXXCXXXXXDPGHLVRHXXXHXXXXXXXCXXCXXXXXQLAHLRAHXXXHXXXXXXXCXXCXXXXXSKKALTEHXXXHXXXXXXXCXXCXXXXXTTGALTEHXXXHXXXXXXXXXXX

SEQ ID NO: 2150 - protein, 209 aa, Artificial Sequence
  source: /note="Description of Artificial Sequence: Synthetic polypeptide"
  MOD_RES (1)..(9): Any amino acid
  MOD_RES (11)..(12): Any amino acid
  MOD_RES (14)..(18): Any amino acid
  MOD_RES (27)..(29): Any amino acid
  MOD_RES (31)..(37): Any amino acid
  MOD_RES (39)..(40): Any amino acid
  MOD_RES (42)..(46): Any amino acid
  MOD_RES (55)..(57): Any amino acid
  MOD_RES (59)..(65): Any amino acid
  MOD_RES (67)..(68): Any amino acid
  MOD_RES (70)..(74): Any amino acid
  MOD_RES (83)..(85): Any amino acid
  MOD_RES (87)..(93): Any amino acid
  MOD_RES (95)..(96): Any amino acid
  MOD_RES (98)..(102): Any amino acid
  MOD_RES (111)..(113): Any amino acid
  MOD_RES (115)..(121): Any amino acid
  MOD_RES (123)..(124): Any amino acid
  MOD_RES (126)..(130): Any amino acid
  MOD_RES (139)..(141): Any amino acid
  MOD_RES (143)..(149): Any amino acid
  MOD_RES (151)..(152): Any amino acid
  MOD_RES (154)..(158): Any amino acid
  MOD_RES (167)..(169): Any amino acid
  MOD_RES (171)..(177): Any amino acid
  MOD_RES (179)..(180): Any amino acid
  MOD_RES (182)..(186): Any amino acid
  MOD_RES (195)..(197): Any amino acid
  MOD_RES (199)..(209): Any amino acid
XXXXXXXXXCXXCXXXXXQLAHLRAHXXXHXXXXXXXCXXCXXXXXERSHLREHXXXHXXXXXXXCXXCXXXXXSKKHLAEHXXXHXXXXXXXCXXCXXXXXTHLDLIRHXXXHXXXXXXXCXXCXXXXXRKDNLKNHXXXHXXXXXXXCXXCXXXXXDCRDLARHXXXHXXXXXXXCXXCXXXXXREDNLHTHXXXHXXXXXXXXXXX

SEQ ID NO: 2151 - protein, 209 aa, Artificial Sequence
  source: /note="Description of Artificial Sequence: Synthetic polypeptide"
  MOD_RES (1)..(9): Any amino acid
  MOD_RES (11)..(12): Any amino acid
  MOD_RES (14)..(18): Any amino acid
  MOD_RES (27)..(29): Any amino acid
  MOD_RES (31)..(37): Any amino acid
  MOD_RES (39)..(40): Any amino acid
  MOD_RES (42)..(46): Any amino acid
  MOD_RES (55)..(57): Any amino acid
  MOD_RES (59)..(65): Any amino acid
  MOD_RES (67)..(68): Any amino acid
  MOD_RES (70)..(74): Any amino acid
  MOD_RES (83)..(85): Any amino acid
  MOD_RES (87)..(93): Any amino acid
  MOD_RES (95)..(96): Any amino acid
  MOD_RES (98)..(102): Any amino acid
  MOD_RES (111)..(113): Any amino acid
  MOD_RES (115)..(121): Any amino acid
  MOD_RES (123)..(124): Any amino acid
  MOD_RES (126)..(130): Any amino acid
  MOD_RES (139)..(141): Any amino acid
  MOD_RES (143)..(149): Any amino acid
  MOD_RES (151)..(152): Any amino acid
  MOD_RES (154)..(158): Any amino acid
  MOD_RES (167)..(169): Any amino acid
  MOD_RES (171)..(177): Any amino acid
  MOD_RES (179)..(180): Any amino acid
  MOD_RES (182)..(186): Any amino acid
  MOD_RES (195)..(197): Any amino acid
  MOD_RES (199)..(209): Any amino acid
XXXXXXXXXCXXCXXXXXERSHLREHXXXHXXXXXXXCXXCXXXXXSKKHLAEHXXXHXXXXXXXCXXCXXXXXTHLDLIRHXXXHXXXXXXXCXXCXXXXXRKDNLKNHXXXHXXXXXXXCXXCXXXXXDCRDLARHXXXHXXXXXXXCXXCXXXXXREDNLHTHXXXHXXXXXXXCXXCXXXXXDPGHLVRHXXXHXXXXXXXXXXX

SEQ ID NO: 2152 - protein, 209 aa, Artificial Sequence
  source: /note="Description of Artificial Sequence: Synthetic polypeptide"
  MOD_RES (1)..(9): Any amino acid
  MOD_RES (11)..(12): Any amino acid
  MOD_RES (14)..(18): Any amino acid
  MOD_RES (27)..(29): Any amino acid
  MOD_RES (31)..(37): Any amino acid
  MOD_RES (39)..(40): Any amino acid
  MOD_RES (42)..(46): Any amino acid
  MOD_RES (55)..(57): Any amino acid
  MOD_RES (59)..(65): Any amino acid
  MOD_RES (67)..(68): Any amino acid
  MOD_RES (70)..(74): Any amino acid
  MOD_RES (83)..(85): Any amino acid
  MOD_RES (87)..(93): Any amino acid
  MOD_RES (95)..(96): Any amino acid
  MOD_RES (98)..(102): Any amino acid
  MOD_RES (111)..(113): Any amino acid
  MOD_RES (115)..(121): Any amino acid
  MOD_RES (123)..(124): Any amino acid
  MOD_RES (126)..(130): Any amino acid
  MOD_RES (139)..(141): Any amino acid
  MOD_RES (143)..(149): Any amino acid
  MOD_RES (151)..(152): Any amino acid
  MOD_RES (154)..(158): Any amino acid
  MOD_RES (167)..(169): Any amino acid
  MOD_RES (171)..(177): Any amino acid
  MOD_RES (179)..(180): Any amino acid
  MOD_RES (182)..(186): Any amino acid
  MOD_RES (195)..(197): Any amino acid
  MOD_RES (199)..(209): Any amino acid
XXXXXXXXXCXXCXXXXXDCRDLARHXXXHXXXXXXXCXXCXXXXXREDNLHTHXXXHXXXXXXXCXXCXXXXXDPGHLVRHXXXHXXXXXXXCXXCXXXXXQLAHLRAHXXXHXXXXXXXCXXCXXXXXSKKALTEHXXXHXXXXXXXCXXCXXXXXTTGALTEHXXXHXXXXXXXCXXCXXXXXSKKHLAEHXXXHXXXXXXXXXXX

SEQ ID NO: 2153 - protein, 209 aa, Artificial Sequence
  source: /note="Description of Artificial Sequence: Synthetic polypeptide"
  MOD_RES (1)..(9): Any amino acid
  MOD_RES (11)..(12): Any amino acid
  MOD_RES (14)..(18): Any amino acid
  MOD_RES (27)..(29): Any amino acid
  MOD_RES (31)..(37): Any amino acid
  MOD_RES (39)..(40): Any amino acid
  MOD_RES (42)..(46): Any amino acid
  MOD_RES (55)..(57): Any amino acid
  MOD_RES (59)..(65): Any amino acid
  MOD_RES (67)..(68): Any amino acid
  MOD_RES (70)..(74): Any amino acid
  MOD_RES (83)..(85): Any amino acid
  MOD_RES (87)..(93): Any amino acid
  MOD_RES (95)..(96): Any amino acid
  MOD_RES (98)..(102): Any amino acid
  MOD_RES (111)..(113): Any amino acid
  MOD_RES (115)..(121): Any amino acid
  MOD_RES (123)..(124): Any amino acid
  MOD_RES (126)..(130): Any amino acid
  MOD_RES (139)..(141): Any amino acid
  MOD_RES (143)..(149): Any amino acid
  MOD_RES (151)..(152): Any amino acid
  MOD_RES (154)..(158): Any amino acid
  MOD_RES (167)..(169): Any amino acid
  MOD_RES (171)..(177): Any amino acid
  MOD_RES (179)..(180): Any amino acid
  MOD_RES (182)..(186): Any amino acid
  MOD_RES (195)..(197): Any amino acid
  MOD_RES (199)..(209): Any amino acid
XXXXXXXXXCXXCXXXXXREDNLHTHXXXHXXXXXXXCXXCXXXXXDPGHLVRHXXXHXXXXXXXCXXCXXXXXQLAHLRAHXXXHXXXXXXXCXXCXXXXXSKKALTEHXXXHXXXXXXXCXXCXXXXXTTGALTEHXXXHXXXXXXXCXXCXXXXXSKKHLAEHXXXHXXXXXXXCXXCXXXXXTSHSLTEHXXXHXXXXXXXXXXX

SEQ ID NO: 2154 - protein, 209 aa, Artificial Sequence
  source: /note="Description of Artificial Sequence: Synthetic polypeptide"
  MOD_RES (1)..(9): Any amino acid
  MOD_RES (11)..(12): Any amino acid
  MOD_RES (14)..(18): Any amino acid
  MOD_RES (27)..(29): Any amino acid
  MOD_RES (31)..(37): Any amino acid
  MOD_RES (39)..(40): Any amino acid
  MOD_RES (42)..(46): Any amino acid
  MOD_RES (55)..(57): Any amino acid
  MOD_RES (59)..(65): Any amino acid
  MOD_RES (67)..(68): Any amino acid
  MOD_RES (70)..(74): Any amino acid
  MOD_RES (83)..(85): Any amino acid
  MOD_RES (87)..(93): Any amino acid
  MOD_RES (95)..(96): Any amino acid
  MOD_RES (98)..(102): Any amino acid
  MOD_RES (111)..(113): Any amino acid
  MOD_RES (115)..(121): Any amino acid
  MOD_RES (123)..(124): Any amino acid
  MOD_RES (126)..(130): Any amino acid
  MOD_RES (139)..(141): Any amino acid
  MOD_RES (143)..(149): Any amino acid
  MOD_RES (151)..(152): Any amino acid
  MOD_RES (154)..(158): Any amino acid
  MOD_RES (167)..(169): Any amino acid
  MOD_RES (171)..(177): Any amino acid
  MOD_RES (179)..(180): Any amino acid
  MOD_RES (182)..(186): Any amino acid
  MOD_RES (195)..(197): Any amino acid
  MOD_RES (199)..(209): Any amino acid
XXXXXXXXXCXXCXXXXXDPGHLVRHXXXHXXXXXXXCXXCXXXXXQLAHLRAHXXXHXXXXXXXCXXCXXXXXSKKALTEHXXXHXXXXXXXCXXCXXXXXTTGALTEHXXXHXXXXXXXCXXCXXXXXSKKHLAEHXXXHXXXXXXXCXXCXXXXXTSHSLTEHXXXHXXXXXXXCXXCXXXXXTKNSLTEHXXXHXXXXXXXXXXX

SEQ ID NO: 2155 - protein, 209 aa, Artificial Sequence
  source: /note="Description of Artificial Sequence: Synthetic polypeptide"
  MOD_RES (1)..(9): Any amino acid
  MOD_RES (11)..(12): Any amino acid
  MOD_RES (14)..(18): Any amino acid
  MOD_RES (27)..(29): Any amino acid
  MOD_RES (31)..(37): Any amino acid
  MOD_RES (39)..(40): Any amino acid
  MOD_RES (42)..(46): Any amino acid
  MOD_RES (55)..(57): Any amino acid
  MOD_RES (59)..(65): Any amino acid
  MOD_RES (67)..(68): Any amino acid
  MOD_RES (70)..(74): Any amino acid
  MOD_RES (83)..(85): Any amino acid
  MOD_RES (87)..(93): Any amino acid
  MOD_RES (95)..(96): Any amino acid
  MOD_RES (98)..(102): Any amino acid
  MOD_RES (111)..(113): Any amino acid
  MOD_RES (115)..(121): Any amino acid
  MOD_RES (123)..(124): Any amino acid
  MOD_RES (126)..(130): Any amino acid
  MOD_RES (139)..(141): Any amino acid
  MOD_RES (143)..(149): Any amino acid
  MOD_RES (151)..(152): Any amino acid
  MOD_RES (154)..(158): Any amino acid
  MOD_RES (167)..(169): Any amino acid
  MOD_RES (171)..(177): Any amino acid
  MOD_RES (179)..(180): Any amino acid
  MOD_RES (182)..(186): Any amino acid
  MOD_RES (195)..(197): Any amino acid
  MOD_RES (199)..(209): Any amino acid
XXXXXXXXXCXXCXXXXXSKKALTEHXXXHXXXXXXXCXXCXXXXXTTGALTEHXXXHXXXXXXXCXXCXXXXXSKKHLAEHXXXHXXXXXXXCXXCXXXXXTSHSLTEHXXXHXXXXXXXCXXCXXXXXTKNSLTEHXXXHXXXXXXXCXXCXXXXXRSDNLVRHXXXHXXXXXXXCXXCXXXXXQSGDLRRHXXXHXXXXXXXXXXX

SEQ ID NO: 2156 - protein, 209 aa, Artificial Sequence
  source: /note="Description of Artificial Sequence: Synthetic polypeptide"
  MOD_RES (1)..(9): Any amino acid
  MOD_RES (11)..(12): Any amino acid
  MOD_RES (14)..(18): Any amino acid
  MOD_RES (27)..(29): Any amino acid
  MOD_RES (31)..(37): Any amino acid
  MOD_RES (39)..(40): Any amino acid
  MOD_RES (42)..(46): Any amino acid
  MOD_RES (55)..(57): Any amino acid
  MOD_RES (59)..(65): Any amino acid
  MOD_RES (67)..(68): Any amino acid
  MOD_RES (70)..(74): Any amino acid
  MOD_RES (83)..(85): Any amino acid
  MOD_RES (87)..(93): Any amino acid
  MOD_RES (95)..(96): Any amino acid
  MOD_RES (98)..(102): Any amino acid
  MOD_RES (111)..(113): Any amino acid
  MOD_RES (115)..(121): Any amino acid
  MOD_RES (123)..(124): Any amino acid
  MOD_RES (126)..(130): Any amino acid
  MOD_RES (139)..(141): Any amino acid
  MOD_RES (143)..(149): Any amino acid
  MOD_RES (151)..(152): Any amino acid
  MOD_RES (154)..(158): Any amino acid
  MOD_RES (167)..(169): Any amino acid
  MOD_RES (171)..(177): Any amino acid
  MOD_RES (179)..(180): Any amino acid
  MOD_RES (182)..(186): Any amino acid
  MOD_RES (195)..(197): Any amino acid
  MOD_RES (199)..(209): Any amino acid
XXXXXXXXXCXXCXXXXXQLAHLRAHXXXHXXXXXXXCXXCXXXXXSKKALTEHXXXHXXXXXXXCXXCXXXXXTTGALTEHXXXHXXXXXXXCXXCXXXXXSKKHLAEHXXXHXXXXXXXCXXCXXXXXTSHSLTEHXXXHXXXXXXXCXXCXXXXXTKNSLTEHXXXHXXXXXXXCXXCXXXXXRSDNLVRHXXXHXXXXXXXXXXX

SEQ ID NO: 2157 - protein, 209 aa, Artificial Sequence
  source: /note="Description of Artificial Sequence: Synthetic polypeptide"
  MOD_RES (1)..(9): Any amino acid
  MOD_RES (11)..(12): Any amino acid
  MOD_RES (14)..(18): Any amino acid
  MOD_RES (27)..(29): Any amino acid
  MOD_RES (31)..(37): Any amino acid
  MOD_RES (39)..(40): Any amino acid
  MOD_RES (42)..(46): Any amino acid
  MOD_RES (55)..(57): Any amino acid
  MOD_RES (59)..(65): Any amino acid
  MOD_RES (67)..(68): Any amino acid
  MOD_RES (70)..(74): Any amino acid
  MOD_RES (83)..(85): Any amino acid
  MOD_RES (87)..(93): Any amino acid
  MOD_RES (95)..(96): Any amino acid
  MOD_RES (98)..(102): Any amino acid
  MOD_RES (111)..(113): Any amino acid
  MOD_RES (115)..(121): Any amino acid
  MOD_RES (123)..(124): Any amino acid
  MOD_RES (126)..(130): Any amino acid
  MOD_RES (139)..(141): Any amino acid
  MOD_RES (143)..(149): Any amino acid
  MOD_RES (151)..(152): Any amino acid
  MOD_RES (154)..(158): Any amino acid
  MOD_RES (167)..(169): Any amino acid
  MOD_RES (171)..(177): Any amino acid
  MOD_RES (179)..(180): Any amino acid
  MOD_RES (182)..(186): Any amino acid
  MOD_RES (195)..(197): Any amino acid
  MOD_RES (199)..(209): Any amino acid
XXXXXXXXXCXXCXXXXXTTGALTEHXXXHXXXXXXXCXXCXXXXXSKKHLAEHXXXHXXXXXXXCXXCXXXXXTSHSLTEHXXXHXXXXXXXCXXCXXXXXTKNSLTEHXXXHXXXXXXXCXXCXXXXXRSDNLVRHXXXHXXXXXXXCXXCXXXXXQSGDLRRHXXXHXXXXXXXCXXCXXXXXRNDTLTEHXXXHXXXXXXXXXXX

SEQ ID NO: 2158 - protein, 209 aa, Artificial Sequence
  source: /note="Description of Artificial Sequence: Synthetic polypeptide"
  MOD_RES (1)..(9): Any amino acid
  MOD_RES (11)..(12): Any amino acid
  MOD_RES (14)..(18): Any amino acid
  MOD_RES (27)..(29): Any amino acid
  MOD_RES (31)..(37): Any amino acid
  MOD_RES (39)..(40): Any amino acid
  MOD_RES (42)..(46): Any amino acid
  MOD_RES (55)..(57): Any amino acid
  MOD_RES (59)..(65): Any amino acid
  MOD_RES (67)..(68): Any amino acid
  MOD_RES (70)..(74): Any amino acid
  MOD_RES (83)..(85): Any amino acid
  MOD_RES (87)..(93): Any amino acid
  MOD_RES (95)..(96): Any amino acid
  MOD_RES (98)..(102): Any amino acid
  MOD_RES (111)..(113): Any amino acid
  MOD_RES (115)..(121): Any amino acid
  MOD_RES (123)..(124): Any amino acid
  MOD_RES (126)..(130): Any amino acid
  MOD_RES (139)..(141): Any amino acid
  MOD_RES (143)..(149): Any amino acid
  MOD_RES (151)..(152): Any amino acid
  MOD_RES (154)..(158): Any amino acid
  MOD_RES (167)..(169): Any amino acid
  MOD_RES (171)..(177): Any amino acid
  MOD_RES (179)..(180): Any amino acid
  MOD_RES (182)..(186): Any amino acid
  MOD_RES (195)..(197): Any amino acid
  MOD_RES (199)..(209): Any amino acid
XXXXXXXXXCXXCXXXXXRSDKLTEHXXXHXXXXXXXCXXCXXXXXQRAHLERHXXXHXXXXXXXCXXCXXXXXQLAHLRAHXXXHXXXXXXXCXXCXXXXXSKKHLAEHXXXHXXXXXXXCXXCXXXXXTTGALTEHXXXHXXXXXXXCXXCXXXXXTSGNLVRHXXXHXXXXXXXCXXCXXXXXQSGDLRRHXXXHXXXXXXXXXXX

SEQ ID NO: 2159 - protein, 209 aa, Artificial Sequence
  source: /note="Description of Artificial Sequence: Synthetic polypeptide"
  MOD_RES (1)..(9): Any amino acid
  MOD_RES (11)..(12): Any amino acid
  MOD_RES (14)..(18): Any amino acid
  MOD_RES (27)..(29): Any amino acid
  MOD_RES (31)..(37): Any amino acid
  MOD_RES (39)..(40): Any amino acid
  MOD_RES (42)..(46): Any amino acid
  MOD_RES (55)..(57): Any amino acid
  MOD_RES (59)..(65): Any amino acid
  MOD_RES (67)..(68): Any amino acid
  MOD_RES (70)..(74): Any amino acid
  MOD_RES (83)..(85): Any amino acid
  MOD_RES (87)..(93): Any amino acid
  MOD_RES (95)..(96): Any amino acid
  MOD_RES (98)..(102): Any amino acid
  MOD_RES (111)..(113): Any amino acid
  MOD_RES (115)..(121): Any amino acid
  MOD_RES (123)..(124): Any amino acid
  MOD_RES (126)..(130): Any amino acid
  MOD_RES (139)..(141): Any amino acid
  MOD_RES (143)..(149): Any amino acid
  MOD_RES (151)..(152): Any amino acid
  MOD_RES (154)..(158): Any amino acid
  MOD_RES (167)..(169): Any amino acid
  MOD_RES (171)..(177): Any amino acid
  MOD_RES (179)..(180): Any amino acid
  MOD_RES (182)..(186): Any amino acid
  MOD_RES (195)..(197): Any amino acid
  MOD_RES (199)..(209): Any amino acid
XXXXXXXXXCXXCXXXXXRSDHLTNHXXXHXXXXXXXCXXCXXXXXRSDKLVRHXXXHXXXXXXXCXXCXXXXXTHLDLIRHXXXHXXXXXXXCXXCXXXXXDPGHLVRHXXXHXXXXXXXCXXCXXXXXRSDNLVRHXXXHXXXXXXXCXXCXXXXXQLAHLRAHXXXHXXXXXXXCXXCXXXXXDPGHLVRHXXXHXXXXXXXXXXX

SEQ ID NO: 2160 - protein, 209 aa, Artificial Sequence
  source: /note="Description of Artificial Sequence: Synthetic polypeptide"
  MOD_RES (1)..(9): Any amino acid
  MOD_RES (11)..(12): Any amino acid
  MOD_RES (14)..(18): Any amino acid
  MOD_RES (27)..(29): Any amino acid
  MOD_RES (31)..(37): Any amino acid
  MOD_RES (39)..(40): Any amino acid
  MOD_RES (42)..(46): Any amino acid
  MOD_RES (55)..(57): Any amino acid
  MOD_RES (59)..(65): Any amino acid
  MOD_RES (67)..(68): Any amino acid
  MOD_RES (70)..(74): Any amino acid
  MOD_RES (83)..(85): Any amino acid
  MOD_RES (87)..(93): Any amino acid
  MOD_RES (95)..(96): Any amino acid
  MOD_RES (98)..(102): Any amino acid
  MOD_RES (111)..(113): Any amino acid
  MOD_RES (115)..(121): Any amino acid
  MOD_RES (123)..(124): Any amino acid
  MOD_RES (126)..(130): Any amino acid
  MOD_RES (139)..(141): Any amino acid
  MOD_RES (143)..(149): Any amino acid
  MOD_RES (151)..(152): Any amino acid
  MOD_RES (154)..(158): Any amino acid
  MOD_RES (167)..(169): Any amino acid
  MOD_RES (171)..(177): Any amino acid
  MOD_RES (179)..(180): Any amino acid
  MOD_RES (182)..(186): Any amino acid
  MOD_RES (195)..(197): Any amino acid
  MOD_RES (199)..(209): Any amino acid
XXXXXXXXXCXXCXXXXXRSDKLVRHXXXHXXXXXXXCXXCXXXXXTHLDLIRHXXXHXXXXXXXCXXCXXXXXDPGHLVRHXXXHXXXXXXXCXXCXXXXXRSDNLVRHXXXHXXXXXXXCXXCXXXXXQLAHLRAHXXXHXXXXXXXCXXCXXXXXDPGHLVRHXXXHXXXXXXXCXXCXXXXXQSSNLVRHXXXHXXXXXXXXXXX

SEQ ID NO: 2161 - protein, 209 aa, Artificial Sequence
  source: /note="Description of Artificial Sequence: Synthetic polypeptide"
  MOD_RES (1)..(9): Any amino acid
  MOD_RES (11)..(12): Any amino acid
  MOD_RES (14)..(18): Any amino acid
  MOD_RES (27)..(29): Any amino acid
  MOD_RES (31)..(37): Any amino acid
  MOD_RES (39)..(40): Any amino acid
  MOD_RES (42)..(46): Any amino acid
  MOD_RES (55)..(57): Any amino acid
  MOD_RES (59)..(65): Any amino acid
  MOD_RES (67)..(68): Any amino acid
  MOD_RES (70)..(74): Any amino acid
  MOD_RES (83)..(85): Any amino acid
  MOD_RES (87)..(93): Any amino acid
  MOD_RES (95)..(96): Any amino acid
  MOD_RES (98)..(102): Any amino acid
  MOD_RES (111)..(113): Any amino acid
  MOD_RES (115)..(121): Any amino acid
  MOD_RES (123)..(124): Any amino acid
  MOD_RES (126)..(130): Any amino acid
  MOD_RES (139)..(141): Any amino acid
  MOD_RES (143)..(149): Any amino acid
  MOD_RES (151)..(152): Any amino acid
  MOD_RES (154)..(158): Any amino acid
  MOD_RES (167)..(169): Any amino acid
  MOD_RES (171)..(177): Any amino acid
  MOD_RES (179)..(180): Any amino acid
  MOD_RES (182)..(186): Any amino acid
  MOD_RES (195)..(197): Any amino acid
  MOD_RES (199)..(209): Any amino acid
XXXXXXXXXCXXCXXXXXRADNLTEHXXXHXXXXXXXCXXCXXXXXRSDHLTNHXXXHXXXXXXXCXXCXXXXXRSDHLTNHXXXHXXXXXXXCXXCXXXXXRSDKLVRHXXXHXXXXXXXCXXCXXXXXTHLDLIRHXXXHXXXXXXXCXXCXXXXXDPGHLVRHXXXHXXXXXXXCXXCXXXXXRSDNLVRHXXXHXXXXXXXXXXX

SEQ ID NO: 2162 - protein, 209 aa, Artificial Sequence
  source: /note="Description of Artificial Sequence: Synthetic polypeptide"
  MOD_RES (1)..(9): Any amino acid
  MOD_RES (11)..(12): Any amino acid
  MOD_RES (14)..(18): Any amino acid
  MOD_RES (27)..(29): Any amino acid
  MOD_RES (31)..(37): Any amino acid
  MOD_RES (39)..(40): Any amino acid
  MOD_RES (42)..(46): Any amino acid
  MOD_RES (55)..(57): Any amino acid
  MOD_RES (59)..(65): Any amino acid
  MOD_RES (67)..(68): Any amino acid
  MOD_RES (70)..(74): Any amino acid
  MOD_RES (83)..(85): Any amino acid
  MOD_RES (87)..(93): Any amino acid
  MOD_RES (95)..(96): Any amino acid
  MOD_RES (98)..(102): Any amino acid
  MOD_RES (111)..(113): Any amino acid
  MOD_RES (115)..(121): Any amino acid
  MOD_RES (123)..(124): Any amino acid
  MOD_RES (126)..(130): Any amino acid
  MOD_RES (139)..(141): Any amino acid
  MOD_RES (143)..(149): Any amino acid
  MOD_RES (151)..(152): Any amino acid
  MOD_RES (154)..(158): Any amino acid
  MOD_RES (167)..(169): Any amino acid
  MOD_RES (171)..(177): Any amino acid
  MOD_RES (179)..(180): Any amino acid
  MOD_RES (182)..(186): Any amino acid
  MOD_RES (195)..(197): Any amino acid
  MOD_RES (199)..(209): Any amino acid
XXXXXXXXXCXXCXXXXXRSDHLTNHXXXHXXXXXXXCXXCXXXXXRSDHLTNHXXXHXXXXXXXCXXCXXXXXRSDKLVRHXXXHXXXXXXXCXXCXXXXXTHLDLIRHXXXHXXXXXXXCXXCXXXXXDPGHLVRHXXXHXXXXXXXCXXCXXXXXRSDNLVRHXXXHXXXXXXXCXXCXXXXXQLAHLRAHXXXHXXXXXXXXXXX

SEQ ID NO: 2163 - protein, 209 aa, Artificial Sequence
  source: /note="Description of Artificial Sequence: Synthetic polypeptide"
  MOD_RES (1)..(9): Any amino acid
  MOD_RES (11)..(12): Any amino acid
  MOD_RES (14)..(18): Any amino acid
  MOD_RES (27)..(29): Any amino acid
  MOD_RES (31)..(37): Any amino acid
  MOD_RES (39)..(40): Any amino acid
  MOD_RES (42)..(46): Any amino acid
  MOD_RES (55)..(57): Any amino acid
  MOD_RES (59)..(65): Any amino acid
  MOD_RES (67)..(68): Any amino acid
  MOD_RES (70)..(74): Any amino acid
  MOD_RES (83)..(85): Any amino acid
  MOD_RES (87)..(93): Any amino acid
  MOD_RES (95)..(96): Any amino acid
  MOD_RES (98)..(102): Any amino acid
  MOD_RES (111)..(113): Any amino acid
  MOD_RES (115)..(121): Any amino acid
  MOD_RES (123)..(124): Any amino acid
  MOD_RES (126)..(130): Any amino acid
  MOD_RES (139)..(141): Any amino acid
  MOD_RES (143)..(149): Any amino acid
  MOD_RES (151)..(152): Any amino acid
  MOD_RES (154)..(158): Any amino acid
  MOD_RES (167)..(169): Any amino acid
  MOD_RES (171)..(177): Any amino acid
  MOD_RES (179)..(180): Any amino acid
  MOD_RES (182)..(186): Any amino acid
  MOD_RES (195)..(197): Any amino acid
  MOD_RES (199)..(209): Any amino acid
XXXXXXXXXCXXCXXXXXDPGHLVRHXXXHXXXXXXXCXXCXXXXXRSDNLVRHXXXHXXXXXXXCXXCXXXXXRSDHLTTHXXXHXXXXXXXCXXCXXXXXRADNLTEHXXXHXXXXXXXCXXCXXXXXRSDHLTNHXXXHXXXXXXXCXXCXXXXXRSDHLTNHXXXHXXXXXXXCXXCXXXXXRSDKLVRHXXXHXXXXXXXXXXX

SEQ ID NO: 2164 - protein, 209 aa, Artificial Sequence
  source: /note="Description of Artificial Sequence: Synthetic polypeptide"
  MOD_RES (1)..(9): Any amino acid
  MOD_RES (11)..(12): Any amino acid
  MOD_RES (14)..(18): Any amino acid
  MOD_RES (27)..(29): Any amino acid
  MOD_RES (31)..(37): Any amino acid
  MOD_RES (39)..(40): Any amino acid
  MOD_RES (42)..(46): Any amino acid
  MOD_RES (55)..(57): Any amino acid
  MOD_RES (59)..(65): Any amino acid
  MOD_RES (67)..(68): Any amino acid
  MOD_RES (70)..(74): Any amino acid
  MOD_RES (83)..(85): Any amino acid
  MOD_RES (87)..(93): Any amino acid
  MOD_RES (95)..(96): Any amino acid
  MOD_RES (98)..(102): Any amino acid
  MOD_RES (111)..(113): Any amino acid
  MOD_RES (115)..(121): Any amino acid
  MOD_RES (123)..(124): Any amino acid
  MOD_RES (126)..(130): Any amino acid
  MOD_RES (139)..(141): Any amino acid
  MOD_RES (143)..(149): Any amino acid
  MOD_RES (151)..(152): Any amino acid
  MOD_RES (154)..(158): Any amino acid
  MOD_RES (167)..(169): Any amino acid
  MOD_RES (171)..(177): Any amino acid
  MOD_RES (179)..(180): Any amino acid
  MOD_RES (182)..(186): Any amino acid
  MOD_RES (195)..(197): Any amino acid
  MOD_RES (199)..(209): Any amino acid
XXXXXXXXXCXXCXXXXXRSDHLTTHXXXHXXXXXXXCXXCXXXXXRADNLTEHXXXHXXXXXXXCXXCXXXXXRSDHLTNHXXXHXXXXXXXCXXCXXXXXRSDHLTNHXXXHXXXXXXXCXXCXXXXXRSDKLVRHXXXHXXXXXXXCXXCXXXXXTHLDLIRHXXXHXXXXXXXCXXCXXXXXDPGHLVRHXXXHXXXXXXXXXXX

SEQ ID NO: 2165 - protein, 209 aa, Artificial Sequence
  source: /note="Description of Artificial Sequence: Synthetic polypeptide"
  MOD_RES (1)..(9): Any amino acid
  MOD_RES (11)..(12): Any amino acid
  MOD_RES (14)..(18): Any amino acid
  MOD_RES (27)..(29): Any amino acid
  MOD_RES (31)..(37): Any amino acid
  MOD_RES (39)..(40): Any amino acid
  MOD_RES (42)..(46): Any amino acid
  MOD_RES (55)..(57): Any amino acid
  MOD_RES (59)..(65): Any amino acid
  MOD_RES (67)..(68): Any amino acid
  MOD_RES (70)..(74): Any amino acid
  MOD_RES (83)..(85): Any amino acid
  MOD_RES (87)..(93): Any amino acid
  MOD_RES (95)..(96): Any amino acid
  MOD_RES (98)..(102): Any amino acid
  MOD_RES (111)..(113): Any amino acid
  MOD_RES (115)..(121): Any amino acid
  MOD_RES (123)..(124): Any amino acid
  MOD_RES (126)..(130): Any amino acid
  MOD_RES (139)..(141): Any amino acid
  MOD_RES (143)..(149): Any amino acid
  MOD_RES (151)..(152): Any amino acid
  MOD_RES (154)..(158): Any amino acid
  MOD_RES (167)..(169): Any amino acid
  MOD_RES (171)..(177): Any amino acid
  MOD_RES (179)..(180): Any amino acid
  MOD_RES (182)..(186): Any amino acid
  MOD_RES (195)..(197): Any amino acid
  MOD_RES (199)..(209): Any amino acid
XXXXXXXXXCXXCXXXXXTKNSLTEHXXXHXXXXXXXCXXCXXXXXRSDKLVRHXXXHXXXXXXXCXXCXXXXXRSDKLTEHXXXHXXXXXXXCXXCXXXXXRSDKLVRHXXXHXXXXXXXCXXCXXXXXQRAHLERHXXXHXXXXXXXCXXCXXXXXDPGHLVRHXXXHXXXXXXXCXXCXXXXXRSDNLVRHXXXHXXXXXXXXXXX

SEQ ID NO: 2166 - protein, 209 aa, Artificial Sequence
  source: /note="Description of Artificial Sequence: Synthetic polypeptide"
  MOD_RES (1)..(9): Any amino acid
  MOD_RES (11)..(12): Any amino acid
  MOD_RES (14)..(18): Any amino acid
  MOD_RES (27)..(29): Any amino acid
  MOD_RES (31)..(37): Any amino acid
  MOD_RES (39)..(40): Any amino acid
  MOD_RES (42)..(46): Any amino acid
  MOD_RES (55)..(57): Any amino acid
  MOD_RES (59)..(65): Any amino acid
  MOD_RES (67)..(68): Any amino acid
  MOD_RES (70)..(74): Any amino acid
  MOD_RES (83)..(85): Any amino acid
  MOD_RES (87)..(93): Any amino acid
  MOD_RES (95)..(96): Any amino acid
  MOD_RES (98)..(102): Any amino acid
  MOD_RES (111)..(113): Any amino acid
  MOD_RES (115)..(121): Any amino acid
  MOD_RES (123)..(124): Any amino acid
  MOD_RES (126)..(130): Any amino acid
  MOD_RES (139)..(141): Any amino acid
  MOD_RES (143)..(149): Any amino acid
  MOD_RES (151)..(152): Any amino acid
  MOD_RES (154)..(158): Any amino acid
  MOD_RES (167)..(169): Any amino acid
  MOD_RES (171)..(177): Any amino acid
  MOD_RES (179)..(180): Any amino acid
  MOD_RES (182)..(186): Any amino acid
  MOD_RES (195)..(197): Any amino acid
  MOD_RES (199)..(209): Any amino acid
XXXXXXXXXCXXCXXXXXRSDNLVRHXXXHXXXXXXXCXXCXXXXXRSDHLTTHXXXHXXXXXXXCXXCXXXXXRADNLTEHXXXHXXXXXXXCXXCXXXXXRSDHLTNHXXXHXXXXXXXCXXCXXXXXRSDHLTNHXXXHXXXXXXXCXXCXXXXXRSDKLVRHXXXHXXXXXXXCXXCXXXXXTHLDLIRHXXXHXXXXXXXXXXX

SEQ ID NO: 2167 - protein, 209 aa, Artificial Sequence
  source: /note="Description of Artificial Sequence: Synthetic polypeptide"
  MOD_RES (1)..(9): Any amino acid
  MOD_RES (11)..(12): Any amino acid
  MOD_RES (14)..(18): Any amino acid
  MOD_RES (27)..(29): Any amino acid
  MOD_RES (31)..(37): Any amino acid
  MOD_RES (39)..(40): Any amino acid
  MOD_RES (42)..(46): Any amino acid
  MOD_RES (55)..(57): Any amino acid
  MOD_RES (59)..(65): Any amino acid
  MOD_RES (67)..(68): Any amino acid
  MOD_RES (70)..(74): Any amino acid
  MOD_RES (83)..(85): Any amino acid
  MOD_RES (87)..(93): Any amino acid
  MOD_RES (95)..(96): Any amino acid
  MOD_RES (98)..(102): Any amino acid
  MOD_RES (111)..(113): Any amino acid
  MOD_RES (115)..(121): Any amino acid
  MOD_RES (123)..(124): Any amino acid
  MOD_RES (126)..(130): Any amino acid
  MOD_RES (139)..(141): Any amino acid
  MOD_RES (143)..(149): Any amino acid
  MOD_RES (151)..(152): Any amino acid
  MOD_RES (154)..(158): Any amino acid
  MOD_RES (167)..(169): Any amino acid
  MOD_RES (171)..(177): Any amino acid
  MOD_RES (179)..(180): Any amino acid
  MOD_RES (182)..(186): Any amino acid
  MOD_RES (195)..(197): Any amino acid
  MOD_RES (199)..(209): Any amino acid
XXXXXXXXXCXXCXXXXXDPGHLVRHXXXHXXXXXXXCXXCXXXXXRSDNLVRHXXXHXXXXXXXCXXCXXXXXQLAHLRAHXXXHXXXXXXXCXXCXXXXXDPGHLVRHXXXHXXXXXXXCXXCXXXXXQSSNLVRHXXXHXXXXXXXCXXCXXXXXRKDNLKNHXXXHXXXXXXXCXXCXXXXXQAGHLASHXXXHXXXXXXXXXXX

SEQ ID NO: 2168 - protein, 209 aa, Artificial Sequence
  source: /note="Description of Artificial Sequence: Synthetic polypeptide"
  MOD_RES (1)..(9): Any amino acid
  MOD_RES (11)..(12): Any amino acid
  MOD_RES (14)..(18): Any amino acid
  MOD_RES (27)..(29): Any amino acid
  MOD_RES (31)..(37): Any amino acid
  MOD_RES (39)..(40): Any amino acid
  MOD_RES (42)..(46): Any amino acid
  MOD_RES (55)..(57): Any amino acid
  MOD_RES (59)..(65): Any amino acid
  MOD_RES (67)..(68): Any amino acid
  MOD_RES (70)..(74): Any amino acid
  MOD_RES (83)..(85): Any amino acid
  MOD_RES (87)..(93): Any amino acid
  MOD_RES (95)..(96): Any amino acid
  MOD_RES (98)..(102): Any amino acid
  MOD_RES (111)..(113): Any amino acid
  MOD_RES (115)..(121): Any amino acid
  MOD_RES (123)..(124): Any amino acid
  MOD_RES (126)..(130): Any amino acid
  MOD_RES (139)..(141): Any amino acid
  MOD_RES (143)..(149): Any amino acid
  MOD_RES (151)..(152): Any amino acid
  MOD_RES (154)..(158): Any amino acid
  MOD_RES (167)..(169): Any amino acid
  MOD_RES (171)..(177): Any amino acid
  MOD_RES (179)..(180): Any amino acid
  MOD_RES (182)..(186): Any amino acid
  MOD_RES (195)..(197): Any amino acid
  MOD_RES (199)..(209): Any amino acid
XXXXXXXXXCXXCXXXXXTHLDLIRHXXXHXXXXXXXCXXCXXXXXDPGHLVRHXXXHXXXXXXXCXXCXXXXXRSDNLVRHXXXHXXXXXXXCXXCXXXXXQLAHLRAHXXXHXXXXXXXCXXCXXXXXDPGHLVRHXXXHXXXXXXXCXXCXXXXXQSSNLVRHXXXHXXXXXXXCXXCXXXXXRKDNLKNHXXXHXXXXXXXXXXX

SEQ ID NO: 2169 - protein, 209 aa, Artificial Sequence
  source: /note="Description of Artificial Sequence: Synthetic polypeptide"
  MOD_RES (1)..(9): Any amino acid
  MOD_RES (11)..(12): Any amino acid
  MOD_RES (14)..(18): Any amino acid
  MOD_RES (27)..(29): Any amino acid
  MOD_RES (31)..(37): Any amino acid
  MOD_RES (39)..(40): Any amino acid
  MOD_RES (42)..(46): Any amino acid
  MOD_RES (55)..(57): Any amino acid
  MOD_RES (59)..(65): Any amino acid
  MOD_RES (67)..(68): Any amino acid
  MOD_RES (70)..(74): Any amino acid
  MOD_RES (83)..(85): Any amino acid
  MOD_RES (87)..(93): Any amino acid
  MOD_RES (95)..(96): Any amino acid
  MOD_RES (98)..(102): Any amino acid
  MOD_RES (111)..(113): Any amino acid
  MOD_RES (115)..(121): Any amino acid
  MOD_RES (123)..(124): Any amino acid
  MOD_RES (126)..(130): Any amino acid
  MOD_RES (139)..(141): Any amino acid
  MOD_RES (143)..(149): Any amino acid
  MOD_RES (151)..(152): Any amino acid
  MOD_RES (154)..(158): Any amino acid
  MOD_RES (167)..(169): Any amino acid
  MOD_RES (171)..(177): Any amino acid
  MOD_RES (179)..(180): Any amino acid
  MOD_RES (182)..(186): Any amino acid
  MOD_RES (195)..(197): Any amino acid
  MOD_RES (199)..(209): Any amino acid
XXXXXXXXXCXXCXXXXXRSDKLVRHXXXHXXXXXXXCXXCXXXXXRSDKLTEHXXXHXXXXXXXCXXCXXXXXRSDKLVRHXXXHXXXXXXXCXXCXXXXXQRAHLERHXXXHXXXXXXXCXXCXXXXXDPGHLVRHXXXHXXXXXXXCXXCXXXXXRSDNLVRHXXXHXXXXXXXCXXCXXXXXRSDHLTTHXXXHXXXXXXXXXXX

SEQ ID NO: 2170 - protein, 209 aa, Artificial Sequence
  source: /note="Description of Artificial Sequence: Synthetic polypeptide"
  MOD_RES (1)..(9): Any amino acid
  MOD_RES (11)..(12): Any amino acid
  MOD_RES (14)..(18): Any amino acid
  MOD_RES (27)..(29): Any amino acid
  MOD_RES (31)..(37): Any amino acid
  MOD_RES (39)..(40): Any amino acid
  MOD_RES (42)..(46): Any amino acid
  MOD_RES (55)..(57): Any amino acid
  MOD_RES (59)..(65): Any amino acid
  MOD_RES (67)..(68): Any amino acid
  MOD_RES (70)..(74): Any amino acid
  MOD_RES (83)..(85): Any amino acid
  MOD_RES (87)..(93): Any amino acid
  MOD_RES (95)..(96): Any amino acid
  MOD_RES (98)..(102): Any amino acid
  MOD_RES (111)..(113): Any amino acid
  MOD_RES (115)..(121): Any amino acid
  MOD_RES (123)..(124): Any amino acid
  MOD_RES (126)..(130): Any amino acid
  MOD_RES (139)..(141): Any amino acid
  MOD_RES (143)..(149): Any amino acid
  MOD_RES (151)..(152): Any amino acid
  MOD_RES (154)..(158): Any amino acid
  MOD_RES (167)..(169): Any amino acid
  MOD_RES (171)..(177): Any amino acid
  MOD_RES (179)..(180): Any amino acid
  MOD_RES (182)..(186): Any amino acid
  MOD_RES (195)..(197): Any amino acid
  MOD_RES (199)..(209): Any amino acid
XXXXXXXXXCXXCXXXXXRSDKLTEHXXXHXXXXXXXCXXCXXXXXRSDKLVRHXXXHXXXXXXXCXXCXXXXXQRAHLERHXXXHXXXXXXXCXXCXXXXXDPGHLVRHXXXHXXXXXXXCXXCXXXXXRSDNLVRHXXXHXXXXXXXCXXCXXXXXRSDHLTTHXXXHXXXXXXXCXXCXXXXXRADNLTEHXXXHXXXXXXXXXXX

SEQ ID NO: 2171 - protein, 209 aa, Artificial Sequence
  source: /note="Description of Artificial Sequence: Synthetic polypeptide"
  MOD_RES (1)..(9): Any amino acid
  MOD_RES (11)..(12): Any amino acid
  MOD_RES (14)..(18): Any amino acid
  MOD_RES (27)..(29): Any amino acid
  MOD_RES (31)..(37): Any amino acid
  MOD_RES (39)..(40): Any amino acid
  MOD_RES (42)..(46): Any amino acid
  MOD_RES (55)..(57): Any amino acid
  MOD_RES (59)..(65): Any amino acid
  MOD_RES (67)..(68): Any amino acid
  MOD_RES (70)..(74): Any amino acid
  MOD_RES (83)..(85): Any amino acid
  MOD_RES (87)..(93): Any amino acid
  MOD_RES (95)..(96): Any amino acid
  MOD_RES (98)..(102): Any amino acid
  MOD_RES (111)..(113): Any amino acid
  MOD_RES (115)..(121): Any amino acid
  MOD_RES (123)..(124): Any amino acid
  MOD_RES (126)..(130): Any amino acid
  MOD_RES (139)..(141): Any amino acid
  MOD_RES (143)..(149): Any amino acid
  MOD_RES (151)..(152): Any amino acid
  MOD_RES (154)..(158): Any amino acid
  MOD_RES (167)..(169): Any amino acid
  MOD_RES (171)..(177): Any amino acid
  MOD_RES (179)..(180): Any amino acid
  MOD_RES (182)..(186): Any amino acid
  MOD_RES (195)..(197): Any amino acid
  MOD_RES (199)..(209): Any amino acid
XXXXXXXXXCXXCXXXXXRSDKLVRHXXXHXXXXXXXCXXCXXXXXQRAHLERHXXXHXXXXXXXCXXCXXXXXDPGHLVRHXXXHXXXXXXXCXXCXXXXXRSDNLVRHXXXHXXXXXXXCXXCXXXXXRSDHLTTHXXXHXXXXXXXCXXCXXXXXRADNLTEHXXXHXXXXXXXCXXCXXXXXRSDHLTNHXXXHXXXXXXXXXXX

SEQ ID NO: 2172 - protein, 209 aa, Artificial Sequence
  source: /note="Description of Artificial Sequence: Synthetic polypeptide"
  MOD_RES (1)..(9): Any amino acid
  MOD_RES (11)..(12): Any amino acid
  MOD_RES (14)..(18): Any amino acid
  MOD_RES (27)..(29): Any amino acid
  MOD_RES (31)..(37): Any amino acid
  MOD_RES (39)..(40): Any amino acid
  MOD_RES (42)..(46): Any amino acid
  MOD_RES (55)..(57): Any amino acid
  MOD_RES (59)..(65): Any amino acid
  MOD_RES (67)..(68): Any amino acid
  MOD_RES (70)..(74): Any amino acid
  MOD_RES (83)..(85): Any amino acid
  MOD_RES (87)..(93): Any amino acid
  MOD_RES (95)..(96): Any amino acid
  MOD_RES (98)..(102): Any amino acid
  MOD_RES (111)..(113): Any amino acid
  MOD_RES (115)..(121): Any amino acid
  MOD_RES (123)..(124): Any amino acid
  MOD_RES (126)..(130): Any amino acid
  MOD_RES (139)..(141): Any amino acid
  MOD_RES (143)..(149): Any amino acid
  MOD_RES (151)..(152): Any amino acid
  MOD_RES (154)..(158): Any amino acid
  MOD_RES (167)..(169): Any amino acid
  MOD_RES (171)..(177): Any amino acid
  MOD_RES (179)..(180): Any amino acid
  MOD_RES (182)..(186): Any amino acid
  MOD_RES (195)..(197): Any amino acid
  MOD_RES (199)..(209): Any amino acid
XXXXXXXXXCXXCXXXXXQRAHLERHXXXHXXXXXXXCXXCXXXXXDPGHLVRHXXXHXXXXXXXCXXCXXXXXRSDNLVRHXXXHXXXXXXXCXXCXXXXXRSDHLTTHXXXHXXXXXXXCXXCXXXXXRADNLTEHXXXHXXXXXXXCXXCXXXXXRSDHLTNHXXXHXXXXXXXCXXCXXXXXRSDHLTNHXXXHXXXXXXXXXXX

SEQ ID NO: 2173 - protein, 209 aa, Artificial Sequence
  source: /note="Description of Artificial Sequence: Synthetic polypeptide"
  MOD_RES (1)..(9): Any amino acid
  MOD_RES (11)..(12): Any amino acid
  MOD_RES (14)..(18): Any amino acid
  MOD_RES (27)..(29): Any amino acid
  MOD_RES (31)..(37): Any amino acid
  MOD_RES (39)..(40): Any amino acid
  MOD_RES (42)..(46): Any amino acid
  MOD_RES (55)..(57): Any amino acid
  MOD_RES (59)..(65): Any amino acid
  MOD_RES (67)..(68): Any amino acid
  MOD_RES (70)..(74): Any amino acid
  MOD_RES (83)..(85): Any amino acid
  MOD_RES (87)..(93): Any amino acid
  MOD_RES (95)..(96): Any amino acid
  MOD_RES (98)..(102): Any amino acid
  MOD_RES (111)..(113): Any amino acid
  MOD_RES (115)..(121): Any amino acid
  MOD_RES (123)..(124): Any amino acid
  MOD_RES (126)..(130): Any amino acid
  MOD_RES (139)..(141): Any amino acid
  MOD_RES (143)..(149): Any amino acid
  MOD_RES (151)..(152): Any amino acid
  MOD_RES (154)..(158): Any amino acid
  MOD_RES (167)..(169): Any amino acid
  MOD_RES (171)..(177): Any amino acid
  MOD_RES (179)..(180): Any amino acid
  MOD_RES (182)..(186): Any amino acid
  MOD_RES (195)..(197): Any amino acid
  MOD_RES (199)..(209): Any amino acid
XXXXXXXXXCXXCXXXXXQLAHLRAHXXXHXXXXXXXCXXCXXXXXDPGHLVRHXXXHXXXXXXXCXXCXXXXXQSSNLVRHXXXHXXXXXXXCXXCXXXXXRKDNLKNHXXXHXXXXXXXCXXCXXXXXQAGHLASHXXXHXXXXXXXCXXCXXXXXTSGSLVRHXXXHXXXXXXXCXXCXXXXXRTDTLRDHXXXHXXXXXXXXXXX

SEQ ID NO: 2174 - protein, 209 aa, Artificial Sequence
  source: /note="Description of Artificial Sequence: Synthetic polypeptide"
  MOD_RES (1)..(9): Any amino acid
  MOD_RES (11)..(12): Any amino acid
  MOD_RES (14)..(18): Any amino acid
  MOD_RES (27)..(29): Any amino acid
  MOD_RES (31)..(37): Any amino acid
  MOD_RES (39)..(40): Any amino acid
  MOD_RES (42)..(46): Any amino acid
  MOD_RES (55)..(57): Any amino acid
  MOD_RES (59)..(65): Any amino acid
  MOD_RES (67)..(68): Any amino acid
  MOD_RES (70)..(74): Any amino acid
  MOD_RES (83)..(85): Any amino acid
  MOD_RES (87)..(93): Any amino acid
  MOD_RES (95)..(96): Any amino acid
  MOD_RES (98)..(102): Any amino acid
  MOD_RES (111)..(113): Any amino acid
  MOD_RES (115)..(121): Any amino acid
  MOD_RES (123)..(124): Any amino acid
  MOD_RES (126)..(130): Any amino acid
  MOD_RES (139)..(141): Any amino acid
  MOD_RES (143)..(149): Any amino acid
  MOD_RES (151)..(152): Any amino acid
  MOD_RES (154)..(158): Any amino acid
  MOD_RES (167)..(169): Any amino acid
  MOD_RES (171)..(177): Any amino acid
  MOD_RES (179)..(180): Any amino acid
  MOD_RES (182)..(186): Any amino acid
  MOD_RES (195)..(197): Any amino acid
  MOD_RES (199)..(209): Any amino acid
XXXXXXXXXCXXCXXXXXDPGHLVRHXXXHXXXXXXXCXXCXXXXXQSSNLVRHXXXHXXXXXXXCXXCXXXXXRKDNLKNHXXXHXXXXXXXCXXCXXXXXQAGHLASHXXXHXXXXXXXCXXCXXXXXTSGSLVRHXXXHXXXXXXXCXXCXXXXXRTDTLRDHXXXHXXXXXXXCXXCXXXXXRSDHLTNHXXXHXXXXXXXXXXX

SEQ ID NO: 2175 - protein, 209 aa, Artificial Sequence
  source: /note="Description of Artificial Sequence: Synthetic polypeptide"
  MOD_RES (1)..(9): Any amino acid
  MOD_RES (11)..(12): Any amino acid
  MOD_RES (14)..(18): Any amino acid
  MOD_RES (27)..(29): Any amino acid
  MOD_RES (31)..(37): Any amino acid
  MOD_RES (39)..(40): Any amino acid
  MOD_RES (42)..(46): Any amino acid
  MOD_RES (55)..(57): Any amino acid
  MOD_RES (59)..(65): Any amino acid
  MOD_RES (67)..(68): Any amino acid
  MOD_RES (70)..(74): Any amino acid
  MOD_RES (83)..(85): Any amino acid
  MOD_RES (87)..(93): Any amino acid
  MOD_RES (95)..(96): Any amino acid
  MOD_RES (98)..(102): Any amino acid
  MOD_RES (111)..(113): Any amino acid
  MOD_RES (115)..(121): Any amino acid
  MOD_RES (123)..(124): Any amino acid
  MOD_RES (126)..(130): Any amino acid
  MOD_RES (139)..(141): Any amino acid
  MOD_RES (143)..(149): Any amino acid
  MOD_RES (151)..(152): Any amino acid
  MOD_RES (154)..(158): Any amino acid
  MOD_RES (167)..(169): Any amino acid
  MOD_RES (171)..(177): Any amino acid
  MOD_RES (179)..(180): Any amino acid
  MOD_RES (182)..(186): Any amino acid
  MOD_RES (195)..(197): Any amino acid
  MOD_RES (199)..(209): Any amino acid
XXXXXXXXXCXXCXXXXXQSSNLVRHXXXHXXXXXXXCXXCXXXXXRKDNLKNHXXXHXXXXXXXCXXCXXXXXQAGHLASHXXXHXXXXXXXCXXCXXXXXTSGSLVRHXXXHXXXXXXXCXXCXXXXXRTDTLRDHXXXHXXXXXXXCXXCXXXXXRSDHLTNHXXXHXXXXXXXCXXCXXXXXRADNLTEHXXXHXXXXXXXXXXX

SEQ ID NO: 2176 - protein, 209 aa, Artificial Sequence
  source: /note="Description of Artificial Sequence: Synthetic polypeptide"
  MOD_RES (1)..(9): Any amino acid
  MOD_RES (11)..(12): Any amino acid
  MOD_RES (14)..(18): Any amino acid
  MOD_RES (27)..(29): Any amino acid
  MOD_RES (31)..(37): Any amino acid
  MOD_RES (39)..(40): Any amino acid
  MOD_RES (42)..(46): Any amino acid
  MOD_RES (55)..(57): Any amino acid
  MOD_RES (59)..(65): Any amino acid
  MOD_RES (67)..(68): Any amino acid
  MOD_RES (70)..(74): Any amino acid
  MOD_RES (83)..(85): Any amino acid
  MOD_RES (87)..(93): Any amino acid
  MOD_RES (95)..(96): Any amino acid
  MOD_RES (98)..(102): Any amino acid
  MOD_RES (111)..(113): Any amino acid
  MOD_RES (115)..(121): Any amino acid
  MOD_RES (123)..(124): Any amino acid
  MOD_RES (126)..(130): Any amino acid
  MOD_RES (139)..(141): Any amino acid
  MOD_RES (143)..(149): Any amino acid
  MOD_RES (151)..(152): Any amino acid
  MOD_RES (154)..(158): Any amino acid
  MOD_RES (167)..(169): Any amino acid
  MOD_RES (171)..(177): Any amino acid
  MOD_RES (179)..(180): Any amino acid
  MOD_RES (182)..(186): Any amino acid
  MOD_RES (195)..(197): Any amino acid
  MOD_RES (199)..(209): Any amino acid
XXXXXXXXXCXXCXXXXXRSDHLTNHXXXHXXXXXXXCXXCXXXXXDPGHLVRHXXXHXXXXXXXCXXCXXXXXREDNLHTHXXXHXXXXXXXCXXCXXXXXRSDKLVRHXXXHXXXXXXXCXXCXXXXXTSHSLTEHXXXHXXXXXXXCXXCXXXXXHTGHLLEHXXXHXXXXXXXCXXCXXXXXRSDKLVRHXXXHXXXXXXXXXXX

SEQ ID NO: 2177 - protein, 209 aa, Artificial Sequence
  source: /note="Description of Artificial Sequence: Synthetic polypeptide"
  MOD_RES (1)..(9): Any amino acid
  MOD_RES (11)..(12): Any amino acid
  MOD_RES (14)..(18): Any amino acid
  MOD_RES (27)..(29): Any amino acid
  MOD_RES (31)..(37): Any amino acid
  MOD_RES (39)..(40): Any amino acid
  MOD_RES (42)..(46): Any amino acid
  MOD_RES (55)..(57): Any amino acid
  MOD_RES (59)..(65): Any amino acid
  MOD_RES (67)..(68): Any amino acid
  MOD_RES (70)..(74): Any amino acid
  MOD_RES (83)..(85): Any amino acid
  MOD_RES (87)..(93): Any amino acid
  MOD_RES (95)..(96): Any amino acid
  MOD_RES (98)..(102): Any amino acid
  MOD_RES (111)..(113): Any amino acid
  MOD_RES (115)..(121): Any amino acid
  MOD_RES (123)..(124): Any amino acid
  MOD_RES (126)..(130): Any amino acid
  MOD_RES (139)..(141): Any amino acid
  MOD_RES (143)..(149): Any amino acid
  MOD_RES (151)..(152): Any amino acid
  MOD_RES (154)..(158): Any amino acid
  MOD_RES (167)..(169): Any amino acid
  MOD_RES (171)..(177): Any amino acid
  MOD_RES (179)..(180): Any amino acid
  MOD_RES (182)..(186): Any amino acid
  MOD_RES (195)..(197): Any amino acid
  MOD_RES (199)..(209): Any amino acid
XXXXXXXXXCXXCXXXXXRSDHLTTHXXXHXXXXXXXCXXCXXXXXRSDHLTNHXXXHXXXXXXXCXXCXXXXXDPGHLVRHXXXHXXXXXXXCXXCXXXXXREDNLHTHXXXHXXXXXXXCXXCXXXXXRSDKLVRHXXXHXXXXXXXCXXCXXXXXTSHSLTEHXXXHXXXXXXXCXXCXXXXXHTGHLLEHXXXHXXXXXXXXXXX

SEQ ID NO: 2178 - protein, 209 aa, Artificial Sequence
  source: /note="Description of Artificial Sequence: Synthetic polypeptide"
  MOD_RES (1)..(9): Any amino acid
  MOD_RES (11)..(12): Any amino acid
  MOD_RES (14)..(18): Any amino acid
  MOD_RES (27)..(29): Any amino acid
  MOD_RES (31)..(37): Any amino acid
  MOD_RES (39)..(40): Any amino acid
  MOD_RES (42)..(46): Any amino acid
  MOD_RES (55)..(57): Any amino acid
  MOD_RES (59)..(65): Any amino acid
  MOD_RES (67)..(68): Any amino acid
  MOD_RES (70)..(74): Any amino acid
  MOD_RES (83)..(85): Any amino acid
  MOD_RES (87)..(93): Any amino acid
  MOD_RES (95)..(96): Any amino acid
  MOD_RES (98)..(102): Any amino acid
  MOD_RES (111)..(113): Any amino acid
  MOD_RES (115)..(121): Any amino acid
  MOD_RES (123)..(124): Any amino acid
  MOD_RES (126)..(130): Any amino acid
  MOD_RES (139)..(141): Any amino acid
  MOD_RES (143)..(149): Any amino acid
  MOD_RES (151)..(152): Any amino acid
  MOD_RES (154)..(158): Any amino acid
  MOD_RES (167)..(169): Any amino acid
  MOD_RES (171)..(177): Any amino acid
  MOD_RES (179)..(180): Any amino acid
  MOD_RES (182)..(186): Any amino acid
  MOD_RES (195)..(197): Any amino acid
  MOD_RES (199)..(209): Any amino acid
XXXXXXXXXCXXCXXXXXDPGHLVRHXXXHXXXXXXXCXXCXXXXXRSDKLVRHXXXHXXXXXXXCXXCXXXXXDPGHLVRHXXXHXXXXXXXCXXCXXXXXRSDNLVRHXXXHXXXXXXXCXXCXXXXXRSDDLVRHXXXHXXXXXXXCXXCXXXXXRSDHLTNHXXXHXXXXXXXCXXCXXXXXRSDKLVRHXXXHXXXXXXXXXXX

SEQ ID NO: 2179 - protein, 209 aa, Artificial Sequence
  source: /note="Description of Artificial Sequence: Synthetic polypeptide"
  MOD_RES (1)..(9): Any amino acid
  MOD_RES (11)..(12): Any amino acid
  MOD_RES (14)..(18): Any amino acid
  MOD_RES (27)..(29): Any amino acid
  MOD_RES (31)..(37): Any amino acid
  MOD_RES (39)..(40): Any amino acid
  MOD_RES (42)..(46): Any amino acid
  MOD_RES (55)..(57): Any amino acid
  MOD_RES (59)..(65): Any amino acid
  MOD_RES (67)..(68): Any amino acid
  MOD_RES (70)..(74): Any amino acid
  MOD_RES (83)..(85): Any amino acid
  MOD_RES (87)..(93): Any amino acid
  MOD_RES (95)..(96): Any amino acid
  MOD_RES (98)..(102): Any amino acid
  MOD_RES (111)..(113): Any amino acid
  MOD_RES (115)..(121): Any amino acid
  MOD_RES (123)..(124): Any amino acid
  MOD_RES (126)..(130): Any amino acid
  MOD_RES (139)..(141): Any amino acid
  MOD_RES (143)..(149): Any amino acid
  MOD_RES (151)..(152): Any amino acid
  MOD_RES (154)..(158): Any amino acid
  MOD_RES (167)..(169): Any amino acid
  MOD_RES (171)..(177): Any amino acid
  MOD_RES (179)..(180): Any amino acid
  MOD_RES (182)..(186): Any amino acid
  MOD_RES (195)..(197): Any amino acid
  MOD_RES (199)..(209): Any amino acid
XXXXXXXXXCXXCXXXXXTTGNLTVHXXXHXXXXXXXCXXCXXXXXRSDNLVRHXXXHXXXXXXXCXXCXXXXXRSDHLTNHXXXHXXXXXXXCXXCXXXXXDPGHLVRHXXXHXXXXXXXCXXCXXXXXQRAHLERHXXXHXXXXXXXCXXCXXXXXSRRTCRAHXXXHXXXXXXXCXXCXXXXXRSDKLTEHXXXHXXXXXXXXXXX

SEQ ID NO: 2180 - protein, 209 aa, Artificial Sequence
  source: /note="Description of Artificial Sequence: Synthetic polypeptide"
  MOD_RES (1)..(9): Any amino acid
  MOD_RES (11)..(12): Any amino acid
  MOD_RES (14)..(18): Any amino acid
  MOD_RES (27)..(29): Any amino acid
  MOD_RES (31)..(37): Any amino acid
  MOD_RES (39)..(40): Any amino acid
  MOD_RES (42)..(46): Any amino acid
  MOD_RES (55)..(57): Any amino acid
  MOD_RES (59)..(65): Any amino acid
  MOD_RES (67)..(68): Any amino acid
  MOD_RES (70)..(74): Any amino acid
  MOD_RES (83)..(85): Any amino acid
  MOD_RES (87)..(93): Any amino acid
  MOD_RES (95)..(96): Any amino acid
  MOD_RES (98)..(102): Any amino acid
  MOD_RES (111)..(113): Any amino acid
  MOD_RES (115)..(121): Any amino acid
  MOD_RES (123)..(124): Any amino acid
  MOD_RES (126)..(130): Any amino acid
  MOD_RES (139)..(141): Any amino acid
  MOD_RES (143)..(149): Any amino acid
  MOD_RES (151)..(152): Any amino acid
  MOD_RES (154)..(158): Any amino acid
  MOD_RES (167)..(169): Any amino acid
  MOD_RES (171)..(177): Any amino acid
  MOD_RES (179)..(180): Any amino acid
  MOD_RES (182)..(186): Any amino acid
  MOD_RES (195)..(197): Any amino acid
  MOD_RES (199)..(209): Any amino acid
XXXXXXXXXCXXCXXXXXRNDALTEHXXXHXXXXXXXCXXCXXXXXQSGDLRRHXXXHXXXXXXXCXXCXXXXXRSDHLTNHXXXHXXXXXXXCXXCXXXXXRSDNLVRHXXXHXXXXXXXCXXCXXXXXQSGDLRRHXXXHXXXXXXXCXXCXXXXXRKDNLKNHXXXHXXXXXXXCXXCXXXXXRSDHLTNHXXXHXXXXXXXXXXX

SEQ ID NO: 2181 - protein, 209 aa, Artificial Sequence
  source: /note="Description of Artificial Sequence: Synthetic polypeptide"
  MOD_RES (1)..(9): Any amino acid
  MOD_RES (11)..(12): Any amino acid
  MOD_RES (14)..(18): Any amino acid
  MOD_RES (27)..(29): Any amino acid
  MOD_RES (31)..(37): Any amino acid
  MOD_RES (39)..(40): Any amino acid
  MOD_RES (42)..(46): Any amino acid
  MOD_RES (55)..(57): Any amino acid
  MOD_RES (59)..(65): Any amino acid
  MOD_RES (67)..(68): Any amino acid
  MOD_RES (70)..(74): Any amino acid
  MOD_RES (83)..(85): Any amino acid
  MOD_RES (87)..(93): Any amino acid
  MOD_RES (95)..(96): Any amino acid
  MOD_RES (98)..(102): Any amino acid
  MOD_RES (111)..(113): Any amino acid
  MOD_RES (115)..(121): Any amino acid
  MOD_RES (123)..(124): Any amino acid
  MOD_RES (126)..(130): Any amino acid
  MOD_RES (139)..(141): Any amino acid
  MOD_RES (143)..(149): Any amino acid
  MOD_RES (151)..(152): Any amino acid
  MOD_RES (154)..(158): Any amino acid
  MOD_RES (167)..(169): Any amino acid
  MOD_RES (171)..(177): Any amino acid
  MOD_RES (179)..(180): Any amino acid
  MOD_RES (182)..(186): Any amino acid
  MOD_RES (195)..(197): Any amino acid
  MOD_RES (199)..(209): Any amino acid
XXXXXXXXXCXXCXXXXXSRRTCRAHXXXHXXXXXXXCXXCXXXXXRSDKLTEHXXXHXXXXXXXCXXCXXXXXRNDTLTEHXXXHXXXXXXXCXXCXXXXXRSDHLTTHXXXHXXXXXXXCXXCXXXXXRSDHLTNHXXXHXXXXXXXCXXCXXXXXDPGHLVRHXXXHXXXXXXXCXXCXXXXXREDNLHTHXXXHXXXXXXXXXXX

SEQ ID NO: 2182 - protein, 209 aa, Artificial Sequence
  source: /note="Description of Artificial Sequence: Synthetic polypeptide"
  MOD_RES (1)..(9): Any amino acid
  MOD_RES (11)..(12): Any amino acid
  MOD_RES (14)..(18): Any amino acid
  MOD_RES (27)..(29): Any amino acid
  MOD_RES (31)..(37): Any amino acid
  MOD_RES (39)..(40): Any amino acid
  MOD_RES (42)..(46): Any amino acid
  MOD_RES (55)..(57): Any amino acid
  MOD_RES (59)..(65): Any amino acid
  MOD_RES (67)..(68): Any amino acid
  MOD_RES (70)..(74): Any amino acid
  MOD_RES (83)..(85): Any amino acid
  MOD_RES (87)..(93): Any amino acid
  MOD_RES (95)..(96): Any amino acid
  MOD_RES (98)..(102): Any amino acid
  MOD_RES (111)..(113): Any amino acid
  MOD_RES (115)..(121): Any amino acid
  MOD_RES (123)..(124): Any amino acid
  MOD_RES (126)..(130): Any amino acid
  MOD_RES (139)..(141): Any amino acid
  MOD_RES (143)..(149): Any amino acid
  MOD_RES (151)..(152): Any amino acid
  MOD_RES (154)..(158): Any amino acid
  MOD_RES (167)..(169): Any amino acid
  MOD_RES (171)..(177): Any amino acid
  MOD_RES (179)..(180): Any amino acid
  MOD_RES (182)..(186): Any amino acid
  MOD_RES (195)..(197): Any amino acid
  MOD_RES (199)..(209): Any amino acid
XXXXXXXXXCXXCXXXXXRSDKLTEHXXXHXXXXXXXCXXCXXXXXRNDTLTEHXXXHXXXXXXXCXXCXXXXXRSDHLTTHXXXHXXXXXXXCXXCXXXXXRSDHLTNHXXXHXXXXXXXCXXCXXXXXDPGHLVRHXXXHXXXXXXXCXXCXXXXXREDNLHTHXXXHXXXXXXXCXXCXXXXXRSDKLVRHXXXHXXXXXXXXXXX

SEQ ID NO: 2183 - protein, 209 aa, Artificial Sequence
  source: /note="Description of Artificial Sequence: Synthetic polypeptide"
  MOD_RES (1)..(9): Any amino acid
  MOD_RES (11)..(12): Any amino acid
  MOD_RES (14)..(18): Any amino acid
  MOD_RES (27)..(29): Any amino acid
  MOD_RES (31)..(37): Any amino acid
  MOD_RES (39)..(40): Any amino acid
  MOD_RES (42)..(46): Any amino acid
  MOD_RES (55)..(57): Any amino acid
  MOD_RES (59)..(65): Any amino acid
  MOD_RES (67)..(68): Any amino acid
  MOD_RES (70)..(74): Any amino acid
  MOD_RES (83)..(85): Any amino acid
  MOD_RES (87)..(93): Any amino acid
  MOD_RES (95)..(96): Any amino acid
  MOD_RES (98)..(102): Any amino acid
  MOD_RES (111)..(113): Any amino acid
  MOD_RES (115)..(121): Any amino acid
  MOD_RES (123)..(124): Any amino acid
  MOD_RES (126)..(130): Any amino acid
  MOD_RES (139)..(141): Any amino acid
  MOD_RES (143)..(149): Any amino acid
  MOD_RES (151)..(152): Any amino acid
  MOD_RES (154)..(158): Any amino acid
  MOD_RES (167)..(169): Any amino acid
  MOD_RES (171)..(177): Any amino acid
  MOD_RES (179)..(180): Any amino acid
  MOD_RES (182)..(186): Any amino acid
  MOD_RES (195)..(197): Any amino acid
  MOD_RES (199)..(209): Any amino acid
XXXXXXXXXCXXCXXXXXRNDTLTEHXXXHXXXXXXXCXXCXXXXXRSDHLTTHXXXHXXXXXXXCXXCXXXXXRSDHLTNHXXXHXXXXXXXCXXCXXXXXDPGHLVRHXXXHXXXXXXXCXXCXXXXXREDNLHTHXXXHXXXXXXXCXXCXXXXXRSDKLVRHXXXHXXXXXXXCXXCXXXXXTSHSLTEHXXXHXXXXXXXXXXX

SEQ ID NO: 2184 - protein, 209 aa, Artificial Sequence
  source: /note="Description of Artificial Sequence: Synthetic polypeptide"
  MOD_RES (1)..(9): Any amino acid
  MOD_RES (11)..(12): Any amino acid
  MOD_RES (14)..(18): Any amino acid
  MOD_RES (27)..(29): Any amino acid
  MOD_RES (31)..(37): Any amino acid
  MOD_RES (39)..(40): Any amino acid
  MOD_RES (42)..(46): Any amino acid
  MOD_RES (55)..(57): Any amino acid
  MOD_RES (59)..(65): Any amino acid
  MOD_RES (67)..(68): Any amino acid
  MOD_RES (70)..(74): Any amino acid
  MOD_RES (83)..(85): Any amino acid
  MOD_RES (87)..(93): Any amino acid
  MOD_RES (95)..(96): Any amino acid
  MOD_RES (98)..(102): Any amino acid
  MOD_RES (111)..(113): Any amino acid
  MOD_RES (115)..(121): Any amino acid
  MOD_RES (123)..(124): Any amino acid
  MOD_RES (126)..(130): Any amino acid
  MOD_RES (139)..(141): Any amino acid
  MOD_RES (143)..(149): Any amino acid
  MOD_RES (151)..(152): Any amino acid
  MOD_RES (154)..(158): Any amino acid
  MOD_RES (167)..(169): Any amino acid
  MOD_RES (171)..(177): Any amino acid
  MOD_RES (179)..(180): Any amino acid
  MOD_RES (182)..(186): Any amino acid
  MOD_RES (195)..(197): Any amino acid
  MOD_RES (199)..(209): Any amino acid
XXXXXXXXXCXXCXXXXXRSDKLTEHXXXHXXXXXXXCXXCXXXXXTTGALTEHXXXHXXXXXXXCXXCXXXXXDPGHLVRHXXXHXXXXXXXCXXCXXXXXRSDKLVRHXXXHXXXXXXXCXXCXXXXXDPGHLVRHXXXHXXXXXXXCXXCXXXXXRSDNLVRHXXXHXXXXXXXCXXCXXXXXRSDDLVRHXXXHXXXXXXXXXXX

SEQ ID NO: 2185 - protein, 209 aa, Artificial Sequence
  source: /note="Description of Artificial Sequence: Synthetic polypeptide"
  MOD_RES (1)..(9): Any amino acid
  MOD_RES (11)..(12): Any amino acid
  MOD_RES (14)..(18): Any amino acid
  MOD_RES (27)..(29): Any amino acid
  MOD_RES (31)..(37): Any amino acid
  MOD_RES (39)..(40): Any amino acid
  MOD_RES (42)..(46): Any amino acid
  MOD_RES (55)..(57): Any amino acid
  MOD_RES (59)..(65): Any amino acid
  MOD_RES (67)..(68): Any amino acid
  MOD_RES (70)..(74): Any amino acid
  MOD_RES (83)..(85): Any amino acid
  MOD_RES (87)..(93): Any amino acid
  MOD_RES (95)..(96): Any amino acid
  MOD_RES (98)..(102): Any amino acid
  MOD_RES (111)..(113): Any amino acid
  MOD_RES (115)..(121): Any amino acid
  MOD_RES (123)..(124): Any amino acid
  MOD_RES (126)..(130): Any amino acid
  MOD_RES (139)..(141): Any amino acid
  MOD_RES (143)..(149): Any amino acid
  MOD_RES (151)..(152): Any amino acid
  MOD_RES (154)..(158): Any amino acid
  MOD_RES (167)..(169): Any amino acid
  MOD_RES (171)..(177): Any amino acid
  MOD_RES (179)..(180): Any amino acid
  MOD_RES (182)..(186): Any amino acid
  MOD_RES (195)..(197): Any amino acid
  MOD_RES (199)..(209): Any amino acid
XXXXXXXXXCXXCXXXXXQSGDLRRHXXXHXXXXXXXCXXCXXXXXRSDHLTNHXXXHXXXXXXXCXXCXXXXXRSDNLVRHXXXHXXXXXXXCXXCXXXXXQSGDLRRHXXXHXXXXXXXCXXCXXXXXRKDNLKNHXXXHXXXXXXXCXXCXXXXXRSDHLTNHXXXHXXXXXXXCXXCXXXXXQSSNLVRHXXXHXXXXXXXXXXX

SEQ ID NO: 2186 - protein, 209 aa, Artificial Sequence
  source: /note="Description of Artificial Sequence: Synthetic polypeptide"
  MOD_RES (1)..(9): Any amino acid
  MOD_RES (11)..(12): Any amino acid
  MOD_RES (14)..(18): Any amino acid
  MOD_RES (27)..(29): Any amino acid
  MOD_RES (31)..(37): Any amino acid
  MOD_RES (39)..(40): Any amino acid
  MOD_RES (42)..(46): Any amino acid
  MOD_RES (55)..(57): Any amino acid
  MOD_RES (59)..(65): Any amino acid
  MOD_RES (67)..(68): Any amino acid
  MOD_RES (70)..(74): Any amino acid
  MOD_RES (83)..(85): Any amino acid
  MOD_RES (87)..(93): Any amino acid
  MOD_RES (95)..(96): Any amino acid
  MOD_RES (98)..(102): Any amino acid
  MOD_RES (111)..(113): Any amino acid
  MOD_RES (115)..(121): Any amino acid
  MOD_RES (123)..(124): Any amino acid
  MOD_RES (126)..(130): Any amino acid
  MOD_RES (139)..(141): Any amino acid
  MOD_RES (143)..(149): Any amino acid
  MOD_RES (151)..(152): Any amino acid
  MOD_RES (154)..(158): Any amino acid
  MOD_RES (167)..(169): Any amino acid
  MOD_RES (171)..(177): Any amino acid
  MOD_RES (179)..(180): Any amino acid
  MOD_RES (182)..(186): Any amino acid
  MOD_RES (195)..(197): Any amino acid
  MOD_RES (199)..(209): Any amino acid
XXXXXXXXXCXXCXXXXXDPGHLVRHXXXHXXXXXXXCXXCXXXXXRSDNLVRHXXXHXXXXXXXCXXCXXXXXRSDDLVRHXXXHXXXXXXXCXXCXXXXXRSDHLTNHXXXHXXXXXXXCXXCXXXXXRSDKLVRHXXXHXXXXXXXCXXCXXXXXHRTTLTNHXXXHXXXXXXXCXXCXXXXXDPGHLVRHXXXHXXXXXXXXXXX

SEQ ID NO: 2187 - protein, 209 aa, Artificial Sequence
  source: /note="Description of Artificial Sequence: Synthetic polypeptide"
  MOD_RES (1)..(9): Any amino acid
  MOD_RES (11)..(12): Any amino acid
  MOD_RES (14)..(18): Any amino acid
  MOD_RES (27)..(29): Any amino acid
  MOD_RES (31)..(37): Any amino acid
  MOD_RES (39)..(40): Any amino acid
  MOD_RES (42)..(46): Any amino acid
  MOD_RES (55)..(57): Any amino acid
  MOD_RES (59)..(65): Any amino acid
  MOD_RES (67)..(68): Any amino acid
  MOD_RES (70)..(74): Any amino acid
  MOD_RES (83)..(85): Any amino acid
  MOD_RES (87)..(93): Any amino acid
  MOD_RES (95)..(96): Any amino acid
  MOD_RES (98)..(102): Any amino acid
  MOD_RES (111)..(113): Any amino acid
  MOD_RES (115)..(121): Any amino acid
  MOD_RES (123)..(124): Any amino acid
  MOD_RES (126)..(130): Any amino acid
  MOD_RES (139)..(141): Any amino acid
  MOD_RES (143)..(149): Any amino acid
  MOD_RES (151)..(152): Any amino acid
  MOD_RES (154)..(158): Any amino acid
  MOD_RES (167)..(169): Any amino acid
  MOD_RES (171)..(177): Any amino acid
  MOD_RES (179)..(180): Any amino acid
  MOD_RES (182)..(186): Any amino acid
  MOD_RES (195)..(197): Any amino acid
  MOD_RES (199)..(209): Any amino acid
XXXXXXXXXCXXCXXXXXRSDKLVRHXXXHXXXXXXXCXXCXXXXXDPGHLVRHXXXHXXXXXXXCXXCXXXXXRSDNLVRHXXXHXXXXXXXCXXCXXXXXRSDDLVRHXXXHXXXXXXXCXXCXXXXXRSDHLTNHXXXHXXXXXXXCXXCXXXXXRSDKLVRHXXXHXXXXXXXCXXCXXXXXHRTTLTNHXXXHXXXXXXXXXXX

SEQ ID NO: 2188 - protein, 209 aa, Artificial Sequence
  source: /note="Description of Artificial Sequence: Synthetic polypeptide"
  MOD_RES (1)..(9): Any amino acid
  MOD_RES (11)..(12): Any amino acid
  MOD_RES (14)..(18): Any amino acid
  MOD_RES (27)..(29): Any amino acid
  MOD_RES (31)..(37): Any amino acid
  MOD_RES (39)..(40): Any amino acid
  MOD_RES (42)..(46): Any amino acid
  MOD_RES (55)..(57): Any amino acid
  MOD_RES (59)..(65): Any amino acid
  MOD_RES (67)..(68): Any amino acid
  MOD_RES (70)..(74): Any amino acid
  MOD_RES (83)..(85): Any amino acid
  MOD_RES (87)..(93): Any amino acid
  MOD_RES (95)..(96): Any amino acid
  MOD_RES (98)..(102): Any amino acid
  MOD_RES (111)..(113): Any amino acid
  MOD_RES (115)..(121): Any amino acid
  MOD_RES (123)..(124): Any amino acid
  MOD_RES (126)..(130): Any amino acid
  MOD_RES (139)..(141): Any amino acid
  MOD_RES (143)..(149): Any amino acid
  MOD_RES (151)..(152): Any amino acid
  MOD_RES (154)..(158): Any amino acid
  MOD_RES (167)..(169): Any amino acid
  MOD_RES (171)..(177): Any amino acid
  MOD_RES (179)..(180): Any amino acid
  MOD_RES (182)..(186): Any amino acid
  MOD_RES (195)..(197): Any amino acid
  MOD_RES (199)..(209): Any amino acid
XXXXXXXXXCXXCXXXXXTTGALTEHXXXHXXXXXXXCXXCXXXXXDPGHLVRHXXXHXXXXXXXCXXCXXXXXRSDKLVRHXXXHXXXXXXXCXXCXXXXXDPGHLVRHXXXHXXXXXXXCXXCXXXXXRSDNLVRHXXXHXXXXXXXCXXCXXXXXRSDDLVRHXXXHXXXXXXXCXXCXXXXXRSDHLTNHXXXHXXXXXXXXXXX

SEQ ID NO: 2189 - protein, 209 aa, Artificial Sequence
  source: /note="Description of Artificial Sequence: Synthetic polypeptide"
  MOD_RES (1)..(9): Any amino acid
  MOD_RES (11)..(12): Any amino acid
  MOD_RES (14)..(18): Any amino acid
  MOD_RES (27)..(29): Any amino acid
  MOD_RES (31)..(37): Any amino acid
  MOD_RES (39)..(40): Any amino acid
  MOD_RES (42)..(46): Any amino acid
  MOD_RES (55)..(57): Any amino acid
  MOD_RES (59)..(65): Any amino acid
  MOD_RES (67)..(68): Any amino acid
  MOD_RES (70)..(74): Any amino acid
  MOD_RES (83)..(85): Any amino acid
  MOD_RES (87)..(93): Any amino acid
  MOD_RES (95)..(96): Any amino acid
  MOD_RES (98)..(102): Any amino acid
  MOD_RES (111)..(113): Any amino acid
  MOD_RES (115)..(121): Any amino acid
  MOD_RES (123)..(124): Any amino acid
  MOD_RES (126)..(130): Any amino acid
  MOD_RES (139)..(141): Any amino acid
  MOD_RES (143)..(149): Any amino acid
  MOD_RES (151)..(152): Any amino acid
  MOD_RES (154)..(158): Any amino acid
  MOD_RES (167)..(169): Any amino acid
  MOD_RES (171)..(177): Any amino acid
  MOD_RES (179)..(180): Any amino acid
  MOD_RES (182)..(186): Any amino acid
  MOD_RES (195)..(197): Any amino acid
  MOD_RES (199)..(209): Any amino acid
XXXXXXXXXCXXCXXXXXQRAHLERHXXXHXXXXXXXCXXCXXXXXRNDALTEHXXXHXXXXXXXCXXCXXXXXQSGDLRRHXXXHXXXXXXXCXXCXXXXXRSDHLTNHXXXHXXXXXXXCXXCXXXXXRSDNLVRHXXXHXXXXXXXCXXCXXXXXQSGDLRRHXXXHXXXXXXXCXXCXXXXXRKDNLKNHXXXHXXXXXXXXXXX

SEQ ID NO: 2190 - protein, 209 aa, Artificial Sequence
  source: /note="Description of Artificial Sequence: Synthetic polypeptide"
  MOD_RES (1)..(9): Any amino acid
  MOD_RES (11)..(12): Any amino acid
  MOD_RES (14)..(18): Any amino acid
  MOD_RES (27)..(29): Any amino acid
  MOD_RES (31)..(37): Any amino acid
  MOD_RES (39)..(40): Any amino acid
  MOD_RES (42)..(46): Any amino acid
  MOD_RES (55)..(57): Any amino acid
  MOD_RES (59)..(65): Any amino acid
  MOD_RES (67)..(68): Any amino acid
  MOD_RES (70)..(74): Any amino acid
  MOD_RES (83)..(85): Any amino acid
  MOD_RES (87)..(93): Any amino acid
  MOD_RES (95)..(96): Any amino acid
  MOD_RES (98)..(102): Any amino acid
  MOD_RES (111)..(113): Any amino acid
  MOD_RES (115)..(121): Any amino acid
  MOD_RES (123)..(124): Any amino acid
  MOD_RES (126)..(130): Any amino acid
  MOD_RES (139)..(141): Any amino acid
  MOD_RES (143)..(149): Any amino acid
  MOD_RES (151)..(152): Any amino acid
  MOD_RES (154)..(158): Any amino acid
  MOD_RES (167)..(169): Any amino acid
  MOD_RES (171)..(177): Any amino acid
  MOD_RES (179)..(180): Any amino acid
  MOD_RES (182)..(186): Any amino acid
  MOD_RES (195)..(197): Any amino acid
  MOD_RES (199)..(209): Any amino acid
XXXXXXXXXCXXCXXXXXRSDDLVRHXXXHXXXXXXXCXXCXXXXXTTGNLTVHXXXHXXXXXXXCXXCXXXXXRSDNLVRHXXXHXXXXXXXCXXCXXXXXRSDHLTNHXXXHXXXXXXXCXXCXXXXXDPGHLVRHXXXHXXXXXXXCXXCXXXXXQRAHLERHXXXHXXXXXXXCXXCXXXXXSRRTCRAHXXXHXXXXXXXXXXX

SEQ ID NO: 2191 - protein, 209 aa, Artificial Sequence
  source: /note="Description of Artificial Sequence: Synthetic polypeptide"
  MOD_RES (1)..(9): Any amino acid
  MOD_RES (11)..(12): Any amino acid
  MOD_RES (14)..(18): Any amino acid
  MOD_RES (27)..(29): Any amino acid
  MOD_RES (31)..(37): Any amino acid
  MOD_RES (39)..(40): Any amino acid
  MOD_RES (42)..(46): Any amino acid
  MOD_RES (55)..(57): Any amino acid
  MOD_RES (59)..(65): Any amino acid
  MOD_RES (67)..(68): Any amino acid
  MOD_RES (70)..(74): Any amino acid
  MOD_RES (83)..(85): Any amino acid
  MOD_RES (87)..(93): Any amino acid
  MOD_RES (95)..(96): Any amino acid
  MOD_RES (98)..(102): Any amino acid
  MOD_RES (111)..(113): Any amino acid
  MOD_RES (115)..(121): Any amino acid
  MOD_RES (123)..(124): Any amino acid
  MOD_RES (126)..(130): Any amino acid
  MOD_RES (139)..(141): Any amino acid
  MOD_RES (143)..(149): Any amino acid
  MOD_RES (151)..(152): Any amino acid
  MOD_RES (154)..(158): Any amino acid
  MOD_RES (167)..(169): Any amino acid
  MOD_RES (171)..(177): Any amino acid
  MOD_RES (179)..(180): Any amino acid
  MOD_RES (182)..(186): Any amino acid
  MOD_RES (195)..(197): Any amino acid
  MOD_RES (199)..(209): Any amino acid
XXXXXXXXXCXXCXXXXXQRAHLERHXXXHXXXXXXXCXXCXXXXXQRAHLERHXXXHXXXXXXXCXXCXXXXXRNDALTEHXXXHXXXXXXXCXXCXXXXXQSGDLRRHXXXHXXXXXXXCXXCXXXXXRSDHLTNHXXXHXXXXXXXCXXCXXXXXRSDNLVRHXXXHXXXXXXXCXXCXXXXXQSGDLRRHXXXHXXXXXXXXXXX

SEQ ID NO: 2192 - protein, 209 aa, Artificial Sequence
  source: /note="Description of Artificial Sequence: Synthetic polypeptide"
  MOD_RES (1)..(9): Any amino acid
  MOD_RES (11)..(12): Any amino acid
  MOD_RES (14)..(18): Any amino acid
  MOD_RES (27)..(29): Any amino acid
  MOD_RES (31)..(37): Any amino acid
  MOD_RES (39)..(40): Any amino acid
  MOD_RES (42)..(46): Any amino acid
  MOD_RES (55)..(57): Any amino acid
  MOD_RES (59)..(65): Any amino acid
  MOD_RES (67)..(68): Any amino acid
  MOD_RES (70)..(74): Any amino acid
  MOD_RES (83)..(85): Any amino acid
  MOD_RES (87)..(93): Any amino acid
  MOD_RES (95)..(96): Any amino acid
  MOD_RES (98)..(102): Any amino acid
  MOD_RES (111)..(113): Any amino acid
  MOD_RES (115)..(121): Any amino acid
  MOD_RES (123)..(124): Any amino acid
  MOD_RES (126)..(130): Any amino acid
  MOD_RES (139)..(141): Any amino acid
  MOD_RES (143)..(149): Any amino acid
  MOD_RES (151)..(152): Any amino acid
  MOD_RES (154)..(158): Any amino acid
  MOD_RES (167)..(169): Any amino acid
  MOD_RES (171)..(177): Any amino acid
  MOD_RES (179)..(180): Any amino acid
  MOD_RES (182)..(186): Any amino acid
  MOD_RES (195)..(197): Any amino acid
  MOD_RES (199)..(209): Any amino acid
XXXXXXXXXCXXCXXXXXDPGHLVRHXXXHXXXXXXXCXXCXXXXXQRAHLERHXXXHXXXXXXXCXXCXXXXXQRAHLERHXXXHXXXXXXXCXXCXXXXXRNDALTEHXXXHXXXXXXXCXXCXXXXXQSGDLRRHXXXHXXXXXXXCXXCXXXXXRSDHLTNHXXXHXXXXXXXCXXCXXXXXRSDNLVRHXXXHXXXXXXXXXXX

SEQ ID NO: 2193 - protein, 209 aa, Artificial Sequence
  source: /note="Description of Artificial Sequence: Synthetic polypeptide"
  MOD_RES (1)..(9): Any amino acid
  MOD_RES (11)..(12): Any amino acid
  MOD_RES (14)..(18): Any amino acid
  MOD_RES (27)..(29): Any amino acid
  MOD_RES (31)..(37): Any amino acid
  MOD_RES (39)..(40): Any amino acid
  MOD_RES (42)..(46): Any amino acid
  MOD_RES (55)..(57): Any amino acid
  MOD_RES (59)..(65): Any amino acid
  MOD_RES (67)..(68): Any amino acid
  MOD_RES (70)..(74): Any amino acid
  MOD_RES (83)..(85): Any amino acid
  MOD_RES (87)..(93): Any amino acid
  MOD_RES (95)..(96): Any amino acid
  MOD_RES (98)..(102): Any amino acid
  MOD_RES (111)..(113): Any amino acid
  MOD_RES (115)..(121): Any amino acid
  MOD_RES (123)..(124): Any amino acid
  MOD_RES (126)..(130): Any amino acid
  MOD_RES (139)..(141): Any amino acid
  MOD_RES (143)..(149): Any amino acid
  MOD_RES (151)..(152): Any amino acid
  MOD_RES (154)..(158): Any amino acid
  MOD_RES (167)..(169): Any amino acid
  MOD_RES (171)..(177): Any amino acid
  MOD_RES (179)..(180): Any amino acid
  MOD_RES (182)..(186): Any amino acid
  MOD_RES (195)..(197): Any amino acid
  MOD_RES (199)..(209): Any amino acid
XXXXXXXXXCXXCXXXXXDPGHLVRHXXXHXXXXXXXCXXCXXXXXQRAHLERHXXXHXXXXXXXCXXCXXXXXSRRTCRAHXXXHXXXXXXXCXXCXXXXXRSDKLTEHXXXHXXXXXXXCXXCXXXXXRNDTLTEHXXXHXXXXXXXCXXCXXXXXRSDHLTTHXXXHXXXXXXXCXXCXXXXXRSDHLTNHXXXHXXXXXXXXXXX

SEQ ID NO: 2194 - protein, 209 aa, Artificial Sequence
  source: /note="Description of Artificial Sequence: Synthetic polypeptide"
  MOD_RES (1)..(9): Any amino acid
  MOD_RES (11)..(12): Any amino acid
  MOD_RES (14)..(18): Any amino acid
  MOD_RES (27)..(29): Any amino acid
  MOD_RES (31)..(37): Any amino acid
  MOD_RES (39)..(40): Any amino acid
  MOD_RES (42)..(46): Any amino acid
  MOD_RES (55)..(57): Any amino acid
  MOD_RES (59)..(65): Any amino acid
  MOD_RES (67)..(68): Any amino acid
  MOD_RES (70)..(74): Any amino acid
  MOD_RES (83)..(85): Any amino acid
  MOD_RES (87)..(93): Any amino acid
  MOD_RES (95)..(96): Any amino acid
  MOD_RES (98)..(102): Any amino acid
  MOD_RES (111)..(113): Any amino acid
  MOD_RES (115)..(121): Any amino acid
  MOD_RES (123)..(124): Any amino acid
  MOD_RES (126)..(130): Any amino acid
  MOD_RES (139)..(141): Any amino acid
  MOD_RES (143)..(149): Any amino acid
  MOD_RES (151)..(152): Any amino acid
  MOD_RES (154)..(158): Any amino acid
  MOD_RES (167)..(169): Any amino acid
  MOD_RES (171)..(177): Any amino acid
  MOD_RES (179)..(180): Any amino acid
  MOD_RES (182)..(186): Any amino acid
  MOD_RES (195)..(197): Any amino acid
  MOD_RES (199)..(209): Any amino acid
XXXXXXXXXCXXCXXXXXRSDHLTNHXXXHXXXXXXXCXXCXXXXXDPGHLVRHXXXHXXXXXXXCXXCXXXXXQRAHLERHXXXHXXXXXXXCXXCXXXXXSRRTCRAHXXXHXXXXXXXCXXCXXXXXRSDKLTEHXXXHXXXXXXXCXXCXXXXXRNDTLTEHXXXHXXXXXXXCXXCXXXXXRSDHLTTHXXXHXXXXXXXXXXX

SEQ ID NO: 2195 - protein, 209 aa, Artificial Sequence
  source: /note="Description of Artificial Sequence: Synthetic polypeptide"
  MOD_RES (1)..(9): Any amino acid
  MOD_RES (11)..(12): Any amino acid
  MOD_RES (14)..(18): Any amino acid
  MOD_RES (27)..(29): Any amino acid
  MOD_RES (31)..(37): Any amino acid
  MOD_RES (39)..(40): Any amino acid
  MOD_RES (42)..(46): Any amino acid
  MOD_RES (55)..(57): Any amino acid
  MOD_RES (59)..(65): Any amino acid
  MOD_RES (67)..(68): Any amino acid
  MOD_RES (70)..(74): Any amino acid
  MOD_RES (83)..(85): Any amino acid
  MOD_RES (87)..(93): Any amino acid
  MOD_RES (95)..(96): Any amino acid
  MOD_RES (98)..(102): Any amino acid
  MOD_RES (111)..(113): Any amino acid
  MOD_RES (115)..(121): Any amino acid
  MOD_RES (123)..(124): Any amino acid
  MOD_RES (126)..(130): Any amino acid
  MOD_RES (139)..(141): Any amino acid
  MOD_RES (143)..(149): Any amino acid
  MOD_RES (151)..(152): Any amino acid
  MOD_RES (154)..(158): Any amino acid
  MOD_RES (167)..(169): Any amino acid
  MOD_RES (171)..(177): Any amino acid
  MOD_RES (179)..(180): Any amino acid
  MOD_RES (182)..(186): Any amino acid
  MOD_RES (195)..(197): Any amino acid
  MOD_RES (199)..(209): Any amino acid
XXXXXXXXXCXXCXXXXXQRAHLERHXXXHXXXXXXXCXXCXXXXXSRRTCRAHXXXHXXXXXXXCXXCXXXXXRSDKLTEHXXXHXXXXXXXCXXCXXXXXRNDTLTEHXXXHXXXXXXXCXXCXXXXXRSDHLTTHXXXHXXXXXXXCXXCXXXXXRSDHLTNHXXXHXXXXXXXCXXCXXXXXDPGHLVRHXXXHXXXXXXXXXXX

SEQ ID NO: 2196 - protein, 209 aa, Artificial Sequence
  source: /note="Description of Artificial Sequence: Synthetic polypeptide"
  MOD_RES (1)..(9): Any amino acid
  MOD_RES (11)..(12): Any amino acid
  MOD_RES (14)..(18): Any amino acid
  MOD_RES (27)..(29): Any amino acid
  MOD_RES (31)..(37): Any amino acid
  MOD_RES (39)..(40): Any amino acid
  MOD_RES (42)..(46): Any amino acid
  MOD_RES (55)..(57): Any amino acid
  MOD_RES (59)..(65): Any amino acid
  MOD_RES (67)..(68): Any amino acid
  MOD_RES (70)..(74): Any amino acid
  MOD_RES (83)..(85): Any amino acid
  MOD_RES (87)..(93): Any amino acid
  MOD_RES (95)..(96): Any amino acid
  MOD_RES (98)..(102): Any amino acid
  MOD_RES (111)..(113): Any amino acid
  MOD_RES (115)..(121): Any amino acid
  MOD_RES (123)..(124): Any amino acid
  MOD_RES (126)..(130): Any amino acid
  MOD_RES (139)..(141): Any amino acid
  MOD_RES (143)..(149): Any amino acid
  MOD_RES (151)..(152): Any amino acid
  MOD_RES (154)..(158): Any amino acid
  MOD_RES (167)..(169): Any amino acid
  MOD_RES (171)..(177): Any amino acid
  MOD_RES (179)..(180): Any amino acid
  MOD_RES (182)..(186): Any amino acid
  MOD_RES (195)..(197): Any amino acid
  MOD_RES (199)..(209): Any amino acid
XXXXXXXXXCXXCXXXXXTHLDLIRHXXXHXXXXXXXCXXCXXXXXRSDDLVRHXXXHXXXXXXXCXXCXXXXXTTGNLTVHXXXHXXXXXXXCXXCXXXXXRSDNLVRHXXXHXXXXXXXCXXCXXXXXRSDHLTNHXXXHXXXXXXXCXXCXXXXXDPGHLVRHXXXHXXXXXXXCXXCXXXXXQRAHLERHXXXHXXXXXXXXXXX

SEQ ID NO: 2197 - protein, 209 aa, Artificial Sequence
  source: /note="Description of Artificial Sequence: Synthetic polypeptide"
  MOD_RES (1)..(9): Any amino acid
  MOD_RES (11)..(12): Any amino acid
  MOD_RES (14)..(18): Any amino acid
  MOD_RES (27)..(29): Any amino acid
  MOD_RES (31)..(37): Any amino acid
  MOD_RES (39)..(40): Any amino acid
  MOD_RES (42)..(46): Any amino acid
  MOD_RES (55)..(57): Any amino acid
  MOD_RES (59)..(65): Any amino acid
  MOD_RES (67)..(68): Any amino acid
  MOD_RES (70)..(74): Any amino acid
  MOD_RES (83)..(85): Any amino acid
  MOD_RES (87)..(93): Any amino acid
  MOD_RES (95)..(96): Any amino acid
  MOD_RES (98)..(102): Any amino acid
  MOD_RES (111)..(113): Any amino acid
  MOD_RES (115)..(121): Any amino acid
  MOD_RES (123)..(124): Any amino acid
  MOD_RES (126)..(130): Any amino acid
  MOD_RES (139)..(141): Any amino acid
  MOD_RES (143)..(149): Any amino acid
  MOD_RES (151)..(152): Any amino acid
  MOD_RES (154)..(158): Any amino acid
  MOD_RES (167)..(169): Any amino acid
  MOD_RES (171)..(177): Any amino acid
  MOD_RES (179)..(180): Any amino acid
  MOD_RES (182)..(186): Any amino acid
  MOD_RES (195)..(197): Any amino acid
  MOD_RES (199)..(209): Any amino acid
XXXXXXXXXCXXCXXXXXRSDKLVRHXXXHXXXXXXXCXXCXXXXXHRTTLTNHXXXHXXXXXXXCXXCXXXXXDPGHLVRHXXXHXXXXXXXCXXCXXXXXQRAHLERHXXXHXXXXXXXCXXCXXXXXQRAHLERHXXXHXXXXXXXCXXCXXXXXRNDALTEHXXXHXXXXXXXCXXCXXXXXQSGDLRRHXXXHXXXXXXXXXXX

SEQ ID NO: 2198 - protein, 209 aa, Artificial Sequence
  source: /note="Description of Artificial Sequence: Synthetic polypeptide"
  MOD_RES (1)..(9): Any amino acid
  MOD_RES (11)..(12): Any amino acid
  MOD_RES (14)..(18): Any amino acid
  MOD_RES (27)..(29): Any amino acid
  MOD_RES (31)..(37): Any amino acid
  MOD_RES (39)..(40): Any amino acid
  MOD_RES (42)..(46): Any amino acid
  MOD_RES (55)..(57): Any amino acid
  MOD_RES (59)..(65): Any amino acid
  MOD_RES (67)..(68): Any amino acid
  MOD_RES (70)..(74): Any amino acid
  MOD_RES (83)..(85): Any amino acid
  MOD_RES (87)..(93): Any amino acid
  MOD_RES (95)..(96): Any amino acid
  MOD_RES (98)..(102): Any amino acid
  MOD_RES (111)..(113): Any amino acid
  MOD_RES (115)..(121): Any amino acid
  MOD_RES (123)..(124): Any amino acid
  MOD_RES (126)..(130): Any amino acid
  MOD_RES (139)..(141): Any amino acid
  MOD_RES (143)..(149): Any amino acid
  MOD_RES (151)..(152): Any amino acid
  MOD_RES (154)..(158): Any amino acid
  MOD_RES (167)..(169): Any amino acid
  MOD_RES (171)..(177): Any amino acid
  MOD_RES (179)..(180): Any amino acid
  MOD_RES (182)..(186): Any amino acid
  MOD_RES (195)..(197): Any amino acid
  MOD_RES (199)..(209): Any amino acid
XXXXXXXXXCXXCXXXXXRSDNLVRHXXXHXXXXXXXCXXCXXXXXRSDDLVRHXXXHXXXXXXXCXXCXXXXXRSDHLTNHXXXHXXXXXXXCXXCXXXXXRSDKLVRHXXXHXXXXXXXCXXCXXXXXHRTTLTNHXXXHXXXXXXXCXXCXXXXXDPGHLVRHXXXHXXXXXXXCXXCXXXXXQRAHLERHXXXHXXXXXXXXXXX

SEQ ID NO: 2199 - protein, 209 aa, Artificial Sequence
  source: /note="Description of Artificial Sequence: Synthetic polypeptide"
  MOD_RES (1)..(9): Any amino acid
  MOD_RES (11)..(12): Any amino acid
  MOD_RES (14)..(18): Any amino acid
  MOD_RES (27)..(29): Any amino acid
  MOD_RES (31)..(37): Any amino acid
  MOD_RES (39)..(40): Any amino acid
  MOD_RES (42)..(46): Any amino acid
  MOD_RES (55)..(57): Any amino acid
  MOD_RES (59)..(65): Any amino acid
  MOD_RES (67)..(68): Any amino acid
  MOD_RES (70)..(74): Any amino acid
  MOD_RES (83)..(85): Any amino acid
  MOD_RES (87)..(93): Any amino acid
  MOD_RES (95)..(96): Any amino acid
  MOD_RES (98)..(102): Any amino acid
  MOD_RES (111)..(113): Any amino acid
  MOD_RES (115)..(121): Any amino acid
  MOD_RES (123)..(124): Any amino acid
  MOD_RES (126)..(130): Any amino acid
  MOD_RES (139)..(141): Any amino acid
  MOD_RES (143)..(149): Any amino acid
  MOD_RES (151)..(152): Any amino acid
  MOD_RES (154)..(158): Any amino acid
  MOD_RES (167)..(169): Any amino acid
  MOD_RES (171)..(177): Any amino acid
  MOD_RES (179)..(180): Any amino acid
  MOD_RES (182)..(186): Any amino acid
  MOD_RES (195)..(197): Any amino acid
  MOD_RES (199)..(209): Any amino acid
XXXXXXXXXCXXCXXXXXHRTTLTNHXXXHXXXXXXXCXXCXXXXXDPGHLVRHXXXHXXXXXXXCXXCXXXXXQRAHLERHXXXHXXXXXXXCXXCXXXXXQRAHLERHXXXHXXXXXXXCXXCXXXXXRNDALTEHXXXHXXXXXXXCXXCXXXXXQSGDLRRHXXXHXXXXXXXCXXCXXXXXRSDHLTNHXXXHXXXXXXXXXXX

SEQ ID NO: 2200 - protein, 209 aa, Artificial Sequence
  source: /note="Description of Artificial Sequence: Synthetic polypeptide"
  MOD_RES (1)..(9): Any amino acid
  MOD_RES (11)..(12): Any amino acid
  MOD_RES (14)..(18): Any amino acid
  MOD_RES (27)..(29): Any amino acid
  MOD_RES (31)..(37): Any amino acid
  MOD_RES (39)..(40): Any amino acid
  MOD_RES (42)..(46): Any amino acid
  MOD_RES (55)..(57): Any amino acid
  MOD_RES (59)..(65): Any amino acid
  MOD_RES (67)..(68): Any amino acid
  MOD_RES (70)..(74): Any amino acid
  MOD_RES (83)..(85): Any amino acid
  MOD_RES (87)..(93): Any amino acid
  MOD_RES (95)..(96): Any amino acid
  MOD_RES (98)..(102): Any amino acid
  MOD_RES (111)..(113): Any amino acid
  MOD_RES (115)..(121): Any amino acid
  MOD_RES (123)..(124): Any amino acid
  MOD_RES (126)..(130): Any amino acid
  MOD_RES (139)..(141): Any amino acid
  MOD_RES (143)..(149): Any amino acid
  MOD_RES (151)..(152): Any amino acid
  MOD_RES (154)..(158): Any amino acid
  MOD_RES (167)..(169): Any amino acid
  MOD_RES (171)..(177): Any amino acid
  MOD_RES (179)..(180): Any amino acid
  MOD_RES (182)..(186): Any amino acid
  MOD_RES (195)..(197): Any amino acid
  MOD_RES (199)..(209): Any amino acid
XXXXXXXXXCXXCXXXXXRSDHLTNHXXXHXXXXXXXCXXCXXXXXRSDKLVRHXXXHXXXXXXXCXXCXXXXXHRTTLTNHXXXHXXXXXXXCXXCXXXXXDPGHLVRHXXXHXXXXXXXCXXCXXXXXQRAHLERHXXXHXXXXXXXCXXCXXXXXQRAHLERHXXXHXXXXXXXCXXCXXXXXRNDALTEHXXXHXXXXXXXXXXX

SEQ ID NO: 2201 - protein, 209 aa, Artificial Sequence
  source: /note="Description of Artificial Sequence: Synthetic polypeptide"
  MOD_RES (1)..(9): Any amino acid
  MOD_RES (11)..(12): Any amino acid
  MOD_RES (14)..(18): Any amino acid
  MOD_RES (27)..(29): Any amino acid
  MOD_RES (31)..(37): Any amino acid
  MOD_RES (39)..(40): Any amino acid
  MOD_RES (42)..(46): Any amino acid
  MOD_RES (55)..(57): Any amino acid
  MOD_RES (59)..(65): Any amino acid
  MOD_RES (67)..(68): Any amino acid
  MOD_RES (70)..(74): Any amino acid
  MOD_RES (83)..(85): Any amino acid
  MOD_RES (87)..(93): Any amino acid
  MOD_RES (95)..(96): Any amino acid
  MOD_RES (98)..(102): Any amino acid
  MOD_RES (111)..(113): Any amino acid
  MOD_RES (115)..(121): Any amino acid
  MOD_RES (123)..(124): Any amino acid
  MOD_RES (126)..(130): Any amino acid
  MOD_RES (139)..(141): Any amino acid
  MOD_RES (143)..(149): Any amino acid
  MOD_RES (151)..(152): Any amino acid
  MOD_RES (154)..(158): Any amino acid
  MOD_RES (167)..(169): Any amino acid
  MOD_RES (171)..(177): Any amino acid
  MOD_RES (179)..(180): Any amino acid
  MOD_RES (182)..(186): Any amino acid
  MOD_RES (195)..(197): Any amino acid
  MOD_RES (199)..(209): Any amino acid
XXXXXXXXXCXXCXXXXXDPGHLVRHXXXHXXXXXXXCXXCXXXXXREDNLHTHXXXHXXXXXXXCXXCXXXXXRSDKLVRHXXXHXXXXXXXCXXCXXXXXTSHSLTEHXXXHXXXXXXXCXXCXXXXXHTGHLLEHXXXHXXXXXXXCXXCXXXXXRSDKLVRHXXXHXXXXXXXCXXCXXXXXTSGHLVRHXXXHXXXXXXXXXXX

SEQ ID NO: 2202 - protein, 209 aa, Artificial Sequence
  source: /note="Description of Artificial Sequence: Synthetic polypeptide"
  MOD_RES (1)..(9): Any amino acid
  MOD_RES (11)..(12): Any amino acid
  MOD_RES (14)..(18): Any amino acid
  MOD_RES (27)..(29): Any amino acid
  MOD_RES (31)..(37): Any amino acid
  MOD_RES (39)..(40): Any amino acid
  MOD_RES (42)..(46): Any amino acid
  MOD_RES (55)..(57): Any amino acid
  MOD_RES (59)..(65): Any amino acid
  MOD_RES (67)..(68): Any amino acid
  MOD_RES (70)..(74): Any amino acid
  MOD_RES (83)..(85): Any amino acid
  MOD_RES (87)..(93): Any amino acid
  MOD_RES (95)..(96): Any amino acid
  MOD_RES (98)..(102): Any amino acid
  MOD_RES (111)..(113): Any amino acid
  MOD_RES (115)..(121): Any amino acid
  MOD_RES (123)..(124): Any amino acid
  MOD_RES (126)..(130): Any amino acid
  MOD_RES (139)..(141): Any amino acid
  MOD_RES (143)..(149): Any amino acid
  MOD_RES (151)..(152): Any amino acid
  MOD_RES (154)..(158): Any amino acid
  MOD_RES (167)..(169): Any amino acid
  MOD_RES (171)..(177): Any amino acid
  MOD_RES (179)..(180): Any amino acid
  MOD_RES (182)..(186): Any amino acid
  MOD_RES (195)..(197): Any amino acid
  MOD_RES (199)..(209): Any amino acid
XXXXXXXXXCXXCXXXXXREDNLHTHXXXHXXXXXXXCXXCXXXXXRSDKLVRHXXXHXXXXXXXCXXCXXXXXTSHSLTEHXXXHXXXXXXXCXXCXXXXXHTGHLLEHXXXHXXXXXXXCXXCXXXXXRSDKLVRHXXXHXXXXXXXCXXCXXXXXTSGHLVRHXXXHXXXXXXXCXXCXXXXXRSDKLTEHXXXHXXXXXXXXXXX

SEQ ID NO: 2203 - protein, 209 aa, Artificial Sequence
  source: /note="Description of Artificial Sequence: Synthetic polypeptide"
  MOD_RES (1)..(9): Any amino acid
  MOD_RES (11)..(12): Any amino acid
  MOD_RES (14)..(18): Any amino acid
  MOD_RES (27)..(29): Any amino acid
  MOD_RES (31)..(37): Any amino acid
  MOD_RES (39)..(40): Any amino acid
  MOD_RES (42)..(46): Any amino acid
  MOD_RES (55)..(57): Any amino acid
  MOD_RES (59)..(65): Any amino acid
  MOD_RES (67)..(68): Any amino acid
  MOD_RES (70)..(74): Any amino acid
  MOD_RES (83)..(85): Any amino acid
  MOD_RES (87)..(93): Any amino acid
  MOD_RES (95)..(96): Any amino acid
  MOD_RES (98)..(102): Any amino acid
  MOD_RES (111)..(113): Any amino acid
  MOD_RES (115)..(121): Any amino acid
  MOD_RES (123)..(124): Any amino acid
  MOD_RES (126)..(130): Any amino acid
  MOD_RES (139)..(141): Any amino acid
  MOD_RES (143)..(149): Any amino acid
  MOD_RES (151)..(152): Any amino acid
  MOD_RES (154)..(158): Any amino acid
  MOD_RES (167)..(169): Any amino acid
  MOD_RES (171)..(177): Any amino acid
  MOD_RES (179)..(180): Any amino acid
  MOD_RES (182)..(186): Any amino acid
  MOD_RES (195)..(197): Any amino acid
  MOD_RES (199)..(209): Any amino acid
XXXXXXXXXCXXCXXXXXRSDKLVRHXXXHXXXXXXXCXXCXXXXXTSGHLVRHXXXHXXXXXXXCXXCXXXXXRSDKLTEHXXXHXXXXXXXCXXCXXXXXTTGALTEHXXXHXXXXXXXCXXCXXXXXDPGHLVRHXXXHXXXXXXXCXXCXXXXXRSDKLVRHXXXHXXXXXXXCXXCXXXXXDPGHLVRHXXXHXXXXXXXXXXX

SEQ ID NO: 2204 - protein, 209 aa, Artificial Sequence
  source: /note="Description of Artificial Sequence: Synthetic polypeptide"
  MOD_RES (1)..(9): Any amino acid
  MOD_RES (11)..(12): Any amino acid
  MOD_RES (14)..(18): Any amino acid
  MOD_RES (27)..(29): Any amino acid
  MOD_RES (31)..(37): Any amino acid
  MOD_RES (39)..(40): Any amino acid
  MOD_RES (42)..(46): Any amino acid
  MOD_RES (55)..(57): Any amino acid
  MOD_RES (59)..(65): Any amino acid
  MOD_RES (67)..(68): Any amino acid
  MOD_RES (70)..(74): Any amino acid
  MOD_RES (83)..(85): Any amino acid
  MOD_RES (87)..(93): Any amino acid
  MOD_RES (95)..(96): Any amino acid
  MOD_RES (98)..(102): Any amino acid
  MOD_RES (111)..(113): Any amino acid
  MOD_RES (115)..(121): Any amino acid
  MOD_RES (123)..(124): Any amino acid
  MOD_RES (126)..(130): Any amino acid
  MOD_RES (139)..(141): Any amino acid
  MOD_RES (143)..(149): Any amino acid
  MOD_RES (151)..(152): Any amino acid
  MOD_RES (154)..(158): Any amino acid
  MOD_RES (167)..(169): Any amino acid
  MOD_RES (171)..(177): Any amino acid
  MOD_RES (179)..(180): Any amino acid
  MOD_RES (182)..(186): Any amino acid
  MOD_RES (195)..(197): Any amino acid
  MOD_RES (199)..(209): Any amino acid
XXXXXXXXXCXXCXXXXXTSGHLVRHXXXHXXXXXXXCXXCXXXXXRSDKLTEHXXXHXXXXXXXCXXCXXXXXTTGALTEHXXXHXXXXXXXCXXCXXXXXDPGHLVRHXXXHXXXXXXXCXXCXXXXXRSDKLVRHXXXHXXXXXXXCXXCXXXXXDPGHLVRHXXXHXXXXXXXCXXCXXXXXRSDNLVRHXXXHXXXXXXXXXXX

SEQ ID NO: 2205 - protein, 209 aa, Artificial Sequence
  source: /note="Description of Artificial Sequence: Synthetic polypeptide"
  MOD_RES (1)..(9): Any amino acid
  MOD_RES (11)..(12): Any amino acid
  MOD_RES (14)..(18): Any amino acid
  MOD_RES (27)..(29): Any amino acid
  MOD_RES (31)..(37): Any amino acid
  MOD_RES (39)..(40): Any amino acid
  MOD_RES (42)..(46): Any amino acid
  MOD_RES (55)..(57): Any amino acid
  MOD_RES (59)..(65): Any amino acid
  MOD_RES (67)..(68): Any amino acid
  MOD_RES (70)..(74): Any amino acid
  MOD_RES (83)..(85): Any amino acid
  MOD_RES (87)..(93): Any amino acid
  MOD_RES (95)..(96): Any amino acid
  MOD_RES (98)..(102): Any amino acid
  MOD_RES (111)..(113): Any amino acid
  MOD_RES (115)..(121): Any amino acid
  MOD_RES (123)..(124): Any amino acid
  MOD_RES (126)..(130): Any amino acid
  MOD_RES (139)..(141): Any amino acid
  MOD_RES (143)..(149): Any amino acid
  MOD_RES (151)..(152): Any amino acid
  MOD_RES (154)..(158): Any amino acid
  MOD_RES (167)..(169): Any amino acid
  MOD_RES (171)..(177): Any amino acid
  MOD_RES (179)..(180): Any amino acid
  MOD_RES (182)..(186): Any amino acid
  MOD_RES (195)..(197): Any amino acid
  MOD_RES (199)..(209): Any amino acid
XXXXXXXXXCXXCXXXXXHTGHLLEHXXXHXXXXXXXCXXCXXXXXRSDKLVRHXXXHXXXXXXXCXXCXXXXXTSGHLVRHXXXHXXXXXXXCXXCXXXXXRSDKLTEHXXXHXXXXXXXCXXCXXXXXTTGALTEHXXXHXXXXXXXCXXCXXXXXDPGHLVRHXXXHXXXXXXXCXXCXXXXXRSDKLVRHXXXHXXXXXXXXXXX

SEQ ID NO: 2206 - protein, 209 aa, Artificial Sequence
  source: /note="Description of Artificial Sequence: Synthetic polypeptide"
  MOD_RES (1)..(9): Any amino acid
  MOD_RES (11)..(12): Any amino acid
  MOD_RES (14)..(18): Any amino acid
  MOD_RES (27)..(29): Any amino acid
  MOD_RES (31)..(37): Any amino acid
  MOD_RES (39)..(40): Any amino acid
  MOD_RES (42)..(46): Any amino acid
  MOD_RES (55)..(57): Any amino acid
  MOD_RES (59)..(65): Any amino acid
  MOD_RES (67)..(68): Any amino acid
  MOD_RES (70)..(74): Any amino acid
  MOD_RES (83)..(85): Any amino acid
  MOD_RES (87)..(93): Any amino acid
  MOD_RES (95)..(96): Any amino acid
  MOD_RES (98)..(102): Any amino acid
  MOD_RES (111)..(113): Any amino acid
  MOD_RES (115)..(121): Any amino acid
  MOD_RES (123)..(124): Any amino acid
  MOD_RES (126)..(130): Any amino acid
  MOD_RES (139)..(141): Any amino acid
  MOD_RES (143)..(149): Any amino acid
  MOD_RES (151)..(152): Any amino acid
  MOD_RES (154)..(158): Any amino acid
  MOD_RES (167)..(169): Any amino acid
  MOD_RES (171)..(177): Any amino acid
  MOD_RES (179)..(180): Any amino acid
  MOD_RES (182)..(186): Any amino acid
  MOD_RES (195)..(197): Any amino acid
  MOD_RES (199)..(209): Any amino acid
XXXXXXXXXCXXCXXXXXRSDDLVRHXXXHXXXXXXXCXXCXXXXXRSDHLTNHXXXHXXXXXXXCXXCXXXXXRSDKLVRHXXXHXXXXXXXCXXCXXXXXHRTTLTNHXXXHXXXXXXXCXXCXXXXXDPGHLVRHXXXHXXXXXXXCXXCXXXXXQRAHLERHXXXHXXXXXXXCXXCXXXXXQRAHLERHXXXHXXXXXXXXXXX

SEQ ID NO: 2207 - protein, 209 aa, Artificial Sequence
  source: /note="Description of Artificial Sequence: Synthetic polypeptide"
  MOD_RES (1)..(9): Any amino acid
  MOD_RES (11)..(12): Any amino acid
  MOD_RES (14)..(18): Any amino acid
  MOD_RES (27)..(29): Any amino acid
  MOD_RES (31)..(37): Any amino acid
  MOD_RES (39)..(40): Any amino acid
  MOD_RES (42)..(46): Any amino acid
  MOD_RES (55)..(57): Any amino acid
  MOD_RES (59)..(65): Any amino acid
  MOD_RES (67)..(68): Any amino acid
  MOD_RES (70)..(74): Any amino acid
  MOD_RES (83)..(85): Any amino acid
  MOD_RES (87)..(93): Any amino acid
  MOD_RES (95)..(96): Any amino acid
  MOD_RES (98)..(102): Any amino acid
  MOD_RES (111)..(113): Any amino acid
  MOD_RES (115)..(121): Any amino acid
  MOD_RES (123)..(124): Any amino acid
  MOD_RES (126)..(130): Any amino acid
  MOD_RES (139)..(141): Any amino acid
  MOD_RES (143)..(149): Any amino acid
  MOD_RES (151)..(152): Any amino acid
  MOD_RES (154)..(158): Any amino acid
  MOD_RES (167)..(169): Any amino acid
  MOD_RES (171)..(177): Any amino acid
  MOD_RES (179)..(180): Any amino acid
  MOD_RES (182)..(186): Any amino acid
  MOD_RES (195)..(197): Any amino acid
  MOD_RES (199)..(209): Any amino acid
XXXXXXXXXCXXCXXXXXTSHSLTEHXXXHXXXXXXXCXXCXXXXXHTGHLLEHXXXHXXXXXXXCXXCXXXXXRSDKLVRHXXXHXXXXXXXCXXCXXXXXTSGHLVRHXXXHXXXXXXXCXXCXXXXXRSDKLTEHXXXHXXXXXXXCXXCXXXXXTTGALTEHXXXHXXXXXXXCXXCXXXXXDPGHLVRHXXXHXXXXXXXXXXX

SEQ ID NO: 2208 - protein, 209 aa, Artificial Sequence
  source: /note="Description of Artificial Sequence: Synthetic polypeptide"
  MOD_RES (1)..(9): Any amino acid
  MOD_RES (11)..(12): Any amino acid
  MOD_RES (14)..(18): Any amino acid
  MOD_RES (27)..(29): Any amino acid
  MOD_RES (31)..(37): Any amino acid
  MOD_RES (39)..(40): Any amino acid
  MOD_RES (42)..(46): Any amino acid
  MOD_RES (55)..(57): Any amino acid
  MOD_RES (59)..(65): Any amino acid
  MOD_RES (67)..(68): Any amino acid
  MOD_RES (70)..(74): Any amino acid
  MOD_RES (83)..(85): Any amino acid
  MOD_RES (87)..(93): Any amino acid
  MOD_RES (95)..(96): Any amino acid
  MOD_RES (98)..(102): Any amino acid
  MOD_RES (111)..(113): Any amino acid
  MOD_RES (115)..(121): Any amino acid
  MOD_RES (123)..(124): Any amino acid
  MOD_RES (126)..(130): Any amino acid
  MOD_RES (139)..(141): Any amino acid
  MOD_RES (143)..(149): Any amino acid
  MOD_RES (151)..(152): Any amino acid
  MOD_RES (154)..(158): Any amino acid
  MOD_RES (167)..(169): Any amino acid
  MOD_RES (171)..(177): Any amino acid
  MOD_RES (179)..(180): Any amino acid
  MOD_RES (182)..(186): Any amino acid
  MOD_RES (195)..(197): Any amino acid
  MOD_RES (199)..(209): Any amino acid
XXXXXXXXXCXXCXXXXXRSDKLVRHXXXHXXXXXXXCXXCXXXXXTSHSLTEHXXXHXXXXXXXCXXCXXXXXHTGHLLEHXXXHXXXXXXXCXXCXXXXXRSDKLVRHXXXHXXXXXXXCXXCXXXXXTSGHLVRHXXXHXXXXXXXCXXCXXXXXRSDKLTEHXXXHXXXXXXXCXXCXXXXXTTGALTEHXXXHXXXXXXXXXXX

SEQ ID NO: 2209 - protein, 209 aa, Artificial Sequence
  source: /note="Description of Artificial Sequence: Synthetic polypeptide"
  MOD_RES (1)..(9): Any amino acid
  MOD_RES (11)..(12): Any amino acid
  MOD_RES (14)..(18): Any amino acid
  MOD_RES (27)..(29): Any amino acid
  MOD_RES (31)..(37): Any amino acid
  MOD_RES (39)..(40): Any amino acid
  MOD_RES (42)..(46): Any amino acid
  MOD_RES (55)..(57): Any amino acid
  MOD_RES (59)..(65): Any amino acid
  MOD_RES (67)..(68): Any amino acid
  MOD_RES (70)..(74): Any amino acid
  MOD_RES (83)..(85): Any amino acid
  MOD_RES (87)..(93): Any amino acid
  MOD_RES (95)..(96): Any amino acid
  MOD_RES (98)..(102): Any amino acid
  MOD_RES (111)..(113): Any amino acid
  MOD_RES (115)..(121): Any amino acid
  MOD_RES (123)..(124): Any amino acid
  MOD_RES (126)..(130): Any amino acid
  MOD_RES (139)..(141): Any amino acid
  MOD_RES (143)..(149): Any amino acid
  MOD_RES (151)..(152): Any amino acid
  MOD_RES (154)..(158): Any amino acid
  MOD_RES (167)..(169): Any amino acid
  MOD_RES (171)..(177): Any amino acid
  MOD_RES (179)..(180): Any amino acid
  MOD_RES (182)..(186): Any amino acid
  MOD_RES (195)..(197): Any amino acid
  MOD_RES (199)..(209): Any amino acid
XXXXXXXXXCXXCXXXXXRSDNLVRHXXXHXXXXXXXCXXCXXXXXRSDNLVRHXXXHXXXXXXXCXXCXXXXXRSDHLTTHXXXHXXXXXXXCXXCXXXXXSKKALTEHXXXHXXXXXXXCXXCXXXXXRSDKLVRHXXXHXXXXXXXCXXCXXXXXQLAHLRAHXXXHXXXXXXXCXXCXXXXXRADNLTEHXXXHXXXXXXXXXXX

SEQ ID NO: 2210 - protein, 209 aa, Artificial Sequence
  source: /note="Description of Artificial Sequence: Synthetic polypeptide"
  MOD_RES (1)..(9): Any amino acid
  MOD_RES (11)..(12): Any amino acid
  MOD_RES (14)..(18): Any amino acid
  MOD_RES (27)..(29): Any amino acid
  MOD_RES (31)..(37): Any amino acid
  MOD_RES (39)..(40): Any amino acid
  MOD_RES (42)..(46): Any amino acid
  MOD_RES (55)..(57): Any amino acid
  MOD_RES (59)..(65): Any amino acid
  MOD_RES (67)..(68): Any amino acid
  MOD_RES (70)..(74): Any amino acid
  MOD_RES (83)..(85): Any amino acid
  MOD_RES (87)..(93): Any amino acid
  MOD_RES (95)..(96): Any amino acid
  MOD_RES (98)..(102): Any amino acid
  MOD_RES (111)..(113): Any amino acid
  MOD_RES (115)..(121): Any amino acid
  MOD_RES (123)..(124): Any amino acid
  MOD_RES (126)..(130): Any amino acid
  MOD_RES (139)..(141): Any amino acid
  MOD_RES (143)..(149): Any amino acid
  MOD_RES (151)..(152): Any amino acid
  MOD_RES (154)..(158): Any amino acid
  MOD_RES (167)..(169): Any amino acid
  MOD_RES (171)..(177): Any amino acid
  MOD_RES (179)..(180): Any amino acid
  MOD_RES (182)..(186): Any amino acid
  MOD_RES (195)..(197): Any amino acid
  MOD_RES (199)..(209): Any amino acid
XXXXXXXXXCXXCXXXXXQSGDLRRHXXXHXXXXXXXCXXCXXXXXRSDNLVRHXXXHXXXXXXXCXXCXXXXXRSDNLVRHXXXHXXXXXXXCXXCXXXXXRSDHLTTHXXXHXXXXXXXCXXCXXXXXSKKALTEHXXXHXXXXXXXCXXCXXXXXRSDKLVRHXXXHXXXXXXXCXXCXXXXXQLAHLRAHXXXHXXXXXXXXXXX

SEQ ID NO: 2211 - protein, 209 aa, Artificial Sequence
  source: /note="Description of Artificial Sequence: Synthetic polypeptide"
  MOD_RES (1)..(9): Any amino acid
  MOD_RES (11)..(12): Any amino acid
  MOD_RES (14)..(18): Any amino acid
  MOD_RES (27)..(29): Any amino acid
  MOD_RES (31)..(37): Any amino acid
  MOD_RES (39)..(40): Any amino acid
  MOD_RES (42)..(46): Any amino acid
  MOD_RES (55)..(57): Any amino acid
  MOD_RES (59)..(65): Any amino acid
  MOD_RES (67)..(68): Any amino acid
  MOD_RES (70)..(74): Any amino acid
  MOD_RES (83)..(85): Any amino acid
  MOD_RES (87)..(93): Any amino acid
  MOD_RES (95)..(96): Any amino acid
  MOD_RES (98)..(102): Any amino acid
  MOD_RES (111)..(113): Any amino acid
  MOD_RES (115)..(121): Any amino acid
  MOD_RES (123)..(124): Any amino acid
  MOD_RES (126)..(130): Any amino acid
  MOD_RES (139)..(141): Any amino acid
  MOD_RES (143)..(149): Any amino acid
  MOD_RES (151)..(152): Any amino acid
  MOD_RES (154)..(158): Any amino acid
  MOD_RES (167)..(169): Any amino acid
  MOD_RES (171)..(177): Any amino acid
  MOD_RES (179)..(180): Any amino acid
  MOD_RES (182)..(186): Any amino acid
  MOD_RES (195)..(197): Any amino acid
  MOD_RES (199)..(209): Any amino acid
XXXXXXXXXCXXCXXXXXRSDELVRHXXXHXXXXXXXCXXCXXXXXQSGDLRRHXXXHXXXXXXXCXXCXXXXXRSDNLVRHXXXHXXXXXXXCXXCXXXXXRSDNLVRHXXXHXXXXXXXCXXCXXXXXRSDHLTTHXXXHXXXXXXXCXXCXXXXXSKKALTEHXXXHXXXXXXXCXXCXXXXXRSDKLVRHXXXHXXXXXXXXXXX

SEQ ID NO: 2212 - protein, 209 aa, Artificial Sequence
  source: /note="Description of Artificial Sequence: Synthetic polypeptide"
  MOD_RES (1)..(9): Any amino acid
  MOD_RES (11)..(12): Any amino acid
  MOD_RES (14)..(18): Any amino acid
  MOD_RES (27)..(29): Any amino acid
  MOD_RES (31)..(37): Any amino acid
  MOD_RES (39)..(40): Any amino acid
  MOD_RES (42)..(46): Any amino acid
  MOD_RES (55)..(57): Any amino acid
  MOD_RES (59)..(65): Any amino acid
  MOD_RES (67)..(68): Any amino acid
  MOD_RES (70)..(74): Any amino acid
  MOD_RES (83)..(85): Any amino acid
  MOD_RES (87)..(93): Any amino acid
  MOD_RES (95)..(96): Any amino acid
  MOD_RES (98)..(102): Any amino acid
  MOD_RES (111)..(113): Any amino acid
  MOD_RES (115)..(121): Any amino acid
  MOD_RES (123)..(124): Any amino acid
  MOD_RES (126)..(130): Any amino acid
  MOD_RES (139)..(141): Any amino acid
  MOD_RES (143)..(149): Any amino acid
  MOD_RES (151)..(152): Any amino acid
  MOD_RES (154)..(158): Any amino acid
  MOD_RES (167)..(169): Any amino acid
  MOD_RES (171)..(177): Any amino acid
  MOD_RES (179)..(180): Any amino acid
  MOD_RES (182)..(186): Any amino acid
  MOD_RES (195)..(197): Any amino acid
  MOD_RES (199)..(209): Any amino acid
XXXXXXXXXCXXCXXXXXRSDNLVRHXXXHXXXXXXXCXXCXXXXXRSDHLTTHXXXHXXXXXXXCXXCXXXXXSKKALTEHXXXHXXXXXXXCXXCXXXXXRSDKLVRHXXXHXXXXXXXCXXCXXXXXQLAHLRAHXXXHXXXXXXXCXXCXXXXXRADNLTEHXXXHXXXXXXXCXXCXXXXXRSDHLTNHXXXHXXXXXXXXXXX

SEQ ID NO: 2213 - protein, 209 aa, Artificial Sequence
  source: /note="Description of Artificial Sequence: Synthetic polypeptide"
  MOD_RES (1)..(9): Any amino acid
  MOD_RES (11)..(12): Any amino acid
  MOD_RES (14)..(18): Any amino acid
  MOD_RES (27)..(29): Any amino acid
  MOD_RES (31)..(37): Any amino acid
  MOD_RES (39)..(40): Any amino acid
  MOD_RES (42)..(46): Any amino acid
  MOD_RES (55)..(57): Any amino acid
  MOD_RES (59)..(65): Any amino acid
  MOD_RES (67)..(68): Any amino acid
  MOD_RES (70)..(74): Any amino acid
  MOD_RES (83)..(85): Any amino acid
  MOD_RES (87)..(93): Any amino acid
  MOD_RES (95)..(96): Any amino acid
  MOD_RES (98)..(102): Any amino acid
  MOD_RES (111)..(113): Any amino acid
  MOD_RES (115)..(121): Any amino acid
  MOD_RES (123)..(124): Any amino acid
  MOD_RES (126)..(130): Any amino acid
  MOD_RES (139)..(141): Any amino acid
  MOD_RES (143)..(149): Any amino acid
  MOD_RES (151)..(152): Any amino acid
  MOD_RES (154)..(158): Any amino acid
  MOD_RES (167)..(169): Any amino acid
  MOD_RES (171)..(177): Any amino acid
  MOD_RES (179)..(180): Any amino acid
  MOD_RES (182)..(186): Any amino acid
  MOD_RES (195)..(197): Any amino acid
  MOD_RES (199)..(209): Any amino acid
XXXXXXXXXCXXCXXXXXRSDKLTEHXXXHXXXXXXXCXXCXXXXXRSDKLVRHXXXHXXXXXXXCXXCXXXXXQRAHLERHXXXHXXXXXXXCXXCXXXXXRSDELVRHXXXHXXXXXXXCXXCXXXXXQSGDLRRHXXXHXXXXXXXCXXCXXXXXRSDNLVRHXXXHXXXXXXXCXXCXXXXXRSDNLVRHXXXHXXXXXXXXXXX

SEQ ID NO: 2214 - protein, 209 aa, Artificial Sequence
  source: /note="Description of Artificial Sequence: Synthetic polypeptide"
  MOD_RES (1)..(9): Any amino acid
  MOD_RES (11)..(12): Any amino acid
  MOD_RES (14)..(18): Any amino acid
  MOD_RES (27)..(29): Any amino acid
  MOD_RES (31)..(37): Any amino acid
  MOD_RES (39)..(40): Any amino acid
  MOD_RES (42)..(46): Any amino acid
  MOD_RES (55)..(57): Any amino acid
  MOD_RES (59)..(65): Any amino acid
  MOD_RES (67)..(68): Any amino acid
  MOD_RES (70)..(74): Any amino acid
  MOD_RES (83)..(85): Any amino acid
  MOD_RES (87)..(93): Any amino acid
  MOD_RES (95)..(96): Any amino acid
  MOD_RES (98)..(102): Any amino acid
  MOD_RES (111)..(113): Any amino acid
  MOD_RES (115)..(121): Any amino acid
  MOD_RES (123)..(124): Any amino acid
  MOD_RES (126)..(130): Any amino acid
  MOD_RES (139)..(141): Any amino acid
  MOD_RES (143)..(149): Any amino acid
  MOD_RES (151)..(152): Any amino acid
  MOD_RES (154)..(158): Any amino acid
  MOD_RES (167)..(169): Any amino acid
  MOD_RES (171)..(177): Any amino acid
  MOD_RES (179)..(180): Any amino acid
  MOD_RES (182)..(186): Any amino acid
  MOD_RES (195)..(197): Any amino acid
  MOD_RES (199)..(209): Any amino acid
XXXXXXXXXCXXCXXXXXRSDKLVRHXXXHXXXXXXXCXXCXXXXXQRAHLERHXXXHXXXXXXXCXXCXXXXXRSDELVRHXXXHXXXXXXXCXXCXXXXXQSGDLRRHXXXHXXXXXXXCXXCXXXXXRSDNLVRHXXXHXXXXXXXCXXCXXXXXRSDNLVRHXXXHXXXXXXXCXXCXXXXXRSDHLTTHXXXHXXXXXXXXXXX

SEQ ID NO: 2215 - protein, 209 aa, Artificial Sequence
  source: /note="Description of Artificial Sequence: Synthetic polypeptide"
  MOD_RES (1)..(9): Any amino acid
  MOD_RES (11)..(12): Any amino acid
  MOD_RES (14)..(18): Any amino acid
  MOD_RES (27)..(29): Any amino acid
  MOD_RES (31)..(37): Any amino acid
  MOD_RES (39)..(40): Any amino acid
  MOD_RES (42)..(46): Any amino acid
  MOD_RES (55)..(57): Any amino acid
  MOD_RES (59)..(65): Any amino acid
  MOD_RES (67)..(68): Any amino acid
  MOD_RES (70)..(74): Any amino acid
  MOD_RES (83)..(85): Any amino acid
  MOD_RES (87)..(93): Any amino acid
  MOD_RES (95)..(96): Any amino acid
  MOD_RES (98)..(102): Any amino acid
  MOD_RES (111)..(113): Any amino acid
  MOD_RES (115)..(121): Any amino acid
  MOD_RES (123)..(124): Any amino acid
  MOD_RES (126)..(130): Any amino acid
  MOD_RES (139)..(141): Any amino acid
  MOD_RES (143)..(149): Any amino acid
  MOD_RES (151)..(152): Any amino acid
  MOD_RES (154)..(158): Any amino acid
  MOD_RES (167)..(169): Any amino acid
  MOD_RES (171)..(177): Any amino acid
  MOD_RES (179)..(180): Any amino acid
  MOD_RES (182)..(186): Any amino acid
  MOD_RES (195)..(197): Any amino acid
  MOD_RES (199)..(209): Any amino acid
XXXXXXXXXCXXCXXXXXRSDHLTNHXXXHXXXXXXXCXXCXXXXXRSDKLTEHXXXHXXXXXXXCXXCXXXXXRSDKLVRHXXXHXXXXXXXCXXCXXXXXQRAHLERHXXXHXXXXXXXCXXCXXXXXRSDELVRHXXXHXXXXXXXCXXCXXXXXQSGDLRRHXXXHXXXXXXXCXXCXXXXXRSDNLVRHXXXHXXXXXXXXXXX

SEQ ID NO: 2216 - protein, 209 aa, Artificial Sequence
  source: /note="Description of Artificial Sequence: Synthetic polypeptide"
  MOD_RES (1)..(9): Any amino acid
  MOD_RES (11)..(12): Any amino acid
  MOD_RES (14)..(18): Any amino acid
  MOD_RES (27)..(29): Any amino acid
  MOD_RES (31)..(37): Any amino acid
  MOD_RES (39)..(40): Any amino acid
  MOD_RES (42)..(46): Any amino acid
  MOD_RES (55)..(57): Any amino acid
  MOD_RES (59)..(65): Any amino acid
  MOD_RES (67)..(68): Any amino acid
  MOD_RES (70)..(74): Any amino acid
  MOD_RES (83)..(85): Any amino acid
  MOD_RES (87)..(93): Any amino acid
  MOD_RES (95)..(96): Any amino acid
  MOD_RES (98)..(102): Any amino acid
  MOD_RES (111)..(113): Any amino acid
  MOD_RES (115)..(121): Any amino acid
  MOD_RES (123)..(124): Any amino acid
  MOD_RES (126)..(130): Any amino acid
  MOD_RES (139)..(141): Any amino acid
  MOD_RES (143)..(149): Any amino acid
  MOD_RES (151)..(152): Any amino acid
  MOD_RES (154)..(158): Any amino acid
  MOD_RES (167)..(169): Any amino acid
  MOD_RES (171)..(177): Any amino acid
  MOD_RES (179)..(180): Any amino acid
  MOD_RES (182)..(186): Any amino acid
  MOD_RES (195)..(197): Any amino acid
  MOD_RES (199)..(209): Any amino acid
XXXXXXXXXCXXCXXXXXQRAHLERHXXXHXXXXXXXCXXCXXXXXRSDELVRHXXXHXXXXXXXCXXCXXXXXQSGDLRRHXXXHXXXXXXXCXXCXXXXXRSDNLVRHXXXHXXXXXXXCXXCXXXXXRSDNLVRHXXXHXXXXXXXCXXCXXXXXRSDHLTTHXXXHXXXXXXXCXXCXXXXXSKKALTEHXXXHXXXXXXXXXXX

SEQ ID NO: 2217 - protein, 209 aa, Artificial Sequence
  source: /note="Description of Artificial Sequence: Synthetic polypeptide"
  MOD_RES (1)..(9): Any amino acid
  MOD_RES (11)..(12): Any amino acid
  MOD_RES (14)..(18): Any amino acid
  MOD_RES (27)..(29): Any amino acid
  MOD_RES (31)..(37): Any amino acid
  MOD_RES (39)..(40): Any amino acid
  MOD_RES (42)..(46): Any amino acid
  MOD_RES (55)..(57): Any amino acid
  MOD_RES (59)..(65): Any amino acid
  MOD_RES (67)..(68): Any amino acid
  MOD_RES (70)..(74): Any amino acid
  MOD_RES (83)..(85): Any amino acid
  MOD_RES (87)..(93): Any amino acid
  MOD_RES (95)..(96): Any amino acid
  MOD_RES (98)..(102): Any amino acid
  MOD_RES (111)..(113): Any amino acid
  MOD_RES (115)..(121): Any amino acid
  MOD_RES (123)..(124): Any amino acid
  MOD_RES (126)..(130): Any amino acid
  MOD_RES (139)..(141): Any amino acid
  MOD_RES (143)..(149): Any amino acid
  MOD_RES (151)..(152): Any amino acid
  MOD_RES (154)..(158): Any amino acid
  MOD_RES (167)..(169): Any amino acid
  MOD_RES (171)..(177): Any amino acid
  MOD_RES (179)..(180): Any amino acid
  MOD_RES (182)..(186): Any amino acid
  MOD_RES (195)..(197): Any amino acid
  MOD_RES (199)..(209): Any amino acid
XXXXXXXXXCXXCXXXXXSKKALTEHXXXHXXXXXXXCXXCXXXXXRSDKLVRHXXXHXXXXXXXCXXCXXXXXQLAHLRAHXXXHXXXXXXXCXXCXXXXXRADNLTEHXXXHXXXXXXXCXXCXXXXXRSDHLTNHXXXHXXXXXXXCXXCXXXXXQRAHLERHXXXHXXXXXXXCXXCXXXXXQRANLRAHXXXHXXXXXXXXXXX

SEQ ID NO: 2218 - protein, 209 aa, Artificial Sequence
  source: /note="Description of Artificial Sequence: Synthetic polypeptide"
  MOD_RES (1)..(9): Any amino acid
  MOD_RES (11)..(12): Any amino acid
  MOD_RES (14)..(18): Any amino acid
  MOD_RES (27)..(29): Any amino acid
  MOD_RES (31)..(37): Any amino acid
  MOD_RES (39)..(40): Any amino acid
  MOD_RES (42)..(46): Any amino acid
  MOD_RES (55)..(57): Any amino acid
  MOD_RES (59)..(65): Any amino acid
  MOD_RES (67)..(68): Any amino acid
  MOD_RES (70)..(74): Any amino acid
  MOD_RES (83)..(85): Any amino acid
  MOD_RES (87)..(93): Any amino acid
  MOD_RES (95)..(96): Any amino acid
  MOD_RES (98)..(102): Any amino acid
  MOD_RES (111)..(113): Any amino acid
  MOD_RES (115)..(121): Any amino acid
  MOD_RES (123)..(124): Any amino acid
  MOD_RES (126)..(130): Any amino acid
  MOD_RES (139)..(141): Any amino acid
  MOD_RES (143)..(149): Any amino acid
  MOD_RES (151)..(152): Any amino acid
  MOD_RES (154)..(158): Any amino acid
  MOD_RES (167)..(169): Any amino acid
  MOD_RES (171)..(177): Any amino acid
  MOD_RES (179)..(180): Any amino acid
  MOD_RES (182)..(186): Any amino acid
  MOD_RES (195)..(197): Any amino acid
  MOD_RES (199)..(209): Any amino acid
XXXXXXXXXCXXCXXXXXRSDHLTTHXXXHXXXXXXXCXXCXXXXXSKKALTEHXXXHXXXXXXXCXXCXXXXXRSDKLVRHXXXHXXXXXXXCXXCXXXXXQLAHLRAHXXXHXXXXXXXCXXCXXXXXRADNLTEHXXXHXXXXXXXCXXCXXXXXRSDHLTNHXXXHXXXXXXXCXXCXXXXXQRAHLERHXXXHXXXXXXXXXXX

SEQ ID NO: 2219 - protein, 209 aa, Artificial Sequence
  source: /note="Description of Artificial Sequence: Synthetic polypeptide"
  MOD_RES (1)..(9): Any amino acid
  MOD_RES (11)..(12): Any amino acid
  MOD_RES (14)..(18): Any amino acid
  MOD_RES (27)..(29): Any amino acid
  MOD_RES (31)..(37): Any amino acid
  MOD_RES (39)..(40): Any amino acid
  MOD_RES (42)..(46): Any amino acid
  MOD_RES (55)..(57): Any amino acid
  MOD_RES (59)..(65): Any amino acid
  MOD_RES (67)..(68): Any amino acid
  MOD_RES (70)..(74): Any amino acid
  MOD_RES (83)..(85): Any amino acid
  MOD_RES (87)..(93): Any amino acid
  MOD_RES (95)..(96): Any amino acid
  MOD_RES (98)..(102): Any amino acid
  MOD_RES (111)..(113): Any amino acid
  MOD_RES (115)..(121): Any amino acid
  MOD_RES (123)..(124): Any amino acid
  MOD_RES (126)..(130): Any amino acid
  MOD_RES (139)..(141): Any amino acid
  MOD_RES (143)..(149): Any amino acid
  MOD_RES (151)..(152): Any amino acid
  MOD_RES (154)..(158): Any amino acid
  MOD_RES (167)..(169): Any amino acid
  MOD_RES (171)..(177): Any amino acid
  MOD_RES (179)..(180): Any amino acid
  MOD_RES (182)..(186): Any amino acid
  MOD_RES (195)..(197): Any amino acid
  MOD_RES (199)..(209): Any amino acid
XXXXXXXXXCXXCXXXXXRSDKLVRHXXXHXXXXXXXCXXCXXXXXRSDDLVRHXXXHXXXXXXXCXXCXXXXXRSDHLTNHXXXHXXXXXXXCXXCXXXXXRSDKLTEHXXXHXXXXXXXCXXCXXXXXRSDKLVRHXXXHXXXXXXXCXXCXXXXXQRAHLERHXXXHXXXXXXXCXXCXXXXXRSDELVRHXXXHXXXXXXXXXXX

SEQ ID NO: 2220 - protein, 209 aa, Artificial Sequence
  source: /note="Description of Artificial Sequence: Synthetic polypeptide"
  MOD_RES (1)..(9): Any amino acid
  MOD_RES (11)..(12): Any amino acid
  MOD_RES (14)..(18): Any amino acid
  MOD_RES (27)..(29): Any amino acid
  MOD_RES (31)..(37): Any amino acid
  MOD_RES (39)..(40): Any amino acid
  MOD_RES (42)..(46): Any amino acid
  MOD_RES (55)..(57): Any amino acid
  MOD_RES (59)..(65): Any amino acid
  MOD_RES (67)..(68): Any amino acid
  MOD_RES (70)..(74): Any amino acid
  MOD_RES (83)..(85): Any amino acid
  MOD_RES (87)..(93): Any amino acid
  MOD_RES (95)..(96): Any amino acid
  MOD_RES (98)..(102): Any amino acid
  MOD_RES (111)..(113): Any amino acid
  MOD_RES (115)..(121): Any amino acid
  MOD_RES (123)..(124): Any amino acid
  MOD_RES (126)..(130): Any amino acid
  MOD_RES (139)..(141): Any amino acid
  MOD_RES (143)..(149): Any amino acid
  MOD_RES (151)..(152): Any amino acid
  MOD_RES (154)..(158): Any amino acid
  MOD_RES (167)..(169): Any amino acid
  MOD_RES (171)..(177): Any amino acid
  MOD_RES (179)..(180): Any amino acid
  MOD_RES (182)..(186): Any amino acid
  MOD_RES (195)..(197): Any amino acid
  MOD_RES (199)..(209): Any amino acid
XXXXXXXXXCXXCXXXXXRSDDLVRHXXXHXXXXXXXCXXCXXXXXRSDHLTNHXXXHXXXXXXXCXXCXXXXXRSDKLTEHXXXHXXXXXXXCXXCXXXXXRSDKLVRHXXXHXXXXXXXCXXCXXXXXQRAHLERHXXXHXXXXXXXCXXCXXXXXRSDELVRHXXXHXXXXXXXCXXCXXXXXQSGDLRRHXXXHXXXXXXXXXXX

SEQ ID NO: 2221 - protein, 209 aa, Artificial Sequence
  source: /note="Description of Artificial Sequence: Synthetic polypeptide"
  MOD_RES (1)..(9): Any amino acid
  MOD_RES (11)..(12): Any amino acid
  MOD_RES (14)..(18): Any amino acid
  MOD_RES (27)..(29): Any amino acid
  MOD_RES (31)..(37): Any amino acid
  MOD_RES (39)..(40): Any amino acid
  MOD_RES (42)..(46): Any amino acid
  MOD_RES (55)..(57): Any amino acid
  MOD_RES (59)..(65): Any amino acid
  MOD_RES (67)..(68): Any amino acid
  MOD_RES (70)..(74): Any amino acid
  MOD_RES (83)..(85): Any amino acid
  MOD_RES (87)..(93): Any amino acid
  MOD_RES (95)..(96): Any amino acid
  MOD_RES (98)..(102): Any amino acid
  MOD_RES (111)..(113): Any amino acid
  MOD_RES (115)..(121): Any amino acid
  MOD_RES (123)..(124): Any amino acid
  MOD_RES (126)..(130): Any amino acid
  MOD_RES (139)..(141): Any amino acid
  MOD_RES (143)..(149): Any amino acid
  MOD_RES (151)..(152): Any amino acid
  MOD_RES (154)..(158): Any amino acid
  MOD_RES (167)..(169): Any amino acid
  MOD_RES (171)..(177): Any amino acid
  MOD_RES (179)..(180): Any amino acid
  MOD_RES (182)..(186): Any amino acid
  MOD_RES (195)..(197): Any amino acid
  MOD_RES (199)..(209): Any amino acid
XXXXXXXXXCXXCXXXXXDCRDLARHXXXHXXXXXXXCXXCXXXXXRSDKLVRHXXXHXXXXXXXCXXCXXXXXRSDDLVRHXXXHXXXXXXXCXXCXXXXXRSDHLTNHXXXHXXXXXXXCXXCXXXXXRSDKLTEHXXXHXXXXXXXCXXCXXXXXRSDKLVRHXXXHXXXXXXXCXXCXXXXXQRAHLERHXXXHXXXXXXXXXXX

SEQ ID NO: 2222 - protein, 209 aa, Artificial Sequence
  source: /note="Description of Artificial Sequence: Synthetic polypeptide"
  MOD_RES (1)..(9): Any amino acid
  MOD_RES (11)..(12): Any amino acid
  MOD_RES (14)..(18): Any amino acid
  MOD_RES (27)..(29): Any amino acid
  MOD_RES (31)..(37): Any amino acid
  MOD_RES (39)..(40): Any amino acid
  MOD_RES (42)..(46): Any amino acid
  MOD_RES (55)..(57): Any amino acid
  MOD_RES (59)..(65): Any amino acid
  MOD_RES (67)..(68): Any amino acid
  MOD_RES (70)..(74): Any amino acid
  MOD_RES (83)..(85): Any amino acid
  MOD_RES (87)..(93): Any amino acid
  MOD_RES (95)..(96): Any amino acid
  MOD_RES (98)..(102): Any amino acid
  MOD_RES (111)..(113): Any amino acid
  MOD_RES (115)..(121): Any amino acid
  MOD_RES (123)..(124): Any amino acid
  MOD_RES (126)..(130): Any amino acid
  MOD_RES (139)..(141): Any amino acid
  MOD_RES (143)..(149): Any amino acid
  MOD_RES (151)..(152): Any amino acid
  MOD_RES (154)..(158): Any amino acid
  MOD_RES (167)..(169): Any amino acid
  MOD_RES (171)..(177): Any amino acid
  MOD_RES (179)..(180): Any amino acid
  MOD_RES (182)..(186): Any amino acid
  MOD_RES (195)..(197): Any amino acid
  MOD_RES (199)..(209): Any amino acid
XXXXXXXXXCXXCXXXXXQLAHLRAHXXXHXXXXXXXCXXCXXXXXRSDKLVRHXXXHXXXXXXXCXXCXXXXXQSGDLRRHXXXHXXXXXXXCXXCXXXXXRSDNLVRHXXXHXXXXXXXCXXCXXXXXRSDELVRHXXXHXXXXXXXCXXCXXXXXDPGHLVRHXXXHXXXXXXXCXXCXXXXXHTGHLLEHXXXHXXXXXXXXXXX

SEQ ID NO: 2223 - protein, 209 aa, Artificial Sequence
  source: /note="Description of Artificial Sequence: Synthetic polypeptide"
  MOD_RES (1)..(9): Any amino acid
  MOD_RES (11)..(12): Any amino acid
  MOD_RES (14)..(18): Any amino acid
  MOD_RES (27)..(29): Any amino acid
  MOD_RES (31)..(37): Any amino acid
  MOD_RES (39)..(40): Any amino acid
  MOD_RES (42)..(46): Any amino acid
  MOD_RES (55)..(57): Any amino acid
  MOD_RES (59)..(65): Any amino acid
  MOD_RES (67)..(68): Any amino acid
  MOD_RES (70)..(74): Any amino acid
  MOD_RES (83)..(85): Any amino acid
  MOD_RES (87)..(93): Any amino acid
  MOD_RES (95)..(96): Any amino acid
  MOD_RES (98)..(102): Any amino acid
  MOD_RES (111)..(113): Any amino acid
  MOD_RES (115)..(121): Any amino acid
  MOD_RES (123)..(124): Any amino acid
  MOD_RES (126)..(130): Any amino acid
  MOD_RES (139)..(141): Any amino acid
  MOD_RES (143)..(149): Any amino acid
  MOD_RES (151)..(152): Any amino acid
  MOD_RES (154)..(158): Any amino acid
  MOD_RES (167)..(169): Any amino acid
  MOD_RES (171)..(177): Any amino acid
  MOD_RES (179)..(180): Any amino acid
  MOD_RES (182)..(186): Any amino acid
  MOD_RES (195)..(197): Any amino acid
  MOD_RES (199)..(209): Any amino acid
XXXXXXXXXCXXCXXXXXRSDKLVRHXXXHXXXXXXXCXXCXXXXXQSGDLRRHXXXHXXXXXXXCXXCXXXXXRSDNLVRHXXXHXXXXXXXCXXCXXXXXRSDELVRHXXXHXXXXXXXCXXCXXXXXDPGHLVRHXXXHXXXXXXXCXXCXXXXXHTGHLLEHXXXHXXXXXXXCXXCXXXXXDPGHLVRHXXXHXXXXXXXXXXX

SEQ ID NO: 2224 - protein, 209 aa, Artificial Sequence
  source: /note="Description of Artificial Sequence: Synthetic polypeptide"
  MOD_RES (1)..(9): Any amino acid
  MOD_RES (11)..(12): Any amino acid
  MOD_RES (14)..(18): Any amino acid
  MOD_RES (27)..(29): Any amino acid
  MOD_RES (31)..(37): Any amino acid
  MOD_RES (39)..(40): Any amino acid
  MOD_RES (42)..(46): Any amino acid
  MOD_RES (55)..(57): Any amino acid
  MOD_RES (59)..(65): Any amino acid
  MOD_RES (67)..(68): Any amino acid
  MOD_RES (70)..(74): Any amino acid
  MOD_RES (83)..(85): Any amino acid
  MOD_RES (87)..(93): Any amino acid
  MOD_RES (95)..(96): Any amino acid
  MOD_RES (98)..(102): Any amino acid
  MOD_RES (111)..(113): Any amino acid
  MOD_RES (115)..(121): Any amino acid
  MOD_RES (123)..(124): Any amino acid
  MOD_RES (126)..(130): Any amino acid
  MOD_RES (139)..(141): Any amino acid
  MOD_RES (143)..(149): Any amino acid
  MOD_RES (151)..(152): Any amino acid
  MOD_RES (154)..(158): Any amino acid
  MOD_RES (167)..(169): Any amino acid
  MOD_RES (171)..(177): Any amino acid
  MOD_RES (179)..(180): Any amino acid
  MOD_RES (182)..(186): Any amino acid
  MOD_RES (195)..(197): Any amino acid
  MOD_RES (199)..(209): Any amino acid
XXXXXXXXXCXXCXXXXXRRDELNVHXXXHXXXXXXXCXXCXXXXXQLAHLRAHXXXHXXXXXXXCXXCXXXXXRSDKLVRHXXXHXXXXXXXCXXCXXXXXQSGDLRRHXXXHXXXXXXXCXXCXXXXXRSDNLVRHXXXHXXXXXXXCXXCXXXXXRSDELVRHXXXHXXXXXXXCXXCXXXXXDPGHLVRHXXXHXXXXXXXXXXX

SEQ ID NO: 2225 - protein, 209 aa, Artificial Sequence
  source: /note="Description of Artificial Sequence: Synthetic polypeptide"
  MOD_RES (1)..(9): Any amino acid
  MOD_RES (11)..(12): Any amino acid
  MOD_RES (14)..(18): Any amino acid
  MOD_RES (27)..(29): Any amino acid
  MOD_RES (31)..(37): Any amino acid
  MOD_RES (39)..(40): Any amino acid
  MOD_RES (42)..(46): Any amino acid
  MOD_RES (55)..(57): Any amino acid
  MOD_RES (59)..(65): Any amino acid
  MOD_RES (67)..(68): Any amino acid
  MOD_RES (70)..(74): Any amino acid
  MOD_RES (83)..(85): Any amino acid
  MOD_RES (87)..(93): Any amino acid
  MOD_RES (95)..(96): Any amino acid
  MOD_RES (98)..(102): Any amino acid
  MOD_RES (111)..(113): Any amino acid
  MOD_RES (115)..(121): Any amino acid
  MOD_RES (123)..(124): Any amino acid
  MOD_RES (126)..(130): Any amino acid
  MOD_RES (139)..(141): Any amino acid
  MOD_RES (143)..(149): Any amino acid
  MOD_RES (151)..(152): Any amino acid
  MOD_RES (154)..(158): Any amino acid
  MOD_RES (167)..(169): Any amino acid
  MOD_RES (171)..(177): Any amino acid
  MOD_RES (179)..(180): Any amino acid
  MOD_RES (182)..(186): Any amino acid
  MOD_RES (195)..(197): Any amino acid
  MOD_RES (199)..(209): Any amino acid
XXXXXXXXXCXXCXXXXXQSGHLTEHXXXHXXXXXXXCXXCXXXXXRRDELNVHXXXHXXXXXXXCXXCXXXXXQLAHLRAHXXXHXXXXXXXCXXCXXXXXRSDKLVRHXXXHXXXXXXXCXXCXXXXXQSGDLRRHXXXHXXXXXXXCXXCXXXXXRSDNLVRHXXXHXXXXXXXCXXCXXXXXRSDELVRHXXXHXXXXXXXXXXX

SEQ ID NO: 2226 - protein, 209 aa, Artificial Sequence
  source: /note="Description of Artificial Sequence: Synthetic polypeptide"
  MOD_RES (1)..(9): Any amino acid
  MOD_RES (11)..(12): Any amino acid
  MOD_RES (14)..(18): Any amino acid
  MOD_RES (27)..(29): Any amino acid
  MOD_RES (31)..(37): Any amino acid
  MOD_RES (39)..(40): Any amino acid
  MOD_RES (42)..(46): Any amino acid
  MOD_RES (55)..(57): Any amino acid
  MOD_RES (59)..(65): Any amino acid
  MOD_RES (67)..(68): Any amino acid
  MOD_RES (70)..(74): Any amino acid
  MOD_RES (83)..(85): Any amino acid
  MOD_RES (87)..(93): Any amino acid
  MOD_RES (95)..(96): Any amino acid
  MOD_RES (98)..(102): Any amino acid
  MOD_RES (111)..(113): Any amino acid
  MOD_RES (115)..(121): Any amino acid
  MOD_RES (123)..(124): Any amino acid
  MOD_RES (126)..(130): Any amino acid
  MOD_RES (139)..(141): Any amino acid
  MOD_RES (143)..(149): Any amino acid
  MOD_RES (151)..(152): Any amino acid
  MOD_RES (154)..(158): Any amino acid
  MOD_RES (167)..(169): Any amino acid
  MOD_RES (171)..(177): Any amino acid
  MOD_RES (179)..(180): Any amino acid
  MOD_RES (182)..(186): Any amino acid
  MOD_RES (195)..(197): Any amino acid
  MOD_RES (199)..(209): Any amino acid
XXXXXXXXXCXXCXXXXXRSDHLTNHXXXHXXXXXXXCXXCXXXXXTSGHLVRHXXXHXXXXXXXCXXCXXXXXRADNLTEHXXXHXXXXXXXCXXCXXXXXDCRDLARHXXXHXXXXXXXCXXCXXXXXDPGHLVRHXXXHXXXXXXXCXXCXXXXXRSDELVRHXXXHXXXXXXXCXXCXXXXXRSDKLVRHXXXHXXXXXXXXXXX

SEQ ID NO: 2227 - protein, 209 aa, Artificial Sequence
  source: /note="Description of Artificial Sequence: Synthetic polypeptide"
  MOD_RES (1)..(9): Any amino acid
  MOD_RES (11)..(12): Any amino acid
  MOD_RES (14)..(18): Any amino acid
  MOD_RES (27)..(29): Any amino acid
  MOD_RES (31)..(37): Any amino acid
  MOD_RES (39)..(40): Any amino acid
  MOD_RES (42)..(46): Any amino acid
  MOD_RES (55)..(57): Any amino acid
  MOD_RES (59)..(65): Any amino acid
  MOD_RES (67)..(68): Any amino acid
  MOD_RES (70)..(74): Any amino acid
  MOD_RES (83)..(85): Any amino acid
  MOD_RES (87)..(93): Any amino acid
  MOD_RES (95)..(96): Any amino acid
  MOD_RES (98)..(102): Any amino acid
  MOD_RES (111)..(113): Any amino acid
  MOD_RES (115)..(121): Any amino acid
  MOD_RES (123)..(124): Any amino acid
  MOD_RES (126)..(130): Any amino acid
  MOD_RES (139)..(141): Any amino acid
  MOD_RES (143)..(149): Any amino acid
  MOD_RES (151)..(152): Any amino acid
  MOD_RES (154)..(158): Any amino acid
  MOD_RES (167)..(169): Any amino acid
  MOD_RES (171)..(177): Any amino acid
  MOD_RES (179)..(180): Any amino acid
  MOD_RES (182)..(186): Any amino acid
  MOD_RES (195)..(197): Any amino acid
  MOD_RES (199)..(209): Any amino acid
XXXXXXXXXCXXCXXXXXQSGDLRRHXXXHXXXXXXXCXXCXXXXXRSDHLTNHXXXHXXXXXXXCXXCXXXXXTSGHLVRHXXXHXXXXXXXCXXCXXXXXRADNLTEHXXXHXXXXXXXCXXCXXXXXDCRDLARHXXXHXXXXXXXCXXCXXXXXDPGHLVRHXXXHXXXXXXXCXXCXXXXXRSDELVRHXXXHXXXXXXXXXXX

SEQ ID NO: 2228 - protein, 209 aa, Artificial Sequence
  source: /note="Description of Artificial Sequence: Synthetic polypeptide"
  MOD_RES (1)..(9): Any amino acid
  MOD_RES (11)..(12): Any amino acid
  MOD_RES (14)..(18): Any amino acid
  MOD_RES (27)..(29): Any amino acid
  MOD_RES (31)..(37): Any amino acid
  MOD_RES (39)..(40): Any amino acid
  MOD_RES (42)..(46): Any amino acid
  MOD_RES (55)..(57): Any amino acid
  MOD_RES (59)..(65): Any amino acid
  MOD_RES (67)..(68): Any amino acid
  MOD_RES (70)..(74): Any amino acid
  MOD_RES (83)..(85): Any amino acid
  MOD_RES (87)..(93): Any amino acid
  MOD_RES (95)..(96): Any amino acid
  MOD_RES (98)..(102): Any amino acid
  MOD_RES (111)..(113): Any amino acid
  MOD_RES (115)..(121): Any amino acid
  MOD_RES (123)..(124): Any amino acid
  MOD_RES (126)..(130): Any amino acid
  MOD_RES (139)..(141): Any amino acid
  MOD_RES (143)..(149): Any amino acid
  MOD_RES (151)..(152): Any amino acid
  MOD_RES (154)..(158): Any amino acid
  MOD_RES (167)..(169): Any amino acid
  MOD_RES (171)..(177): Any amino acid
  MOD_RES (179)..(180): Any amino acid
  MOD_RES (182)..(186): Any amino acid
  MOD_RES (195)..(197): Any amino acid
  MOD_RES (199)..(209): Any amino acid
XXXXXXXXXCXXCXXXXXRSDNLVRHXXXHXXXXXXXCXXCXXXXXRSDELVRHXXXHXXXXXXXCXXCXXXXXDPGHLVRHXXXHXXXXXXXCXXCXXXXXHTGHLLEHXXXHXXXXXXXCXXCXXXXXDPGHLVRHXXXHXXXXXXXCXXCXXXXXTSGHLVRHXXXHXXXXXXXCXXCXXXXXQSGDLRRHXXXHXXXXXXXXXXX

SEQ ID NO: 2229 - protein, 209 aa, Artificial Sequence
  source: /note="Description of Artificial Sequence: Synthetic polypeptide"
  MOD_RES (1)..(9): Any amino acid
  MOD_RES (11)..(12): Any amino acid
  MOD_RES (14)..(18): Any amino acid
  MOD_RES (27)..(29): Any amino acid
  MOD_RES (31)..(37): Any amino acid
  MOD_RES (39)..(40): Any amino acid
  MOD_RES (42)..(46): Any amino acid
  MOD_RES (55)..(57): Any amino acid
  MOD_RES (59)..(65): Any amino acid
  MOD_RES (67)..(68): Any amino acid
  MOD_RES (70)..(74): Any amino acid
  MOD_RES (83)..(85): Any amino acid
  MOD_RES (87)..(93): Any amino acid
  MOD_RES (95)..(96): Any amino acid
  MOD_RES (98)..(102): Any amino acid
  MOD_RES (111)..(113): Any amino acid
  MOD_RES (115)..(121): Any amino acid
  MOD_RES (123)..(124): Any amino acid
  MOD_RES (126)..(130): Any amino acid
  MOD_RES (139)..(141): Any amino acid
  MOD_RES (143)..(149): Any amino acid
  MOD_RES (151)..(152): Any amino acid
  MOD_RES (154)..(158): Any amino acid
  MOD_RES (167)..(169): Any amino acid
  MOD_RES (171)..(177): Any amino acid
  MOD_RES (179)..(180): Any amino acid
  MOD_RES (182)..(186): Any amino acid
  MOD_RES (195)..(197): Any amino acid
  MOD_RES (199)..(209): Any amino acid
XXXXXXXXXCXXCXXXXXQSGDLRRHXXXHXXXXXXXCXXCXXXXXRSDNLVRHXXXHXXXXXXXCXXCXXXXXRSDELVRHXXXHXXXXXXXCXXCXXXXXDPGHLVRHXXXHXXXXXXXCXXCXXXXXHTGHLLEHXXXHXXXXXXXCXXCXXXXXDPGHLVRHXXXHXXXXXXXCXXCXXXXXTSGHLVRHXXXHXXXXXXXXXXX

SEQ ID NO: 2230 - protein, 209 aa, Artificial Sequence
  source: /note="Description of Artificial Sequence: Synthetic polypeptide"
  MOD_RES (1)..(9): Any amino acid
  MOD_RES (11)..(12): Any amino acid
  MOD_RES (14)..(18): Any amino acid
  MOD_RES (27)..(29): Any amino acid
  MOD_RES (31)..(37): Any amino acid
  MOD_RES (39)..(40): Any amino acid
  MOD_RES (42)..(46): Any amino acid
  MOD_RES (55)..(57): Any amino acid
  MOD_RES (59)..(65): Any amino acid
  MOD_RES (67)..(68): Any amino acid
  MOD_RES (70)..(74): Any amino acid
  MOD_RES (83)..(85): Any amino acid
  MOD_RES (87)..(93): Any amino acid
  MOD_RES (95)..(96): Any amino acid
  MOD_RES (98)..(102): Any amino acid
  MOD_RES (111)..(113): Any amino acid
  MOD_RES (115)..(121): Any amino acid
  MOD_RES (123)..(124): Any amino acid
  MOD_RES (126)..(130): Any amino acid
  MOD_RES (139)..(141): Any amino acid
  MOD_RES (143)..(149): Any amino acid
  MOD_RES (151)..(152): Any amino acid
  MOD_RES (154)..(158): Any amino acid
  MOD_RES (167)..(169): Any amino acid
  MOD_RES (171)..(177): Any amino acid
  MOD_RES (179)..(180): Any amino acid
  MOD_RES (182)..(186): Any amino acid
  MOD_RES (195)..(197): Any amino acid
  MOD_RES (199)..(209): Any amino acid
XXXXXXXXXCXXCXXXXXRSDELVRHXXXHXXXXXXXCXXCXXXXXDPGHLVRHXXXHXXXXXXXCXXCXXXXXHTGHLLEHXXXHXXXXXXXCXXCXXXXXDPGHLVRHXXXHXXXXXXXCXXCXXXXXTSGHLVRHXXXHXXXXXXXCXXCXXXXXQSGDLRRHXXXHXXXXXXXCXXCXXXXXRSDHLTNHXXXHXXXXXXXXXXX

SEQ ID NO: 2231 - protein, 209 aa, Artificial Sequence
  source: /note="Description of Artificial Sequence: Synthetic polypeptide"
  MOD_RES (1)..(9): Any amino acid
  MOD_RES (11)..(12): Any amino acid
  MOD_RES (14)..(18): Any amino acid
  MOD_RES (27)..(29): Any amino acid
  MOD_RES (31)..(37): Any amino acid
  MOD_RES (39)..(40): Any amino acid
  MOD_RES (42)..(46): Any amino acid
  MOD_RES (55)..(57): Any amino acid
  MOD_RES (59)..(65): Any amino acid
  MOD_RES (67)..(68): Any amino acid
  MOD_RES (70)..(74): Any amino acid
  MOD_RES (83)..(85): Any amino acid
  MOD_RES (87)..(93): Any amino acid
  MOD_RES (95)..(96): Any amino acid
  MOD_RES (98)..(102): Any amino acid
  MOD_RES (111)..(113): Any amino acid
  MOD_RES (115)..(121): Any amino acid
  MOD_RES (123)..(124): Any amino acid
  MOD_RES (126)..(130): Any amino acid
  MOD_RES (139)..(141): Any amino acid
  MOD_RES (143)..(149): Any amino acid
  MOD_RES (151)..(152): Any amino acid
  MOD_RES (154)..(158): Any amino acid
  MOD_RES (167)..(169): Any amino acid
  MOD_RES (171)..(177): Any amino acid
  MOD_RES (179)..(180): Any amino acid
  MOD_RES (182)..(186): Any amino acid
  MOD_RES (195)..(197): Any amino acid
  MOD_RES (199)..(209): Any amino acid
XXXXXXXXXCXXCXXXXXDPGHLVRHXXXHXXXXXXXCXXCXXXXXTSGHLVRHXXXHXXXXXXXCXXCXXXXXQSGDLRRHXXXHXXXXXXXCXXCXXXXXRSDHLTNHXXXHXXXXXXXCXXCXXXXXTSGHLVRHXXXHXXXXXXXCXXCXXXXXRADNLTEHXXXHXXXXXXXCXXCXXXXXDCRDLARHXXXHXXXXXXXXXXX

SEQ ID NO: 2232 - protein, 209 aa, Artificial Sequence
  source: /note="Description of Artificial Sequence: Synthetic polypeptide"
  MOD_RES (1)..(9): Any amino acid
  MOD_RES (11)..(12): Any amino acid
  MOD_RES (14)..(18): Any amino acid
  MOD_RES (27)..(29): Any amino acid
  MOD_RES (31)..(37): Any amino acid
  MOD_RES (39)..(40): Any amino acid
  MOD_RES (42)..(46): Any amino acid
  MOD_RES (55)..(57): Any amino acid
  MOD_RES (59)..(65): Any amino acid
  MOD_RES (67)..(68): Any amino acid
  MOD_RES (70)..(74): Any amino acid
  MOD_RES (83)..(85): Any amino acid
  MOD_RES (87)..(93): Any amino acid
  MOD_RES (95)..(96): Any amino acid
  MOD_RES (98)..(102): Any amino acid
  MOD_RES (111)..(113): Any amino acid
  MOD_RES (115)..(121): Any amino acid
  MOD_RES (123)..(124): Any amino acid
  MOD_RES (126)..(130): Any amino acid
  MOD_RES (139)..(141): Any amino acid
  MOD_RES (143)..(149): Any amino acid
  MOD_RES (151)..(152): Any amino acid
  MOD_RES (154)..(158): Any amino acid
  MOD_RES (167)..(169): Any amino acid
  MOD_RES (171)..(177): Any amino acid
  MOD_RES (179)..(180): Any amino acid
  MOD_RES (182)..(186): Any amino acid
  MOD_RES (195)..(197): Any amino acid
  MOD_RES (199)..(209): Any amino acid
XXXXXXXXXCXXCXXXXXTSGHLVRHXXXHXXXXXXXCXXCXXXXXQSGDLRRHXXXHXXXXXXXCXXCXXXXXRSDHLTNHXXXHXXXXXXXCXXCXXXXXTSGHLVRHXXXHXXXXXXXCXXCXXXXXRADNLTEHXXXHXXXXXXXCXXCXXXXXDCRDLARHXXXHXXXXXXXCXXCXXXXXDPGHLVRHXXXHXXXXXXXXXXX

SEQ ID NO: 2233 - protein, 209 aa, Artificial Sequence
  source: /note="Description of Artificial Sequence: Synthetic polypeptide"
  MOD_RES (1)..(9): Any amino acid
  MOD_RES (11)..(12): Any amino acid
  MOD_RES (14)..(18): Any amino acid
  MOD_RES (27)..(29): Any amino acid
  MOD_RES (31)..(37): Any amino acid
  MOD_RES (39)..(40): Any amino acid
  MOD_RES (42)..(46): Any amino acid
  MOD_RES (55)..(57): Any amino acid
  MOD_RES (59)..(65): Any amino acid
  MOD_RES (67)..(68): Any amino acid
  MOD_RES (70)..(74): Any amino acid
  MOD_RES (83)..(85): Any amino acid
  MOD_RES (87)..(93): Any amino acid
  MOD_RES (95)..(96): Any amino acid
  MOD_RES (98)..(102): Any amino acid
  MOD_RES (111)..(113): Any amino acid
  MOD_RES (115)..(121): Any amino acid
  MOD_RES (123)..(124): Any amino acid
  MOD_RES (126)..(130): Any amino acid
  MOD_RES (139)..(141): Any amino acid
  MOD_RES (143)..(149): Any amino acid
  MOD_RES (151)..(152): Any amino acid
  MOD_RES (154)..(158): Any amino acid
  MOD_RES (167)..(169): Any amino acid
  MOD_RES (171)..(177): Any amino acid
  MOD_RES (179)..(180): Any amino acid
  MOD_RES (182)..(186): Any amino acid
  MOD_RES (195)..(197): Any amino acid
  MOD_RES (199)..(209): Any amino acid
XXXXXXXXXCXXCXXXXXHTGHLLEHXXXHXXXXXXXCXXCXXXXXDPGHLVRHXXXHXXXXXXXCXXCXXXXXTSGHLVRHXXXHXXXXXXXCXXCXXXXXQSGDLRRHXXXHXXXXXXXCXXCXXXXXRSDHLTNHXXXHXXXXXXXCXXCXXXXXTSGHLVRHXXXHXXXXXXXCXXCXXXXXRADNLTEHXXXHXXXXXXXXXXX

SEQ ID NO: 2234 - protein, 209 aa, Artificial Sequence
  source: /note="Description of Artificial Sequence: Synthetic polypeptide"
  MOD_RES (1)..(9): Any amino acid
  MOD_RES (11)..(12): Any amino acid
  MOD_RES (14)..(18): Any amino acid
  MOD_RES (27)..(29): Any amino acid
  MOD_RES (31)..(37): Any amino acid
  MOD_RES (39)..(40): Any amino acid
  MOD_RES (42)..(46): Any amino acid
  MOD_RES (55)..(57): Any amino acid
  MOD_RES (59)..(65): Any amino acid
  MOD_RES (67)..(68): Any amino acid
  MOD_RES (70)..(74): Any amino acid
  MOD_RES (83)..(85): Any amino acid
  MOD_RES (87)..(93): Any amino acid
  MOD_RES (95)..(96): Any amino acid
  MOD_RES (98)..(102): Any amino acid
  MOD_RES (111)..(113): Any amino acid
  MOD_RES (115)..(121): Any amino acid
  MOD_RES (123)..(124): Any amino acid
  MOD_RES (126)..(130): Any amino acid
  MOD_RES (139)..(141): Any amino acid
  MOD_RES (143)..(149): Any amino acid
  MOD_RES (151)..(152): Any amino acid
  MOD_RES (154)..(158): Any amino acid
  MOD_RES (167)..(169): Any amino acid
  MOD_RES (171)..(177): Any amino acid
  MOD_RES (179)..(180): Any amino acid
  MOD_RES (182)..(186): Any amino acid
  MOD_RES (195)..(197): Any amino acid
  MOD_RES (199)..(209): Any amino acid
XXXXXXXXXCXXCXXXXXDPGHLVRHXXXHXXXXXXXCXXCXXXXXHTGHLLEHXXXHXXXXXXXCXXCXXXXXDPGHLVRHXXXHXXXXXXXCXXCXXXXXTSGHLVRHXXXHXXXXXXXCXXCXXXXXQSGDLRRHXXXHXXXXXXXCXXCXXXXXRSDHLTNHXXXHXXXXXXXCXXCXXXXXTSGHLVRHXXXHXXXXXXXXXXX

SEQ ID NO: 2235 - protein, 209 aa, Artificial Sequence
  source: /note="Description of Artificial Sequence: Synthetic polypeptide"
  MOD_RES (1)..(9): Any amino acid
  MOD_RES (11)..(12): Any amino acid
  MOD_RES (14)..(18): Any amino acid
  MOD_RES (27)..(29): Any amino acid
  MOD_RES (31)..(37): Any amino acid
  MOD_RES (39)..(40): Any amino acid
  MOD_RES (42)..(46): Any amino acid
  MOD_RES (55)..(57): Any amino acid
  MOD_RES (59)..(65): Any amino acid
  MOD_RES (67)..(68): Any amino acid
  MOD_RES (70)..(74): Any amino acid
  MOD_RES (83)..(85): Any amino acid
  MOD_RES (87)..(93): Any amino acid
  MOD_RES (95)..(96): Any amino acid
  MOD_RES (98)..(102): Any amino acid
  MOD_RES (111)..(113): Any amino acid
  MOD_RES (115)..(121): Any amino acid
  MOD_RES (123)..(124): Any amino acid
  MOD_RES (126)..(130): Any amino acid
  MOD_RES (139)..(141): Any amino acid
  MOD_RES (143)..(149): Any amino acid
  MOD_RES (151)..(152): Any amino acid
  MOD_RES (154)..(158): Any amino acid
  MOD_RES (167)..(169): Any amino acid
  MOD_RES (171)..(177): Any amino acid
  MOD_RES (179)..(180): Any amino acid
  MOD_RES (182)..(186): Any amino acid
  MOD_RES (195)..(197): Any amino acid
  MOD_RES (199)..(209): Any amino acid
XXXXXXXXXCXXCXXXXXRSDDLVRHXXXHXXXXXXXCXXCXXXXXDCRDLARHXXXHXXXXXXXCXXCXXXXXRSDELVRHXXXHXXXXXXXCXXCXXXXXRADNLTEHXXXHXXXXXXXCXXCXXXXXRSDKLVRHXXXHXXXXXXXCXXCXXXXXQSSSLVRHXXXHXXXXXXXCXXCXXXXXRSDHLTNHXXXHXXXXXXXXXXX

SEQ ID NO: 2236 - protein, 209 aa, Artificial Sequence
  source: /note="Description of Artificial Sequence: Synthetic polypeptide"
  MOD_RES (1)..(9): Any amino acid
  MOD_RES (11)..(12): Any amino acid
  MOD_RES (14)..(18): Any amino acid
  MOD_RES (27)..(29): Any amino acid
  MOD_RES (31)..(37): Any amino acid
  MOD_RES (39)..(40): Any amino acid
  MOD_RES (42)..(46): Any amino acid
  MOD_RES (55)..(57): Any amino acid
  MOD_RES (59)..(65): Any amino acid
  MOD_RES (67)..(68): Any amino acid
  MOD_RES (70)..(74): Any amino acid
  MOD_RES (83)..(85): Any amino acid
  MOD_RES (87)..(93): Any amino acid
  MOD_RES (95)..(96): Any amino acid
  MOD_RES (98)..(102): Any amino acid
  MOD_RES (111)..(113): Any amino acid
  MOD_RES (115)..(121): Any amino acid
  MOD_RES (123)..(124): Any amino acid
  MOD_RES (126)..(130): Any amino acid
  MOD_RES (139)..(141): Any amino acid
  MOD_RES (143)..(149): Any amino acid
  MOD_RES (151)..(152): Any amino acid
  MOD_RES (154)..(158): Any amino acid
  MOD_RES (167)..(169): Any amino acid
  MOD_RES (171)..(177): Any amino acid
  MOD_RES (179)..(180): Any amino acid
  MOD_RES (182)..(186): Any amino acid
  MOD_RES (195)..(197): Any amino acid
  MOD_RES (199)..(209): Any amino acid
XXXXXXXXXCXXCXXXXXDCRDLARHXXXHXXXXXXXCXXCXXXXXRSDELVRHXXXHXXXXXXXCXXCXXXXXRADNLTEHXXXHXXXXXXXCXXCXXXXXRSDKLVRHXXXHXXXXXXXCXXCXXXXXQSSSLVRHXXXHXXXXXXXCXXCXXXXXRSDHLTNHXXXHXXXXXXXCXXCXXXXXSKKHLAEHXXXHXXXXXXXXXXX

SEQ ID NO: 2237 - protein, 209 aa, Artificial Sequence
  source: /note="Description of Artificial Sequence: Synthetic polypeptide"
  MOD_RES (1)..(9): Any amino acid
  MOD_RES (11)..(12): Any amino acid
  MOD_RES (14)..(18): Any amino acid
  MOD_RES (27)..(29): Any amino acid
  MOD_RES (31)..(37): Any amino acid
  MOD_RES (39)..(40): Any amino acid
  MOD_RES (42)..(46): Any amino acid
  MOD_RES (55)..(57): Any amino acid
  MOD_RES (59)..(65): Any amino acid
  MOD_RES (67)..(68): Any amino acid
  MOD_RES (70)..(74): Any amino acid
  MOD_RES (83)..(85): Any amino acid
  MOD_RES (87)..(93): Any amino acid
  MOD_RES (95)..(96): Any amino acid
  MOD_RES (98)..(102): Any amino acid
  MOD_RES (111)..(113): Any amino acid
  MOD_RES (115)..(121): Any amino acid
  MOD_RES (123)..(124): Any amino acid
  MOD_RES (126)..(130): Any amino acid
  MOD_RES (139)..(141): Any amino acid
  MOD_RES (143)..(149): Any amino acid
  MOD_RES (151)..(152): Any amino acid
  MOD_RES (154)..(158): Any amino acid
  MOD_RES (167)..(169): Any amino acid
  MOD_RES (171)..(177): Any amino acid
  MOD_RES (179)..(180): Any amino acid
  MOD_RES (182)..(186): Any amino acid
  MOD_RES (195)..(197): Any amino acid
  MOD_RES (199)..(209): Any amino acid
XXXXXXXXXCXXCXXXXXRSDDLVRHXXXHXXXXXXXCXXCXXXXXRSDDLVRHXXXHXXXXXXXCXXCXXXXXDCRDLARHXXXHXXXXXXXCXXCXXXXXRSDELVRHXXXHXXXXXXXCXXCXXXXXRADNLTEHXXXHXXXXXXXCXXCXXXXXRSDKLVRHXXXHXXXXXXXCXXCXXXXXQSSSLVRHXXXHXXXXXXXXXXX

SEQ ID NO: 2238 - protein, 209 aa, Artificial Sequence
  source: /note="Description of Artificial Sequence: Synthetic polypeptide"
  MOD_RES (1)..(9): Any amino acid
  MOD_RES (11)..(12): Any amino acid
  MOD_RES (14)..(18): Any amino acid
  MOD_RES (27)..(29): Any amino acid
  MOD_RES (31)..(37): Any amino acid
  MOD_RES (39)..(40): Any amino acid
  MOD_RES (42)..(46): Any amino acid
  MOD_RES (55)..(57): Any amino acid
  MOD_RES (59)..(65): Any amino acid
  MOD_RES (67)..(68): Any amino acid
  MOD_RES (70)..(74): Any amino acid
  MOD_RES (83)..(85): Any amino acid
  MOD_RES (87)..(93): Any amino acid
  MOD_RES (95)..(96): Any amino acid
  MOD_RES (98)..(102): Any amino acid
  MOD_RES (111)..(113): Any amino acid
  MOD_RES (115)..(121): Any amino acid
  MOD_RES (123)..(124): Any amino acid
  MOD_RES (126)..(130): Any amino acid
  MOD_RES (139)..(141): Any amino acid
  MOD_RES (143)..(149): Any amino acid
  MOD_RES (151)..(152): Any amino acid
  MOD_RES (154)..(158): Any amino acid
  MOD_RES (167)..(169): Any amino acid
  MOD_RES (171)..(177): Any amino acid
  MOD_RES (179)..(180): Any amino acid
  MOD_RES (182)..(186): Any amino acid
  MOD_RES (195)..(197): Any amino acid
  MOD_RES (199)..(209): Any amino acid
XXXXXXXXXCXXCXXXXXRSDHLTTHXXXHXXXXXXXCXXCXXXXXRSDDLVRHXXXHXXXXXXXCXXCXXXXXRSDDLVRHXXXHXXXXXXXCXXCXXXXXDCRDLARHXXXHXXXXXXXCXXCXXXXXRSDELVRHXXXHXXXXXXXCXXCXXXXXRADNLTEHXXXHXXXXXXXCXXCXXXXXRSDKLVRHXXXHXXXXXXXXXXX

SEQ ID NO: 2239 - protein, 209 aa, Artificial Sequence
  source: /note="Description of Artificial Sequence: Synthetic polypeptide"
  MOD_RES (1)..(9): Any amino acid
  MOD_RES (11)..(12): Any amino acid
  MOD_RES (14)..(18): Any amino acid
  MOD_RES (27)..(29): Any amino acid
  MOD_RES (31)..(37): Any amino acid
  MOD_RES (39)..(40): Any amino acid
  MOD_RES (42)..(46): Any amino acid
  MOD_RES (55)..(57): Any amino acid
  MOD_RES (59)..(65): Any amino acid
  MOD_RES (67)..(68): Any amino acid
  MOD_RES (70)..(74): Any amino acid
  MOD_RES (83)..(85): Any amino acid
  MOD_RES (87)..(93): Any amino acid
  MOD_RES (95)..(96): Any amino acid
  MOD_RES (98)..(102): Any amino acid
  MOD_RES (111)..(113): Any amino acid
  MOD_RES (115)..(121): Any amino acid
  MOD_RES (123)..(124): Any amino acid
  MOD_RES (126)..(130): Any amino acid
  MOD_RES (139)..(141): Any amino acid
  MOD_RES (143)..(149): Any amino acid
  MOD_RES (151)..(152): Any amino acid
  MOD_RES (154)..(158): Any amino acid
  MOD_RES (167)..(169): Any amino acid
  MOD_RES (171)..(177): Any amino acid
  MOD_RES (179)..(180): Any amino acid
  MOD_RES (182)..(186): Any amino acid
  MOD_RES (195)..(197): Any amino acid
  MOD_RES (199)..(209): Any amino acid
XXXXXXXXXCXXCXXXXXRADNLTEHXXXHXXXXXXXCXXCXXXXXRSDHLTNHXXXHXXXXXXXCXXCXXXXXRSDHLTTHXXXHXXXXXXXCXXCXXXXXRSDDLVRHXXXHXXXXXXXCXXCXXXXXRSDDLVRHXXXHXXXXXXXCXXCXXXXXDCRDLARHXXXHXXXXXXXCXXCXXXXXRSDELVRHXXXHXXXXXXXXXXX

SEQ ID NO: 2240 - protein, 209 aa, Artificial Sequence
  source: /note="Description of Artificial Sequence: Synthetic polypeptide"
  MOD_RES (1)..(9): Any amino acid
  MOD_RES (11)..(12): Any amino acid
  MOD_RES (14)..(18): Any amino acid
  MOD_RES (27)..(29): Any amino acid
  MOD_RES (31)..(37): Any amino acid
  MOD_RES (39)..(40): Any amino acid
  MOD_RES (42)..(46): Any amino acid
  MOD_RES (55)..(57): Any amino acid
  MOD_RES (59)..(65): Any amino acid
  MOD_RES (67)..(68): Any amino acid
  MOD_RES (70)..(74): Any amino acid
  MOD_RES (83)..(85): Any amino acid
  MOD_RES (87)..(93): Any amino acid
  MOD_RES (95)..(96): Any amino acid
  MOD_RES (98)..(102): Any amino acid
  MOD_RES (111)..(113): Any amino acid
  MOD_RES (115)..(121): Any amino acid
  MOD_RES (123)..(124): Any amino acid
  MOD_RES (126)..(130): Any amino acid
  MOD_RES (139)..(141): Any amino acid
  MOD_RES (143)..(149): Any amino acid
  MOD_RES (151)..(152): Any amino acid
  MOD_RES (154)..(158): Any amino acid
  MOD_RES (167)..(169): Any amino acid
  MOD_RES (171)..(177): Any amino acid
  MOD_RES (179)..(180): Any amino acid
  MOD_RES (182)..(186): Any amino acid
  MOD_RES (195)..(197): Any amino acid
  MOD_RES (199)..(209): Any amino acid
XXXXXXXXXCXXCXXXXXRSDHLTNHXXXHXXXXXXXCXXCXXXXXRSDHLTTHXXXHXXXXXXXCXXCXXXXXRSDDLVRHXXXHXXXXXXXCXXCXXXXXRSDDLVRHXXXHXXXXXXXCXXCXXXXXDCRDLARHXXXHXXXXXXXCXXCXXXXXRSDELVRHXXXHXXXXXXXCXXCXXXXXRADNLTEHXXXHXXXXXXXXXXX

SEQ ID NO: 2241 - protein, 209 aa, Artificial Sequence
  source: /note="Description of Artificial Sequence: Synthetic polypeptide"
  MOD_RES (1)..(9): Any amino acid
  MOD_RES (11)..(12): Any amino acid
  MOD_RES (14)..(18): Any amino acid
  MOD_RES (27)..(29): Any amino acid
  MOD_RES (31)..(37): Any amino acid
  MOD_RES (39)..(40): Any amino acid
  MOD_RES (42)..(46): Any amino acid
  MOD_RES (55)..(57): Any amino acid
  MOD_RES (59)..(65): Any amino acid
  MOD_RES (67)..(68): Any amino acid
  MOD_RES (70)..(74): Any amino acid
  MOD_RES (83)..(85): Any amino acid
  MOD_RES (87)..(93): Any amino acid
  MOD_RES (95)..(96): Any amino acid
  MOD_RES (98)..(102): Any amino acid
  MOD_RES (111)..(113): Any amino acid
  MOD_RES (115)..(121): Any amino acid
  MOD_RES (123)..(124): Any amino acid
  MOD_RES (126)..(130): Any amino acid
  MOD_RES (139)..(141): Any amino acid
  MOD_RES (143)..(149): Any amino acid
  MOD_RES (151)..(152): Any amino acid
  MOD_RES (154)..(158): Any amino acid
  MOD_RES (167)..(169): Any amino acid
  MOD_RES (171)..(177): Any amino acid
  MOD_RES (179)..(180): Any amino acid
  MOD_RES (182)..(186): Any amino acid
  MOD_RES (195)..(197): Any amino acid
  MOD_RES (199)..(209): Any amino acid
XXXXXXXXXCXXCXXXXXRSDELVRHXXXHXXXXXXXCXXCXXXXXRADNLTEHXXXHXXXXXXXCXXCXXXXXRSDKLVRHXXXHXXXXXXXCXXCXXXXXQSSSLVRHXXXHXXXXXXXCXXCXXXXXRSDHLTNHXXXHXXXXXXXCXXCXXXXXSKKHLAEHXXXHXXXXXXXCXXCXXXXXRSDDLVRHXXXHXXXXXXXXXXX

SEQ ID NO: 2242 - protein, 209 aa, Artificial Sequence
  source: /note="Description of Artificial Sequence: Synthetic polypeptide"
  MOD_RES (1)..(9): Any amino acid
  MOD_RES (11)..(12): Any amino acid
  MOD_RES (14)..(18): Any amino acid
  MOD_RES (27)..(29): Any amino acid
  MOD_RES (31)..(37): Any amino acid
  MOD_RES (39)..(40): Any amino acid
  MOD_RES (42)..(46): Any amino acid
  MOD_RES (55)..(57): Any amino acid
  MOD_RES (59)..(65): Any amino acid
  MOD_RES (67)..(68): Any amino acid
  MOD_RES (70)..(74): Any amino acid
  MOD_RES (83)..(85): Any amino acid
  MOD_RES (87)..(93): Any amino acid
  MOD_RES (95)..(96): Any amino acid
  MOD_RES (98)..(102): Any amino acid
  MOD_RES (111)..(113): Any amino acid
  MOD_RES (115)..(121): Any amino acid
  MOD_RES (123)..(124): Any amino acid
  MOD_RES (126)..(130): Any amino acid
  MOD_RES (139)..(141): Any amino acid
  MOD_RES (143)..(149): Any amino acid
  MOD_RES (151)..(152): Any amino acid
  MOD_RES (154)..(158): Any amino acid
  MOD_RES (167)..(169): Any amino acid
  MOD_RES (171)..(177): Any amino acid
  MOD_RES (179)..(180): Any amino acid
  MOD_RES (182)..(186): Any amino acid
  MOD_RES (195)..(197): Any amino acid
  MOD_RES (199)..(209): Any amino acid
XXXXXXXXXCXXCXXXXXRSDKLVRHXXXHXXXXXXXCXXCXXXXXQSSSLVRHXXXHXXXXXXXCXXCXXXXXRSDHLTNHXXXHXXXXXXXCXXCXXXXXSKKHLAEHXXXHXXXXXXXCXXCXXXXXRSDDLVRHXXXHXXXXXXXCXXCXXXXXRSDHLTTHXXXHXXXXXXXCXXCXXXXXRSDKLVRHXXXHXXXXXXXXXXX

SEQ ID NO: 2243 - protein, 209 aa, Artificial Sequence
  source: /note="Description of Artificial Sequence: Synthetic polypeptide"
  MOD_RES (1)..(9): Any amino acid
  MOD_RES (11)..(12): Any amino acid
  MOD_RES (14)..(18): Any amino acid
  MOD_RES (27)..(29): Any amino acid
  MOD_RES (31)..(37): Any amino acid
  MOD_RES (39)..(40): Any amino acid
  MOD_RES (42)..(46): Any amino acid
  MOD_RES (55)..(57): Any amino acid
  MOD_RES (59)..(65): Any amino acid
  MOD_RES (67)..(68): Any amino acid
  MOD_RES (70)..(74): Any amino acid
  MOD_RES (83)..(85): Any amino acid
  MOD_RES (87)..(93): Any amino acid
  MOD_RES (95)..(96): Any amino acid
  MOD_RES (98)..(102): Any amino acid
  MOD_RES (111)..(113): Any amino acid
  MOD_RES (115)..(121): Any amino acid
  MOD_RES (123)..(124): Any amino acid
  MOD_RES (126)..(130): Any amino acid
  MOD_RES (139)..(141): Any amino acid
  MOD_RES (143)..(149): Any amino acid
  MOD_RES (151)..(152): Any amino acid
  MOD_RES (154)..(158): Any amino acid
  MOD_RES (167)..(169): Any amino acid
  MOD_RES (171)..(177): Any amino acid
  MOD_RES (179)..(180): Any amino acid
  MOD_RES (182)..(186): Any amino acid
  MOD_RES (195)..(197): Any amino acid
  MOD_RES (199)..(209): Any amino acid
XXXXXXXXXCXXCXXXXXRADNLTEHXXXHXXXXXXXCXXCXXXXXRSDKLVRHXXXHXXXXXXXCXXCXXXXXQSSSLVRHXXXHXXXXXXXCXXCXXXXXRSDHLTNHXXXHXXXXXXXCXXCXXXXXSKKHLAEHXXXHXXXXXXXCXXCXXXXXRSDDLVRHXXXHXXXXXXXCXXCXXXXXRSDHLTTHXXXHXXXXXXXXXXX

SEQ ID NO: 2244 - protein, 209 aa, Artificial Sequence
  source: /note="Description of Artificial Sequence: Synthetic polypeptide"
  MOD_RES (1)..(9): Any amino acid
  MOD_RES (11)..(12): Any amino acid
  MOD_RES (14)..(18): Any amino acid
  MOD_RES (27)..(29): Any amino acid
  MOD_RES (31)..(37): Any amino acid
  MOD_RES (39)..(40): Any amino acid
  MOD_RES (42)..(46): Any amino acid
  MOD_RES (55)..(57): Any amino acid
  MOD_RES (59)..(65): Any amino acid
  MOD_RES (67)..(68): Any amino acid
  MOD_RES (70)..(74): Any amino acid
  MOD_RES (83)..(85): Any amino acid
  MOD_RES (87)..(93): Any amino acid
  MOD_RES (95)..(96): Any amino acid
  MOD_RES (98)..(102): Any amino acid
  MOD_RES (111)..(113): Any amino acid
  MOD_RES (115)..(121): Any amino acid
  MOD_RES (123)..(124): Any amino acid
  MOD_RES (126)..(130): Any amino acid
  MOD_RES (139)..(141): Any amino acid
  MOD_RES (143)..(149): Any amino acid
  MOD_RES (151)..(152): Any amino acid
  MOD_RES (154)..(158): Any amino acid
  MOD_RES (167)..(169): Any amino acid
  MOD_RES (171)..(177): Any amino acid
  MOD_RES (179)..(180): Any amino acid
  MOD_RES (182)..(186): Any amino acid
  MOD_RES (195)..(197): Any amino acid
  MOD_RES (199)..(209): Any amino acid
XXXXXXXXXCXXCXXXXXQSSNLVRHXXXHXXXXXXXCXXCXXXXXQRAHLERHXXXHXXXXXXXCXXCXXXXXRADNLTEHXXXHXXXXXXXCXXCXXXXXRSDHLTNHXXXHXXXXXXXCXXCXXXXXRSDHLTTHXXXHXXXXXXXCXXCXXXXXRSDDLVRHXXXHXXXXXXXCXXCXXXXXRSDDLVRHXXXHXXXXXXXXXXX

SEQ ID NO: 2245 - protein, 209 aa, Artificial Sequence
  source: /note="Description of Artificial Sequence: Synthetic polypeptide"
  MOD_RES (1)..(9): Any amino acid
  MOD_RES (11)..(12): Any amino acid
  MOD_RES (14)..(18): Any amino acid
  MOD_RES (27)..(29): Any amino acid
  MOD_RES (31)..(37): Any amino acid
  MOD_RES (39)..(40): Any amino acid
  MOD_RES (42)..(46): Any amino acid
  MOD_RES (55)..(57): Any amino acid
  MOD_RES (59)..(65): Any amino acid
  MOD_RES (67)..(68): Any amino acid
  MOD_RES (70)..(74): Any amino acid
  MOD_RES (83)..(85): Any amino acid
  MOD_RES (87)..(93): Any amino acid
  MOD_RES (95)..(96): Any amino acid
  MOD_RES (98)..(102): Any amino acid
  MOD_RES (111)..(113): Any amino acid
  MOD_RES (115)..(121): Any amino acid
  MOD_RES (123)..(124): Any amino acid
  MOD_RES (126)..(130): Any amino acid
  MOD_RES (139)..(141): Any amino acid
  MOD_RES (143)..(149): Any amino acid
  MOD_RES (151)..(152): Any amino acid
  MOD_RES (154)..(158): Any amino acid
  MOD_RES (167)..(169): Any amino acid
  MOD_RES (171)..(177): Any amino acid
  MOD_RES (179)..(180): Any amino acid
  MOD_RES (182)..(186): Any amino acid
  MOD_RES (195)..(197): Any amino acid
  MOD_RES (199)..(209): Any amino acid
XXXXXXXXXCXXCXXXXXQRAHLERHXXXHXXXXXXXCXXCXXXXXRADNLTEHXXXHXXXXXXXCXXCXXXXXRSDHLTNHXXXHXXXXXXXCXXCXXXXXRSDHLTTHXXXHXXXXXXXCXXCXXXXXRSDDLVRHXXXHXXXXXXXCXXCXXXXXRSDDLVRHXXXHXXXXXXXCXXCXXXXXDCRDLARHXXXHXXXXXXXXXXX

SEQ ID NO: 2246 - protein, 209 aa, Artificial Sequence
  source: /note="Description of Artificial Sequence: Synthetic polypeptide"
  MOD_RES (1)..(9): Any amino acid
  MOD_RES (11)..(12): Any amino acid
  MOD_RES (14)..(18): Any amino acid
  MOD_RES (27)..(29): Any amino acid
  MOD_RES (31)..(37): Any amino acid
  MOD_RES (39)..(40): Any amino acid
  MOD_RES (42)..(46): Any amino acid
  MOD_RES (55)..(57): Any amino acid
  MOD_RES (59)..(65): Any amino acid
  MOD_RES (67)..(68): Any amino acid
  MOD_RES (70)..(74): Any amino acid
  MOD_RES (83)..(85): Any amino acid
  MOD_RES (87)..(93): Any amino acid
  MOD_RES (95)..(96): Any amino acid
  MOD_RES (98)..(102): Any amino acid
  MOD_RES (111)..(113): Any amino acid
  MOD_RES (115)..(121): Any amino acid
  MOD_RES (123)..(124): Any amino acid
  MOD_RES (126)..(130): Any amino acid
  MOD_RES (139)..(141): Any amino acid
  MOD_RES (143)..(149): Any amino acid
  MOD_RES (151)..(152): Any amino acid
  MOD_RES (154)..(158): Any amino acid
  MOD_RES (167)..(169): Any amino acid
  MOD_RES (171)..(177): Any amino acid
  MOD_RES (179)..(180): Any amino acid
  MOD_RES (182)..(186): Any amino acid
  MOD_RES (195)..(197): Any amino acid
  MOD_RES (199)..(209): Any amino acid
XXXXXXXXXCXXCXXXXXTSGNLTEHXXXHXXXXXXXCXXCXXXXXQRAHLERHXXXHXXXXXXXCXXCXXXXXTSGNLTEHXXXHXXXXXXXCXXCXXXXXQSGHLTEHXXXHXXXXXXXCXXCXXXXXSRRTCRAHXXXHXXXXXXXCXXCXXXXXTKNSLTEHXXXHXXXXXXXCXXCXXXXXDSGNLRVHXXXHXXXXXXXXXXX

SEQ ID NO: 2247 - protein, 209 aa, Artificial Sequence
  source: /note="Description of Artificial Sequence: Synthetic polypeptide"
  MOD_RES (1)..(9): Any amino acid
  MOD_RES (11)..(12): Any amino acid
  MOD_RES (14)..(18): Any amino acid
  MOD_RES (27)..(29): Any amino acid
  MOD_RES (31)..(37): Any amino acid
  MOD_RES (39)..(40): Any amino acid
  MOD_RES (42)..(46): Any amino acid
  MOD_RES (55)..(57): Any amino acid
  MOD_RES (59)..(65): Any amino acid
  MOD_RES (67)..(68): Any amino acid
  MOD_RES (70)..(74): Any amino acid
  MOD_RES (83)..(85): Any amino acid
  MOD_RES (87)..(93): Any amino acid
  MOD_RES (95)..(96): Any amino acid
  MOD_RES (98)..(102): Any amino acid
  MOD_RES (111)..(113): Any amino acid
  MOD_RES (115)..(121): Any amino acid
  MOD_RES (123)..(124): Any amino acid
  MOD_RES (126)..(130): Any amino acid
  MOD_RES (139)..(141): Any amino acid
  MOD_RES (143)..(149): Any amino acid
  MOD_RES (151)..(152): Any amino acid
  MOD_RES (154)..(158): Any amino acid
  MOD_RES (167)..(169): Any amino acid
  MOD_RES (171)..(177): Any amino acid
  MOD_RES (179)..(180): Any amino acid
  MOD_RES (182)..(186): Any amino acid
  MOD_RES (195)..(197): Any amino acid
  MOD_RES (199)..(209): Any amino acid
XXXXXXXXXCXXCXXXXXDPGHLVRHXXXHXXXXXXXCXXCXXXXXTSGNLTEHXXXHXXXXXXXCXXCXXXXXQRAHLERHXXXHXXXXXXXCXXCXXXXXTSGNLTEHXXXHXXXXXXXCXXCXXXXXQSGHLTEHXXXHXXXXXXXCXXCXXXXXSRRTCRAHXXXHXXXXXXXCXXCXXXXXTKNSLTEHXXXHXXXXXXXXXXX

SEQ ID NO: 2248 - protein, 209 aa, Artificial Sequence
  source: /note="Description of Artificial Sequence: Synthetic polypeptide"
  MOD_RES (1)..(9): Any amino acid
  MOD_RES (11)..(12): Any amino acid
  MOD_RES (14)..(18): Any amino acid
  MOD_RES (27)..(29): Any amino acid
  MOD_RES (31)..(37): Any amino acid
  MOD_RES (39)..(40): Any amino acid
  MOD_RES (42)..(46): Any amino acid
  MOD_RES (55)..(57): Any amino acid
  MOD_RES (59)..(65): Any amino acid
  MOD_RES (67)..(68): Any amino acid
  MOD_RES (70)..(74): Any amino acid
  MOD_RES (83)..(85): Any amino acid
  MOD_RES (87)..(93): Any amino acid
  MOD_RES (95)..(96): Any amino acid
  MOD_RES (98)..(102): Any amino acid
  MOD_RES (111)..(113): Any amino acid
  MOD_RES (115)..(121): Any amino acid
  MOD_RES (123)..(124): Any amino acid
  MOD_RES (126)..(130): Any amino acid
  MOD_RES (139)..(141): Any amino acid
  MOD_RES (143)..(149): Any amino acid
  MOD_RES (151)..(152): Any amino acid
  MOD_RES (154)..(158): Any amino acid
  MOD_RES (167)..(169): Any amino acid
  MOD_RES (171)..(177): Any amino acid
  MOD_RES (179)..(180): Any amino acid
  MOD_RES (182)..(186): Any amino acid
  MOD_RES (195)..(197): Any amino acid
  MOD_RES (199)..(209): Any amino acid
XXXXXXXXXCXXCXXXXXRADNLTEHXXXHXXXXXXXCXXCXXXXXQNSTLTEHXXXHXXXXXXXCXXCXXXXXQSGHLTEHXXXHXXXXXXXCXXCXXXXXDPGHLVRHXXXHXXXXXXXCXXCXXXXXTSGNLTEHXXXHXXXXXXXCXXCXXXXXQRAHLERHXXXHXXXXXXXCXXCXXXXXTSGNLTEHXXXHXXXXXXXXXXX

SEQ ID NO: 2249 - protein, 209 aa, Artificial Sequence
  source: /note="Description of Artificial Sequence: Synthetic polypeptide"
  MOD_RES (1)..(9): Any amino acid
  MOD_RES (11)..(12): Any amino acid
  MOD_RES (14)..(18): Any amino acid
  MOD_RES (27)..(29): Any amino acid
  MOD_RES (31)..(37): Any amino acid
  MOD_RES (39)..(40): Any amino acid
  MOD_RES (42)..(46): Any amino acid
  MOD_RES (55)..(57): Any amino acid
  MOD_RES (59)..(65): Any amino acid
  MOD_RES (67)..(68): Any amino acid
  MOD_RES (70)..(74): Any amino acid
  MOD_RES (83)..(85): Any amino acid
  MOD_RES (87)..(93): Any amino acid
  MOD_RES (95)..(96): Any amino acid
  MOD_RES (98)..(102): Any amino acid
  MOD_RES (111)..(113): Any amino acid
  MOD_RES (115)..(121): Any amino acid
  MOD_RES (123)..(124): Any amino acid
  MOD_RES (126)..(130): Any amino acid
  MOD_RES (139)..(141): Any amino acid
  MOD_RES (143)..(149): Any amino acid
  MOD_RES (151)..(152): Any amino acid
  MOD_RES (154)..(158): Any amino acid
  MOD_RES (167)..(169): Any amino acid
  MOD_RES (171)..(177): Any amino acid
  MOD_RES (179)..(180): Any amino acid
  MOD_RES (182)..(186): Any amino acid
  MOD_RES (195)..(197): Any amino acid
  MOD_RES (199)..(209): Any amino acid
XXXXXXXXXCXXCXXXXXQRAHLERHXXXHXXXXXXXCXXCXXXXXTSGNLTEHXXXHXXXXXXXCXXCXXXXXQSGHLTEHXXXHXXXXXXXCXXCXXXXXSRRTCRAHXXXHXXXXXXXCXXCXXXXXTKNSLTEHXXXHXXXXXXXCXXCXXXXXDSGNLRVHXXXHXXXXXXXCXXCXXXXXQSGNLTEHXXXHXXXXXXXXXXX

SEQ ID NO: 2250 - protein, 209 aa, Artificial Sequence
  source: /note="Description of Artificial Sequence: Synthetic polypeptide"
  MOD_RES (1)..(9): Any amino acid
  MOD_RES (11)..(12): Any amino acid
  MOD_RES (14)..(18): Any amino acid
  MOD_RES (27)..(29): Any amino acid
  MOD_RES (31)..(37): Any amino acid
  MOD_RES (39)..(40): Any amino acid
  MOD_RES (42)..(46): Any amino acid
  MOD_RES (55)..(57): Any amino acid
  MOD_RES (59)..(65): Any amino acid
  MOD_RES (67)..(68): Any amino acid
  MOD_RES (70)..(74): Any amino acid
  MOD_RES (83)..(85): Any amino acid
  MOD_RES (87)..(93): Any amino acid
  MOD_RES (95)..(96): Any amino acid
  MOD_RES (98)..(102): Any amino acid
  MOD_RES (111)..(113): Any amino acid
  MOD_RES (115)..(121): Any amino acid
  MOD_RES (123)..(124): Any amino acid
  MOD_RES (126)..(130): Any amino acid
  MOD_RES (139)..(141): Any amino acid
  MOD_RES (143)..(149): Any amino acid
  MOD_RES (151)..(152): Any amino acid
  MOD_RES (154)..(158): Any amino acid
  MOD_RES (167)..(169): Any amino acid
  MOD_RES (171)..(177): Any amino acid
  MOD_RES (179)..(180): Any amino acid
  MOD_RES (182)..(186): Any amino acid
  MOD_RES (195)..(197): Any amino acid
  MOD_RES (199)..(209): Any amino acid
XXXXXXXXXCXXCXXXXXQSGHLTEHXXXHXXXXXXXCXXCXXXXXDPGHLVRHXXXHXXXXXXXCXXCXXXXXTSGNLTEHXXXHXXXXXXXCXXCXXXXXQRAHLERHXXXHXXXXXXXCXXCXXXXXTSGNLTEHXXXHXXXXXXXCXXCXXXXXQSGHLTEHXXXHXXXXXXXCXXCXXXXXSRRTCRAHXXXHXXXXXXXXXXX

SEQ ID NO: 2251 - protein, 209 aa, Artificial Sequence
  source: /note="Description of Artificial Sequence: Synthetic polypeptide"
  MOD_RES (1)..(9): Any amino acid
  MOD_RES (11)..(12): Any amino acid
  MOD_RES (14)..(18): Any amino acid
  MOD_RES (27)..(29): Any amino acid
  MOD_RES (31)..(37): Any amino acid
  MOD_RES (39)..(40): Any amino acid
  MOD_RES (42)..(46): Any amino acid
  MOD_RES (55)..(57): Any amino acid
  MOD_RES (59)..(65): Any amino acid
  MOD_RES (67)..(68): Any amino acid
  MOD_RES (70)..(74): Any amino acid
  MOD_RES (83)..(85): Any amino acid
  MOD_RES (87)..(93): Any amino acid
  MOD_RES (95)..(96): Any amino acid
  MOD_RES (98)..(102): Any amino acid
  MOD_RES (111)..(113): Any amino acid
  MOD_RES (115)..(121): Any amino acid
  MOD_RES (123)..(124): Any amino acid
  MOD_RES (126)..(130): Any amino acid
  MOD_RES (139)..(141): Any amino acid
  MOD_RES (143)..(149): Any amino acid
  MOD_RES (151)..(152): Any amino acid
  MOD_RES (154)..(158): Any amino acid
  MOD_RES (167)..(169): Any amino acid
  MOD_RES (171)..(177): Any amino acid
  MOD_RES (179)..(180): Any amino acid
  MOD_RES (182)..(186): Any amino acid
  MOD_RES (195)..(197): Any amino acid
  MOD_RES (199)..(209): Any amino acid
XXXXXXXXXCXXCXXXXXQNSTLTEHXXXHXXXXXXXCXXCXXXXXQSGHLTEHXXXHXXXXXXXCXXCXXXXXDPGHLVRHXXXHXXXXXXXCXXCXXXXXTSGNLTEHXXXHXXXXXXXCXXCXXXXXQRAHLERHXXXHXXXXXXXCXXCXXXXXTSGNLTEHXXXHXXXXXXXCXXCXXXXXQSGHLTEHXXXHXXXXXXXXXXX

SEQ ID NO: 2252 - protein, 209 aa, Artificial Sequence
  source: /note="Description of Artificial Sequence: Synthetic polypeptide"
  MOD_RES (1)..(9): Any amino acid
  MOD_RES (11)..(12): Any amino acid
  MOD_RES (14)..(18): Any amino acid
  MOD_RES (27)..(29): Any amino acid
  MOD_RES (31)..(37): Any amino acid
  MOD_RES (39)..(40): Any amino acid
  MOD_RES (42)..(46): Any amino acid
  MOD_RES (55)..(57): Any amino acid
  MOD_RES (59)..(65): Any amino acid
  MOD_RES (67)..(68): Any amino acid
  MOD_RES (70)..(74): Any amino acid
  MOD_RES (83)..(85): Any amino acid
  MOD_RES (87)..(93): Any amino acid
  MOD_RES (95)..(96): Any amino acid
  MOD_RES (98)..(102): Any amino acid
  MOD_RES (111)..(113): Any amino acid
  MOD_RES (115)..(121): Any amino acid
  MOD_RES (123)..(124): Any amino acid
  MOD_RES (126)..(130): Any amino acid
  MOD_RES (139)..(141): Any amino acid
  MOD_RES (143)..(149): Any amino acid
  MOD_RES (151)..(152): Any amino acid
  MOD_RES (154)..(158): Any amino acid
  MOD_RES (167)..(169): Any amino acid
  MOD_RES (171)..(177): Any amino acid
  MOD_RES (179)..(180): Any amino acid
  MOD_RES (182)..(186): Any amino acid
  MOD_RES (195)..(197): Any amino acid
  MOD_RES (199)..(209): Any amino acid
XXXXXXXXXCXXCXXXXXDPGNLVRHXXXHXXXXXXXCXXCXXXXXDCRDLARHXXXHXXXXXXXCXXCXXXXXRRDELNVHXXXHXXXXXXXCXXCXXXXXDPGNLVRHXXXHXXXXXXXCXXCXXXXXRRDELNVHXXXHXXXXXXXCXXCXXXXXDPGNLVRHXXXHXXXXXXXCXXCXXXXXDPGALVRHXXXHXXXXXXXXXXX

SEQ ID NO: 2253 - protein, 209 aa, Artificial Sequence
  source: /note="Description of Artificial Sequence: Synthetic polypeptide"
  MOD_RES (1)..(9): Any amino acid
  MOD_RES (11)..(12): Any amino acid
  MOD_RES (14)..(18): Any amino acid
  MOD_RES (27)..(29): Any amino acid
  MOD_RES (31)..(37): Any amino acid
  MOD_RES (39)..(40): Any amino acid
  MOD_RES (42)..(46): Any amino acid
  MOD_RES (55)..(57): Any amino acid
  MOD_RES (59)..(65): Any amino acid
  MOD_RES (67)..(68): Any amino acid
  MOD_RES (70)..(74): Any amino acid
  MOD_RES (83)..(85): Any amino acid
  MOD_RES (87)..(93): Any amino acid
  MOD_RES (95)..(96): Any amino acid
  MOD_RES (98)..(102): Any amino acid
  MOD_RES (111)..(113): Any amino acid
  MOD_RES (115)..(121): Any amino acid
  MOD_RES (123)..(124): Any amino acid
  MOD_RES (126)..(130): Any amino acid
  MOD_RES (139)..(141): Any amino acid
  MOD_RES (143)..(149): Any amino acid
  MOD_RES (151)..(152): Any amino acid
  MOD_RES (154)..(158): Any amino acid
  MOD_RES (167)..(169): Any amino acid
  MOD_RES (171)..(177): Any amino acid
  MOD_RES (179)..(180): Any amino acid
  MOD_RES (182)..(186): Any amino acid
  MOD_RES (195)..(197): Any amino acid
  MOD_RES (199)..(209): Any amino acid
XXXXXXXXXCXXCXXXXXTKNSLTEHXXXHXXXXXXXCXXCXXXXXRADNLTEHXXXHXXXXXXXCXXCXXXXXDKKDLTRHXXXHXXXXXXXCXXCXXXXXRSDHLTTHXXXHXXXXXXXCXXCXXXXXSKKALTEHXXXHXXXXXXXCXXCXXXXXRNDALTEHXXXHXXXXXXXCXXCXXXXXRSDELVRHXXXHXXXXXXXXXXX

SEQ ID NO: 2254 - protein, 209 aa, Artificial Sequence
  source: /note="Description of Artificial Sequence: Synthetic polypeptide"
  MOD_RES (1)..(9): Any amino acid
  MOD_RES (11)..(12): Any amino acid
  MOD_RES (14)..(18): Any amino acid
  MOD_RES (27)..(29): Any amino acid
  MOD_RES (31)..(37): Any amino acid
  MOD_RES (39)..(40): Any amino acid
  MOD_RES (42)..(46): Any amino acid
  MOD_RES (55)..(57): Any amino acid
  MOD_RES (59)..(65): Any amino acid
  MOD_RES (67)..(68): Any amino acid
  MOD_RES (70)..(74): Any amino acid
  MOD_RES (83)..(85): Any amino acid
  MOD_RES (87)..(93): Any amino acid
  MOD_RES (95)..(96): Any amino acid
  MOD_RES (98)..(102): Any amino acid
  MOD_RES (111)..(113): Any amino acid
  MOD_RES (115)..(121): Any amino acid
  MOD_RES (123)..(124): Any amino acid
  MOD_RES (126)..(130): Any amino acid
  MOD_RES (139)..(141): Any amino acid
  MOD_RES (143)..(149): Any amino acid
  MOD_RES (151)..(152): Any amino acid
  MOD_RES (154)..(158): Any amino acid
  MOD_RES (167)..(169): Any amino acid
  MOD_RES (171)..(177): Any amino acid
  MOD_RES (179)..(180): Any amino acid
  MOD_RES (182)..(186): Any amino acid
  MOD_RES (195)..(197): Any amino acid
  MOD_RES (199)..(209): Any amino acid
XXXXXXXXXCXXCXXXXXRADNLTEHXXXHXXXXXXXCXXCXXXXXDKKDLTRHXXXHXXXXXXXCXXCXXXXXRSDHLTTHXXXHXXXXXXXCXXCXXXXXSKKALTEHXXXHXXXXXXXCXXCXXXXXRNDALTEHXXXHXXXXXXXCXXCXXXXXRSDELVRHXXXHXXXXXXXCXXCXXXXXSPADLTRHXXXHXXXXXXXXXXX

SEQ ID NO: 2255 - protein, 209 aa, Artificial Sequence
  source: /note="Description of Artificial Sequence: Synthetic polypeptide"
  MOD_RES (1)..(9): Any amino acid
  MOD_RES (11)..(12): Any amino acid
  MOD_RES (14)..(18): Any amino acid
  MOD_RES (27)..(29): Any amino acid
  MOD_RES (31)..(37): Any amino acid
  MOD_RES (39)..(40): Any amino acid
  MOD_RES (42)..(46): Any amino acid
  MOD_RES (55)..(57): Any amino acid
  MOD_RES (59)..(65): Any amino acid
  MOD_RES (67)..(68): Any amino acid
  MOD_RES (70)..(74): Any amino acid
  MOD_RES (83)..(85): Any amino acid
  MOD_RES (87)..(93): Any amino acid
  MOD_RES (95)..(96): Any amino acid
  MOD_RES (98)..(102): Any amino acid
  MOD_RES (111)..(113): Any amino acid
  MOD_RES (115)..(121): Any amino acid
  MOD_RES (123)..(124): Any amino acid
  MOD_RES (126)..(130): Any amino acid
  MOD_RES (139)..(141): Any amino acid
  MOD_RES (143)..(149): Any amino acid
  MOD_RES (151)..(152): Any amino acid
  MOD_RES (154)..(158): Any amino acid
  MOD_RES (167)..(169): Any amino acid
  MOD_RES (171)..(177): Any amino acid
  MOD_RES (179)..(180): Any amino acid
  MOD_RES (182)..(186): Any amino acid
  MOD_RES (195)..(197): Any amino acid
  MOD_RES (199)..(209): Any amino acid
XXXXXXXXXCXXCXXXXXSPADLTRHXXXHXXXXXXXCXXCXXXXXTKNSLTEHXXXHXXXXXXXCXXCXXXXXRADNLTEHXXXHXXXXXXXCXXCXXXXXDKKDLTRHXXXHXXXXXXXCXXCXXXXXRSDHLTTHXXXHXXXXXXXCXXCXXXXXSKKALTEHXXXHXXXXXXXCXXCXXXXXRNDALTEHXXXHXXXXXXXXXXX

SEQ ID NO: 2256 - protein, 209 aa, Artificial Sequence
  source: /note="Description of Artificial Sequence: Synthetic polypeptide"
  MOD_RES (1)..(9): Any amino acid
  MOD_RES (11)..(12): Any amino acid
  MOD_RES (14)..(18): Any amino acid
  MOD_RES (27)..(29): Any amino acid
  MOD_RES (31)..(37): Any amino acid
  MOD_RES (39)..(40): Any amino acid
  MOD_RES (42)..(46): Any amino acid
  MOD_RES (55)..(57): Any amino acid
  MOD_RES (59)..(65): Any amino acid
  MOD_RES (67)..(68): Any amino acid
  MOD_RES (70)..(74): Any amino acid
  MOD_RES (83)..(85): Any amino acid
  MOD_RES (87)..(93): Any amino acid
  MOD_RES (95)..(96): Any amino acid
  MOD_RES (98)..(102): Any amino acid
  MOD_RES (111)..(113): Any amino acid
  MOD_RES (115)..(121): Any amino acid
  MOD_RES (123)..(124): Any amino acid
  MOD_RES (126)..(130): Any amino acid
  MOD_RES (139)..(141): Any amino acid
  MOD_RES (143)..(149): Any amino acid
  MOD_RES (151)..(152): Any amino acid
  MOD_RES (154)..(158): Any amino acid
  MOD_RES (167)..(169): Any amino acid
  MOD_RES (171)..(177): Any amino acid
  MOD_RES (179)..(180): Any amino acid
  MOD_RES (182)..(186): Any amino acid
  MOD_RES (195)..(197): Any amino acid
  MOD_RES (199)..(209): Any amino acid
XXXXXXXXXCXXCXXXXXTSHSLTEHXXXHXXXXXXXCXXCXXXXXSPADLTRHXXXHXXXXXXXCXXCXXXXXTKNSLTEHXXXHXXXXXXXCXXCXXXXXRADNLTEHXXXHXXXXXXXCXXCXXXXXDKKDLTRHXXXHXXXXXXXCXXCXXXXXRSDHLTTHXXXHXXXXXXXCXXCXXXXXSKKALTEHXXXHXXXXXXXXXXX

SEQ ID NO: 2257 - protein, 209 aa, Artificial Sequence
  source: /note="Description of Artificial Sequence: Synthetic polypeptide"
  MOD_RES (1)..(9): Any amino acid
  MOD_RES (11)..(12): Any amino acid
  MOD_RES (14)..(18): Any amino acid
  MOD_RES (27)..(29): Any amino acid
  MOD_RES (31)..(37): Any amino acid
  MOD_RES (39)..(40): Any amino acid
  MOD_RES (42)..(46): Any amino acid
  MOD_RES (55)..(57): Any amino acid
  MOD_RES (59)..(65): Any amino acid
  MOD_RES (67)..(68): Any amino acid
  MOD_RES (70)..(74): Any amino acid
  MOD_RES (83)..(85): Any amino acid
  MOD_RES (87)..(93): Any amino acid
  MOD_RES (95)..(96): Any amino acid
  MOD_RES (98)..(102): Any amino acid
  MOD_RES (111)..(113): Any amino acid
  MOD_RES (115)..(121): Any amino acid
  MOD_RES (123)..(124): Any amino acid
  MOD_RES (126)..(130): Any amino acid
  MOD_RES (139)..(141): Any amino acid
  MOD_RES (143)..(149): Any amino acid
  MOD_RES (151)..(152): Any amino acid
  MOD_RES (154)..(158): Any amino acid
  MOD_RES (167)..(169): Any amino acid
  MOD_RES (171)..(177): Any amino acid
  MOD_RES (179)..(180): Any amino acid
  MOD_RES (182)..(186): Any amino acid
  MOD_RES (195)..(197): Any amino acid
  MOD_RES (199)..(209): Any amino acid
XXXXXXXXXCXXCXXXXXDKKDLTRHXXXHXXXXXXXCXXCXXXXXRSDHLTTHXXXHXXXXXXXCXXCXXXXXSKKALTEHXXXHXXXXXXXCXXCXXXXXRNDALTEHXXXHXXXXXXXCXXCXXXXXRSDELVRHXXXHXXXXXXXCXXCXXXXXSPADLTRHXXXHXXXXXXXCXXCXXXXXTHLDLIRHXXXHXXXXXXXXXXX

SEQ ID NO: 2258 - protein, 209 aa, Artificial Sequence
  source: /note="Description of Artificial Sequence: Synthetic polypeptide"
  MOD_RES (1)..(9): Any amino acid
  MOD_RES (11)..(12): Any amino acid
  MOD_RES (14)..(18): Any amino acid
  MOD_RES (27)..(29): Any amino acid
  MOD_RES (31)..(37): Any amino acid
  MOD_RES (39)..(40): Any amino acid
  MOD_RES (42)..(46): Any amino acid
  MOD_RES (55)..(57): Any amino acid
  MOD_RES (59)..(65): Any amino acid
  MOD_RES (67)..(68): Any amino acid
  MOD_RES (70)..(74): Any amino acid
  MOD_RES (83)..(85): Any amino acid
  MOD_RES (87)..(93): Any amino acid
  MOD_RES (95)..(96): Any amino acid
  MOD_RES (98)..(102): Any amino acid
  MOD_RES (111)..(113): Any amino acid
  MOD_RES (115)..(121): Any amino acid
  MOD_RES (123)..(124): Any amino acid
  MOD_RES (126)..(130): Any amino acid
  MOD_RES (139)..(141): Any amino acid
  MOD_RES (143)..(149): Any amino acid
  MOD_RES (151)..(152): Any amino acid
  MOD_RES (154)..(158): Any amino acid
  MOD_RES (167)..(169): Any amino acid
  MOD_RES (171)..(177): Any amino acid
  MOD_RES (179)..(180): Any amino acid
  MOD_RES (182)..(186): Any amino acid
  MOD_RES (195)..(197): Any amino acid
  MOD_RES (199)..(209): Any amino acid
XXXXXXXXXCXXCXXXXXRNDALTEHXXXHXXXXXXXCXXCXXXXXRSDELVRHXXXHXXXXXXXCXXCXXXXXSPADLTRHXXXHXXXXXXXCXXCXXXXXTHLDLIRHXXXHXXXXXXXCXXCXXXXXRNDTLTEHXXXHXXXXXXXCXXCXXXXXRSDHLTTHXXXHXXXXXXXCXXCXXXXXSPADLTRHXXXHXXXXXXXXXXX

SEQ ID NO: 2259 - protein, 209 aa, Artificial Sequence
  source: /note="Description of Artificial Sequence: Synthetic polypeptide"
  MOD_RES (1)..(9): Any amino acid
  MOD_RES (11)..(12): Any amino acid
  MOD_RES (14)..(18): Any amino acid
  MOD_RES (27)..(29): Any amino acid
  MOD_RES (31)..(37): Any amino acid
  MOD_RES (39)..(40): Any amino acid
  MOD_RES (42)..(46): Any amino acid
  MOD_RES (55)..(57): Any amino acid
  MOD_RES (59)..(65): Any amino acid
  MOD_RES (67)..(68): Any amino acid
  MOD_RES (70)..(74): Any amino acid
  MOD_RES (83)..(85): Any amino acid
  MOD_RES (87)..(93): Any amino acid
  MOD_RES (95)..(96): Any amino acid
  MOD_RES (98)..(102): Any amino acid
  MOD_RES (111)..(113): Any amino acid
  MOD_RES (115)..(121): Any amino acid
  MOD_RES (123)..(124): Any amino acid
  MOD_RES (126)..(130): Any amino acid
  MOD_RES (139)..(141): Any amino acid
  MOD_RES (143)..(149): Any amino acid
  MOD_RES (151)..(152): Any amino acid
  MOD_RES (154)..(158): Any amino acid
  MOD_RES (167)..(169): Any amino acid
  MOD_RES (171)..(177): Any amino acid
  MOD_RES (179)..(180): Any amino acid
  MOD_RES (182)..(186): Any amino acid
  MOD_RES (195)..(197): Any amino acid
  MOD_RES (199)..(209): Any amino acid
XXXXXXXXXCXXCXXXXXRSDELVRHXXXHXXXXXXXCXXCXXXXXSPADLTRHXXXHXXXXXXXCXXCXXXXXTHLDLIRHXXXHXXXXXXXCXXCXXXXXRNDTLTEHXXXHXXXXXXXCXXCXXXXXRSDHLTTHXXXHXXXXXXXCXXCXXXXXSPADLTRHXXXHXXXXXXXCXXCXXXXXRSDHLTTHXXXHXXXXXXXXXXX

SEQ ID NO: 2260 - protein, 209 aa, Artificial Sequence
  source: /note="Description of Artificial Sequence: Synthetic polypeptide"
  MOD_RES (1)..(9): Any amino acid
  MOD_RES (11)..(12): Any amino acid
  MOD_RES (14)..(18): Any amino acid
  MOD_RES (27)..(29): Any amino acid
  MOD_RES (31)..(37): Any amino acid
  MOD_RES (39)..(40): Any amino acid
  MOD_RES (42)..(46): Any amino acid
  MOD_RES (55)..(57): Any amino acid
  MOD_RES (59)..(65): Any amino acid
  MOD_RES (67)..(68): Any amino acid
  MOD_RES (70)..(74): Any amino acid
  MOD_RES (83)..(85): Any amino acid
  MOD_RES (87)..(93): Any amino acid
  MOD_RES (95)..(96): Any amino acid
  MOD_RES (98)..(102): Any amino acid
  MOD_RES (111)..(113): Any amino acid
  MOD_RES (115)..(121): Any amino acid
  MOD_RES (123)..(124): Any amino acid
  MOD_RES (126)..(130): Any amino acid
  MOD_RES (139)..(141): Any amino acid
  MOD_RES (143)..(149): Any amino acid
  MOD_RES (151)..(152): Any amino acid
  MOD_RES (154)..(158): Any amino acid
  MOD_RES (167)..(169): Any amino acid
  MOD_RES (171)..(177): Any amino acid
  MOD_RES (179)..(180): Any amino acid
  MOD_RES (182)..(186): Any amino acid
  MOD_RES (195)..(197): Any amino acid
  MOD_RES (199)..(209): Any amino acid
XXXXXXXXXCXXCXXXXXTTGNLTVHXXXHXXXXXXXCXXCXXXXXRSDHLTTHXXXHXXXXXXXCXXCXXXXXSKKHLAEHXXXHXXXXXXXCXXCXXXXXTSHSLTEHXXXHXXXXXXXCXXCXXXXXSPADLTRHXXXHXXXXXXXCXXCXXXXXTKNSLTEHXXXHXXXXXXXCXXCXXXXXRADNLTEHXXXHXXXXXXXXXXX

SEQ ID NO: 2261 - protein, 209 aa, Artificial Sequence
  source: /note="Description of Artificial Sequence: Synthetic polypeptide"
  MOD_RES (1)..(9): Any amino acid
  MOD_RES (11)..(12): Any amino acid
  MOD_RES (14)..(18): Any amino acid
  MOD_RES (27)..(29): Any amino acid
  MOD_RES (31)..(37): Any amino acid
  MOD_RES (39)..(40): Any amino acid
  MOD_RES (42)..(46): Any amino acid
  MOD_RES (55)..(57): Any amino acid
  MOD_RES (59)..(65): Any amino acid
  MOD_RES (67)..(68): Any amino acid
  MOD_RES (70)..(74): Any amino acid
  MOD_RES (83)..(85): Any amino acid
  MOD_RES (87)..(93): Any amino acid
  MOD_RES (95)..(96): Any amino acid
  MOD_RES (98)..(102): Any amino acid
  MOD_RES (111)..(113): Any amino acid
  MOD_RES (115)..(121): Any amino acid
  MOD_RES (123)..(124): Any amino acid
  MOD_RES (126)..(130): Any amino acid
  MOD_RES (139)..(141): Any amino acid
  MOD_RES (143)..(149): Any amino acid
  MOD_RES (151)..(152): Any amino acid
  MOD_RES (154)..(158): Any amino acid
  MOD_RES (167)..(169): Any amino acid
  MOD_RES (171)..(177): Any amino acid
  MOD_RES (179)..(180): Any amino acid
  MOD_RES (182)..(186): Any amino acid
  MOD_RES (195)..(197): Any amino acid
  MOD_RES (199)..(209): Any amino acid
XXXXXXXXXCXXCXXXXXSPADLTRHXXXHXXXXXXXCXXCXXXXXTHLDLIRHXXXHXXXXXXXCXXCXXXXXRNDTLTEHXXXHXXXXXXXCXXCXXXXXRSDHLTTHXXXHXXXXXXXCXXCXXXXXSPADLTRHXXXHXXXXXXXCXXCXXXXXRSDHLTTHXXXHXXXXXXXCXXCXXXXXSPADLTRHXXXHXXXXXXXXXXX

SEQ ID NO: 2262 - protein, 209 aa, Artificial Sequence
  source: /note="Description of Artificial Sequence: Synthetic polypeptide"
  MOD_RES (1)..(9): Any amino acid
  MOD_RES (11)..(12): Any amino acid
  MOD_RES (14)..(18): Any amino acid
  MOD_RES (27)..(29): Any amino acid
  MOD_RES (31)..(37): Any amino acid
  MOD_RES (39)..(40): Any amino acid
  MOD_RES (42)..(46): Any amino acid
  MOD_RES (55)..(57): Any amino acid
  MOD_RES (59)..(65): Any amino acid
  MOD_RES (67)..(68): Any amino acid
  MOD_RES (70)..(74): Any amino acid
  MOD_RES (83)..(85): Any amino acid
  MOD_RES (87)..(93): Any amino acid
  MOD_RES (95)..(96): Any amino acid
  MOD_RES (98)..(102): Any amino acid
  MOD_RES (111)..(113): Any amino acid
  MOD_RES (115)..(121): Any amino acid
  MOD_RES (123)..(124): Any amino acid
  MOD_RES (126)..(130): Any amino acid
  MOD_RES (139)..(141): Any amino acid
  MOD_RES (143)..(149): Any amino acid
  MOD_RES (151)..(152): Any amino acid
  MOD_RES (154)..(158): Any amino acid
  MOD_RES (167)..(169): Any amino acid
  MOD_RES (171)..(177): Any amino acid
  MOD_RES (179)..(180): Any amino acid
  MOD_RES (182)..(186): Any amino acid
  MOD_RES (195)..(197): Any amino acid
  MOD_RES (199)..(209): Any amino acid
XXXXXXXXXCXXCXXXXXSKKHLAEHXXXHXXXXXXXCXXCXXXXXTSHSLTEHXXXHXXXXXXXCXXCXXXXXSPADLTRHXXXHXXXXXXXCXXCXXXXXTKNSLTEHXXXHXXXXXXXCXXCXXXXXRADNLTEHXXXHXXXXXXXCXXCXXXXXDKKDLTRHXXXHXXXXXXXCXXCXXXXXRSDHLTTHXXXHXXXXXXXXXXX

SEQ ID NO: 2263 - protein, 209 aa, Artificial Sequence
  source: /note="Description of Artificial Sequence: Synthetic polypeptide"
  MOD_RES (1)..(9): Any amino acid
  MOD_RES (11)..(12): Any amino acid
  MOD_RES (14)..(18): Any amino acid
  MOD_RES (27)..(29): Any amino acid
  MOD_RES (31)..(37): Any amino acid
  MOD_RES (39)..(40): Any amino acid
  MOD_RES (42)..(46): Any amino acid
  MOD_RES (55)..(57): Any amino acid
  MOD_RES (59)..(65): Any amino acid
  MOD_RES (67)..(68): Any amino acid
  MOD_RES (70)..(74): Any amino acid
  MOD_RES (83)..(85): Any amino acid
  MOD_RES (87)..(93): Any amino acid
  MOD_RES (95)..(96): Any amino acid
  MOD_RES (98)..(102): Any amino acid
  MOD_RES (111)..(113): Any amino acid
  MOD_RES (115)..(121): Any amino acid
  MOD_RES (123)..(124): Any amino acid
  MOD_RES (126)..(130): Any amino acid
  MOD_RES (139)..(141): Any amino acid
  MOD_RES (143)..(149): Any amino acid
  MOD_RES (151)..(152): Any amino acid
  MOD_RES (154)..(158): Any amino acid
  MOD_RES (167)..(169): Any amino acid
  MOD_RES (171)..(177): Any amino acid
  MOD_RES (179)..(180): Any amino acid
  MOD_RES (182)..(186): Any amino acid
  MOD_RES (195)..(197): Any amino acid
  MOD_RES (199)..(209): Any amino acid
XXXXXXXXXCXXCXXXXXRSDHLTTHXXXHXXXXXXXCXXCXXXXXSKKHLAEHXXXHXXXXXXXCXXCXXXXXTSHSLTEHXXXHXXXXXXXCXXCXXXXXSPADLTRHXXXHXXXXXXXCXXCXXXXXTKNSLTEHXXXHXXXXXXXCXXCXXXXXRADNLTEHXXXHXXXXXXXCXXCXXXXXDKKDLTRHXXXHXXXXXXXXXXX

SEQ ID NO: 2264 - protein, 209 aa, Artificial Sequence
  source: /note="Description of Artificial Sequence: Synthetic polypeptide"
  MOD_RES (1)..(9): Any amino acid
  MOD_RES (11)..(12): Any amino acid
  MOD_RES (14)..(18): Any amino acid
  MOD_RES (27)..(29): Any amino acid
  MOD_RES (31)..(37): Any amino acid
  MOD_RES (39)..(40): Any amino acid
  MOD_RES (42)..(46): Any amino acid
  MOD_RES (55)..(57): Any amino acid
  MOD_RES (59)..(65): Any amino acid
  MOD_RES (67)..(68): Any amino acid
  MOD_RES (70)..(74): Any amino acid
  MOD_RES (83)..(85): Any amino acid
  MOD_RES (87)..(93): Any amino acid
  MOD_RES (95)..(96): Any amino acid
  MOD_RES (98)..(102): Any amino acid
  MOD_RES (111)..(113): Any amino acid
  MOD_RES (115)..(121): Any amino acid
  MOD_RES (123)..(124): Any amino acid
  MOD_RES (126)..(130): Any amino acid
  MOD_RES (139)..(141): Any amino acid
  MOD_RES (143)..(149): Any amino acid
  MOD_RES (151)..(152): Any amino acid
  MOD_RES (154)..(158): Any amino acid
  MOD_RES (167)..(169): Any amino acid
  MOD_RES (171)..(177): Any amino acid
  MOD_RES (179)..(180): Any amino acid
  MOD_RES (182)..(186): Any amino acid
  MOD_RES (195)..(197): Any amino acid
  MOD_RES (199)..(209): Any amino acid
XXXXXXXXXCXXCXXXXXRSDHLTTHXXXHXXXXXXXCXXCXXXXXSKKALTEHXXXHXXXXXXXCXXCXXXXXRNDALTEHXXXHXXXXXXXCXXCXXXXXRSDELVRHXXXHXXXXXXXCXXCXXXXXSPADLTRHXXXHXXXXXXXCXXCXXXXXTHLDLIRHXXXHXXXXXXXCXXCXXXXXRNDTLTEHXXXHXXXXXXXXXXX

SEQ ID NO: 2265 - protein, 209 aa, Artificial Sequence
  source: /note="Description of Artificial Sequence: Synthetic polypeptide"
  MOD_RES (1)..(9): Any amino acid
  MOD_RES (11)..(12): Any amino acid
  MOD_RES (14)..(18): Any amino acid
  MOD_RES (27)..(29): Any amino acid
  MOD_RES (31)..(37): Any amino acid
  MOD_RES (39)..(40): Any amino acid
  MOD_RES (42)..(46): Any amino acid
  MOD_RES (55)..(57): Any amino acid
  MOD_RES (59)..(65): Any amino acid
  MOD_RES (67)..(68): Any amino acid
  MOD_RES (70)..(74): Any amino acid
  MOD_RES (83)..(85): Any amino acid
  MOD_RES (87)..(93): Any amino acid
  MOD_RES (95)..(96): Any amino acid
  MOD_RES (98)..(102): Any amino acid
  MOD_RES (111)..(113): Any amino acid
  MOD_RES (115)..(121): Any amino acid
  MOD_RES (123)..(124): Any amino acid
  MOD_RES (126)..(130): Any amino acid
  MOD_RES (139)..(141): Any amino acid
  MOD_RES (143)..(149): Any amino acid
  MOD_RES (151)..(152): Any amino acid
  MOD_RES (154)..(158): Any amino acid
  MOD_RES (167)..(169): Any amino acid
  MOD_RES (171)..(177): Any amino acid
  MOD_RES (179)..(180): Any amino acid
  MOD_RES (182)..(186): Any amino acid
  MOD_RES (195)..(197): Any amino acid
  MOD_RES (199)..(209): Any amino acid
XXXXXXXXXCXXCXXXXXSKKALTEHXXXHXXXXXXXCXXCXXXXXRNDALTEHXXXHXXXXXXXCXXCXXXXXRSDELVRHXXXHXXXXXXXCXXCXXXXXSPADLTRHXXXHXXXXXXXCXXCXXXXXTHLDLIRHXXXHXXXXXXXCXXCXXXXXRNDTLTEHXXXHXXXXXXXCXXCXXXXXRSDHLTTHXXXHXXXXXXXXXXX

SEQ ID NO: 2266 - protein, 209 aa, Artificial Sequence
  source: /note="Description of Artificial Sequence: Synthetic polypeptide"
  MOD_RES (1)..(9): Any amino acid
  MOD_RES (11)..(12): Any amino acid
  MOD_RES (14)..(18): Any amino acid
  MOD_RES (27)..(29): Any amino acid
  MOD_RES (31)..(37): Any amino acid
  MOD_RES (39)..(40): Any amino acid
  MOD_RES (42)..(46): Any amino acid
  MOD_RES (55)..(57): Any amino acid
  MOD_RES (59)..(65): Any amino acid
  MOD_RES (67)..(68): Any amino acid
  MOD_RES (70)..(74): Any amino acid
  MOD_RES (83)..(85): Any amino acid
  MOD_RES (87)..(93): Any amino acid
  MOD_RES (95)..(96): Any amino acid
  MOD_RES (98)..(102): Any amino acid
  MOD_RES (111)..(113): Any amino acid
  MOD_RES (115)..(121): Any amino acid
  MOD_RES (123)..(124): Any amino acid
  MOD_RES (126)..(130): Any amino acid
  MOD_RES (139)..(141): Any amino acid
  MOD_RES (143)..(149): Any amino acid
  MOD_RES (151)..(152): Any amino acid
  MOD_RES (154)..(158): Any amino acid
  MOD_RES (167)..(169): Any amino acid
  MOD_RES (171)..(177): Any amino acid
  MOD_RES (179)..(180): Any amino acid
  MOD_RES (182)..(186): Any amino acid
  MOD_RES (195)..(197): Any amino acid
  MOD_RES (199)..(209): Any amino acid
XXXXXXXXXCXXCXXXXXDCRDLARHXXXHXXXXXXXCXXCXXXXXTSHSLTEHXXXHXXXXXXXCXXCXXXXXDPGNLVRHXXXHXXXXXXXCXXCXXXXXRNDALTEHXXXHXXXXXXXCXXCXXXXXQSGDLRRHXXXHXXXXXXXCXXCXXXXXTSGELVRHXXXHXXXXXXXCXXCXXXXXHRTTLTNHXXXHXXXXXXXXXXX

SEQ ID NO: 2267 - protein, 209 aa, Artificial Sequence
  source: /note="Description of Artificial Sequence: Synthetic polypeptide"
  MOD_RES (1)..(9): Any amino acid
  MOD_RES (11)..(12): Any amino acid
  MOD_RES (14)..(18): Any amino acid
  MOD_RES (27)..(29): Any amino acid
  MOD_RES (31)..(37): Any amino acid
  MOD_RES (39)..(40): Any amino acid
  MOD_RES (42)..(46): Any amino acid
  MOD_RES (55)..(57): Any amino acid
  MOD_RES (59)..(65): Any amino acid
  MOD_RES (67)..(68): Any amino acid
  MOD_RES (70)..(74): Any amino acid
  MOD_RES (83)..(85): Any amino acid
  MOD_RES (87)..(93): Any amino acid
  MOD_RES (95)..(96): Any amino acid
  MOD_RES (98)..(102): Any amino acid
  MOD_RES (111)..(113): Any amino acid
  MOD_RES (115)..(121): Any amino acid
  MOD_RES (123)..(124): Any amino acid
  MOD_RES (126)..(130): Any amino acid
  MOD_RES (139)..(141): Any amino acid
  MOD_RES (143)..(149): Any amino acid
  MOD_RES (151)..(152): Any amino acid
  MOD_RES (154)..(158): Any amino acid
  MOD_RES (167)..(169): Any amino acid
  MOD_RES (171)..(177): Any amino acid
  MOD_RES (179)..(180): Any amino acid
  MOD_RES (182)..(186): Any amino acid
  MOD_RES (195)..(197): Any amino acid
  MOD_RES (199)..(209): Any amino acid
XXXXXXXXXCXXCXXXXXQAGHLASHXXXHXXXXXXXCXXCXXXXXHKNALQNHXXXHXXXXXXXCXXCXXXXXQRAHLERHXXXHXXXXXXXCXXCXXXXXTKNSLTEHXXXHXXXXXXXCXXCXXXXXSKKALTEHXXXHXXXXXXXCXXCXXXXXSKKALTEHXXXHXXXXXXXCXXCXXXXXQNSTLTEHXXXHXXXXXXXXXXX

SEQ ID NO: 2268 - protein, 209 aa, Artificial Sequence
  source: /note="Description of Artificial Sequence: Synthetic polypeptide"
  MOD_RES (1)..(9): Any amino acid
  MOD_RES (11)..(12): Any amino acid
  MOD_RES (14)..(18): Any amino acid
  MOD_RES (27)..(29): Any amino acid
  MOD_RES (31)..(37): Any amino acid
  MOD_RES (39)..(40): Any amino acid
  MOD_RES (42)..(46): Any amino acid
  MOD_RES (55)..(57): Any amino acid
  MOD_RES (59)..(65): Any amino acid
  MOD_RES (67)..(68): Any amino acid
  MOD_RES (70)..(74): Any amino acid
  MOD_RES (83)..(85): Any amino acid
  MOD_RES (87)..(93): Any amino acid
  MOD_RES (95)..(96): Any amino acid
  MOD_RES (98)..(102): Any amino acid
  MOD_RES (111)..(113): Any amino acid
  MOD_RES (115)..(121): Any amino acid
  MOD_RES (123)..(124): Any amino acid
  MOD_RES (126)..(130): Any amino acid
  MOD_RES (139)..(141): Any amino acid
  MOD_RES (143)..(149): Any amino acid
  MOD_RES (151)..(152): Any amino acid
  MOD_RES (154)..(158): Any amino acid
  MOD_RES (167)..(169): Any amino acid
  MOD_RES (171)..(177): Any amino acid
  MOD_RES (179)..(180): Any amino acid
  MOD_RES (182)..(186): Any amino acid
  MOD_RES (195)..(197): Any amino acid
  MOD_RES (199)..(209): Any amino acid
XXXXXXXXXCXXCXXXXXHKNALQNHXXXHXXXXXXXCXXCXXXXXQRAHLERHXXXHXXXXXXXCXXCXXXXXTKNSLTEHXXXHXXXXXXXCXXCXXXXXSKKALTEHXXXHXXXXXXXCXXCXXXXXSKKALTEHXXXHXXXXXXXCXXCXXXXXQNSTLTEHXXXHXXXXXXXCXXCXXXXXERSHLREHXXXHXXXXXXXXXXX

SEQ ID NO: 2269 - protein, 209 aa, Artificial Sequence
  source: /note="Description of Artificial Sequence: Synthetic polypeptide"
  MOD_RES (1)..(9): Any amino acid
  MOD_RES (11)..(12): Any amino acid
  MOD_RES (14)..(18): Any amino acid
  MOD_RES (27)..(29): Any amino acid
  MOD_RES (31)..(37): Any amino acid
  MOD_RES (39)..(40): Any amino acid
  MOD_RES (42)..(46): Any amino acid
  MOD_RES (55)..(57): Any amino acid
  MOD_RES (59)..(65): Any amino acid
  MOD_RES (67)..(68): Any amino acid
  MOD_RES (70)..(74): Any amino acid
  MOD_RES (83)..(85): Any amino acid
  MOD_RES (87)..(93): Any amino acid
  MOD_RES (95)..(96): Any amino acid
  MOD_RES (98)..(102): Any amino acid
  MOD_RES (111)..(113): Any amino acid
  MOD_RES (115)..(121): Any amino acid
  MOD_RES (123)..(124): Any amino acid
  MOD_RES (126)..(130): Any amino acid
  MOD_RES (139)..(141): Any amino acid
  MOD_RES (143)..(149): Any amino acid
  MOD_RES (151)..(152): Any amino acid
  MOD_RES (154)..(158): Any amino acid
  MOD_RES (167)..(169): Any amino acid
  MOD_RES (171)..(177): Any amino acid
  MOD_RES (179)..(180): Any amino acid
  MOD_RES (182)..(186): Any amino acid
  MOD_RES (195)..(197): Any amino acid
  MOD_RES (199)..(209): Any amino acid
XXXXXXXXXCXXCXXXXXQSSNLVRHXXXHXXXXXXXCXXCXXXXXQAGHLASHXXXHXXXXXXXCXXCXXXXXHKNALQNHXXXHXXXXXXXCXXCXXXXXQRAHLERHXXXHXXXXXXXCXXCXXXXXTKNSLTEHXXXHXXXXXXXCXXCXXXXXSKKALTEHXXXHXXXXXXXCXXCXXXXXSKKALTEHXXXHXXXXXXXXXXX

SEQ ID NO: 2270 - protein, 209 aa, Artificial Sequence
  source: /note="Description of Artificial Sequence: Synthetic polypeptide"
  MOD_RES (1)..(9): Any amino acid
  MOD_RES (11)..(12): Any amino acid
  MOD_RES (14)..(18): Any amino acid
  MOD_RES (27)..(29): Any amino acid
  MOD_RES (31)..(37): Any amino acid
  MOD_RES (39)..(40): Any amino acid
  MOD_RES (42)..(46): Any amino acid
  MOD_RES (55)..(57): Any amino acid
  MOD_RES (59)..(65): Any amino acid
  MOD_RES (67)..(68): Any amino acid
  MOD_RES (70)..(74): Any amino acid
  MOD_RES (83)..(85): Any amino acid
  MOD_RES (87)..(93): Any amino acid
  MOD_RES (95)..(96): Any amino acid
  MOD_RES (98)..(102): Any amino acid
  MOD_RES (111)..(113): Any amino acid
  MOD_RES (115)..(121): Any amino acid
  MOD_RES (123)..(124): Any amino acid
  MOD_RES (126)..(130): Any amino acid
  MOD_RES (139)..(141): Any amino acid
  MOD_RES (143)..(149): Any amino acid
  MOD_RES (151)..(152): Any amino acid
  MOD_RES (154)..(158): Any amino acid
  MOD_RES (167)..(169): Any amino acid
  MOD_RES (171)..(177): Any amino acid
  MOD_RES (179)..(180): Any amino acid
  MOD_RES (182)..(186): Any amino acid
  MOD_RES (195)..(197): Any amino acid
  MOD_RES (199)..(209): Any amino acid
XXXXXXXXXCXXCXXXXXTKNSLTEHXXXHXXXXXXXCXXCXXXXXSKKALTEHXXXHXXXXXXXCXXCXXXXXSKKALTEHXXXHXXXXXXXCXXCXXXXXQNSTLTEHXXXHXXXXXXXCXXCXXXXXERSHLREHXXXHXXXXXXXCXXCXXXXXSKKHLAEHXXXHXXXXXXXCXXCXXXXXQRAHLERHXXXHXXXXXXXXXXX

SEQ ID NO: 2271 - protein, 209 aa, Artificial Sequence
  source: /note="Description of Artificial Sequence: Synthetic polypeptide"
  MOD_RES (1)..(9): Any amino acid
  MOD_RES (11)..(12): Any amino acid
  MOD_RES (14)..(18): Any amino acid
  MOD_RES (27)..(29): Any amino acid
  MOD_RES (31)..(37): Any amino acid
  MOD_RES (39)..(40): Any amino acid
  MOD_RES (42)..(46): Any amino acid
  MOD_RES (55)..(57): Any amino acid
  MOD_RES (59)..(65): Any amino acid
  MOD_RES (67)..(68): Any amino acid
  MOD_RES (70)..(74): Any amino acid
  MOD_RES (83)..(85): Any amino acid
  MOD_RES (87)..(93): Any amino acid
  MOD_RES (95)..(96): Any amino acid
  MOD_RES (98)..(102): Any amino acid
  MOD_RES (111)..(113): Any amino acid
  MOD_RES (115)..(121): Any amino acid
  MOD_RES (123)..(124): Any amino acid
  MOD_RES (126)..(130): Any amino acid
  MOD_RES (139)..(141): Any amino acid
  MOD_RES (143)..(149): Any amino acid
  MOD_RES (151)..(152): Any amino acid
  MOD_RES (154)..(158): Any amino acid
  MOD_RES (167)..(169): Any amino acid
  MOD_RES (171)..(177): Any amino acid
  MOD_RES (179)..(180): Any amino acid
  MOD_RES (182)..(186): Any amino acid
  MOD_RES (195)..(197): Any amino acid
  MOD_RES (199)..(209): Any amino acid
XXXXXXXXXCXXCXXXXXQRAHLERHXXXHXXXXXXXCXXCXXXXXTKNSLTEHXXXHXXXXXXXCXXCXXXXXSKKALTEHXXXHXXXXXXXCXXCXXXXXSKKALTEHXXXHXXXXXXXCXXCXXXXXQNSTLTEHXXXHXXXXXXXCXXCXXXXXERSHLREHXXXHXXXXXXXCXXCXXXXXSKKHLAEHXXXHXXXXXXXXXXX

SEQ ID NO: 2272 - protein, 209 aa, Artificial Sequence
  source: /note="Description of Artificial Sequence: Synthetic polypeptide"
  MOD_RES (1)..(9): Any amino acid
  MOD_RES (11)..(12): Any amino acid
  MOD_RES (14)..(18): Any amino acid
  MOD_RES (27)..(29): Any amino acid
  MOD_RES (31)..(37): Any amino acid
  MOD_RES (39)..(40): Any amino acid
  MOD_RES (42)..(46): Any amino acid
  MOD_RES (55)..(57): Any amino acid
  MOD_RES (59)..(65): Any amino acid
  MOD_RES (67)..(68): Any amino acid
  MOD_RES (70)..(74): Any amino acid
  MOD_RES (83)..(85): Any amino acid
  MOD_RES (87)..(93): Any amino acid
  MOD_RES (95)..(96): Any amino acid
  MOD_RES (98)..(102): Any amino acid
  MOD_RES (111)..(113): Any amino acid
  MOD_RES (115)..(121): Any amino acid
  MOD_RES (123)..(124): Any amino acid
  MOD_RES (126)..(130): Any amino acid
  MOD_RES (139)..(141): Any amino acid
  MOD_RES (143)..(149): Any amino acid
  MOD_RES (151)..(152): Any amino acid
  MOD_RES (154)..(158): Any amino acid
  MOD_RES (167)..(169): Any amino acid
  MOD_RES (171)..(177): Any amino acid
  MOD_RES (179)..(180): Any amino acid
  MOD_RES (182)..(186): Any amino acid
  MOD_RES (195)..(197): Any amino acid
  MOD_RES (199)..(209): Any amino acid
XXXXXXXXXCXXCXXXXXSKKALTEHXXXHXXXXXXXCXXCXXXXXSKKALTEHXXXHXXXXXXXCXXCXXXXXQNSTLTEHXXXHXXXXXXXCXXCXXXXXERSHLREHXXXHXXXXXXXCXXCXXXXXSKKHLAEHXXXHXXXXXXXCXXCXXXXXQRAHLERHXXXHXXXXXXXCXXCXXXXXTHLDLIRHXXXHXXXXXXXXXXX

SEQ ID NO: 2273 - protein, 209 aa, Artificial Sequence
  source: /note="Description of Artificial Sequence: Synthetic polypeptide"
  MOD_RES (1)..(9): Any amino acid
  MOD_RES (11)..(12): Any amino acid
  MOD_RES (14)..(18): Any amino acid
  MOD_RES (27)..(29): Any amino acid
  MOD_RES (31)..(37): Any amino acid
  MOD_RES (39)..(40): Any amino acid
  MOD_RES (42)..(46): Any amino acid
  MOD_RES (55)..(57): Any amino acid
  MOD_RES (59)..(65): Any amino acid
  MOD_RES (67)..(68): Any amino acid
  MOD_RES (70)..(74): Any amino acid
  MOD_RES (83)..(85): Any amino acid
  MOD_RES (87)..(93): Any amino acid
  MOD_RES (95)..(96): Any amino acid
  MOD_RES (98)..(102): Any amino acid
  MOD_RES (111)..(113): Any amino acid
  MOD_RES (115)..(121): Any amino acid
  MOD_RES (123)..(124): Any amino acid
  MOD_RES (126)..(130): Any amino acid
  MOD_RES (139)..(141): Any amino acid
  MOD_RES (143)..(149): Any amino acid
  MOD_RES (151)..(152): Any amino acid
  MOD_RES (154)..(158): Any amino acid
  MOD_RES (167)..(169): Any amino acid
  MOD_RES (171)..(177): Any amino acid
  MOD_RES (179)..(180): Any amino acid
  MOD_RES (182)..(186): Any amino acid
  MOD_RES (195)..(197): Any amino acid
  MOD_RES (199)..(209): Any amino acid
XXXXXXXXXCXXCXXXXXRSDELVRHXXXHXXXXXXXCXXCXXXXXTSGNLVRHXXXHXXXXXXXCXXCXXXXXQSGDLRRHXXXHXXXXXXXCXXCXXXXXRSDKLVRHXXXHXXXXXXXCXXCXXXXXRSDELVRHXXXHXXXXXXXCXXCXXXXXREDNLHTHXXXHXXXXXXXCXXCXXXXXRSDHLTTHXXXHXXXXXXXXXXX

SEQ ID NO: 2274 - protein, 209 aa, Artificial Sequence
  source: /note="Description of Artificial Sequence: Synthetic polypeptide"
  MOD_RES (1)..(9): Any amino acid
  MOD_RES (11)..(12): Any amino acid
  MOD_RES (14)..(18): Any amino acid
  MOD_RES (27)..(29): Any amino acid
  MOD_RES (31)..(37): Any amino acid
  MOD_RES (39)..(40): Any amino acid
  MOD_RES (42)..(46): Any amino acid
  MOD_RES (55)..(57): Any amino acid
  MOD_RES (59)..(65): Any amino acid
  MOD_RES (67)..(68): Any amino acid
  MOD_RES (70)..(74): Any amino acid
  MOD_RES (83)..(85): Any amino acid
  MOD_RES (87)..(93): Any amino acid
  MOD_RES (95)..(96): Any amino acid
  MOD_RES (98)..(102): Any amino acid
  MOD_RES (111)..(113): Any amino acid
  MOD_RES (115)..(121): Any amino acid
  MOD_RES (123)..(124): Any amino acid
  MOD_RES (126)..(130): Any amino acid
  MOD_RES (139)..(141): Any amino acid
  MOD_RES (143)..(149): Any amino acid
  MOD_RES (151)..(152): Any amino acid
  MOD_RES (154)..(158): Any amino acid
  MOD_RES (167)..(169): Any amino acid
  MOD_RES (171)..(177): Any amino acid
  MOD_RES (179)..(180): Any amino acid
  MOD_RES (182)..(186): Any amino acid
  MOD_RES (195)..(197): Any amino acid
  MOD_RES (199)..(209): Any amino acid
XXXXXXXXXCXXCXXXXXSKKHLAEHXXXHXXXXXXXCXXCXXXXXRSDELVRHXXXHXXXXXXXCXXCXXXXXTSGNLVRHXXXHXXXXXXXCXXCXXXXXQSGDLRRHXXXHXXXXXXXCXXCXXXXXRSDKLVRHXXXHXXXXXXXCXXCXXXXXRSDELVRHXXXHXXXXXXXCXXCXXXXXREDNLHTHXXXHXXXXXXXXXXX

SEQ ID NO: 2275 - protein, 209 aa, Artificial Sequence
  source: /note="Description of Artificial Sequence: Synthetic polypeptide"
  MOD_RES (1)..(9): Any amino acid
  MOD_RES (11)..(12): Any amino acid
  MOD_RES (14)..(18): Any amino acid
  MOD_RES (27)..(29): Any amino acid
  MOD_RES (31)..(37): Any amino acid
  MOD_RES (39)..(40): Any amino acid
  MOD_RES (42)..(46): Any amino acid
  MOD_RES (55)..(57): Any amino acid
  MOD_RES (59)..(65): Any amino acid
  MOD_RES (67)..(68): Any amino acid
  MOD_RES (70)..(74): Any amino acid
  MOD_RES (83)..(85): Any amino acid
  MOD_RES (87)..(93): Any amino acid
  MOD_RES (95)..(96): Any amino acid
  MOD_RES (98)..(102): Any amino acid
  MOD_RES (111)..(113): Any amino acid
  MOD_RES (115)..(121): Any amino acid
  MOD_RES (123)..(124): Any amino acid
  MOD_RES (126)..(130): Any amino acid
  MOD_RES (139)..(141): Any amino acid
  MOD_RES (143)..(149): Any amino acid
  MOD_RES (151)..(152): Any amino acid
  MOD_RES (154)..(158): Any amino acid
  MOD_RES (167)..(169): Any amino acid
  MOD_RES (171)..(177): Any amino acid
  MOD_RES (179)..(180): Any amino acid
  MOD_RES (182)..(186): Any amino acid
  MOD_RES (195)..(197): Any amino acid
  MOD_RES (199)..(209): Any amino acid
XXXXXXXXXCXXCXXXXXRSDKLVRHXXXHXXXXXXXCXXCXXXXXRSDELVRHXXXHXXXXXXXCXXCXXXXXREDNLHTHXXXHXXXXXXXCXXCXXXXXRSDHLTTHXXXHXXXXXXXCXXCXXXXXQSGNLTEHXXXHXXXXXXXCXXCXXXXXRSDKLVRHXXXHXXXXXXXCXXCXXXXXTSGNLVRHXXXHXXXXXXXXXXX

SEQ ID NO: 2276 - protein, 209 aa, Artificial Sequence
  source: /note="Description of Artificial Sequence: Synthetic polypeptide"
  MOD_RES (1)..(9): Any amino acid
  MOD_RES (11)..(12): Any amino acid
  MOD_RES (14)..(18): Any amino acid
  MOD_RES (27)..(29): Any amino acid
  MOD_RES (31)..(37): Any amino acid
  MOD_RES (39)..(40): Any amino acid
  MOD_RES (42)..(46): Any amino acid
  MOD_RES (55)..(57): Any amino acid
  MOD_RES (59)..(65): Any amino acid
  MOD_RES (67)..(68): Any amino acid
  MOD_RES (70)..(74): Any amino acid
  MOD_RES (83)..(85): Any amino acid
  MOD_RES (87)..(93): Any amino acid
  MOD_RES (95)..(96): Any amino acid
  MOD_RES (98)..(102): Any amino acid
  MOD_RES (111)..(113): Any amino acid
  MOD_RES (115)..(121): Any amino acid
  MOD_RES (123)..(124): Any amino acid
  MOD_RES (126)..(130): Any amino acid
  MOD_RES (139)..(141): Any amino acid
  MOD_RES (143)..(149): Any amino acid
  MOD_RES (151)..(152): Any amino acid
  MOD_RES (154)..(158): Any amino acid
  MOD_RES (167)..(169): Any amino acid
  MOD_RES (171)..(177): Any amino acid
  MOD_RES (179)..(180): Any amino acid
  MOD_RES (182)..(186): Any amino acid
  MOD_RES (195)..(197): Any amino acid
  MOD_RES (199)..(209): Any amino acid
XXXXXXXXXCXXCXXXXXQSGDLRRHXXXHXXXXXXXCXXCXXXXXRSDKLVRHXXXHXXXXXXXCXXCXXXXXRSDELVRHXXXHXXXXXXXCXXCXXXXXREDNLHTHXXXHXXXXXXXCXXCXXXXXRSDHLTTHXXXHXXXXXXXCXXCXXXXXQSGNLTEHXXXHXXXXXXXCXXCXXXXXRSDKLVRHXXXHXXXXXXXXXXX

SEQ ID NO: 2277 - protein, 209 aa, Artificial Sequence
  source: /note="Description of Artificial Sequence: Synthetic polypeptide"
  MOD_RES (1)..(9): Any amino acid
  MOD_RES (11)..(12): Any amino acid
  MOD_RES (14)..(18): Any amino acid
  MOD_RES (27)..(29): Any amino acid
  MOD_RES (31)..(37): Any amino acid
  MOD_RES (39)..(40): Any amino acid
  MOD_RES (42)..(46): Any amino acid
  MOD_RES (55)..(57): Any amino acid
  MOD_RES (59)..(65): Any amino acid
  MOD_RES (67)..(68): Any amino acid
  MOD_RES (70)..(74): Any amino acid
  MOD_RES (83)..(85): Any amino acid
  MOD_RES (87)..(93): Any amino acid
  MOD_RES (95)..(96): Any amino acid
  MOD_RES (98)..(102): Any amino acid
  MOD_RES (111)..(113): Any amino acid
  MOD_RES (115)..(121): Any amino acid
  MOD_RES (123)..(124): Any amino acid
  MOD_RES (126)..(130): Any amino acid
  MOD_RES (139)..(141): Any amino acid
  MOD_RES (143)..(149): Any amino acid
  MOD_RES (151)..(152): Any amino acid
  MOD_RES (154)..(158): Any amino acid
  MOD_RES (167)..(169): Any amino acid
  MOD_RES (171)..(177): Any amino acid
  MOD_RES (179)..(180): Any amino acid
  MOD_RES (182)..(186): Any amino acid
  MOD_RES (195)..(197): Any amino acid
  MOD_RES (199)..(209): Any amino acid
XXXXXXXXXCXXCXXXXXTSGNLVRHXXXHXXXXXXXCXXCXXXXXQSGDLRRHXXXHXXXXXXXCXXCXXXXXRSDKLVRHXXXHXXXXXXXCXXCXXXXXRSDELVRHXXXHXXXXXXXCXXCXXXXXREDNLHTHXXXHXXXXXXXCXXCXXXXXRSDHLTTHXXXHXXXXXXXCXXCXXXXXQSGNLTEHXXXHXXXXXXXXXXX

SEQ ID NO: 2278 - protein, 209 aa, Artificial Sequence
  source: /note="Description of Artificial Sequence: Synthetic polypeptide"
  MOD_RES (1)..(9): Any amino acid
  MOD_RES (11)..(12): Any amino acid
  MOD_RES (14)..(18): Any amino acid
  MOD_RES (27)..(29): Any amino acid
  MOD_RES (31)..(37): Any amino acid
  MOD_RES (39)..(40): Any amino acid
  MOD_RES (42)..(46): Any amino acid
  MOD_RES (55)..(57): Any amino acid
  MOD_RES (59)..(65): Any amino acid
  MOD_RES (67)..(68): Any amino acid
  MOD_RES (70)..(74): Any amino acid
  MOD_RES (83)..(85): Any amino acid
  MOD_RES (87)..(93): Any amino acid
  MOD_RES (95)..(96): Any amino acid
  MOD_RES (98)..(102): Any amino acid
  MOD_RES (111)..(113): Any amino acid
  MOD_RES (115)..(121): Any amino acid
  MOD_RES (123)..(124): Any amino acid
  MOD_RES (126)..(130): Any amino acid
  MOD_RES (139)..(141): Any amino acid
  MOD_RES (143)..(149): Any amino acid
  MOD_RES (151)..(152): Any amino acid
  MOD_RES (154)..(158): Any amino acid
  MOD_RES (167)..(169): Any amino acid
  MOD_RES (171)..(177): Any amino acid
  MOD_RES (179)..(180): Any amino acid
  MOD_RES (182)..(186): Any amino acid
  MOD_RES (195)..(197): Any amino acid
  MOD_RES (199)..(209): Any amino acid
XXXXXXXXXCXXCXXXXXRSDHLTNHXXXHXXXXXXXCXXCXXXXXSKKHLAEHXXXHXXXXXXXCXXCXXXXXRSDELVRHXXXHXXXXXXXCXXCXXXXXTSGNLVRHXXXHXXXXXXXCXXCXXXXXQSGDLRRHXXXHXXXXXXXCXXCXXXXXRSDKLVRHXXXHXXXXXXXCXXCXXXXXRSDELVRHXXXHXXXXXXXXXXX

SEQ ID NO: 2279 - protein, 209 aa, Artificial Sequence
  source: /note="Description of Artificial Sequence: Synthetic polypeptide"
  MOD_RES (1)..(9): Any amino acid
  MOD_RES (11)..(12): Any amino acid
  MOD_RES (14)..(18): Any amino acid
  MOD_RES (27)..(29): Any amino acid
  MOD_RES (31)..(37): Any amino acid
  MOD_RES (39)..(40): Any amino acid
  MOD_RES (42)..(46): Any amino acid
  MOD_RES (55)..(57): Any amino acid
  MOD_RES (59)..(65): Any amino acid
  MOD_RES (67)..(68): Any amino acid
  MOD_RES (70)..(74): Any amino acid
  MOD_RES (83)..(85): Any amino acid
  MOD_RES (87)..(93): Any amino acid
  MOD_RES (95)..(96): Any amino acid
  MOD_RES (98)..(102): Any amino acid
  MOD_RES (111)..(113): Any amino acid
  MOD_RES (115)..(121): Any amino acid
  MOD_RES (123)..(124): Any amino acid
  MOD_RES (126)..(130): Any amino acid
  MOD_RES (139)..(141): Any amino acid
  MOD_RES (143)..(149): Any amino acid
  MOD_RES (151)..(152): Any amino acid
  MOD_RES (154)..(158): Any amino acid
  MOD_RES (167)..(169): Any amino acid
  MOD_RES (171)..(177): Any amino acid
  MOD_RES (179)..(180): Any amino acid
  MOD_RES (182)..(186): Any amino acid
  MOD_RES (195)..(197): Any amino acid
  MOD_RES (199)..(209): Any amino acid
XXXXXXXXXCXXCXXXXXRSDELVRHXXXHXXXXXXXCXXCXXXXXREDNLHTHXXXHXXXXXXXCXXCXXXXXRSDHLTTHXXXHXXXXXXXCXXCXXXXXQSGNLTEHXXXHXXXXXXXCXXCXXXXXRSDKLVRHXXXHXXXXXXXCXXCXXXXXTSGNLVRHXXXHXXXXXXXCXXCXXXXXDPGNLVRHXXXHXXXXXXXXXXX

SEQ ID NO: 2280 - protein, 209 aa, Artificial Sequence
  source: /note="Description of Artificial Sequence: Synthetic polypeptide"
  MOD_RES (1)..(9): Any amino acid
  MOD_RES (11)..(12): Any amino acid
  MOD_RES (14)..(18): Any amino acid
  MOD_RES (27)..(29): Any amino acid
  MOD_RES (31)..(37): Any amino acid
  MOD_RES (39)..(40): Any amino acid
  MOD_RES (42)..(46): Any amino acid
  MOD_RES (55)..(57): Any amino acid
  MOD_RES (59)..(65): Any amino acid
  MOD_RES (67)..(68): Any amino acid
  MOD_RES (70)..(74): Any amino acid
  MOD_RES (83)..(85): Any amino acid
  MOD_RES (87)..(93): Any amino acid
  MOD_RES (95)..(96): Any amino acid
  MOD_RES (98)..(102): Any amino acid
  MOD_RES (111)..(113): Any amino acid
  MOD_RES (115)..(121): Any amino acid
  MOD_RES (123)..(124): Any amino acid
  MOD_RES (126)..(130): Any amino acid
  MOD_RES (139)..(141): Any amino acid
  MOD_RES (143)..(149): Any amino acid
  MOD_RES (151)..(152): Any amino acid
  MOD_RES (154)..(158): Any amino acid
  MOD_RES (167)..(169): Any amino acid
  MOD_RES (171)..(177): Any amino acid
  MOD_RES (179)..(180): Any amino acid
  MOD_RES (182)..(186): Any amino acid
  MOD_RES (195)..(197): Any amino acid
  MOD_RES (199)..(209): Any amino acid
XXXXXXXXXCXXCXXXXXREDNLHTHXXXHXXXXXXXCXXCXXXXXRSDHLTTHXXXHXXXXXXXCXXCXXXXXQSGNLTEHXXXHXXXXXXXCXXCXXXXXRSDKLVRHXXXHXXXXXXXCXXCXXXXXTSGNLVRHXXXHXXXXXXXCXXCXXXXXDPGNLVRHXXXHXXXXXXXCXXCXXXXXTSGSLVRHXXXHXXXXXXXXXXX

SEQ ID NO: 2281 - protein, 209 aa, Artificial Sequence
  source: /note="Description of Artificial Sequence: Synthetic polypeptide"
  MOD_RES (1)..(9): Any amino acid
  MOD_RES (11)..(12): Any amino acid
  MOD_RES (14)..(18): Any amino acid
  MOD_RES (27)..(29): Any amino acid
  MOD_RES (31)..(37): Any amino acid
  MOD_RES (39)..(40): Any amino acid
  MOD_RES (42)..(46): Any amino acid
  MOD_RES (55)..(57): Any amino acid
  MOD_RES (59)..(65): Any amino acid
  MOD_RES (67)..(68): Any amino acid
  MOD_RES (70)..(74): Any amino acid
  MOD_RES (83)..(85): Any amino acid
  MOD_RES (87)..(93): Any amino acid
  MOD_RES (95)..(96): Any amino acid
  MOD_RES (98)..(102): Any amino acid
  MOD_RES (111)..(113): Any amino acid
  MOD_RES (115)..(121): Any amino acid
  MOD_RES (123)..(124): Any amino acid
  MOD_RES (126)..(130): Any amino acid
  MOD_RES (139)..(141): Any amino acid
  MOD_RES (143)..(149): Any amino acid
  MOD_RES (151)..(152): Any amino acid
  MOD_RES (154)..(158): Any amino acid
  MOD_RES (167)..(169): Any amino acid
  MOD_RES (171)..(177): Any amino acid
  MOD_RES (179)..(180): Any amino acid
  MOD_RES (182)..(186): Any amino acid
  MOD_RES (195)..(197): Any amino acid
  MOD_RES (199)..(209): Any amino acid
XXXXXXXXXCXXCXXXXXQSGNLTEHXXXHXXXXXXXCXXCXXXXXRSDKLVRHXXXHXXXXXXXCXXCXXXXXTSGNLVRHXXXHXXXXXXXCXXCXXXXXDPGNLVRHXXXHXXXXXXXCXXCXXXXXTSGSLVRHXXXHXXXXXXXCXXCXXXXXTSGHLVRHXXXHXXXXXXXCXXCXXXXXQSGDLRRHXXXHXXXXXXXXXXX

SEQ ID NO: 2282 - protein, 209 aa, Artificial Sequence
  source: /note="Description of Artificial Sequence: Synthetic polypeptide"
  MOD_RES (1)..(9): Any amino acid
  MOD_RES (11)..(12): Any amino acid
  MOD_RES (14)..(18): Any amino acid
  MOD_RES (27)..(29): Any amino acid
  MOD_RES (31)..(37): Any amino acid
  MOD_RES (39)..(40): Any amino acid
  MOD_RES (42)..(46): Any amino acid
  MOD_RES (55)..(57): Any amino acid
  MOD_RES (59)..(65): Any amino acid
  MOD_RES (67)..(68): Any amino acid
  MOD_RES (70)..(74): Any amino acid
  MOD_RES (83)..(85): Any amino acid
  MOD_RES (87)..(93): Any amino acid
  MOD_RES (95)..(96): Any amino acid
  MOD_RES (98)..(102): Any amino acid
  MOD_RES (111)..(113): Any amino acid
  MOD_RES (115)..(121): Any amino acid
  MOD_RES (123)..(124): Any amino acid
  MOD_RES (126)..(130): Any amino acid
  MOD_RES (139)..(141): Any amino acid
  MOD_RES (143)..(149): Any amino acid
  MOD_RES (151)..(152): Any amino acid
  MOD_RES (154)..(158): Any amino acid
  MOD_RES (167)..(169): Any amino acid
  MOD_RES (171)..(177): Any amino acid
  MOD_RES (179)..(180): Any amino acid
  MOD_RES (182)..(186): Any amino acid
  MOD_RES (195)..(197): Any amino acid
  MOD_RES (199)..(209): Any amino acid
XXXXXXXXXCXXCXXXXXRSDHLTTHXXXHXXXXXXXCXXCXXXXXQSGNLTEHXXXHXXXXXXXCXXCXXXXXRSDKLVRHXXXHXXXXXXXCXXCXXXXXTSGNLVRHXXXHXXXXXXXCXXCXXXXXDPGNLVRHXXXHXXXXXXXCXXCXXXXXTSGSLVRHXXXHXXXXXXXCXXCXXXXXTSGHLVRHXXXHXXXXXXXXXXX

SEQ ID NO: 2283 - protein, 209 aa, Artificial Sequence
  source: /note="Description of Artificial Sequence: Synthetic polypeptide"
  MOD_RES (1)..(9): Any amino acid
  MOD_RES (11)..(12): Any amino acid
  MOD_RES (14)..(18): Any amino acid
  MOD_RES (27)..(29): Any amino acid
  MOD_RES (31)..(37): Any amino acid
  MOD_RES (39)..(40): Any amino acid
  MOD_RES (42)..(46): Any amino acid
  MOD_RES (55)..(57): Any amino acid
  MOD_RES (59)..(65): Any amino acid
  MOD_RES (67)..(68): Any amino acid
  MOD_RES (70)..(74): Any amino acid
  MOD_RES (83)..(85): Any amino acid
  MOD_RES (87)..(93): Any amino acid
  MOD_RES (95)..(96): Any amino acid
  MOD_RES (98)..(102): Any amino acid
  MOD_RES (111)..(113): Any amino acid
  MOD_RES (115)..(121): Any amino acid
  MOD_RES (123)..(124): Any amino acid
  MOD_RES (126)..(130): Any amino acid
  MOD_RES (139)..(141): Any amino acid
  MOD_RES (143)..(149): Any amino acid
  MOD_RES (151)..(152): Any amino acid
  MOD_RES (154)..(158): Any amino acid
  MOD_RES (167)..(169): Any amino acid
  MOD_RES (171)..(177): Any amino acid
  MOD_RES (179)..(180): Any amino acid
  MOD_RES (182)..(186): Any amino acid
  MOD_RES (195)..(197): Any amino acid
  MOD_RES (199)..(209): Any amino acid
XXXXXXXXXCXXCXXXXXQLAHLRAHXXXHXXXXXXXCXXCXXXXXDPGHLVRHXXXHXXXXXXXCXXCXXXXXRSDKLVRHXXXHXXXXXXXCXXCXXXXXTSGHLVRHXXXHXXXXXXXCXXCXXXXXQSSSLVRHXXXHXXXXXXXCXXCXXXXXRRDELNVHXXXHXXXXXXXCXXCXXXXXQSGDLRRHXXXHXXXXXXXXXXX

SEQ ID NO: 2284 - protein, 209 aa, Artificial Sequence
  source: /note="Description of Artificial Sequence: Synthetic polypeptide"
  MOD_RES (1)..(9): Any amino acid
  MOD_RES (11)..(12): Any amino acid
  MOD_RES (14)..(18): Any amino acid
  MOD_RES (27)..(29): Any amino acid
  MOD_RES (31)..(37): Any amino acid
  MOD_RES (39)..(40): Any amino acid
  MOD_RES (42)..(46): Any amino acid
  MOD_RES (55)..(57): Any amino acid
  MOD_RES (59)..(65): Any amino acid
  MOD_RES (67)..(68): Any amino acid
  MOD_RES (70)..(74): Any amino acid
  MOD_RES (83)..(85): Any amino acid
  MOD_RES (87)..(93): Any amino acid
  MOD_RES (95)..(96): Any amino acid
  MOD_RES (98)..(102): Any amino acid
  MOD_RES (111)..(113): Any amino acid
  MOD_RES (115)..(121): Any amino acid
  MOD_RES (123)..(124): Any amino acid
  MOD_RES (126)..(130): Any amino acid
  MOD_RES (139)..(141): Any amino acid
  MOD_RES (143)..(149): Any amino acid
  MOD_RES (151)..(152): Any amino acid
  MOD_RES (154)..(158): Any amino acid
  MOD_RES (167)..(169): Any amino acid
  MOD_RES (171)..(177): Any amino acid
  MOD_RES (179)..(180): Any amino acid
  MOD_RES (182)..(186): Any amino acid
  MOD_RES (195)..(197): Any amino acid
  MOD_RES (199)..(209): Any amino acid
XXXXXXXXXCXXCXXXXXDPGHLVRHXXXHXXXXXXXCXXCXXXXXRSDKLVRHXXXHXXXXXXXCXXCXXXXXTSGHLVRHXXXHXXXXXXXCXXCXXXXXQSSSLVRHXXXHXXXXXXXCXXCXXXXXRRDELNVHXXXHXXXXXXXCXXCXXXXXQSGDLRRHXXXHXXXXXXXCXXCXXXXXRSDHLTTHXXXHXXXXXXXXXXX

SEQ ID NO: 2285 - protein, 209 aa, Artificial Sequence
  source: /note="Description of Artificial Sequence: Synthetic polypeptide"
  MOD_RES (1)..(9): Any amino acid
  MOD_RES (11)..(12): Any amino acid
  MOD_RES (14)..(18): Any amino acid
  MOD_RES (27)..(29): Any amino acid
  MOD_RES (31)..(37): Any amino acid
  MOD_RES (39)..(40): Any amino acid
  MOD_RES (42)..(46): Any amino acid
  MOD_RES (55)..(57): Any amino acid
  MOD_RES (59)..(65): Any amino acid
  MOD_RES (67)..(68): Any amino acid
  MOD_RES (70)..(74): Any amino acid
  MOD_RES (83)..(85): Any amino acid
  MOD_RES (87)..(93): Any amino acid
  MOD_RES (95)..(96): Any amino acid
  MOD_RES (98)..(102): Any amino acid
  MOD_RES (111)..(113): Any amino acid
  MOD_RES (115)..(121): Any amino acid
  MOD_RES (123)..(124): Any amino acid
  MOD_RES (126)..(130): Any amino acid
  MOD_RES (139)..(141): Any amino acid
  MOD_RES (143)..(149): Any amino acid
  MOD_RES (151)..(152): Any amino acid
  MOD_RES (154)..(158): Any amino acid
  MOD_RES (167)..(169): Any amino acid
  MOD_RES (171)..(177): Any amino acid
  MOD_RES (179)..(180): Any amino acid
  MOD_RES (182)..(186): Any amino acid
  MOD_RES (195)..(197): Any amino acid
  MOD_RES (199)..(209): Any amino acid
XXXXXXXXXCXXCXXXXXTSGHLVRHXXXHXXXXXXXCXXCXXXXXQSSSLVRHXXXHXXXXXXXCXXCXXXXXRRDELNVHXXXHXXXXXXXCXXCXXXXXQSGDLRRHXXXHXXXXXXXCXXCXXXXXRSDHLTTHXXXHXXXXXXXCXXCXXXXXQSGHLTEHXXXHXXXXXXXCXXCXXXXXQAGHLASHXXXHXXXXXXXXXXX

SEQ ID NO: 2286 - protein, 209 aa, Artificial Sequence
  source: /note="Description of Artificial Sequence: Synthetic polypeptide"
  MOD_RES (1)..(9): Any amino acid
  MOD_RES (11)..(12): Any amino acid
  MOD_RES (14)..(18): Any amino acid
  MOD_RES (27)..(29): Any amino acid
  MOD_RES (31)..(37): Any amino acid
  MOD_RES (39)..(40): Any amino acid
  MOD_RES (42)..(46): Any amino acid
  MOD_RES (55)..(57): Any amino acid
  MOD_RES (59)..(65): Any amino acid
  MOD_RES (67)..(68): Any amino acid
  MOD_RES (70)..(74): Any amino acid
  MOD_RES (83)..(85): Any amino acid
  MOD_RES (87)..(93): Any amino acid
  MOD_RES (95)..(96): Any amino acid
  MOD_RES (98)..(102): Any amino acid
  MOD_RES (111)..(113): Any amino acid
  MOD_RES (115)..(121): Any amino acid
  MOD_RES (123)..(124): Any amino acid
  MOD_RES (126)..(130): Any amino acid
  MOD_RES (139)..(141): Any amino acid
  MOD_RES (143)..(149): Any amino acid
  MOD_RES (151)..(152): Any amino acid
  MOD_RES (154)..(158): Any amino acid
  MOD_RES (167)..(169): Any amino acid
  MOD_RES (171)..(177): Any amino acid
  MOD_RES (179)..(180): Any amino acid
  MOD_RES (182)..(186): Any amino acid
  MOD_RES (195)..(197): Any amino acid
  MOD_RES (199)..(209): Any amino acid
XXXXXXXXXCXXCXXXXXRSDKLVRHXXXHXXXXXXXCXXCXXXXXTSGHLVRHXXXHXXXXXXXCXXCXXXXXQSSSLVRHXXXHXXXXXXXCXXCXXXXXRRDELNVHXXXHXXXXXXXCXXCXXXXXQSGDLRRHXXXHXXXXXXXCXXCXXXXXRSDHLTTHXXXHXXXXXXXCXXCXXXXXQSGHLTEHXXXHXXXXXXXXXXX

SEQ ID NO: 2287 - protein, 209 aa, Artificial Sequence
  source: /note="Description of Artificial Sequence: Synthetic polypeptide"
  MOD_RES (1)..(9): Any amino acid
  MOD_RES (11)..(12): Any amino acid
  MOD_RES (14)..(18): Any amino acid
  MOD_RES (27)..(29): Any amino acid
  MOD_RES (31)..(37): Any amino acid
  MOD_RES (39)..(40): Any amino acid
  MOD_RES (42)..(46): Any amino acid
  MOD_RES (55)..(57): Any amino acid
  MOD_RES (59)..(65): Any amino acid
  MOD_RES (67)..(68): Any amino acid
  MOD_RES (70)..(74): Any amino acid
  MOD_RES (83)..(85): Any amino acid
  MOD_RES (87)..(93): Any amino acid
  MOD_RES (95)..(96): Any amino acid
  MOD_RES (98)..(102): Any amino acid
  MOD_RES (111)..(113): Any amino acid
  MOD_RES (115)..(121): Any amino acid
  MOD_RES (123)..(124): Any amino acid
  MOD_RES (126)..(130): Any amino acid
  MOD_RES (139)..(141): Any amino acid
  MOD_RES (143)..(149): Any amino acid
  MOD_RES (151)..(152): Any amino acid
  MOD_RES (154)..(158): Any amino acid
  MOD_RES (167)..(169): Any amino acid
  MOD_RES (171)..(177): Any amino acid
  MOD_RES (179)..(180): Any amino acid
  MOD_RES (182)..(186): Any amino acid
  MOD_RES (195)..(197): Any amino acid
  MOD_RES (199)..(209): Any amino acid
XXXXXXXXXCXXCXXXXXRADNLTEHXXXHXXXXXXXCXXCXXXXXRSDKLVRHXXXHXXXXXXXCXXCXXXXXRSDHLTTHXXXHXXXXXXXCXXCXXXXXRSDHLTNHXXXHXXXXXXXCXXCXXXXXTSGHLVRHXXXHXXXXXXXCXXCXXXXXTTGNLTVHXXXHXXXXXXXCXXCXXXXXDPGHLVRHXXXHXXXXXXXXXXX

SEQ ID NO: 2288 - protein, 209 aa, Artificial Sequence
  source: /note="Description of Artificial Sequence: Synthetic polypeptide"
  MOD_RES (1)..(9): Any amino acid
  MOD_RES (11)..(12): Any amino acid
  MOD_RES (14)..(18): Any amino acid
  MOD_RES (27)..(29): Any amino acid
  MOD_RES (31)..(37): Any amino acid
  MOD_RES (39)..(40): Any amino acid
  MOD_RES (42)..(46): Any amino acid
  MOD_RES (55)..(57): Any amino acid
  MOD_RES (59)..(65): Any amino acid
  MOD_RES (67)..(68): Any amino acid
  MOD_RES (70)..(74): Any amino acid
  MOD_RES (83)..(85): Any amino acid
  MOD_RES (87)..(93): Any amino acid
  MOD_RES (95)..(96): Any amino acid
  MOD_RES (98)..(102): Any amino acid
  MOD_RES (111)..(113): Any amino acid
  MOD_RES (115)..(121): Any amino acid
  MOD_RES (123)..(124): Any amino acid
  MOD_RES (126)..(130): Any amino acid
  MOD_RES (139)..(141): Any amino acid
  MOD_RES (143)..(149): Any amino acid
  MOD_RES (151)..(152): Any amino acid
  MOD_RES (154)..(158): Any amino acid
  MOD_RES (167)..(169): Any amino acid
  MOD_RES (171)..(177): Any amino acid
  MOD_RES (179)..(180): Any amino acid
  MOD_RES (182)..(186): Any amino acid
  MOD_RES (195)..(197): Any amino acid
  MOD_RES (199)..(209): Any amino acid
XXXXXXXXXCXXCXXXXXRSDKLVRHXXXHXXXXXXXCXXCXXXXXRSDHLTTHXXXHXXXXXXXCXXCXXXXXRSDHLTNHXXXHXXXXXXXCXXCXXXXXTSGHLVRHXXXHXXXXXXXCXXCXXXXXTTGNLTVHXXXHXXXXXXXCXXCXXXXXDPGHLVRHXXXHXXXXXXXCXXCXXXXXRRDELNVHXXXHXXXXXXXXXXX

SEQ ID NO: 2289 - protein, 209 aa, Artificial Sequence
  source: /note="Description of Artificial Sequence: Synthetic polypeptide"
  MOD_RES (1)..(9): Any amino acid
  MOD_RES (11)..(12): Any amino acid
  MOD_RES (14)..(18): Any amino acid
  MOD_RES (27)..(29): Any amino acid
  MOD_RES (31)..(37): Any amino acid
  MOD_RES (39)..(40): Any amino acid
  MOD_RES (42)..(46): Any amino acid
  MOD_RES (55)..(57): Any amino acid
  MOD_RES (59)..(65): Any amino acid
  MOD_RES (67)..(68): Any amino acid
  MOD_RES (70)..(74): Any amino acid
  MOD_RES (83)..(85): Any amino acid
  MOD_RES (87)..(93): Any amino acid
  MOD_RES (95)..(96): Any amino acid
  MOD_RES (98)..(102): Any amino acid
  MOD_RES (111)..(113): Any amino acid
  MOD_RES (115)..(121): Any amino acid
  MOD_RES (123)..(124): Any amino acid
  MOD_RES (126)..(130): Any amino acid
  MOD_RES (139)..(141): Any amino acid
  MOD_RES (143)..(149): Any amino acid
  MOD_RES (151)..(152): Any amino acid
  MOD_RES (154)..(158): Any amino acid
  MOD_RES (167)..(169): Any amino acid
  MOD_RES (171)..(177): Any amino acid
  MOD_RES (179)..(180): Any amino acid
  MOD_RES (182)..(186): Any amino acid
  MOD_RES (195)..(197): Any amino acid
  MOD_RES (199)..(209): Any amino acid
XXXXXXXXXCXXCXXXXXRRDELNVHXXXHXXXXXXXCXXCXXXXXRADNLTEHXXXHXXXXXXXCXXCXXXXXRSDKLVRHXXXHXXXXXXXCXXCXXXXXRSDHLTTHXXXHXXXXXXXCXXCXXXXXRSDHLTNHXXXHXXXXXXXCXXCXXXXXTSGHLVRHXXXHXXXXXXXCXXCXXXXXTTGNLTVHXXXHXXXXXXXXXXX

SEQ ID NO: 2290 - protein, 209 aa, Artificial Sequence
  source: /note="Description of Artificial Sequence: Synthetic polypeptide"
  MOD_RES (1)..(9): Any amino acid
  MOD_RES (11)..(12): Any amino acid
  MOD_RES (14)..(18): Any amino acid
  MOD_RES (27)..(29): Any amino acid
  MOD_RES (31)..(37): Any amino acid
  MOD_RES (39)..(40): Any amino acid
  MOD_RES (42)..(46): Any amino acid
  MOD_RES (55)..(57): Any amino acid
  MOD_RES (59)..(65): Any amino acid
  MOD_RES (67)..(68): Any amino acid
  MOD_RES (70)..(74): Any amino acid
  MOD_RES (83)..(85): Any amino acid
  MOD_RES (87)..(93): Any amino acid
  MOD_RES (95)..(96): Any amino acid
  MOD_RES (98)..(102): Any amino acid
  MOD_RES (111)..(113): Any amino acid
  MOD_RES (115)..(121): Any amino acid
  MOD_RES (123)..(124): Any amino acid
  MOD_RES (126)..(130): Any amino acid
  MOD_RES (139)..(141): Any amino acid
  MOD_RES (143)..(149): Any amino acid
  MOD_RES (151)..(152): Any amino acid
  MOD_RES (154)..(158): Any amino acid
  MOD_RES (167)..(169): Any amino acid
  MOD_RES (171)..(177): Any amino acid
  MOD_RES (179)..(180): Any amino acid
  MOD_RES (182)..(186): Any amino acid
  MOD_RES (195)..(197): Any amino acid
  MOD_RES (199)..(209): Any amino acid
XXXXXXXXXCXXCXXXXXRSDHLTTHXXXHXXXXXXXCXXCXXXXXRSDHLTNHXXXHXXXXXXXCXXCXXXXXTSGHLVRHXXXHXXXXXXXCXXCXXXXXTTGNLTVHXXXHXXXXXXXCXXCXXXXXDPGHLVRHXXXHXXXXXXXCXXCXXXXXRRDELNVHXXXHXXXXXXXCXXCXXXXXRTDTLRDHXXXHXXXXXXXXXXX

SEQ ID NO: 2291 - protein, 209 aa, Artificial Sequence
  source: /note="Description of Artificial Sequence: Synthetic polypeptide"
  MOD_RES (1)..(9): Any amino acid
  MOD_RES (11)..(12): Any amino acid
  MOD_RES (14)..(18): Any amino acid
  MOD_RES (27)..(29): Any amino acid
  MOD_RES (31)..(37): Any amino acid
  MOD_RES (39)..(40): Any amino acid
  MOD_RES (42)..(46): Any amino acid
  MOD_RES (55)..(57): Any amino acid
  MOD_RES (59)..(65): Any amino acid
  MOD_RES (67)..(68): Any amino acid
  MOD_RES (70)..(74): Any amino acid
  MOD_RES (83)..(85): Any amino acid
  MOD_RES (87)..(93): Any amino acid
  MOD_RES (95)..(96): Any amino acid
  MOD_RES (98)..(102): Any amino acid
  MOD_RES (111)..(113): Any amino acid
  MOD_RES (115)..(121): Any amino acid
  MOD_RES (123)..(124): Any amino acid
  MOD_RES (126)..(130): Any amino acid
  MOD_RES (139)..(141): Any amino acid
  MOD_RES (143)..(149): Any amino acid
  MOD_RES (151)..(152): Any amino acid
  MOD_RES (154)..(158): Any amino acid
  MOD_RES (167)..(169): Any amino acid
  MOD_RES (171)..(177): Any amino acid
  MOD_RES (179)..(180): Any amino acid
  MOD_RES (182)..(186): Any amino acid
  MOD_RES (195)..(197): Any amino acid
  MOD_RES (199)..(209): Any amino acid
XXXXXXXXXCXXCXXXXXRSDKLVRHXXXHXXXXXXXCXXCXXXXXTKNSLTEHXXXHXXXXXXXCXXCXXXXXRSDELVRHXXXHXXXXXXXCXXCXXXXXTSGHLVRHXXXHXXXXXXXCXXCXXXXXQSGDLRRHXXXHXXXXXXXCXXCXXXXXRSDKLVRHXXXHXXXXXXXCXXCXXXXXRSDELVRHXXXHXXXXXXXXXXX

SEQ ID NO: 2292 - protein, 209 aa, Artificial Sequence
  source: /note="Description of Artificial Sequence: Synthetic polypeptide"
  MOD_RES (1)..(9): Any amino acid
  MOD_RES (11)..(12): Any amino acid
  MOD_RES (14)..(18): Any amino acid
  MOD_RES (27)..(29): Any amino acid
  MOD_RES (31)..(37): Any amino acid
  MOD_RES (39)..(40): Any amino acid
  MOD_RES (42)..(46): Any amino acid
  MOD_RES (55)..(57): Any amino acid
  MOD_RES (59)..(65): Any amino acid
  MOD_RES (67)..(68): Any amino acid
  MOD_RES (70)..(74): Any amino acid
  MOD_RES (83)..(85): Any amino acid
  MOD_RES (87)..(93): Any amino acid
  MOD_RES (95)..(96): Any amino acid
  MOD_RES (98)..(102): Any amino acid
  MOD_RES (111)..(113): Any amino acid
  MOD_RES (115)..(121): Any amino acid
  MOD_RES (123)..(124): Any amino acid
  MOD_RES (126)..(130): Any amino acid
  MOD_RES (139)..(141): Any amino acid
  MOD_RES (143)..(149): Any amino acid
  MOD_RES (151)..(152): Any amino acid
  MOD_RES (154)..(158): Any amino acid
  MOD_RES (167)..(169): Any amino acid
  MOD_RES (171)..(177): Any amino acid
  MOD_RES (179)..(180): Any amino acid
  MOD_RES (182)..(186): Any amino acid
  MOD_RES (195)..(197): Any amino acid
  MOD_RES (199)..(209): Any amino acid
XXXXXXXXXCXXCXXXXXTKNSLTEHXXXHXXXXXXXCXXCXXXXXRSDELVRHXXXHXXXXXXXCXXCXXXXXTSGHLVRHXXXHXXXXXXXCXXCXXXXXQSGDLRRHXXXHXXXXXXXCXXCXXXXXRSDKLVRHXXXHXXXXXXXCXXCXXXXXRSDELVRHXXXHXXXXXXXCXXCXXXXXTSHSLTEHXXXHXXXXXXXXXXX

SEQ ID NO: 2293 - protein, 209 aa, Artificial Sequence
  source: /note="Description of Artificial Sequence: Synthetic polypeptide"
  MOD_RES (1)..(9): Any amino acid
  MOD_RES (11)..(12): Any amino acid
  MOD_RES (14)..(18): Any amino acid
  MOD_RES (27)..(29): Any amino acid
  MOD_RES (31)..(37): Any amino acid
  MOD_RES (39)..(40): Any amino acid
  MOD_RES (42)..(46): Any amino acid
  MOD_RES (55)..(57): Any amino acid
  MOD_RES (59)..(65): Any amino acid
  MOD_RES (67)..(68): Any amino acid
  MOD_RES (70)..(74): Any amino acid
  MOD_RES (83)..(85): Any amino acid
  MOD_RES (87)..(93): Any amino acid
  MOD_RES (95)..(96): Any amino acid
  MOD_RES (98)..(102): Any amino acid
  MOD_RES (111)..(113): Any amino acid
  MOD_RES (115)..(121): Any amino acid
  MOD_RES (123)..(124): Any amino acid
  MOD_RES (126)..(130): Any amino acid
  MOD_RES (139)..(141): Any amino acid
  MOD_RES (143)..(149): Any amino acid
  MOD_RES (151)..(152): Any amino acid
  MOD_RES (154)..(158): Any amino acid
  MOD_RES (167)..(169): Any amino acid
  MOD_RES (171)..(177): Any amino acid
  MOD_RES (179)..(180): Any amino acid
  MOD_RES (182)..(186): Any amino acid
  MOD_RES (195)..(197): Any amino acid
  MOD_RES (199)..(209): Any amino acid
XXXXXXXXXCXXCXXXXXRSDELVRHXXXHXXXXXXXCXXCXXXXXTSGHLVRHXXXHXXXXXXXCXXCXXXXXQSGDLRRHXXXHXXXXXXXCXXCXXXXXRSDKLVRHXXXHXXXXXXXCXXCXXXXXRSDELVRHXXXHXXXXXXXCXXCXXXXXTSHSLTEHXXXHXXXXXXXCXXCXXXXXRSDELVRHXXXHXXXXXXXXXXX

SEQ ID NO: 2294 - protein, 209 aa, Artificial Sequence
  source: /note="Description of Artificial Sequence: Synthetic polypeptide"
  MOD_RES (1)..(9): Any amino acid
  MOD_RES (11)..(12): Any amino acid
  MOD_RES (14)..(18): Any amino acid
  MOD_RES (27)..(29): Any amino acid
  MOD_RES (31)..(37): Any amino acid
  MOD_RES (39)..(40): Any amino acid
  MOD_RES (42)..(46): Any amino acid
  MOD_RES (55)..(57): Any amino acid
  MOD_RES (59)..(65): Any amino acid
  MOD_RES (67)..(68): Any amino acid
  MOD_RES (70)..(74): Any amino acid
  MOD_RES (83)..(85): Any amino acid
  MOD_RES (87)..(93): Any amino acid
  MOD_RES (95)..(96): Any amino acid
  MOD_RES (98)..(102): Any amino acid
  MOD_RES (111)..(113): Any amino acid
  MOD_RES (115)..(121): Any amino acid
  MOD_RES (123)..(124): Any amino acid
  MOD_RES (126)..(130): Any amino acid
  MOD_RES (139)..(141): Any amino acid
  MOD_RES (143)..(149): Any amino acid
  MOD_RES (151)..(152): Any amino acid
  MOD_RES (154)..(158): Any amino acid
  MOD_RES (167)..(169): Any amino acid
  MOD_RES (171)..(177): Any amino acid
  MOD_RES (179)..(180): Any amino acid
  MOD_RES (182)..(186): Any amino acid
  MOD_RES (195)..(197): Any amino acid
  MOD_RES (199)..(209): Any amino acid
XXXXXXXXXCXXCXXXXXQSGDLRRHXXXHXXXXXXXCXXCXXXXXRSDKLVRHXXXHXXXXXXXCXXCXXXXXRSDELVRHXXXHXXXXXXXCXXCXXXXXTSHSLTEHXXXHXXXXXXXCXXCXXXXXRSDELVRHXXXHXXXXXXXCXXCXXXXXTSGHLVRHXXXHXXXXXXXCXXCXXXXXTSHSLTEHXXXHXXXXXXXXXXX

SEQ ID NO: 2295 - protein, 209 aa, Artificial Sequence
  source: /note="Description of Artificial Sequence: Synthetic polypeptide"
  MOD_RES (1)..(9): Any amino acid
  MOD_RES (11)..(12): Any amino acid
  MOD_RES (14)..(18): Any amino acid
  MOD_RES (27)..(29): Any amino acid
  MOD_RES (31)..(37): Any amino acid
  MOD_RES (39)..(40): Any amino acid
  MOD_RES (42)..(46): Any amino acid
  MOD_RES (55)..(57): Any amino acid
  MOD_RES (59)..(65): Any amino acid
  MOD_RES (67)..(68): Any amino acid
  MOD_RES (70)..(74): Any amino acid
  MOD_RES (83)..(85): Any amino acid
  MOD_RES (87)..(93): Any amino acid
  MOD_RES (95)..(96): Any amino acid
  MOD_RES (98)..(102): Any amino acid
  MOD_RES (111)..(113): Any amino acid
  MOD_RES (115)..(121): Any amino acid
  MOD_RES (123)..(124): Any amino acid
  MOD_RES (126)..(130): Any amino acid
  MOD_RES (139)..(141): Any amino acid
  MOD_RES (143)..(149): Any amino acid
  MOD_RES (151)..(152): Any amino acid
  MOD_RES (154)..(158): Any amino acid
  MOD_RES (167)..(169): Any amino acid
  MOD_RES (171)..(177): Any amino acid
  MOD_RES (179)..(180): Any amino acid
  MOD_RES (182)..(186): Any amino acid
  MOD_RES (195)..(197): Any amino acid
  MOD_RES (199)..(209): Any amino acid
XXXXXXXXXCXXCXXXXXTSGHLVRHXXXHXXXXXXXCXXCXXXXXQSGDLRRHXXXHXXXXXXXCXXCXXXXXRSDKLVRHXXXHXXXXXXXCXXCXXXXXRSDELVRHXXXHXXXXXXXCXXCXXXXXTSHSLTEHXXXHXXXXXXXCXXCXXXXXRSDELVRHXXXHXXXXXXXCXXCXXXXXTSGHLVRHXXXHXXXXXXXXXXX

SEQ ID NO: 2296 - protein, 209 aa, Artificial Sequence
  source: /note="Description of Artificial Sequence: Synthetic polypeptide"
  MOD_RES (1)..(9): Any amino acid
  MOD_RES (11)..(12): Any amino acid
  MOD_RES (14)..(18): Any amino acid
  MOD_RES (27)..(29): Any amino acid
  MOD_RES (31)..(37): Any amino acid
  MOD_RES (39)..(40): Any amino acid
  MOD_RES (42)..(46): Any amino acid
  MOD_RES (55)..(57): Any amino acid
  MOD_RES (59)..(65): Any amino acid
  MOD_RES (67)..(68): Any amino acid
  MOD_RES (70)..(74): Any amino acid
  MOD_RES (83)..(85): Any amino acid
  MOD_RES (87)..(93): Any amino acid
  MOD_RES (95)..(96): Any amino acid
  MOD_RES (98)..(102): Any amino acid
  MOD_RES (111)..(113): Any amino acid
  MOD_RES (115)..(121): Any amino acid
  MOD_RES (123)..(124): Any amino acid
  MOD_RES (126)..(130): Any amino acid
  MOD_RES (139)..(141): Any amino acid
  MOD_RES (143)..(149): Any amino acid
  MOD_RES (151)..(152): Any amino acid
  MOD_RES (154)..(158): Any amino acid
  MOD_RES (167)..(169): Any amino acid
  MOD_RES (171)..(177): Any amino acid
  MOD_RES (179)..(180): Any amino acid
  MOD_RES (182)..(186): Any amino acid
  MOD_RES (195)..(197): Any amino acid
  MOD_RES (199)..(209): Any amino acid
XXXXXXXXXCXXCXXXXXSKKALTEHXXXHXXXXXXXCXXCXXXXXRSDHLTTHXXXHXXXXXXXCXXCXXXXXTTGALTEHXXXHXXXXXXXCXXCXXXXXTSGNLVRHXXXHXXXXXXXCXXCXXXXXQSGDLRRHXXXHXXXXXXXCXXCXXXXXQRAHLERHXXXHXXXXXXXCXXCXXXXXTSHSLTEHXXXHXXXXXXXXXXX

SEQ ID NO: 2297 - protein, 209 aa, Artificial Sequence
  source: /note="Description of Artificial Sequence: Synthetic polypeptide"
  MOD_RES (1)..(9): Any amino acid
  MOD_RES (11)..(12): Any amino acid
  MOD_RES (14)..(18): Any amino acid
  MOD_RES (27)..(29): Any amino acid
  MOD_RES (31)..(37): Any amino acid
  MOD_RES (39)..(40): Any amino acid
  MOD_RES (42)..(46): Any amino acid
  MOD_RES (55)..(57): Any amino acid
  MOD_RES (59)..(65): Any amino acid
  MOD_RES (67)..(68): Any amino acid
  MOD_RES (70)..(74): Any amino acid
  MOD_RES (83)..(85): Any amino acid
  MOD_RES (87)..(93): Any amino acid
  MOD_RES (95)..(96): Any amino acid
  MOD_RES (98)..(102): Any amino acid
  MOD_RES (111)..(113): Any amino acid
  MOD_RES (115)..(121): Any amino acid
  MOD_RES (123)..(124): Any amino acid
  MOD_RES (126)..(130): Any amino acid
  MOD_RES (139)..(141): Any amino acid
  MOD_RES (143)..(149): Any amino acid
  MOD_RES (151)..(152): Any amino acid
  MOD_RES (154)..(158): Any amino acid
  MOD_RES (167)..(169): Any amino acid
  MOD_RES (171)..(177): Any amino acid
  MOD_RES (179)..(180): Any amino acid
  MOD_RES (182)..(186): Any amino acid
  MOD_RES (195)..(197): Any amino acid
  MOD_RES (199)..(209): Any amino acid
XXXXXXXXXCXXCXXXXXTTGALTEHXXXHXXXXXXXCXXCXXXXXTSGNLVRHXXXHXXXXXXXCXXCXXXXXQSGDLRRHXXXHXXXXXXXCXXCXXXXXQRAHLERHXXXHXXXXXXXCXXCXXXXXTSHSLTEHXXXHXXXXXXXCXXCXXXXXTSGHLVRHXXXHXXXXXXXCXXCXXXXXRNDALTEHXXXHXXXXXXXXXXX

SEQ ID NO: 2298 - protein, 209 aa, Artificial Sequence
  source: /note="Description of Artificial Sequence: Synthetic polypeptide"
  MOD_RES (1)..(9): Any amino acid
  MOD_RES (11)..(12): Any amino acid
  MOD_RES (14)..(18): Any amino acid
  MOD_RES (27)..(29): Any amino acid
  MOD_RES (31)..(37): Any amino acid
  MOD_RES (39)..(40): Any amino acid
  MOD_RES (42)..(46): Any amino acid
  MOD_RES (55)..(57): Any amino acid
  MOD_RES (59)..(65): Any amino acid
  MOD_RES (67)..(68): Any amino acid
  MOD_RES (70)..(74): Any amino acid
  MOD_RES (83)..(85): Any amino acid
  MOD_RES (87)..(93): Any amino acid
  MOD_RES (95)..(96): Any amino acid
  MOD_RES (98)..(102): Any amino acid
  MOD_RES (111)..(113): Any amino acid
  MOD_RES (115)..(121): Any amino acid
  MOD_RES (123)..(124): Any amino acid
  MOD_RES (126)..(130): Any amino acid
  MOD_RES (139)..(141): Any amino acid
  MOD_RES (143)..(149): Any amino acid
  MOD_RES (151)..(152): Any amino acid
  MOD_RES (154)..(158): Any amino acid
  MOD_RES (167)..(169): Any amino acid
  MOD_RES (171)..(177): Any amino acid
  MOD_RES (179)..(180): Any amino acid
  MOD_RES (182)..(186): Any amino acid
  MOD_RES (195)..(197): Any amino acid
  MOD_RES (199)..(209): Any amino acid
XXXXXXXXXCXXCXXXXXRSDHLTTHXXXHXXXXXXXCXXCXXXXXTTGALTEHXXXHXXXXXXXCXXCXXXXXTSGNLVRHXXXHXXXXXXXCXXCXXXXXQSGDLRRHXXXHXXXXXXXCXXCXXXXXQRAHLERHXXXHXXXXXXXCXXCXXXXXTSHSLTEHXXXHXXXXXXXCXXCXXXXXTSGHLVRHXXXHXXXXXXXXXXX

SEQ ID NO: 2299 - protein, 209 aa, Artificial Sequence
  source: /note="Description of Artificial Sequence: Synthetic polypeptide"
  MOD_RES (1)..(9): Any amino acid
  MOD_RES (11)..(12): Any amino acid
  MOD_RES (14)..(18): Any amino acid
  MOD_RES (27)..(29): Any amino acid
  MOD_RES (31)..(37): Any amino acid
  MOD_RES (39)..(40): Any amino acid
  MOD_RES (42)..(46): Any amino acid
  MOD_RES (55)..(57): Any amino acid
  MOD_RES (59)..(65): Any amino acid
  MOD_RES (67)..(68): Any amino acid
  MOD_RES (70)..(74): Any amino acid
  MOD_RES (83)..(85): Any amino acid
  MOD_RES (87)..(93): Any amino acid
  MOD_RES (95)..(96): Any amino acid
  MOD_RES (98)..(102): Any amino acid
  MOD_RES (111)..(113): Any amino acid
  MOD_RES (115)..(121): Any amino acid
  MOD_RES (123)..(124): Any amino acid
  MOD_RES (126)..(130): Any amino acid
  MOD_RES (139)..(141): Any amino acid
  MOD_RES (143)..(149): Any amino acid
  MOD_RES (151)..(152): Any amino acid
  MOD_RES (154)..(158): Any amino acid
  MOD_RES (167)..(169): Any amino acid
  MOD_RES (171)..(177): Any amino acid
  MOD_RES (179)..(180): Any amino acid
  MOD_RES (182)..(186): Any amino acid
  MOD_RES (195)..(197): Any amino acid
  MOD_RES (199)..(209): Any amino acid
XXXXXXXXXCXXCXXXXXTTGNLTVHXXXHXXXXXXXCXXCXXXXXQSGNLTEHXXXHXXXXXXXCXXCXXXXXQKSSLIAHXXXHXXXXXXXCXXCXXXXXRRDELNVHXXXHXXXXXXXCXXCXXXXXQLAHLRAHXXXHXXXXXXXCXXCXXXXXRSDHLTNHXXXHXXXXXXXCXXCXXXXXRSDKLVRHXXXHXXXXXXXXXXX

SEQ ID NO: 2300 - protein, 209 aa, Artificial Sequence
  source: /note="Description of Artificial Sequence: Synthetic polypeptide"
  MOD_RES (1)..(9): Any amino acid
  MOD_RES (11)..(12): Any amino acid
  MOD_RES (14)..(18): Any amino acid
  MOD_RES (27)..(29): Any amino acid
  MOD_RES (31)..(37): Any amino acid
  MOD_RES (39)..(40): Any amino acid
  MOD_RES (42)..(46): Any amino acid
  MOD_RES (55)..(57): Any amino acid
  MOD_RES (59)..(65): Any amino acid
  MOD_RES (67)..(68): Any amino acid
  MOD_RES (70)..(74): Any amino acid
  MOD_RES (83)..(85): Any amino acid
  MOD_RES (87)..(93): Any amino acid
  MOD_RES (95)..(96): Any amino acid
  MOD_RES (98)..(102): Any amino acid
  MOD_RES (111)..(113): Any amino acid
  MOD_RES (115)..(121): Any amino acid
  MOD_RES (123)..(124): Any amino acid
  MOD_RES (126)..(130): Any amino acid
  MOD_RES (139)..(141): Any amino acid
  MOD_RES (143)..(149): Any amino acid
  MOD_RES (151)..(152): Any amino acid
  MOD_RES (154)..(158): Any amino acid
  MOD_RES (167)..(169): Any amino acid
  MOD_RES (171)..(177): Any amino acid
  MOD_RES (179)..(180): Any amino acid
  MOD_RES (182)..(186): Any amino acid
  MOD_RES (195)..(197): Any amino acid
  MOD_RES (199)..(209): Any amino acid
XXXXXXXXXCXXCXXXXXQKSSLIAHXXXHXXXXXXXCXXCXXXXXRRDELNVHXXXHXXXXXXXCXXCXXXXXQLAHLRAHXXXHXXXXXXXCXXCXXXXXRSDHLTNHXXXHXXXXXXXCXXCXXXXXRSDKLVRHXXXHXXXXXXXCXXCXXXXXTSGHLVRHXXXHXXXXXXXCXXCXXXXXRSDHLTTHXXXHXXXXXXXXXXX

SEQ ID NO: 2301 - protein, 209 aa, Artificial Sequence
  source: /note="Description of Artificial Sequence: Synthetic polypeptide"
  MOD_RES (1)..(9): Any amino acid
  MOD_RES (11)..(12): Any amino acid
  MOD_RES (14)..(18): Any amino acid
  MOD_RES (27)..(29): Any amino acid
  MOD_RES (31)..(37): Any amino acid
  MOD_RES (39)..(40): Any amino acid
  MOD_RES (42)..(46): Any amino acid
  MOD_RES (55)..(57): Any amino acid
  MOD_RES (59)..(65): Any amino acid
  MOD_RES (67)..(68): Any amino acid
  MOD_RES (70)..(74): Any amino acid
  MOD_RES (83)..(85): Any amino acid
  MOD_RES (87)..(93): Any amino acid
  MOD_RES (95)..(96): Any amino acid
  MOD_RES (98)..(102): Any amino acid
  MOD_RES (111)..(113): Any amino acid
  MOD_RES (115)..(121): Any amino acid
  MOD_RES (123)..(124): Any amino acid
  MOD_RES (126)..(130): Any amino acid
  MOD_RES (139)..(141): Any amino acid
  MOD_RES (143)..(149): Any amino acid
  MOD_RES (151)..(152): Any amino acid
  MOD_RES (154)..(158): Any amino acid
  MOD_RES (167)..(169): Any amino acid
  MOD_RES (171)..(177): Any amino acid
  MOD_RES (179)..(180): Any amino acid
  MOD_RES (182)..(186): Any amino acid
  MOD_RES (195)..(197): Any amino acid
  MOD_RES (199)..(209): Any amino acid
XXXXXXXXXCXXCXXXXXRRDELNVHXXXHXXXXXXXCXXCXXXXXQLAHLRAHXXXHXXXXXXXCXXCXXXXXRSDHLTNHXXXHXXXXXXXCXXCXXXXXRSDKLVRHXXXHXXXXXXXCXXCXXXXXTSGHLVRHXXXHXXXXXXXCXXCXXXXXRSDHLTTHXXXHXXXXXXXCXXCXXXXXTTGALTEHXXXHXXXXXXXXXXX

SEQ ID NO: 2302 - protein, 209 aa, Artificial Sequence
  source: /note="Description of Artificial Sequence: Synthetic polypeptide"
  MOD_RES (1)..(9): Any amino acid
  MOD_RES (11)..(12): Any amino acid
  MOD_RES (14)..(18): Any amino acid
  MOD_RES (27)..(29): Any amino acid
  MOD_RES (31)..(37): Any amino acid
  MOD_RES (39)..(40): Any amino acid
  MOD_RES (42)..(46): Any amino acid
  MOD_RES (55)..(57): Any amino acid
  MOD_RES (59)..(65): Any amino acid
  MOD_RES (67)..(68): Any amino acid
  MOD_RES (70)..(74): Any amino acid
  MOD_RES (83)..(85): Any amino acid
  MOD_RES (87)..(93): Any amino acid
  MOD_RES (95)..(96): Any amino acid
  MOD_RES (98)..(102): Any amino acid
  MOD_RES (111)..(113): Any amino acid
  MOD_RES (115)..(121): Any amino acid
  MOD_RES (123)..(124): Any amino acid
  MOD_RES (126)..(130): Any amino acid
  MOD_RES (139)..(141): Any amino acid
  MOD_RES (143)..(149): Any amino acid
  MOD_RES (151)..(152): Any amino acid
  MOD_RES (154)..(158): Any amino acid
  MOD_RES (167)..(169): Any amino acid
  MOD_RES (171)..(177): Any amino acid
  MOD_RES (179)..(180): Any amino acid
  MOD_RES (182)..(186): Any amino acid
  MOD_RES (195)..(197): Any amino acid
  MOD_RES (199)..(209): Any amino acid
XXXXXXXXXCXXCXXXXXRSDKLVRHXXXHXXXXXXXCXXCXXXXXTSGHLVRHXXXHXXXXXXXCXXCXXXXXRSDHLTTHXXXHXXXXXXXCXXCXXXXXTTGALTEHXXXHXXXXXXXCXXCXXXXXQSGNLTEHXXXHXXXXXXXCXXCXXXXXTHLDLIRHXXXHXXXXXXXCXXCXXXXXDPGHLVRHXXXHXXXXXXXXXXX

SEQ ID NO: 2303 - protein, 209 aa, Artificial Sequence
  source: /note="Description of Artificial Sequence: Synthetic polypeptide"
  MOD_RES (1)..(9): Any amino acid
  MOD_RES (11)..(12): Any amino acid
  MOD_RES (14)..(18): Any amino acid
  MOD_RES (27)..(29): Any amino acid
  MOD_RES (31)..(37): Any amino acid
  MOD_RES (39)..(40): Any amino acid
  MOD_RES (42)..(46): Any amino acid
  MOD_RES (55)..(57): Any amino acid
  MOD_RES (59)..(65): Any amino acid
  MOD_RES (67)..(68): Any amino acid
  MOD_RES (70)..(74): Any amino acid
  MOD_RES (83)..(85): Any amino acid
  MOD_RES (87)..(93): Any amino acid
  MOD_RES (95)..(96): Any amino acid
  MOD_RES (98)..(102): Any amino acid
  MOD_RES (111)..(113): Any amino acid
  MOD_RES (115)..(121): Any amino acid
  MOD_RES (123)..(124): Any amino acid
  MOD_RES (126)..(130): Any amino acid
  MOD_RES (139)..(141): Any amino acid
  MOD_RES (143)..(149): Any amino acid
  MOD_RES (151)..(152): Any amino acid
  MOD_RES (154)..(158): Any amino acid
  MOD_RES (167)..(169): Any amino acid
  MOD_RES (171)..(177): Any amino acid
  MOD_RES (179)..(180): Any amino acid
  MOD_RES (182)..(186): Any amino acid
  MOD_RES (195)..(197): Any amino acid
  MOD_RES (199)..(209): Any amino acid
XXXXXXXXXCXXCXXXXXTSGHLVRHXXXHXXXXXXXCXXCXXXXXTTGNLTVHXXXHXXXXXXXCXXCXXXXXQSGNLTEHXXXHXXXXXXXCXXCXXXXXQKSSLIAHXXXHXXXXXXXCXXCXXXXXRRDELNVHXXXHXXXXXXXCXXCXXXXXQLAHLRAHXXXHXXXXXXXCXXCXXXXXRSDHLTNHXXXHXXXXXXXXXXX

SEQ ID NO: 2304 - protein, 209 aa, Artificial Sequence
  source: /note="Description of Artificial Sequence: Synthetic polypeptide"
  MOD_RES (1)..(9): Any amino acid
  MOD_RES (11)..(12): Any amino acid
  MOD_RES (14)..(18): Any amino acid
  MOD_RES (27)..(29): Any amino acid
  MOD_RES (31)..(37): Any amino acid
  MOD_RES (39)..(40): Any amino acid
  MOD_RES (42)..(46): Any amino acid
  MOD_RES (55)..(57): Any amino acid
  MOD_RES (59)..(65): Any amino acid
  MOD_RES (67)..(68): Any amino acid
  MOD_RES (70)..(74): Any amino acid
  MOD_RES (83)..(85): Any amino acid
  MOD_RES (87)..(93): Any amino acid
  MOD_RES (95)..(96): Any amino acid
  MOD_RES (98)..(102): Any amino acid
  MOD_RES (111)..(113): Any amino acid
  MOD_RES (115)..(121): Any amino acid
  MOD_RES (123)..(124): Any amino acid
  MOD_RES (126)..(130): Any amino acid
  MOD_RES (139)..(141): Any amino acid
  MOD_RES (143)..(149): Any amino acid
  MOD_RES (151)..(152): Any amino acid
  MOD_RES (154)..(158): Any amino acid
  MOD_RES (167)..(169): Any amino acid
  MOD_RES (171)..(177): Any amino acid
  MOD_RES (179)..(180): Any amino acid
  MOD_RES (182)..(186): Any amino acid
  MOD_RES (195)..(197): Any amino acid
  MOD_RES (199)..(209): Any amino acid
XXXXXXXXXCXXCXXXXXRSDHLTNHXXXHXXXXXXXCXXCXXXXXTSGHLVRHXXXHXXXXXXXCXXCXXXXXTTGNLTVHXXXHXXXXXXXCXXCXXXXXQSGNLTEHXXXHXXXXXXXCXXCXXXXXQKSSLIAHXXXHXXXXXXXCXXCXXXXXRRDELNVHXXXHXXXXXXXCXXCXXXXXQLAHLRAHXXXHXXXXXXXXXXX

SEQ ID NO: 2305 - protein, 209 aa, Artificial Sequence
  source: /note="Description of Artificial Sequence: Synthetic polypeptide"
  MOD_RES (1)..(9): Any amino acid
  MOD_RES (11)..(12): Any amino acid
  MOD_RES (14)..(18): Any amino acid
  MOD_RES (27)..(29): Any amino acid
  MOD_RES (31)..(37): Any amino acid
  MOD_RES (39)..(40): Any amino acid
  MOD_RES (42)..(46): Any amino acid
  MOD_RES (55)..(57): Any amino acid
  MOD_RES (59)..(65): Any amino acid
  MOD_RES (67)..(68): Any amino acid
  MOD_RES (70)..(74): Any amino acid
  MOD_RES (83)..(85): Any amino acid
  MOD_RES (87)..(93): Any amino acid
  MOD_RES (95)..(96): Any amino acid
  MOD_RES (98)..(102): Any amino acid
  MOD_RES (111)..(113): Any amino acid
  MOD_RES (115)..(121): Any amino acid
  MOD_RES (123)..(124): Any amino acid
  MOD_RES (126)..(130): Any amino acid
  MOD_RES (139)..(141): Any amino acid
  MOD_RES (143)..(149): Any amino acid
  MOD_RES (151)..(152): Any amino acid
  MOD_RES (154)..(158): Any amino acid
  MOD_RES (167)..(169): Any amino acid
  MOD_RES (171)..(177): Any amino acid
  MOD_RES (179)..(180): Any amino acid
  MOD_RES (182)..(186): Any amino acid
  MOD_RES (195)..(197): Any amino acid
  MOD_RES (199)..(209): Any amino acid
XXXXXXXXXCXXCXXXXXQSGNLTEHXXXHXXXXXXXCXXCXXXXXQKSSLIAHXXXHXXXXXXXCXXCXXXXXRRDELNVHXXXHXXXXXXXCXXCXXXXXQLAHLRAHXXXHXXXXXXXCXXCXXXXXRSDHLTNHXXXHXXXXXXXCXXCXXXXXRSDKLVRHXXXHXXXXXXXCXXCXXXXXTSGHLVRHXXXHXXXXXXXXXXX

SEQ ID NO: 2306 - protein, 209 aa, Artificial Sequence
  source: /note="Description of Artificial Sequence: Synthetic polypeptide"
  MOD_RES (1)..(9): Any amino acid
  MOD_RES (11)..(12): Any amino acid
  MOD_RES (14)..(18): Any amino acid
  MOD_RES (27)..(29): Any amino acid
  MOD_RES (31)..(37): Any amino acid
  MOD_RES (39)..(40): Any amino acid
  MOD_RES (42)..(46): Any amino acid
  MOD_RES (55)..(57): Any amino acid
  MOD_RES (59)..(65): Any amino acid
  MOD_RES (67)..(68): Any amino acid
  MOD_RES (70)..(74): Any amino acid
  MOD_RES (83)..(85): Any amino acid
  MOD_RES (87)..(93): Any amino acid
  MOD_RES (95)..(96): Any amino acid
  MOD_RES (98)..(102): Any amino acid
  MOD_RES (111)..(113): Any amino acid
  MOD_RES (115)..(121): Any amino acid
  MOD_RES (123)..(124): Any amino acid
  MOD_RES (126)..(130): Any amino acid
  MOD_RES (139)..(141): Any amino acid
  MOD_RES (143)..(149): Any amino acid
  MOD_RES (151)..(152): Any amino acid
  MOD_RES (154)..(158): Any amino acid
  MOD_RES (167)..(169): Any amino acid
  MOD_RES (171)..(177): Any amino acid
  MOD_RES (179)..(180): Any amino acid
  MOD_RES (182)..(186): Any amino acid
  MOD_RES (195)..(197): Any amino acid
  MOD_RES (199)..(209): Any amino acid
XXXXXXXXXCXXCXXXXXQLAHLRAHXXXHXXXXXXXCXXCXXXXXRSDHLTNHXXXHXXXXXXXCXXCXXXXXRSDKLVRHXXXHXXXXXXXCXXCXXXXXTSGHLVRHXXXHXXXXXXXCXXCXXXXXRSDHLTTHXXXHXXXXXXXCXXCXXXXXTTGALTEHXXXHXXXXXXXCXXCXXXXXQSGNLTEHXXXHXXXXXXXXXXX

SEQ ID NO: 2307 - protein, 209 aa, Artificial Sequence
  source: /note="Description of Artificial Sequence: Synthetic polypeptide"
  MOD_RES (1)..(9): Any amino acid
  MOD_RES (11)..(12): Any amino acid
  MOD_RES (14)..(18): Any amino acid
  MOD_RES (27)..(29): Any amino acid
  MOD_RES (31)..(37): Any amino acid
  MOD_RES (39)..(40): Any amino acid
  MOD_RES (42)..(46): Any amino acid
  MOD_RES (55)..(57): Any amino acid
  MOD_RES (59)..(65): Any amino acid
  MOD_RES (67)..(68): Any amino acid
  MOD_RES (70)..(74): Any amino acid
  MOD_RES (83)..(85): Any amino acid
  MOD_RES (87)..(93): Any amino acid
  MOD_RES (95)..(96): Any amino acid
  MOD_RES (98)..(102): Any amino acid
  MOD_RES (111)..(113): Any amino acid
  MOD_RES (115)..(121): Any amino acid
  MOD_RES (123)..(124): Any amino acid
  MOD_RES (126)..(130): Any amino acid
  MOD_RES (139)..(141): Any amino acid
  MOD_RES (143)..(149): Any amino acid
  MOD_RES (151)..(152): Any amino acid
  MOD_RES (154)..(158): Any amino acid
  MOD_RES (167)..(169): Any amino acid
  MOD_RES (171)..(177): Any amino acid
  MOD_RES (179)..(180): Any amino acid
  MOD_RES (182)..(186): Any amino acid
  MOD_RES (195)..(197): Any amino acid
  MOD_RES (199)..(209): Any amino acid
XXXXXXXXXCXXCXXXXXRSDHLTNHXXXHXXXXXXXCXXCXXXXXRSDKLVRHXXXHXXXXXXXCXXCXXXXXTSGHLVRHXXXHXXXXXXXCXXCXXXXXRSDHLTTHXXXHXXXXXXXCXXCXXXXXTTGALTEHXXXHXXXXXXXCXXCXXXXXQSGNLTEHXXXHXXXXXXXCXXCXXXXXTHLDLIRHXXXHXXXXXXXXXXX

SEQ ID NO: 2308 - protein, 209 aa, Artificial Sequence
  source: /note="Description of Artificial Sequence: Synthetic polypeptide"
  MOD_RES (1)..(9): Any amino acid
  MOD_RES (11)..(12): Any amino acid
  MOD_RES (14)..(18): Any amino acid
  MOD_RES (27)..(29): Any amino acid
  MOD_RES (31)..(37): Any amino acid
  MOD_RES (39)..(40): Any amino acid
  MOD_RES (42)..(46): Any amino acid
  MOD_RES (55)..(57): Any amino acid
  MOD_RES (59)..(65): Any amino acid
  MOD_RES (67)..(68): Any amino acid
  MOD_RES (70)..(74): Any amino acid
  MOD_RES (83)..(85): Any amino acid
  MOD_RES (87)..(93): Any amino acid
  MOD_RES (95)..(96): Any amino acid
  MOD_RES (98)..(102): Any amino acid
  MOD_RES (111)..(113): Any amino acid
  MOD_RES (115)..(121): Any amino acid
  MOD_RES (123)..(124): Any amino acid
  MOD_RES (126)..(130): Any amino acid
  MOD_RES (139)..(141): Any amino acid
  MOD_RES (143)..(149): Any amino acid
  MOD_RES (151)..(152): Any amino acid
  MOD_RES (154)..(158): Any amino acid
  MOD_RES (167)..(169): Any amino acid
  MOD_RES (171)..(177): Any amino acid
  MOD_RES (179)..(180): Any amino acid
  MOD_RES (182)..(186): Any amino acid
  MOD_RES (195)..(197): Any amino acid
  MOD_RES (199)..(209): Any amino acid
XXXXXXXXXCXXCXXXXXSPADLTRHXXXHXXXXXXXCXXCXXXXXTSGNLVRHXXXHXXXXXXXCXXCXXXXXTTGNLTVHXXXHXXXXXXXCXXCXXXXXRSDNLVRHXXXHXXXXXXXCXXCXXXXXRSDNLVRHXXXHXXXXXXXCXXCXXXXXRSDHLTTHXXXHXXXXXXXCXXCXXXXXRSDKLVRHXXXHXXXXXXXXXXX

SEQ ID NO: 2309 - protein, 209 aa, Artificial Sequence
  source: /note="Description of Artificial Sequence: Synthetic polypeptide"
  MOD_RES (1)..(9): Any amino acid
  MOD_RES (11)..(12): Any amino acid
  MOD_RES (14)..(18): Any amino acid
  MOD_RES (27)..(29): Any amino acid
  MOD_RES (31)..(37): Any amino acid
  MOD_RES (39)..(40): Any amino acid
  MOD_RES (42)..(46): Any amino acid
  MOD_RES (55)..(57): Any amino acid
  MOD_RES (59)..(65): Any amino acid
  MOD_RES (67)..(68): Any amino acid
  MOD_RES (70)..(74): Any amino acid
  MOD_RES (83)..(85): Any amino acid
  MOD_RES (87)..(93): Any amino acid
  MOD_RES (95)..(96): Any amino acid
  MOD_RES (98)..(102): Any amino acid
  MOD_RES (111)..(113): Any amino acid
  MOD_RES (115)..(121): Any amino acid
  MOD_RES (123)..(124): Any amino acid
  MOD_RES (126)..(130): Any amino acid
  MOD_RES (139)..(141): Any amino acid
  MOD_RES (143)..(149): Any amino acid
  MOD_RES (151)..(152): Any amino acid
  MOD_RES (154)..(158): Any amino acid
  MOD_RES (167)..(169): Any amino acid
  MOD_RES (171)..(177): Any amino acid
  MOD_RES (179)..(180): Any amino acid
  MOD_RES (182)..(186): Any amino acid
  MOD_RES (195)..(197): Any amino acid
  MOD_RES (199)..(209): Any amino acid
XXXXXXXXXCXXCXXXXXREDNLHTHXXXHXXXXXXXCXXCXXXXXRSDHLTTHXXXHXXXXXXXCXXCXXXXXQRANLRAHXXXHXXXXXXXCXXCXXXXXSPADLTRHXXXHXXXXXXXCXXCXXXXXTSGNLVRHXXXHXXXXXXXCXXCXXXXXTTGNLTVHXXXHXXXXXXXCXXCXXXXXRSDNLVRHXXXHXXXXXXXXXXX

SEQ ID NO: 2310 - protein, 209 aa, Artificial Sequence
  source: /note="Description of Artificial Sequence: Synthetic polypeptide"
  MOD_RES (1)..(9): Any amino acid
  MOD_RES (11)..(12): Any amino acid
  MOD_RES (14)..(18): Any amino acid
  MOD_RES (27)..(29): Any amino acid
  MOD_RES (31)..(37): Any amino acid
  MOD_RES (39)..(40): Any amino acid
  MOD_RES (42)..(46): Any amino acid
  MOD_RES (55)..(57): Any amino acid
  MOD_RES (59)..(65): Any amino acid
  MOD_RES (67)..(68): Any amino acid
  MOD_RES (70)..(74): Any amino acid
  MOD_RES (83)..(85): Any amino acid
  MOD_RES (87)..(93): Any amino acid
  MOD_RES (95)..(96): Any amino acid
  MOD_RES (98)..(102): Any amino acid
  MOD_RES (111)..(113): Any amino acid
  MOD_RES (115)..(121): Any amino acid
  MOD_RES (123)..(124): Any amino acid
  MOD_RES (126)..(130): Any amino acid
  MOD_RES (139)..(141): Any amino acid
  MOD_RES (143)..(149): Any amino acid
  MOD_RES (151)..(152): Any amino acid
  MOD_RES (154)..(158): Any amino acid
  MOD_RES (167)..(169): Any amino acid
  MOD_RES (171)..(177): Any amino acid
  MOD_RES (179)..(180): Any amino acid
  MOD_RES (182)..(186): Any amino acid
  MOD_RES (195)..(197): Any amino acid
  MOD_RES (199)..(209): Any amino acid
XXXXXXXXXCXXCXXXXXQRANLRAHXXXHXXXXXXXCXXCXXXXXSPADLTRHXXXHXXXXXXXCXXCXXXXXTSGNLVRHXXXHXXXXXXXCXXCXXXXXTTGNLTVHXXXHXXXXXXXCXXCXXXXXRSDNLVRHXXXHXXXXXXXCXXCXXXXXRSDNLVRHXXXHXXXXXXXCXXCXXXXXRSDHLTTHXXXHXXXXXXXXXXX

SEQ ID NO: 2311 - protein, 209 aa, Artificial Sequence
  source: /note="Description of Artificial Sequence: Synthetic polypeptide"
  MOD_RES (1)..(9): Any amino acid
  MOD_RES (11)..(12): Any amino acid
  MOD_RES (14)..(18): Any amino acid
  MOD_RES (27)..(29): Any amino acid
  MOD_RES (31)..(37): Any amino acid
  MOD_RES (39)..(40): Any amino acid
  MOD_RES (42)..(46): Any amino acid
  MOD_RES (55)..(57): Any amino acid
  MOD_RES (59)..(65): Any amino acid
  MOD_RES (67)..(68): Any amino acid
  MOD_RES (70)..(74): Any amino acid
  MOD_RES (83)..(85): Any amino acid
  MOD_RES (87)..(93): Any amino acid
  MOD_RES (95)..(96): Any amino acid
  MOD_RES (98)..(102): Any amino acid
  MOD_RES (111)..(113): Any amino acid
  MOD_RES (115)..(121): Any amino acid
  MOD_RES (123)..(124): Any amino acid
  MOD_RES (126)..(130): Any amino acid
  MOD_RES (139)..(141): Any amino acid
  MOD_RES (143)..(149): Any amino acid
  MOD_RES (151)..(152): Any amino acid
  MOD_RES (154)..(158): Any amino acid
  MOD_RES (167)..(169): Any amino acid
  MOD_RES (171)..(177): Any amino acid
  MOD_RES (179)..(180): Any amino acid
  MOD_RES (182)..(186): Any amino acid
  MOD_RES (195)..(197): Any amino acid
  MOD_RES (199)..(209): Any amino acid
XXXXXXXXXCXXCXXXXXRSDHLTTHXXXHXXXXXXXCXXCXXXXXQRANLRAHXXXHXXXXXXXCXXCXXXXXSPADLTRHXXXHXXXXXXXCXXCXXXXXTSGNLVRHXXXHXXXXXXXCXXCXXXXXTTGNLTVHXXXHXXXXXXXCXXCXXXXXRSDNLVRHXXXHXXXXXXXCXXCXXXXXRSDNLVRHXXXHXXXXXXXXXXX

SEQ ID NO: 2312 - protein, 209 aa, Artificial Sequence
  source: /note="Description of Artificial Sequence: Synthetic polypeptide"
  MOD_RES (1)..(9): Any amino acid
  MOD_RES (11)..(12): Any amino acid
  MOD_RES (14)..(18): Any amino acid
  MOD_RES (27)..(29): Any amino acid
  MOD_RES (31)..(37): Any amino acid
  MOD_RES (39)..(40): Any amino acid
  MOD_RES (42)..(46): Any amino acid
  MOD_RES (55)..(57): Any amino acid
  MOD_RES (59)..(65): Any amino acid
  MOD_RES (67)..(68): Any amino acid
  MOD_RES (70)..(74): Any amino acid
  MOD_RES (83)..(85): Any amino acid
  MOD_RES (87)..(93): Any amino acid
  MOD_RES (95)..(96): Any amino acid
  MOD_RES (98)..(102): Any amino acid
  MOD_RES (111)..(113): Any amino acid
  MOD_RES (115)..(121): Any amino acid
  MOD_RES (123)..(124): Any amino acid
  MOD_RES (126)..(130): Any amino acid
  MOD_RES (139)..(141): Any amino acid
  MOD_RES (143)..(149): Any amino acid
  MOD_RES (151)..(152): Any amino acid
  MOD_RES (154)..(158): Any amino acid
  MOD_RES (167)..(169): Any amino acid
  MOD_RES (171)..(177): Any amino acid
  MOD_RES (179)..(180): Any amino acid
  MOD_RES (182)..(186): Any amino acid
  MOD_RES (195)..(197): Any amino acid
  MOD_RES (199)..(209): Any amino acid
XXXXXXXXXCXXCXXXXXTSGSLVRHXXXHXXXXXXXCXXCXXXXXREDNLHTHXXXHXXXXXXXCXXCXXXXXRSDHLTTHXXXHXXXXXXXCXXCXXXXXQRANLRAHXXXHXXXXXXXCXXCXXXXXSPADLTRHXXXHXXXXXXXCXXCXXXXXTSGNLVRHXXXHXXXXXXXCXXCXXXXXTTGNLTVHXXXHXXXXXXXXXXX

SEQ ID NO: 2313 - protein, 209 aa, Artificial Sequence
  source: /note="Description of Artificial Sequence: Synthetic polypeptide"
  MOD_RES (1)..(9): Any amino acid
  MOD_RES (11)..(12): Any amino acid
  MOD_RES (14)..(18): Any amino acid
  MOD_RES (27)..(29): Any amino acid
  MOD_RES (31)..(37): Any amino acid
  MOD_RES (39)..(40): Any amino acid
  MOD_RES (42)..(46): Any amino acid
  MOD_RES (55)..(57): Any amino acid
  MOD_RES (59)..(65): Any amino acid
  MOD_RES (67)..(68): Any amino acid
  MOD_RES (70)..(74): Any amino acid
  MOD_RES (83)..(85): Any amino acid
  MOD_RES (87)..(93): Any amino acid
  MOD_RES (95)..(96): Any amino acid
  MOD_RES (98)..(102): Any amino acid
  MOD_RES (111)..(113): Any amino acid
  MOD_RES (115)..(121): Any amino acid
  MOD_RES (123)..(124): Any amino acid
  MOD_RES (126)..(130): Any amino acid
  MOD_RES (139)..(141): Any amino acid
  MOD_RES (143)..(149): Any amino acid
  MOD_RES (151)..(152): Any amino acid
  MOD_RES (154)..(158): Any amino acid
  MOD_RES (167)..(169): Any amino acid
  MOD_RES (171)..(177): Any amino acid
  MOD_RES (179)..(180): Any amino acid
  MOD_RES (182)..(186): Any amino acid
  MOD_RES (195)..(197): Any amino acid
  MOD_RES (199)..(209): Any amino acid
XXXXXXXXXCXXCXXXXXRSDHLTNHXXXHXXXXXXXCXXCXXXXXSKKALTEHXXXHXXXXXXXCXXCXXXXXRADNLTEHXXXHXXXXXXXCXXCXXXXXDPGHLVRHXXXHXXXXXXXCXXCXXXXXSPADLTRHXXXHXXXXXXXCXXCXXXXXTKNSLTEHXXXHXXXXXXXCXXCXXXXXTSGHLVRHXXXHXXXXXXXXXXX

SEQ ID NO: 2314 - protein, 209 aa, Artificial Sequence
  source: /note="Description of Artificial Sequence: Synthetic polypeptide"
  MOD_RES (1)..(9): Any amino acid
  MOD_RES (11)..(12): Any amino acid
  MOD_RES (14)..(18): Any amino acid
  MOD_RES (27)..(29): Any amino acid
  MOD_RES (31)..(37): Any amino acid
  MOD_RES (39)..(40): Any amino acid
  MOD_RES (42)..(46): Any amino acid
  MOD_RES (55)..(57): Any amino acid
  MOD_RES (59)..(65): Any amino acid
  MOD_RES (67)..(68): Any amino acid
  MOD_RES (70)..(74): Any amino acid
  MOD_RES (83)..(85): Any amino acid
  MOD_RES (87)..(93): Any amino acid
  MOD_RES (95)..(96): Any amino acid
  MOD_RES (98)..(102): Any amino acid
  MOD_RES (111)..(113): Any amino acid
  MOD_RES (115)..(121): Any amino acid
  MOD_RES (123)..(124): Any amino acid
  MOD_RES (126)..(130): Any amino acid
  MOD_RES (139)..(141): Any amino acid
  MOD_RES (143)..(149): Any amino acid
  MOD_RES (151)..(152): Any amino acid
  MOD_RES (154)..(158): Any amino acid
  MOD_RES (167)..(169): Any amino acid
  MOD_RES (171)..(177): Any amino acid
  MOD_RES (179)..(180): Any amino acid
  MOD_RES (182)..(186): Any amino acid
  MOD_RES (195)..(197): Any amino acid
  MOD_RES (199)..(209): Any amino acid
XXXXXXXXXCXXCXXXXXRADNLTEHXXXHXXXXXXXCXXCXXXXXDPGHLVRHXXXHXXXXXXXCXXCXXXXXSPADLTRHXXXHXXXXXXXCXXCXXXXXTKNSLTEHXXXHXXXXXXXCXXCXXXXXTSGHLVRHXXXHXXXXXXXCXXCXXXXXTSGSLVRHXXXHXXXXXXXCXXCXXXXXREDNLHTHXXXHXXXXXXXXXXX

SEQ ID NO: 2315 - protein, 209 aa, Artificial Sequence
  source: /note="Description of Artificial Sequence: Synthetic polypeptide"
  MOD_RES (1)..(9): Any amino acid
  MOD_RES (11)..(12): Any amino acid
  MOD_RES (14)..(18): Any amino acid
  MOD_RES (27)..(29): Any amino acid
  MOD_RES (31)..(37): Any amino acid
  MOD_RES (39)..(40): Any amino acid
  MOD_RES (42)..(46): Any amino acid
  MOD_RES (55)..(57): Any amino acid
  MOD_RES (59)..(65): Any amino acid
  MOD_RES (67)..(68): Any amino acid
  MOD_RES (70)..(74): Any amino acid
  MOD_RES (83)..(85): Any amino acid
  MOD_RES (87)..(93): Any amino acid
  MOD_RES (95)..(96): Any amino acid
  MOD_RES (98)..(102): Any amino acid
  MOD_RES (111)..(113): Any amino acid
  MOD_RES (115)..(121): Any amino acid
  MOD_RES (123)..(124): Any amino acid
  MOD_RES (126)..(130): Any amino acid
  MOD_RES (139)..(141): Any amino acid
  MOD_RES (143)..(149): Any amino acid
  MOD_RES (151)..(152): Any amino acid
  MOD_RES (154)..(158): Any amino acid
  MOD_RES (167)..(169): Any amino acid
  MOD_RES (171)..(177): Any amino acid
  MOD_RES (179)..(180): Any amino acid
  MOD_RES (182)..(186): Any amino acid
  MOD_RES (195)..(197): Any amino acid
  MOD_RES (199)..(209): Any amino acid
XXXXXXXXXCXXCXXXXXDPGHLVRHXXXHXXXXXXXCXXCXXXXXSPADLTRHXXXHXXXXXXXCXXCXXXXXTKNSLTEHXXXHXXXXXXXCXXCXXXXXTSGHLVRHXXXHXXXXXXXCXXCXXXXXTSGSLVRHXXXHXXXXXXXCXXCXXXXXREDNLHTHXXXHXXXXXXXCXXCXXXXXRSDHLTTHXXXHXXXXXXXXXXX

SEQ ID NO: 2316 - protein, 209 aa, Artificial Sequence
  source: /note="Description of Artificial Sequence: Synthetic polypeptide"
  MOD_RES (1)..(9): Any amino acid
  MOD_RES (11)..(12): Any amino acid
  MOD_RES (14)..(18): Any amino acid
  MOD_RES (27)..(29): Any amino acid
  MOD_RES (31)..(37): Any amino acid
  MOD_RES (39)..(40): Any amino acid
  MOD_RES (42)..(46): Any amino acid
  MOD_RES (55)..(57): Any amino acid
  MOD_RES (59)..(65): Any amino acid
  MOD_RES (67)..(68): Any amino acid
  MOD_RES (70)..(74): Any amino acid
  MOD_RES (83)..(85): Any amino acid
  MOD_RES (87)..(93): Any amino acid
  MOD_RES (95)..(96): Any amino acid
  MOD_RES (98)..(102): Any amino acid
  MOD_RES (111)..(113): Any amino acid
  MOD_RES (115)..(121): Any amino acid
  MOD_RES (123)..(124): Any amino acid
  MOD_RES (126)..(130): Any amino acid
  MOD_RES (139)..(141): Any amino acid
  MOD_RES (143)..(149): Any amino acid
  MOD_RES (151)..(152): Any amino acid
  MOD_RES (154)..(158): Any amino acid
  MOD_RES (167)..(169): Any amino acid
  MOD_RES (171)..(177): Any amino acid
  MOD_RES (179)..(180): Any amino acid
  MOD_RES (182)..(186): Any amino acid
  MOD_RES (195)..(197): Any amino acid
  MOD_RES (199)..(209): Any amino acid
XXXXXXXXXCXXCXXXXXSPADLTRHXXXHXXXXXXXCXXCXXXXXTKNSLTEHXXXHXXXXXXXCXXCXXXXXTSGHLVRHXXXHXXXXXXXCXXCXXXXXTSGSLVRHXXXHXXXXXXXCXXCXXXXXREDNLHTHXXXHXXXXXXXCXXCXXXXXRSDHLTTHXXXHXXXXXXXCXXCXXXXXQRANLRAHXXXHXXXXXXXXXXX

SEQ ID NO: 2317 - protein, 209 aa, Artificial Sequence
  source: /note="Description of Artificial Sequence: Synthetic polypeptide"
  MOD_RES (1)..(9): Any amino acid
  MOD_RES (11)..(12): Any amino acid
  MOD_RES (14)..(18): Any amino acid
  MOD_RES (27)..(29): Any amino acid
  MOD_RES (31)..(37): Any amino acid
  MOD_RES (39)..(40): Any amino acid
  MOD_RES (42)..(46): Any amino acid
  MOD_RES (55)..(57): Any amino acid
  MOD_RES (59)..(65): Any amino acid
  MOD_RES (67)..(68): Any amino acid
  MOD_RES (70)..(74): Any amino acid
  MOD_RES (83)..(85): Any amino acid
  MOD_RES (87)..(93): Any amino acid
  MOD_RES (95)..(96): Any amino acid
  MOD_RES (98)..(102): Any amino acid
  MOD_RES (111)..(113): Any amino acid
  MOD_RES (115)..(121): Any amino acid
  MOD_RES (123)..(124): Any amino acid
  MOD_RES (126)..(130): Any amino acid
  MOD_RES (139)..(141): Any amino acid
  MOD_RES (143)..(149): Any amino acid
  MOD_RES (151)..(152): Any amino acid
  MOD_RES (154)..(158): Any amino acid
  MOD_RES (167)..(169): Any amino acid
  MOD_RES (171)..(177): Any amino acid
  MOD_RES (179)..(180): Any amino acid
  MOD_RES (182)..(186): Any amino acid
  MOD_RES (195)..(197): Any amino acid
  MOD_RES (199)..(209): Any amino acid
XXXXXXXXXCXXCXXXXXTKNSLTEHXXXHXXXXXXXCXXCXXXXXTSGHLVRHXXXHXXXXXXXCXXCXXXXXTSGSLVRHXXXHXXXXXXXCXXCXXXXXREDNLHTHXXXHXXXXXXXCXXCXXXXXRSDHLTTHXXXHXXXXXXXCXXCXXXXXQRANLRAHXXXHXXXXXXXCXXCXXXXXSPADLTRHXXXHXXXXXXXXXXX

SEQ ID NO: 2318 - protein, 209 aa, Artificial Sequence
  source: /note="Description of Artificial Sequence: Synthetic polypeptide"
  MOD_RES (1)..(9): Any amino acid
  MOD_RES (11)..(12): Any amino acid
  MOD_RES (14)..(18): Any amino acid
  MOD_RES (27)..(29): Any amino acid
  MOD_RES (31)..(37): Any amino acid
  MOD_RES (39)..(40): Any amino acid
  MOD_RES (42)..(46): Any amino acid
  MOD_RES (55)..(57): Any amino acid
  MOD_RES (59)..(65): Any amino acid
  MOD_RES (67)..(68): Any amino acid
  MOD_RES (70)..(74): Any amino acid
  MOD_RES (83)..(85): Any amino acid
  MOD_RES (87)..(93): Any amino acid
  MOD_RES (95)..(96): Any amino acid
  MOD_RES (98)..(102): Any amino acid
  MOD_RES (111)..(113): Any amino acid
  MOD_RES (115)..(121): Any amino acid
  MOD_RES (123)..(124): Any amino acid
  MOD_RES (126)..(130): Any amino acid
  MOD_RES (139)..(141): Any amino acid
  MOD_RES (143)..(149): Any amino acid
  MOD_RES (151)..(152): Any amino acid
  MOD_RES (154)..(158): Any amino acid
  MOD_RES (167)..(169): Any amino acid
  MOD_RES (171)..(177): Any amino acid
  MOD_RES (179)..(180): Any amino acid
  MOD_RES (182)..(186): Any amino acid
  MOD_RES (195)..(197): Any amino acid
  MOD_RES (199)..(209): Any amino acid
XXXXXXXXXCXXCXXXXXTSGHLVRHXXXHXXXXXXXCXXCXXXXXTSGSLVRHXXXHXXXXXXXCXXCXXXXXREDNLHTHXXXHXXXXXXXCXXCXXXXXRSDHLTTHXXXHXXXXXXXCXXCXXXXXQRANLRAHXXXHXXXXXXXCXXCXXXXXSPADLTRHXXXHXXXXXXXCXXCXXXXXTSGNLVRHXXXHXXXXXXXXXXX

SEQ ID NO: 2319 - protein, 209 aa, Artificial Sequence
  source: /note="Description of Artificial Sequence: Synthetic polypeptide"
  MOD_RES (1)..(9): Any amino acid
  MOD_RES (11)..(12): Any amino acid
  MOD_RES (14)..(18): Any amino acid
  MOD_RES (27)..(29): Any amino acid
  MOD_RES (31)..(37): Any amino acid
  MOD_RES (39)..(40): Any amino acid
  MOD_RES (42)..(46): Any amino acid
  MOD_RES (55)..(57): Any amino acid
  MOD_RES (59)..(65): Any amino acid
  MOD_RES (67)..(68): Any amino acid
  MOD_RES (70)..(74): Any amino acid
  MOD_RES (83)..(85): Any amino acid
  MOD_RES (87)..(93): Any amino acid
  MOD_RES (95)..(96): Any amino acid
  MOD_RES (98)..(102): Any amino acid
  MOD_RES (111)..(113): Any amino acid
  MOD_RES (115)..(121): Any amino acid
  MOD_RES (123)..(124): Any amino acid
  MOD_RES (126)..(130): Any amino acid
  MOD_RES (139)..(141): Any amino acid
  MOD_RES (143)..(149): Any amino acid
  MOD_RES (151)..(152): Any amino acid
  MOD_RES (154)..(158): Any amino acid
  MOD_RES (167)..(169): Any amino acid
  MOD_RES (171)..(177): Any amino acid
  MOD_RES (179)..(180): Any amino acid
  MOD_RES (182)..(186): Any amino acid
  MOD_RES (195)..(197): Any amino acid
  MOD_RES (199)..(209): Any amino acid
XXXXXXXXXCXXCXXXXXSKKALTEHXXXHXXXXXXXCXXCXXXXXRADNLTEHXXXHXXXXXXXCXXCXXXXXDPGHLVRHXXXHXXXXXXXCXXCXXXXXSPADLTRHXXXHXXXXXXXCXXCXXXXXTKNSLTEHXXXHXXXXXXXCXXCXXXXXTSGHLVRHXXXHXXXXXXXCXXCXXXXXTSGSLVRHXXXHXXXXXXXXXXX

SEQ ID NO: 2320 - protein, 209 aa, Artificial Sequence
  source: /note="Description of Artificial Sequence: Synthetic polypeptide"
  MOD_RES (1)..(9): Any amino acid
  MOD_RES (11)..(12): Any amino acid
  MOD_RES (14)..(18): Any amino acid
  MOD_RES (27)..(29): Any amino acid
  MOD_RES (31)..(37): Any amino acid
  MOD_RES (39)..(40): Any amino acid
  MOD_RES (42)..(46): Any amino acid
  MOD_RES (55)..(57): Any amino acid
  MOD_RES (59)..(65): Any amino acid
  MOD_RES (67)..(68): Any amino acid
  MOD_RES (70)..(74): Any amino acid
  MOD_RES (83)..(85): Any amino acid
  MOD_RES (87)..(93): Any amino acid
  MOD_RES (95)..(96): Any amino acid
  MOD_RES (98)..(102): Any amino acid
  MOD_RES (111)..(113): Any amino acid
  MOD_RES (115)..(121): Any amino acid
  MOD_RES (123)..(124): Any amino acid
  MOD_RES (126)..(130): Any amino acid
  MOD_RES (139)..(141): Any amino acid
  MOD_RES (143)..(149): Any amino acid
  MOD_RES (151)..(152): Any amino acid
  MOD_RES (154)..(158): Any amino acid
  MOD_RES (167)..(169): Any amino acid
  MOD_RES (171)..(177): Any amino acid
  MOD_RES (179)..(180): Any amino acid
  MOD_RES (182)..(186): Any amino acid
  MOD_RES (195)..(197): Any amino acid
  MOD_RES (199)..(209): Any amino acid
XXXXXXXXXCXXCXXXXXTSGHLVRHXXXHXXXXXXXCXXCXXXXXSPADLTRHXXXHXXXXXXXCXXCXXXXXERSHLREHXXXHXXXXXXXCXXCXXXXXDCRDLARHXXXHXXXXXXXCXXCXXXXXRADNLTEHXXXHXXXXXXXCXXCXXXXXQNSTLTEHXXXHXXXXXXXCXXCXXXXXDPGALVRHXXXHXXXXXXXXXXX

SEQ ID NO: 2321 - protein, 209 aa, Artificial Sequence
  source: /note="Description of Artificial Sequence: Synthetic polypeptide"
  MOD_RES (1)..(9): Any amino acid
  MOD_RES (11)..(12): Any amino acid
  MOD_RES (14)..(18): Any amino acid
  MOD_RES (27)..(29): Any amino acid
  MOD_RES (31)..(37): Any amino acid
  MOD_RES (39)..(40): Any amino acid
  MOD_RES (42)..(46): Any amino acid
  MOD_RES (55)..(57): Any amino acid
  MOD_RES (59)..(65): Any amino acid
  MOD_RES (67)..(68): Any amino acid
  MOD_RES (70)..(74): Any amino acid
  MOD_RES (83)..(85): Any amino acid
  MOD_RES (87)..(93): Any amino acid
  MOD_RES (95)..(96): Any amino acid
  MOD_RES (98)..(102): Any amino acid
  MOD_RES (111)..(113): Any amino acid
  MOD_RES (115)..(121): Any amino acid
  MOD_RES (123)..(124): Any amino acid
  MOD_RES (126)..(130): Any amino acid
  MOD_RES (139)..(141): Any amino acid
  MOD_RES (143)..(149): Any amino acid
  MOD_RES (151)..(152): Any amino acid
  MOD_RES (154)..(158): Any amino acid
  MOD_RES (167)..(169): Any amino acid
  MOD_RES (171)..(177): Any amino acid
  MOD_RES (179)..(180): Any amino acid
  MOD_RES (182)..(186): Any amino acid
  MOD_RES (195)..(197): Any amino acid
  MOD_RES (199)..(209): Any amino acid
XXXXXXXXXCXXCXXXXXDCRDLARHXXXHXXXXXXXCXXCXXXXXTSGSLVRHXXXHXXXXXXXCXXCXXXXXTSGHLVRHXXXHXXXXXXXCXXCXXXXXSPADLTRHXXXHXXXXXXXCXXCXXXXXERSHLREHXXXHXXXXXXXCXXCXXXXXDCRDLARHXXXHXXXXXXXCXXCXXXXXRADNLTEHXXXHXXXXXXXXXXX

SEQ ID NO: 2322 - protein, 209 aa, Artificial Sequence
  source: /note="Description of Artificial Sequence: Synthetic polypeptide"
  MOD_RES (1)..(9): Any amino acid
  MOD_RES (11)..(12): Any amino acid
  MOD_RES (14)..(18): Any amino acid
  MOD_RES (27)..(29): Any amino acid
  MOD_RES (31)..(37): Any amino acid
  MOD_RES (39)..(40): Any amino acid
  MOD_RES (42)..(46): Any amino acid
  MOD_RES (55)..(57): Any amino acid
  MOD_RES (59)..(65): Any amino acid
  MOD_RES (67)..(68): Any amino acid
  MOD_RES (70)..(74): Any amino acid
  MOD_RES (83)..(85): Any amino acid
  MOD_RES (87)..(93): Any amino acid
  MOD_RES (95)..(96): Any amino acid
  MOD_RES (98)..(102): Any amino acid
  MOD_RES (111)..(113): Any amino acid
  MOD_RES (115)..(121): Any amino acid
  MOD_RES (123)..(124): Any amino acid
  MOD_RES (126)..(130): Any amino acid
  MOD_RES (139)..(141): Any amino acid
  MOD_RES (143)..(149): Any amino acid
  MOD_RES (151)..(152): Any amino acid
  MOD_RES (154)..(158): Any amino acid
  MOD_RES (167)..(169): Any amino acid
  MOD_RES (171)..(177): Any amino acid
  MOD_RES (179)..(180): Any amino acid
  MOD_RES (182)..(186): Any amino acid
  MOD_RES (195)..(197): Any amino acid
  MOD_RES (199)..(209): Any amino acid
XXXXXXXXXCXXCXXXXXTSGSLVRHXXXHXXXXXXXCXXCXXXXXTSGHLVRHXXXHXXXXXXXCXXCXXXXXSPADLTRHXXXHXXXXXXXCXXCXXXXXERSHLREHXXXHXXXXXXXCXXCXXXXXDCRDLARHXXXHXXXXXXXCXXCXXXXXRADNLTEHXXXHXXXXXXXCXXCXXXXXQNSTLTEHXXXHXXXXXXXXXXX

SEQ ID NO: 2323 - protein, 209 aa, Artificial Sequence
  source: /note="Description of Artificial Sequence: Synthetic polypeptide"
  MOD_RES (1)..(9): Any amino acid
  MOD_RES (11)..(12): Any amino acid
  MOD_RES (14)..(18): Any amino acid
  MOD_RES (27)..(29): Any amino acid
  MOD_RES (31)..(37): Any amino acid
  MOD_RES (39)..(40): Any amino acid
  MOD_RES (42)..(46): Any amino acid
  MOD_RES (55)..(57): Any amino acid
  MOD_RES (59)..(65): Any amino acid
  MOD_RES (67)..(68): Any amino acid
  MOD_RES (70)..(74): Any amino acid
  MOD_RES (83)..(85): Any amino acid
  MOD_RES (87)..(93): Any amino acid
  MOD_RES (95)..(96): Any amino acid
  MOD_RES (98)..(102): Any amino acid
  MOD_RES (111)..(113): Any amino acid
  MOD_RES (115)..(121): Any amino acid
  MOD_RES (123)..(124): Any amino acid
  MOD_RES (126)..(130): Any amino acid
  MOD_RES (139)..(141): Any amino acid
  MOD_RES (143)..(149): Any amino acid
  MOD_RES (151)..(152): Any amino acid
  MOD_RES (154)..(158): Any amino acid
  MOD_RES (167)..(169): Any amino acid
  MOD_RES (171)..(177): Any amino acid
  MOD_RES (179)..(180): Any amino acid
  MOD_RES (182)..(186): Any amino acid
  MOD_RES (195)..(197): Any amino acid
  MOD_RES (199)..(209): Any amino acid
XXXXXXXXXCXXCXXXXXTSHSLTEHXXXHXXXXXXXCXXCXXXXXERSHLREHXXXHXXXXXXXCXXCXXXXXQAGHLASHXXXHXXXXXXXCXXCXXXXXRKDNLKNHXXXHXXXXXXXCXXCXXXXXDCRDLARHXXXHXXXXXXXCXXCXXXXXTSGSLVRHXXXHXXXXXXXCXXCXXXXXTSGHLVRHXXXHXXXXXXXXXXX

SEQ ID NO: 2324 - protein, 209 aa, Artificial Sequence
  source: /note="Description of Artificial Sequence: Synthetic polypeptide"
  MOD_RES (1)..(9): Any amino acid
  MOD_RES (11)..(12): Any amino acid
  MOD_RES (14)..(18): Any amino acid
  MOD_RES (27)..(29): Any amino acid
  MOD_RES (31)..(37): Any amino acid
  MOD_RES (39)..(40): Any amino acid
  MOD_RES (42)..(46): Any amino acid
  MOD_RES (55)..(57): Any amino acid
  MOD_RES (59)..(65): Any amino acid
  MOD_RES (67)..(68): Any amino acid
  MOD_RES (70)..(74): Any amino acid
  MOD_RES (83)..(85): Any amino acid
  MOD_RES (87)..(93): Any amino acid
  MOD_RES (95)..(96): Any amino acid
  MOD_RES (98)..(102): Any amino acid
  MOD_RES (111)..(113): Any amino acid
  MOD_RES (115)..(121): Any amino acid
  MOD_RES (123)..(124): Any amino acid
  MOD_RES (126)..(130): Any amino acid
  MOD_RES (139)..(141): Any amino acid
  MOD_RES (143)..(149): Any amino acid
  MOD_RES (151)..(152): Any amino acid
  MOD_RES (154)..(158): Any amino acid
  MOD_RES (167)..(169): Any amino acid
  MOD_RES (171)..(177): Any amino acid
  MOD_RES (179)..(180): Any amino acid
  MOD_RES (182)..(186): Any amino acid
  MOD_RES (195)..(197): Any amino acid
  MOD_RES (199)..(209): Any amino acid
XXXXXXXXXCXXCXXXXXQAGHLASHXXXHXXXXXXXCXXCXXXXXRKDNLKNHXXXHXXXXXXXCXXCXXXXXDCRDLARHXXXHXXXXXXXCXXCXXXXXTSGSLVRHXXXHXXXXXXXCXXCXXXXXTSGHLVRHXXXHXXXXXXXCXXCXXXXXSPADLTRHXXXHXXXXXXXCXXCXXXXXERSHLREHXXXHXXXXXXXXXXX

SEQ ID NO: 2325 - protein, 209 aa, Artificial Sequence
  source: /note="Description of Artificial Sequence: Synthetic polypeptide"
  MOD_RES (1)..(9): Any amino acid
  MOD_RES (11)..(12): Any amino acid
  MOD_RES (14)..(18): Any amino acid
  MOD_RES (27)..(29): Any amino acid
  MOD_RES (31)..(37): Any amino acid
  MOD_RES (39)..(40): Any amino acid
  MOD_RES (42)..(46): Any amino acid
  MOD_RES (55)..(57): Any amino acid
  MOD_RES (59)..(65): Any amino acid
  MOD_RES (67)..(68): Any amino acid
  MOD_RES (70)..(74): Any amino acid
  MOD_RES (83)..(85): Any amino acid
  MOD_RES (87)..(93): Any amino acid
  MOD_RES (95)..(96): Any amino acid
  MOD_RES (98)..(102): Any amino acid
  MOD_RES (111)..(113): Any amino acid
  MOD_RES (115)..(121): Any amino acid
  MOD_RES (123)..(124): Any amino acid
  MOD_RES (126)..(130): Any amino acid
  MOD_RES (139)..(141): Any amino acid
  MOD_RES (143)..(149): Any amino acid
  MOD_RES (151)..(152): Any amino acid
  MOD_RES (154)..(158): Any amino acid
  MOD_RES (167)..(169): Any amino acid
  MOD_RES (171)..(177): Any amino acid
  MOD_RES (179)..(180): Any amino acid
  MOD_RES (182)..(186): Any amino acid
  MOD_RES (195)..(197): Any amino acid
  MOD_RES (199)..(209): Any amino acid
XXXXXXXXXCXXCXXXXXERSHLREHXXXHXXXXXXXCXXCXXXXXQAGHLASHXXXHXXXXXXXCXXCXXXXXRKDNLKNHXXXHXXXXXXXCXXCXXXXXDCRDLARHXXXHXXXXXXXCXXCXXXXXTSGSLVRHXXXHXXXXXXXCXXCXXXXXTSGHLVRHXXXHXXXXXXXCXXCXXXXXSPADLTRHXXXHXXXXXXXXXXX

SEQ ID NO: 2326 - protein, 209 aa, Artificial Sequence
  source: /note="Description of Artificial Sequence: Synthetic polypeptide"
  MOD_RES (1)..(9): Any amino acid
  MOD_RES (11)..(12): Any amino acid
  MOD_RES (14)..(18): Any amino acid
  MOD_RES (27)..(29): Any amino acid
  MOD_RES (31)..(37): Any amino acid
  MOD_RES (39)..(40): Any amino acid
  MOD_RES (42)..(46): Any amino acid
  MOD_RES (55)..(57): Any amino acid
  MOD_RES (59)..(65): Any amino acid
  MOD_RES (67)..(68): Any amino acid
  MOD_RES (70)..(74): Any amino acid
  MOD_RES (83)..(85): Any amino acid
  MOD_RES (87)..(93): Any amino acid
  MOD_RES (95)..(96): Any amino acid
  MOD_RES (98)..(102): Any amino acid
  MOD_RES (111)..(113): Any amino acid
  MOD_RES (115)..(121): Any amino acid
  MOD_RES (123)..(124): Any amino acid
  MOD_RES (126)..(130): Any amino acid
  MOD_RES (139)..(141): Any amino acid
  MOD_RES (143)..(149): Any amino acid
  MOD_RES (151)..(152): Any amino acid
  MOD_RES (154)..(158): Any amino acid
  MOD_RES (167)..(169): Any amino acid
  MOD_RES (171)..(177): Any amino acid
  MOD_RES (179)..(180): Any amino acid
  MOD_RES (182)..(186): Any amino acid
  MOD_RES (195)..(197): Any amino acid
  MOD_RES (199)..(209): Any amino acid
XXXXXXXXXCXXCXXXXXRKDNLKNHXXXHXXXXXXXCXXCXXXXXDCRDLARHXXXHXXXXXXXCXXCXXXXXTSGSLVRHXXXHXXXXXXXCXXCXXXXXTSGHLVRHXXXHXXXXXXXCXXCXXXXXSPADLTRHXXXHXXXXXXXCXXCXXXXXERSHLREHXXXHXXXXXXXCXXCXXXXXDCRDLARHXXXHXXXXXXXXXXX

SEQ ID NO: 2327 - protein, 209 aa, Artificial Sequence
  source: /note="Description of Artificial Sequence: Synthetic polypeptide"
  MOD_RES (1)..(9): Any amino acid
  MOD_RES (11)..(12): Any amino acid
  MOD_RES (14)..(18): Any amino acid
  MOD_RES (27)..(29): Any amino acid
  MOD_RES (31)..(37): Any amino acid
  MOD_RES (39)..(40): Any amino acid
  MOD_RES (42)..(46): Any amino acid
  MOD_RES (55)..(57): Any amino acid
  MOD_RES (59)..(65): Any amino acid
  MOD_RES (67)..(68): Any amino acid
  MOD_RES (70)..(74): Any amino acid
  MOD_RES (83)..(85): Any amino acid
  MOD_RES (87)..(93): Any amino acid
  MOD_RES (95)..(96): Any amino acid
  MOD_RES (98)..(102): Any amino acid
  MOD_RES (111)..(113): Any amino acid
  MOD_RES (115)..(121): Any amino acid
  MOD_RES (123)..(124): Any amino acid
  MOD_RES (126)..(130): Any amino acid
  MOD_RES (139)..(141): Any amino acid
  MOD_RES (143)..(149): Any amino acid
  MOD_RES (151)..(152): Any amino acid
  MOD_RES (154)..(158): Any amino acid
  MOD_RES (167)..(169): Any amino acid
  MOD_RES (171)..(177): Any amino acid
  MOD_RES (179)..(180): Any amino acid
  MOD_RES (182)..(186): Any amino acid
  MOD_RES (195)..(197): Any amino acid
  MOD_RES (199)..(209): Any amino acid
XXXXXXXXXCXXCXXXXXTSGNLTEHXXXHXXXXXXXCXXCXXXXXRSDHLTNHXXXHXXXXXXXCXXCXXXXXSKKALTEHXXXHXXXXXXXCXXCXXXXXTSGNLVRHXXXHXXXXXXXCXXCXXXXXHRTTLTNHXXXHXXXXXXXCXXCXXXXXSKKALTEHXXXHXXXXXXXCXXCXXXXXRSDHLTNHXXXHXXXXXXXXXXX

SEQ ID NO: 2328 - protein, 209 aa, Artificial Sequence
  source: /note="Description of Artificial Sequence: Synthetic polypeptide"
  MOD_RES (1)..(9): Any amino acid
  MOD_RES (11)..(12): Any amino acid
  MOD_RES (14)..(18): Any amino acid
  MOD_RES (27)..(29): Any amino acid
  MOD_RES (31)..(37): Any amino acid
  MOD_RES (39)..(40): Any amino acid
  MOD_RES (42)..(46): Any amino acid
  MOD_RES (55)..(57): Any amino acid
  MOD_RES (59)..(65): Any amino acid
  MOD_RES (67)..(68): Any amino acid
  MOD_RES (70)..(74): Any amino acid
  MOD_RES (83)..(85): Any amino acid
  MOD_RES (87)..(93): Any amino acid
  MOD_RES (95)..(96): Any amino acid
  MOD_RES (98)..(102): Any amino acid
  MOD_RES (111)..(113): Any amino acid
  MOD_RES (115)..(121): Any amino acid
  MOD_RES (123)..(124): Any amino acid
  MOD_RES (126)..(130): Any amino acid
  MOD_RES (139)..(141): Any amino acid
  MOD_RES (143)..(149): Any amino acid
  MOD_RES (151)..(152): Any amino acid
  MOD_RES (154)..(158): Any amino acid
  MOD_RES (167)..(169): Any amino acid
  MOD_RES (171)..(177): Any amino acid
  MOD_RES (179)..(180): Any amino acid
  MOD_RES (182)..(186): Any amino acid
  MOD_RES (195)..(197): Any amino acid
  MOD_RES (199)..(209): Any amino acid
XXXXXXXXXCXXCXXXXXSKKHLAEHXXXHXXXXXXXCXXCXXXXXRSDELVRHXXXHXXXXXXXCXXCXXXXXTSGNLTEHXXXHXXXXXXXCXXCXXXXXDCRDLARHXXXHXXXXXXXCXXCXXXXXQSSNLVRHXXXHXXXXXXXCXXCXXXXXHRTTLTNHXXXHXXXXXXXCXXCXXXXXTSHSLTEHXXXHXXXXXXXXXXX

SEQ ID NO: 2329 - protein, 209 aa, Artificial Sequence
  source: /note="Description of Artificial Sequence: Synthetic polypeptide"
  MOD_RES (1)..(9): Any amino acid
  MOD_RES (11)..(12): Any amino acid
  MOD_RES (14)..(18): Any amino acid
  MOD_RES (27)..(29): Any amino acid
  MOD_RES (31)..(37): Any amino acid
  MOD_RES (39)..(40): Any amino acid
  MOD_RES (42)..(46): Any amino acid
  MOD_RES (55)..(57): Any amino acid
  MOD_RES (59)..(65): Any amino acid
  MOD_RES (67)..(68): Any amino acid
  MOD_RES (70)..(74): Any amino acid
  MOD_RES (83)..(85): Any amino acid
  MOD_RES (87)..(93): Any amino acid
  MOD_RES (95)..(96): Any amino acid
  MOD_RES (98)..(102): Any amino acid
  MOD_RES (111)..(113): Any amino acid
  MOD_RES (115)..(121): Any amino acid
  MOD_RES (123)..(124): Any amino acid
  MOD_RES (126)..(130): Any amino acid
  MOD_RES (139)..(141): Any amino acid
  MOD_RES (143)..(149): Any amino acid
  MOD_RES (151)..(152): Any amino acid
  MOD_RES (154)..(158): Any amino acid
  MOD_RES (167)..(169): Any amino acid
  MOD_RES (171)..(177): Any amino acid
  MOD_RES (179)..(180): Any amino acid
  MOD_RES (182)..(186): Any amino acid
  MOD_RES (195)..(197): Any amino acid
  MOD_RES (199)..(209): Any amino acid
XXXXXXXXXCXXCXXXXXSKKALTEHXXXHXXXXXXXCXXCXXXXXRSDHLTNHXXXHXXXXXXXCXXCXXXXXSKKHLAEHXXXHXXXXXXXCXXCXXXXXRSDELVRHXXXHXXXXXXXCXXCXXXXXTSGNLTEHXXXHXXXXXXXCXXCXXXXXDCRDLARHXXXHXXXXXXXCXXCXXXXXQSSNLVRHXXXHXXXXXXXXXXX

SEQ ID NO: 2330 - protein, 209 aa, Artificial Sequence
  source: /note="Description of Artificial Sequence: Synthetic polypeptide"
  MOD_RES (1)..(9): Any amino acid
  MOD_RES (11)..(12): Any amino acid
  MOD_RES (14)..(18): Any amino acid
  MOD_RES (27)..(29): Any amino acid
  MOD_RES (31)..(37): Any amino acid
  MOD_RES (39)..(40): Any amino acid
  MOD_RES (42)..(46): Any amino acid
  MOD_RES (55)..(57): Any amino acid
  MOD_RES (59)..(65): Any amino acid
  MOD_RES (67)..(68): Any amino acid
  MOD_RES (70)..(74): Any amino acid
  MOD_RES (83)..(85): Any amino acid
  MOD_RES (87)..(93): Any amino acid
  MOD_RES (95)..(96): Any amino acid
  MOD_RES (98)..(102): Any amino acid
  MOD_RES (111)..(113): Any amino acid
  MOD_RES (115)..(121): Any amino acid
  MOD_RES (123)..(124): Any amino acid
  MOD_RES (126)..(130): Any amino acid
  MOD_RES (139)..(141): Any amino acid
  MOD_RES (143)..(149): Any amino acid
  MOD_RES (151)..(152): Any amino acid
  MOD_RES (154)..(158): Any amino acid
  MOD_RES (167)..(169): Any amino acid
  MOD_RES (171)..(177): Any amino acid
  MOD_RES (179)..(180): Any amino acid
  MOD_RES (182)..(186): Any amino acid
  MOD_RES (195)..(197): Any amino acid
  MOD_RES (199)..(209): Any amino acid
XXXXXXXXXCXXCXXXXXRSDHLTNHXXXHXXXXXXXCXXCXXXXXSKKHLAEHXXXHXXXXXXXCXXCXXXXXRSDELVRHXXXHXXXXXXXCXXCXXXXXTSGNLTEHXXXHXXXXXXXCXXCXXXXXDCRDLARHXXXHXXXXXXXCXXCXXXXXQSSNLVRHXXXHXXXXXXXCXXCXXXXXHRTTLTNHXXXHXXXXXXXXXXX

SEQ ID NO: 2331 - protein, 209 aa, Artificial Sequence
  source: /note="Description of Artificial Sequence: Synthetic polypeptide"
  MOD_RES (1)..(9): Any amino acid
  MOD_RES (11)..(12): Any amino acid
  MOD_RES (14)..(18): Any amino acid
  MOD_RES (27)..(29): Any amino acid
  MOD_RES (31)..(37): Any amino acid
  MOD_RES (39)..(40): Any amino acid
  MOD_RES (42)..(46): Any amino acid
  MOD_RES (55)..(57): Any amino acid
  MOD_RES (59)..(65): Any amino acid
  MOD_RES (67)..(68): Any amino acid
  MOD_RES (70)..(74): Any amino acid
  MOD_RES (83)..(85): Any amino acid
  MOD_RES (87)..(93): Any amino acid
  MOD_RES (95)..(96): Any amino acid
  MOD_RES (98)..(102): Any amino acid
  MOD_RES (111)..(113): Any amino acid
  MOD_RES (115)..(121): Any amino acid
  MOD_RES (123)..(124): Any amino acid
  MOD_RES (126)..(130): Any amino acid
  MOD_RES (139)..(141): Any amino acid
  MOD_RES (143)..(149): Any amino acid
  MOD_RES (151)..(152): Any amino acid
  MOD_RES (154)..(158): Any amino acid
  MOD_RES (167)..(169): Any amino acid
  MOD_RES (171)..(177): Any amino acid
  MOD_RES (179)..(180): Any amino acid
  MOD_RES (182)..(186): Any amino acid
  MOD_RES (195)..(197): Any amino acid
  MOD_RES (199)..(209): Any amino acid
XXXXXXXXXCXXCXXXXXSKKALTEHXXXHXXXXXXXCXXCXXXXXTSGNLVRHXXXHXXXXXXXCXXCXXXXXHRTTLTNHXXXHXXXXXXXCXXCXXXXXSKKALTEHXXXHXXXXXXXCXXCXXXXXRSDHLTNHXXXHXXXXXXXCXXCXXXXXSKKHLAEHXXXHXXXXXXXCXXCXXXXXRSDELVRHXXXHXXXXXXXXXXX

SEQ ID NO: 2332 - protein, 209 aa, Artificial Sequence
  source: /note="Description of Artificial Sequence: Synthetic polypeptide"
  MOD_RES (1)..(9): Any amino acid
  MOD_RES (11)..(12): Any amino acid
  MOD_RES (14)..(18): Any amino acid
  MOD_RES (27)..(29): Any amino acid
  MOD_RES (31)..(37): Any amino acid
  MOD_RES (39)..(40): Any amino acid
  MOD_RES (42)..(46): Any amino acid
  MOD_RES (55)..(57): Any amino acid
  MOD_RES (59)..(65): Any amino acid
  MOD_RES (67)..(68): Any amino acid
  MOD_RES (70)..(74): Any amino acid
  MOD_RES (83)..(85): Any amino acid
  MOD_RES (87)..(93): Any amino acid
  MOD_RES (95)..(96): Any amino acid
  MOD_RES (98)..(102): Any amino acid
  MOD_RES (111)..(113): Any amino acid
  MOD_RES (115)..(121): Any amino acid
  MOD_RES (123)..(124): Any amino acid
  MOD_RES (126)..(130): Any amino acid
  MOD_RES (139)..(141): Any amino acid
  MOD_RES (143)..(149): Any amino acid
  MOD_RES (151)..(152): Any amino acid
  MOD_RES (154)..(158): Any amino acid
  MOD_RES (167)..(169): Any amino acid
  MOD_RES (171)..(177): Any amino acid
  MOD_RES (179)..(180): Any amino acid
  MOD_RES (182)..(186): Any amino acid
  MOD_RES (195)..(197): Any amino acid
  MOD_RES (199)..(209): Any amino acid
XXXXXXXXXCXXCXXXXXHRTTLTNHXXXHXXXXXXXCXXCXXXXXSKKALTEHXXXHXXXXXXXCXXCXXXXXRSDHLTNHXXXHXXXXXXXCXXCXXXXXSKKHLAEHXXXHXXXXXXXCXXCXXXXXRSDELVRHXXXHXXXXXXXCXXCXXXXXTSGNLTEHXXXHXXXXXXXCXXCXXXXXDCRDLARHXXXHXXXXXXXXXXX

SEQ ID NO: 2333 - protein, 209 aa, Artificial Sequence
  source: /note="Description of Artificial Sequence: Synthetic polypeptide"
  MOD_RES (1)..(9): Any amino acid
  MOD_RES (11)..(12): Any amino acid
  MOD_RES (14)..(18): Any amino acid
  MOD_RES (27)..(29): Any amino acid
  MOD_RES (31)..(37): Any amino acid
  MOD_RES (39)..(40): Any amino acid
  MOD_RES (42)..(46): Any amino acid
  MOD_RES (55)..(57): Any amino acid
  MOD_RES (59)..(65): Any amino acid
  MOD_RES (67)..(68): Any amino acid
  MOD_RES (70)..(74): Any amino acid
  MOD_RES (83)..(85): Any amino acid
  MOD_RES (87)..(93): Any amino acid
  MOD_RES (95)..(96): Any amino acid
  MOD_RES (98)..(102): Any amino acid
  MOD_RES (111)..(113): Any amino acid
  MOD_RES (115)..(121): Any amino acid
  MOD_RES (123)..(124): Any amino acid
  MOD_RES (126)..(130): Any amino acid
  MOD_RES (139)..(141): Any amino acid
  MOD_RES (143)..(149): Any amino acid
  MOD_RES (151)..(152): Any amino acid
  MOD_RES (154)..(158): Any amino acid
  MOD_RES (167)..(169): Any amino acid
  MOD_RES (171)..(177): Any amino acid
  MOD_RES (179)..(180): Any amino acid
  MOD_RES (182)..(186): Any amino acid
  MOD_RES (195)..(197): Any amino acid
  MOD_RES (199)..(209): Any amino acid
XXXXXXXXXCXXCXXXXXTSGNLVRHXXXHXXXXXXXCXXCXXXXXHRTTLTNHXXXHXXXXXXXCXXCXXXXXSKKALTEHXXXHXXXXXXXCXXCXXXXXRSDHLTNHXXXHXXXXXXXCXXCXXXXXSKKHLAEHXXXHXXXXXXXCXXCXXXXXRSDELVRHXXXHXXXXXXXCXXCXXXXXTSGNLTEHXXXHXXXXXXXXXXX

SEQ ID NO: 2334 - protein, 209 aa, Artificial Sequence
  source: /note="Description of Artificial Sequence: Synthetic polypeptide"
  MOD_RES (1)..(9): Any amino acid
  MOD_RES (11)..(12): Any amino acid
  MOD_RES (14)..(18): Any amino acid
  MOD_RES (27)..(29): Any amino acid
  MOD_RES (31)..(37): Any amino acid
  MOD_RES (39)..(40): Any amino acid
  MOD_RES (42)..(46): Any amino acid
  MOD_RES (55)..(57): Any amino acid
  MOD_RES (59)..(65): Any amino acid
  MOD_RES (67)..(68): Any amino acid
  MOD_RES (70)..(74): Any amino acid
  MOD_RES (83)..(85): Any amino acid
  MOD_RES (87)..(93): Any amino acid
  MOD_RES (95)..(96): Any amino acid
  MOD_RES (98)..(102): Any amino acid
  MOD_RES (111)..(113): Any amino acid
  MOD_RES (115)..(121): Any amino acid
  MOD_RES (123)..(124): Any amino acid
  MOD_RES (126)..(130): Any amino acid
  MOD_RES (139)..(141): Any amino acid
  MOD_RES (143)..(149): Any amino acid
  MOD_RES (151)..(152): Any amino acid
  MOD_RES (154)..(158): Any amino acid
  MOD_RES (167)..(169): Any amino acid
  MOD_RES (171)..(177): Any amino acid
  MOD_RES (179)..(180): Any amino acid
  MOD_RES (182)..(186): Any amino acid
  MOD_RES (195)..(197): Any amino acid
  MOD_RES (199)..(209): Any amino acid
XXXXXXXXXCXXCXXXXXRSDHLTNHXXXHXXXXXXXCXXCXXXXXSKKALTEHXXXHXXXXXXXCXXCXXXXXTSGNLVRHXXXHXXXXXXXCXXCXXXXXHRTTLTNHXXXHXXXXXXXCXXCXXXXXSKKALTEHXXXHXXXXXXXCXXCXXXXXRSDHLTNHXXXHXXXXXXXCXXCXXXXXSKKHLAEHXXXHXXXXXXXXXXX

SEQ ID NO: 2335 - protein, 209 aa, Artificial Sequence
  source: /note="Description of Artificial Sequence: Synthetic polypeptide"
  MOD_RES (1)..(9): Any amino acid
  MOD_RES (11)..(12): Any amino acid
  MOD_RES (14)..(18): Any amino acid
  MOD_RES (27)..(29): Any amino acid
  MOD_RES (31)..(37): Any amino acid
  MOD_RES (39)..(40): Any amino acid
  MOD_RES (42)..(46): Any amino acid
  MOD_RES (55)..(57): Any amino acid
  MOD_RES (59)..(65): Any amino acid
  MOD_RES (67)..(68): Any amino acid
  MOD_RES (70)..(74): Any amino acid
  MOD_RES (83)..(85): Any amino acid
  MOD_RES (87)..(93): Any amino acid
  MOD_RES (95)..(96): Any amino acid
  MOD_RES (98)..(102): Any amino acid
  MOD_RES (111)..(113): Any amino acid
  MOD_RES (115)..(121): Any amino acid
  MOD_RES (123)..(124): Any amino acid
  MOD_RES (126)..(130): Any amino acid
  MOD_RES (139)..(141): Any amino acid
  MOD_RES (143)..(149): Any amino acid
  MOD_RES (151)..(152): Any amino acid
  MOD_RES (154)..(158): Any amino acid
  MOD_RES (167)..(169): Any amino acid
  MOD_RES (171)..(177): Any amino acid
  MOD_RES (179)..(180): Any amino acid
  MOD_RES (182)..(186): Any amino acid
  MOD_RES (195)..(197): Any amino acid
  MOD_RES (199)..(209): Any amino acid
XXXXXXXXXCXXCXXXXXTTGNLTVHXXXHXXXXXXXCXXCXXXXXDCRDLARHXXXHXXXXXXXCXXCXXXXXRSDHLTNHXXXHXXXXXXXCXXCXXXXXQSGDLRRHXXXHXXXXXXXCXXCXXXXXTKNSLTEHXXXHXXXXXXXCXXCXXXXXRSDHLTNHXXXHXXXXXXXCXXCXXXXXRSDKLVRHXXXHXXXXXXXXXXX

SEQ ID NO: 2336 - protein, 209 aa, Artificial Sequence
  source: /note="Description of Artificial Sequence: Synthetic polypeptide"
  MOD_RES (1)..(9): Any amino acid
  MOD_RES (11)..(12): Any amino acid
  MOD_RES (14)..(18): Any amino acid
  MOD_RES (27)..(29): Any amino acid
  MOD_RES (31)..(37): Any amino acid
  MOD_RES (39)..(40): Any amino acid
  MOD_RES (42)..(46): Any amino acid
  MOD_RES (55)..(57): Any amino acid
  MOD_RES (59)..(65): Any amino acid
  MOD_RES (67)..(68): Any amino acid
  MOD_RES (70)..(74): Any amino acid
  MOD_RES (83)..(85): Any amino acid
  MOD_RES (87)..(93): Any amino acid
  MOD_RES (95)..(96): Any amino acid
  MOD_RES (98)..(102): Any amino acid
  MOD_RES (111)..(113): Any amino acid
  MOD_RES (115)..(121): Any amino acid
  MOD_RES (123)..(124): Any amino acid
  MOD_RES (126)..(130): Any amino acid
  MOD_RES (139)..(141): Any amino acid
  MOD_RES (143)..(149): Any amino acid
  MOD_RES (151)..(152): Any amino acid
  MOD_RES (154)..(158): Any amino acid
  MOD_RES (167)..(169): Any amino acid
  MOD_RES (171)..(177): Any amino acid
  MOD_RES (179)..(180): Any amino acid
  MOD_RES (182)..(186): Any amino acid
  MOD_RES (195)..(197): Any amino acid
  MOD_RES (199)..(209): Any amino acid
XXXXXXXXXCXXCXXXXXDCRDLARHXXXHXXXXXXXCXXCXXXXXRSDHLTNHXXXHXXXXXXXCXXCXXXXXQSGDLRRHXXXHXXXXXXXCXXCXXXXXTKNSLTEHXXXHXXXXXXXCXXCXXXXXRSDHLTNHXXXHXXXXXXXCXXCXXXXXRSDKLVRHXXXHXXXXXXXCXXCXXXXXQSSNLVRHXXXHXXXXXXXXXXX

SEQ ID NO: 2337 - protein, 209 aa, Artificial Sequence
  source: /note="Description of Artificial Sequence: Synthetic polypeptide"
  MOD_RES (1)..(9): Any amino acid
  MOD_RES (11)..(12): Any amino acid
  MOD_RES (14)..(18): Any amino acid
  MOD_RES (27)..(29): Any amino acid
  MOD_RES (31)..(37): Any amino acid
  MOD_RES (39)..(40): Any amino acid
  MOD_RES (42)..(46): Any amino acid
  MOD_RES (55)..(57): Any amino acid
  MOD_RES (59)..(65): Any amino acid
  MOD_RES (67)..(68): Any amino acid
  MOD_RES (70)..(74): Any amino acid
  MOD_RES (83)..(85): Any amino acid
  MOD_RES (87)..(93): Any amino acid
  MOD_RES (95)..(96): Any amino acid
  MOD_RES (98)..(102): Any amino acid
  MOD_RES (111)..(113): Any amino acid
  MOD_RES (115)..(121): Any amino acid
  MOD_RES (123)..(124): Any amino acid
  MOD_RES (126)..(130): Any amino acid
  MOD_RES (139)..(141): Any amino acid
  MOD_RES (143)..(149): Any amino acid
  MOD_RES (151)..(152): Any amino acid
  MOD_RES (154)..(158): Any amino acid
  MOD_RES (167)..(169): Any amino acid
  MOD_RES (171)..(177): Any amino acid
  MOD_RES (179)..(180): Any amino acid
  MOD_RES (182)..(186): Any amino acid
  MOD_RES (195)..(197): Any amino acid
  MOD_RES (199)..(209): Any amino acid
XXXXXXXXXCXXCXXXXXRSDKLVRHXXXHXXXXXXXCXXCXXXXXQSSNLVRHXXXHXXXXXXXCXXCXXXXXTSGHLVRHXXXHXXXXXXXCXXCXXXXXRNDALTEHXXXHXXXXXXXCXXCXXXXXHKNALQNHXXXHXXXXXXXCXXCXXXXXDPGHLVRHXXXHXXXXXXXCXXCXXXXXSPADLTRHXXXHXXXXXXXXXXX

SEQ ID NO: 2338 - protein, 209 aa, Artificial Sequence
  source: /note="Description of Artificial Sequence: Synthetic polypeptide"
  MOD_RES (1)..(9): Any amino acid
  MOD_RES (11)..(12): Any amino acid
  MOD_RES (14)..(18): Any amino acid
  MOD_RES (27)..(29): Any amino acid
  MOD_RES (31)..(37): Any amino acid
  MOD_RES (39)..(40): Any amino acid
  MOD_RES (42)..(46): Any amino acid
  MOD_RES (55)..(57): Any amino acid
  MOD_RES (59)..(65): Any amino acid
  MOD_RES (67)..(68): Any amino acid
  MOD_RES (70)..(74): Any amino acid
  MOD_RES (83)..(85): Any amino acid
  MOD_RES (87)..(93): Any amino acid
  MOD_RES (95)..(96): Any amino acid
  MOD_RES (98)..(102): Any amino acid
  MOD_RES (111)..(113): Any amino acid
  MOD_RES (115)..(121): Any amino acid
  MOD_RES (123)..(124): Any amino acid
  MOD_RES (126)..(130): Any amino acid
  MOD_RES (139)..(141): Any amino acid
  MOD_RES (143)..(149): Any amino acid
  MOD_RES (151)..(152): Any amino acid
  MOD_RES (154)..(158): Any amino acid
  MOD_RES (167)..(169): Any amino acid
  MOD_RES (171)..(177): Any amino acid
  MOD_RES (179)..(180): Any amino acid
  MOD_RES (182)..(186): Any amino acid
  MOD_RES (195)..(197): Any amino acid
  MOD_RES (199)..(209): Any amino acid
XXXXXXXXXCXXCXXXXXQSGDLRRHXXXHXXXXXXXCXXCXXXXXTKNSLTEHXXXHXXXXXXXCXXCXXXXXRSDHLTNHXXXHXXXXXXXCXXCXXXXXRSDKLVRHXXXHXXXXXXXCXXCXXXXXQSSNLVRHXXXHXXXXXXXCXXCXXXXXTSGHLVRHXXXHXXXXXXXCXXCXXXXXRNDALTEHXXXHXXXXXXXXXXX

SEQ ID NO: 2339 - protein, 209 aa, Artificial Sequence
  source: /note="Description of Artificial Sequence: Synthetic polypeptide"
  MOD_RES (1)..(9): Any amino acid
  MOD_RES (11)..(12): Any amino acid
  MOD_RES (14)..(18): Any amino acid
  MOD_RES (27)..(29): Any amino acid
  MOD_RES (31)..(37): Any amino acid
  MOD_RES (39)..(40): Any amino acid
  MOD_RES (42)..(46): Any amino acid
  MOD_RES (55)..(57): Any amino acid
  MOD_RES (59)..(65): Any amino acid
  MOD_RES (67)..(68): Any amino acid
  MOD_RES (70)..(74): Any amino acid
  MOD_RES (83)..(85): Any amino acid
  MOD_RES (87)..(93): Any amino acid
  MOD_RES (95)..(96): Any amino acid
  MOD_RES (98)..(102): Any amino acid
  MOD_RES (111)..(113): Any amino acid
  MOD_RES (115)..(121): Any amino acid
  MOD_RES (123)..(124): Any amino acid
  MOD_RES (126)..(130): Any amino acid
  MOD_RES (139)..(141): Any amino acid
  MOD_RES (143)..(149): Any amino acid
  MOD_RES (151)..(152): Any amino acid
  MOD_RES (154)..(158): Any amino acid
  MOD_RES (167)..(169): Any amino acid
  MOD_RES (171)..(177): Any amino acid
  MOD_RES (179)..(180): Any amino acid
  MOD_RES (182)..(186): Any amino acid
  MOD_RES (195)..(197): Any amino acid
  MOD_RES (199)..(209): Any amino acid
XXXXXXXXXCXXCXXXXXTKNSLTEHXXXHXXXXXXXCXXCXXXXXRSDHLTNHXXXHXXXXXXXCXXCXXXXXRSDKLVRHXXXHXXXXXXXCXXCXXXXXQSSNLVRHXXXHXXXXXXXCXXCXXXXXTSGHLVRHXXXHXXXXXXXCXXCXXXXXRNDALTEHXXXHXXXXXXXCXXCXXXXXHKNALQNHXXXHXXXXXXXXXXX

SEQ ID NO: 2340 - protein, 209 aa, Artificial Sequence
  source: /note="Description of Artificial Sequence: Synthetic polypeptide"
  MOD_RES (1)..(9): Any amino acid
  MOD_RES (11)..(12): Any amino acid
  MOD_RES (14)..(18): Any amino acid
  MOD_RES (27)..(29): Any amino acid
  MOD_RES (31)..(37): Any amino acid
  MOD_RES (39)..(40): Any amino acid
  MOD_RES (42)..(46): Any amino acid
  MOD_RES (55)..(57): Any amino acid
  MOD_RES (59)..(65): Any amino acid
  MOD_RES (67)..(68): Any amino acid
  MOD_RES (70)..(74): Any amino acid
  MOD_RES (83)..(85): Any amino acid
  MOD_RES (87)..(93): Any amino acid
  MOD_RES (95)..(96): Any amino acid
  MOD_RES (98)..(102): Any amino acid
  MOD_RES (111)..(113): Any amino acid
  MOD_RES (115)..(121): Any amino acid
  MOD_RES (123)..(124): Any amino acid
  MOD_RES (126)..(130): Any amino acid
  MOD_RES (139)..(141): Any amino acid
  MOD_RES (143)..(149): Any amino acid
  MOD_RES (151)..(152): Any amino acid
  MOD_RES (154)..(158): Any amino acid
  MOD_RES (167)..(169): Any amino acid
  MOD_RES (171)..(177): Any amino acid
  MOD_RES (179)..(180): Any amino acid
  MOD_RES (182)..(186): Any amino acid
  MOD_RES (195)..(197): Any amino acid
  MOD_RES (199)..(209): Any amino acid
XXXXXXXXXCXXCXXXXXRSDHLTNHXXXHXXXXXXXCXXCXXXXXRSDKLVRHXXXHXXXXXXXCXXCXXXXXQSSNLVRHXXXHXXXXXXXCXXCXXXXXTSGHLVRHXXXHXXXXXXXCXXCXXXXXRNDALTEHXXXHXXXXXXXCXXCXXXXXHKNALQNHXXXHXXXXXXXCXXCXXXXXDPGHLVRHXXXHXXXXXXXXXXX

SEQ ID NO: 2341 - protein, 209 aa, Artificial Sequence
  source: /note="Description of Artificial Sequence: Synthetic polypeptide"
  MOD_RES (1)..(9): Any amino acid
  MOD_RES (11)..(12): Any amino acid
  MOD_RES (14)..(18): Any amino acid
  MOD_RES (27)..(29): Any amino acid
  MOD_RES (31)..(37): Any amino acid
  MOD_RES (39)..(40): Any amino acid
  MOD_RES (42)..(46): Any amino acid
  MOD_RES (55)..(57): Any amino acid
  MOD_RES (59)..(65): Any amino acid
  MOD_RES (67)..(68): Any amino acid
  MOD_RES (70)..(74): Any amino acid
  MOD_RES (83)..(85): Any amino acid
  MOD_RES (87)..(93): Any amino acid
  MOD_RES (95)..(96): Any amino acid
  MOD_RES (98)..(102): Any amino acid
  MOD_RES (111)..(113): Any amino acid
  MOD_RES (115)..(121): Any amino acid
  MOD_RES (123)..(124): Any amino acid
  MOD_RES (126)..(130): Any amino acid
  MOD_RES (139)..(141): Any amino acid
  MOD_RES (143)..(149): Any amino acid
  MOD_RES (151)..(152): Any amino acid
  MOD_RES (154)..(158): Any amino acid
  MOD_RES (167)..(169): Any amino acid
  MOD_RES (171)..(177): Any amino acid
  MOD_RES (179)..(180): Any amino acid
  MOD_RES (182)..(186): Any amino acid
  MOD_RES (195)..(197): Any amino acid
  MOD_RES (199)..(209): Any amino acid
XXXXXXXXXCXXCXXXXXRSDHLTNHXXXHXXXXXXXCXXCXXXXXQSGDLRRHXXXHXXXXXXXCXXCXXXXXTKNSLTEHXXXHXXXXXXXCXXCXXXXXRSDHLTNHXXXHXXXXXXXCXXCXXXXXRSDKLVRHXXXHXXXXXXXCXXCXXXXXQSSNLVRHXXXHXXXXXXXCXXCXXXXXTSGHLVRHXXXHXXXXXXXXXXX

SEQ ID NO: 2342 - protein, 209 aa, Artificial Sequence
  source: /note="Description of Artificial Sequence: Synthetic polypeptide"
  MOD_RES (1)..(9): Any amino acid
  MOD_RES (11)..(12): Any amino acid
  MOD_RES (14)..(18): Any amino acid
  MOD_RES (27)..(29): Any amino acid
  MOD_RES (31)..(37): Any amino acid
  MOD_RES (39)..(40): Any amino acid
  MOD_RES (42)..(46): Any amino acid
  MOD_RES (55)..(57): Any amino acid
  MOD_RES (59)..(65): Any amino acid
  MOD_RES (67)..(68): Any amino acid
  MOD_RES (70)..(74): Any amino acid
  MOD_RES (83)..(85): Any amino acid
  MOD_RES (87)..(93): Any amino acid
  MOD_RES (95)..(96): Any amino acid
  MOD_RES (98)..(102): Any amino acid
  MOD_RES (111)..(113): Any amino acid
  MOD_RES (115)..(121): Any amino acid
  MOD_RES (123)..(124): Any amino acid
  MOD_RES (126)..(130): Any amino acid
  MOD_RES (139)..(141): Any amino acid
  MOD_RES (143)..(149): Any amino acid
  MOD_RES (151)..(152): Any amino acid
  MOD_RES (154)..(158): Any amino acid
  MOD_RES (167)..(169): Any amino acid
  MOD_RES (171)..(177): Any amino acid
  MOD_RES (179)..(180): Any amino acid
  MOD_RES (182)..(186): Any amino acid
  MOD_RES (195)..(197): Any amino acid
  MOD_RES (199)..(209): Any amino acid
XXXXXXXXXCXXCXXXXXHKNALQNHXXXHXXXXXXXCXXCXXXXXTSHSLTEHXXXHXXXXXXXCXXCXXXXXRSDKLVRHXXXHXXXXXXXCXXCXXXXXQSGNLTEHXXXHXXXXXXXCXXCXXXXXRNDALTEHXXXHXXXXXXXCXXCXXXXXDPGHLVRHXXXHXXXXXXXCXXCXXXXXQRAHLERHXXXHXXXXXXXXXXX

SEQ ID NO: 2343 - protein, 209 aa, Artificial Sequence
  source: /note="Description of Artificial Sequence: Synthetic polypeptide"
  MOD_RES (1)..(9): Any amino acid
  MOD_RES (11)..(12): Any amino acid
  MOD_RES (14)..(18): Any amino acid
  MOD_RES (27)..(29): Any amino acid
  MOD_RES (31)..(37): Any amino acid
  MOD_RES (39)..(40): Any amino acid
  MOD_RES (42)..(46): Any amino acid
  MOD_RES (55)..(57): Any amino acid
  MOD_RES (59)..(65): Any amino acid
  MOD_RES (67)..(68): Any amino acid
  MOD_RES (70)..(74): Any amino acid
  MOD_RES (83)..(85): Any amino acid
  MOD_RES (87)..(93): Any amino acid
  MOD_RES (95)..(96): Any amino acid
  MOD_RES (98)..(102): Any amino acid
  MOD_RES (111)..(113): Any amino acid
  MOD_RES (115)..(121): Any amino acid
  MOD_RES (123)..(124): Any amino acid
  MOD_RES (126)..(130): Any amino acid
  MOD_RES (139)..(141): Any amino acid
  MOD_RES (143)..(149): Any amino acid
  MOD_RES (151)..(152): Any amino acid
  MOD_RES (154)..(158): Any amino acid
  MOD_RES (167)..(169): Any amino acid
  MOD_RES (171)..(177): Any amino acid
  MOD_RES (179)..(180): Any amino acid
  MOD_RES (182)..(186): Any amino acid
  MOD_RES (195)..(197): Any amino acid
  MOD_RES (199)..(209): Any amino acid
XXXXXXXXXCXXCXXXXXRSDKLVRHXXXHXXXXXXXCXXCXXXXXQSGNLTEHXXXHXXXXXXXCXXCXXXXXRNDALTEHXXXHXXXXXXXCXXCXXXXXDPGHLVRHXXXHXXXXXXXCXXCXXXXXQRAHLERHXXXHXXXXXXXCXXCXXXXXRKDNLKNHXXXHXXXXXXXCXXCXXXXXRSDELVRHXXXHXXXXXXXXXXX

SEQ ID NO: 2344 - protein, 209 aa, Artificial Sequence
  source: /note="Description of Artificial Sequence: Synthetic polypeptide"
  MOD_RES (1)..(9): Any amino acid
  MOD_RES (11)..(12): Any amino acid
  MOD_RES (14)..(18): Any amino acid
  MOD_RES (27)..(29): Any amino acid
  MOD_RES (31)..(37): Any amino acid
  MOD_RES (39)..(40): Any amino acid
  MOD_RES (42)..(46): Any amino acid
  MOD_RES (55)..(57): Any amino acid
  MOD_RES (59)..(65): Any amino acid
  MOD_RES (67)..(68): Any amino acid
  MOD_RES (70)..(74): Any amino acid
  MOD_RES (83)..(85): Any amino acid
  MOD_RES (87)..(93): Any amino acid
  MOD_RES (95)..(96): Any amino acid
  MOD_RES (98)..(102): Any amino acid
  MOD_RES (111)..(113): Any amino acid
  MOD_RES (115)..(121): Any amino acid
  MOD_RES (123)..(124): Any amino acid
  MOD_RES (126)..(130): Any amino acid
  MOD_RES (139)..(141): Any amino acid
  MOD_RES (143)..(149): Any amino acid
  MOD_RES (151)..(152): Any amino acid
  MOD_RES (154)..(158): Any amino acid
  MOD_RES (167)..(169): Any amino acid
  MOD_RES (171)..(177): Any amino acid
  MOD_RES (179)..(180): Any amino acid
  MOD_RES (182)..(186): Any amino acid
  MOD_RES (195)..(197): Any amino acid
  MOD_RES (199)..(209): Any amino acid
XXXXXXXXXCXXCXXXXXQSGNLTEHXXXHXXXXXXXCXXCXXXXXRNDALTEHXXXHXXXXXXXCXXCXXXXXDPGHLVRHXXXHXXXXXXXCXXCXXXXXQRAHLERHXXXHXXXXXXXCXXCXXXXXRKDNLKNHXXXHXXXXXXXCXXCXXXXXRSDELVRHXXXHXXXXXXXCXXCXXXXXRSDHLTTHXXXHXXXXXXXXXXX

SEQ ID NO: 2345 - protein, 209 aa, Artificial Sequence
  source: /note="Description of Artificial Sequence: Synthetic polypeptide"
  MOD_RES (1)..(9): Any amino acid
  MOD_RES (11)..(12): Any amino acid
  MOD_RES (14)..(18): Any amino acid
  MOD_RES (27)..(29): Any amino acid
  MOD_RES (31)..(37): Any amino acid
  MOD_RES (39)..(40): Any amino acid
  MOD_RES (42)..(46): Any amino acid
  MOD_RES (55)..(57): Any amino acid
  MOD_RES (59)..(65): Any amino acid
  MOD_RES (67)..(68): Any amino acid
  MOD_RES (70)..(74): Any amino acid
  MOD_RES (83)..(85): Any amino acid
  MOD_RES (87)..(93): Any amino acid
  MOD_RES (95)..(96): Any amino acid
  MOD_RES (98)..(102): Any amino acid
  MOD_RES (111)..(113): Any amino acid
  MOD_RES (115)..(121): Any amino acid
  MOD_RES (123)..(124): Any amino acid
  MOD_RES (126)..(130): Any amino acid
  MOD_RES (139)..(141): Any amino acid
  MOD_RES (143)..(149): Any amino acid
  MOD_RES (151)..(152): Any amino acid
  MOD_RES (154)..(158): Any amino acid
  MOD_RES (167)..(169): Any amino acid
  MOD_RES (171)..(177): Any amino acid
  MOD_RES (179)..(180): Any amino acid
  MOD_RES (182)..(186): Any amino acid
  MOD_RES (195)..(197): Any amino acid
  MOD_RES (199)..(209): Any amino acid
XXXXXXXXXCXXCXXXXXTSHSLTEHXXXHXXXXXXXCXXCXXXXXRSDKLVRHXXXHXXXXXXXCXXCXXXXXQSGNLTEHXXXHXXXXXXXCXXCXXXXXRNDALTEHXXXHXXXXXXXCXXCXXXXXDPGHLVRHXXXHXXXXXXXCXXCXXXXXQRAHLERHXXXHXXXXXXXCXXCXXXXXRKDNLKNHXXXHXXXXXXXXXXX

SEQ ID NO: 2346 - protein, 209 aa, Artificial Sequence
  source: /note="Description of Artificial Sequence: Synthetic polypeptide"
  MOD_RES (1)..(9): Any amino acid
  MOD_RES (11)..(12): Any amino acid
  MOD_RES (14)..(18): Any amino acid
  MOD_RES (27)..(29): Any amino acid
  MOD_RES (31)..(37): Any amino acid
  MOD_RES (39)..(40): Any amino acid
  MOD_RES (42)..(46): Any amino acid
  MOD_RES (55)..(57): Any amino acid
  MOD_RES (59)..(65): Any amino acid
  MOD_RES (67)..(68): Any amino acid
  MOD_RES (70)..(74): Any amino acid
  MOD_RES (83)..(85): Any amino acid
  MOD_RES (87)..(93): Any amino acid
  MOD_RES (95)..(96): Any amino acid
  MOD_RES (98)..(102): Any amino acid
  MOD_RES (111)..(113): Any amino acid
  MOD_RES (115)..(121): Any amino acid
  MOD_RES (123)..(124): Any amino acid
  MOD_RES (126)..(130): Any amino acid
  MOD_RES (139)..(141): Any amino acid
  MOD_RES (143)..(149): Any amino acid
  MOD_RES (151)..(152): Any amino acid
  MOD_RES (154)..(158): Any amino acid
  MOD_RES (167)..(169): Any amino acid
  MOD_RES (171)..(177): Any amino acid
  MOD_RES (179)..(180): Any amino acid
  MOD_RES (182)..(186): Any amino acid
  MOD_RES (195)..(197): Any amino acid
  MOD_RES (199)..(209): Any amino acid
XXXXXXXXXCXXCXXXXXDPGHLVRHXXXHXXXXXXXCXXCXXXXXRRDELNVHXXXHXXXXXXXCXXCXXXXXSKKALTEHXXXHXXXXXXXCXXCXXXXXRSDKLVRHXXXHXXXXXXXCXXCXXXXXTKNSLTEHXXXHXXXXXXXCXXCXXXXXRSDELVRHXXXHXXXXXXXCXXCXXXXXTHLDLIRHXXXHXXXXXXXXXXX

SEQ ID NO: 2347 - protein, 209 aa, Artificial Sequence
  source: /note="Description of Artificial Sequence: Synthetic polypeptide"
  MOD_RES (1)..(9): Any amino acid
  MOD_RES (11)..(12): Any amino acid
  MOD_RES (14)..(18): Any amino acid
  MOD_RES (27)..(29): Any amino acid
  MOD_RES (31)..(37): Any amino acid
  MOD_RES (39)..(40): Any amino acid
  MOD_RES (42)..(46): Any amino acid
  MOD_RES (55)..(57): Any amino acid
  MOD_RES (59)..(65): Any amino acid
  MOD_RES (67)..(68): Any amino acid
  MOD_RES (70)..(74): Any amino acid
  MOD_RES (83)..(85): Any amino acid
  MOD_RES (87)..(93): Any amino acid
  MOD_RES (95)..(96): Any amino acid
  MOD_RES (98)..(102): Any amino acid
  MOD_RES (111)..(113): Any amino acid
  MOD_RES (115)..(121): Any amino acid
  MOD_RES (123)..(124): Any amino acid
  MOD_RES (126)..(130): Any amino acid
  MOD_RES (139)..(141): Any amino acid
  MOD_RES (143)..(149): Any amino acid
  MOD_RES (151)..(152): Any amino acid
  MOD_RES (154)..(158): Any amino acid
  MOD_RES (167)..(169): Any amino acid
  MOD_RES (171)..(177): Any amino acid
  MOD_RES (179)..(180): Any amino acid
  MOD_RES (182)..(186): Any amino acid
  MOD_RES (195)..(197): Any amino acid
  MOD_RES (199)..(209): Any amino acid
XXXXXXXXXCXXCXXXXXSKKALTEHXXXHXXXXXXXCXXCXXXXXTTGALTEHXXXHXXXXXXXCXXCXXXXXRSDKLVRHXXXHXXXXXXXCXXCXXXXXTSGNLTEHXXXHXXXXXXXCXXCXXXXXQSGDLRRHXXXHXXXXXXXCXXCXXXXXRSDHLTTHXXXHXXXXXXXCXXCXXXXXDCRDLARHXXXHXXXXXXXXXXX

SEQ ID NO: 2348 - protein, 209 aa, Artificial Sequence
  source: /note="Description of Artificial Sequence: Synthetic polypeptide"
  MOD_RES (1)..(9): Any amino acid
  MOD_RES (11)..(12): Any amino acid
  MOD_RES (14)..(18): Any amino acid
  MOD_RES (27)..(29): Any amino acid
  MOD_RES (31)..(37): Any amino acid
  MOD_RES (39)..(40): Any amino acid
  MOD_RES (42)..(46): Any amino acid
  MOD_RES (55)..(57): Any amino acid
  MOD_RES (59)..(65): Any amino acid
  MOD_RES (67)..(68): Any amino acid
  MOD_RES (70)..(74): Any amino acid
  MOD_RES (83)..(85): Any amino acid
  MOD_RES (87)..(93): Any amino acid
  MOD_RES (95)..(96): Any amino acid
  MOD_RES (98)..(102): Any amino acid
  MOD_RES (111)..(113): Any amino acid
  MOD_RES (115)..(121): Any amino acid
  MOD_RES (123)..(124): Any amino acid
  MOD_RES (126)..(130): Any amino acid
  MOD_RES (139)..(141): Any amino acid
  MOD_RES (143)..(149): Any amino acid
  MOD_RES (151)..(152): Any amino acid
  MOD_RES (154)..(158): Any amino acid
  MOD_RES (167)..(169): Any amino acid
  MOD_RES (171)..(177): Any amino acid
  MOD_RES (179)..(180): Any amino acid
  MOD_RES (182)..(186): Any amino acid
  MOD_RES (195)..(197): Any amino acid
  MOD_RES (199)..(209): Any amino acid
XXXXXXXXXCXXCXXXXXTKNSLTEHXXXHXXXXXXXCXXCXXXXXQSGNLTEHXXXHXXXXXXXCXXCXXXXXDPGNLVRHXXXHXXXXXXXCXXCXXXXXREDNLHTHXXXHXXXXXXXCXXCXXXXXRNDALTEHXXXHXXXXXXXCXXCXXXXXDPGHLVRHXXXHXXXXXXXCXXCXXXXXTSGELVRHXXXHXXXXXXXXXXX

SEQ ID NO: 2349 - protein, 209 aa, Artificial Sequence
  source: /note="Description of Artificial Sequence: Synthetic polypeptide"
  MOD_RES (1)..(9): Any amino acid
  MOD_RES (11)..(12): Any amino acid
  MOD_RES (14)..(18): Any amino acid
  MOD_RES (27)..(29): Any amino acid
  MOD_RES (31)..(37): Any amino acid
  MOD_RES (39)..(40): Any amino acid
  MOD_RES (42)..(46): Any amino acid
  MOD_RES (55)..(57): Any amino acid
  MOD_RES (59)..(65): Any amino acid
  MOD_RES (67)..(68): Any amino acid
  MOD_RES (70)..(74): Any amino acid
  MOD_RES (83)..(85): Any amino acid
  MOD_RES (87)..(93): Any amino acid
  MOD_RES (95)..(96): Any amino acid
  MOD_RES (98)..(102): Any amino acid
  MOD_RES (111)..(113): Any amino acid
  MOD_RES (115)..(121): Any amino acid
  MOD_RES (123)..(124): Any amino acid
  MOD_RES (126)..(130): Any amino acid
  MOD_RES (139)..(141): Any amino acid
  MOD_RES (143)..(149): Any amino acid
  MOD_RES (151)..(152): Any amino acid
  MOD_RES (154)..(158): Any amino acid
  MOD_RES (167)..(169): Any amino acid
  MOD_RES (171)..(177): Any amino acid
  MOD_RES (179)..(180): Any amino acid
  MOD_RES (182)..(186): Any amino acid
  MOD_RES (195)..(197): Any amino acid
  MOD_RES (199)..(209): Any amino acid
XXXXXXXXXCXXCXXXXXDKKDLTRHXXXHXXXXXXXCXXCXXXXXTKNSLTEHXXXHXXXXXXXCXXCXXXXXQSGNLTEHXXXHXXXXXXXCXXCXXXXXDPGNLVRHXXXHXXXXXXXCXXCXXXXXREDNLHTHXXXHXXXXXXXCXXCXXXXXRNDALTEHXXXHXXXXXXXCXXCXXXXXDPGHLVRHXXXHXXXXXXXXXXX

SEQ ID NO: 2350 - protein, 209 aa, Artificial Sequence
  source: /note="Description of Artificial Sequence: Synthetic polypeptide"
  MOD_RES (1)..(9): Any amino acid
  MOD_RES (11)..(12): Any amino acid
  MOD_RES (14)..(18): Any amino acid
  MOD_RES (27)..(29): Any amino acid
  MOD_RES (31)..(37): Any amino acid
  MOD_RES (39)..(40): Any amino acid
  MOD_RES (42)..(46): Any amino acid
  MOD_RES (55)..(57): Any amino acid
  MOD_RES (59)..(65): Any amino acid
  MOD_RES (67)..(68): Any amino acid
  MOD_RES (70)..(74): Any amino acid
  MOD_RES (83)..(85): Any amino acid
  MOD_RES (87)..(93): Any amino acid
  MOD_RES (95)..(96): Any amino acid
  MOD_RES (98)..(102): Any amino acid
  MOD_RES (111)..(113): Any amino acid
  MOD_RES (115)..(121): Any amino acid
  MOD_RES (123)..(124): Any amino acid
  MOD_RES (126)..(130): Any amino acid
  MOD_RES (139)..(141): Any amino acid
  MOD_RES (143)..(149): Any amino acid
  MOD_RES (151)..(152): Any amino acid
  MOD_RES (154)..(158): Any amino acid
  MOD_RES (167)..(169): Any amino acid
  MOD_RES (171)..(177): Any amino acid
  MOD_RES (179)..(180): Any amino acid
  MOD_RES (182)..(186): Any amino acid
  MOD_RES (195)..(197): Any amino acid
  MOD_RES (199)..(209): Any amino acid
XXXXXXXXXCXXCXXXXXHKNALQNHXXXHXXXXXXXCXXCXXXXXDKKDLTRHXXXHXXXXXXXCXXCXXXXXTKNSLTEHXXXHXXXXXXXCXXCXXXXXQSGNLTEHXXXHXXXXXXXCXXCXXXXXDPGNLVRHXXXHXXXXXXXCXXCXXXXXREDNLHTHXXXHXXXXXXXCXXCXXXXXRNDALTEHXXXHXXXXXXXXXXX

SEQ ID NO: 2351 - protein, 209 aa, Artificial Sequence
  source: /note="Description of Artificial Sequence: Synthetic polypeptide"
  MOD_RES (1)..(9): Any amino acid
  MOD_RES (11)..(12): Any amino acid
  MOD_RES (14)..(18): Any amino acid
  MOD_RES (27)..(29): Any amino acid
  MOD_RES (31)..(37): Any amino acid
  MOD_RES (39)..(40): Any amino acid
  MOD_RES (42)..(46): Any amino acid
  MOD_RES (55)..(57): Any amino acid
  MOD_RES (59)..(65): Any amino acid
  MOD_RES (67)..(68): Any amino acid
  MOD_RES (70)..(74): Any amino acid
  MOD_RES (83)..(85): Any amino acid
  MOD_RES (87)..(93): Any amino acid
  MOD_RES (95)..(96): Any amino acid
  MOD_RES (98)..(102): Any amino acid
  MOD_RES (111)..(113): Any amino acid
  MOD_RES (115)..(121): Any amino acid
  MOD_RES (123)..(124): Any amino acid
  MOD_RES (126)..(130): Any amino acid
  MOD_RES (139)..(141): Any amino acid
  MOD_RES (143)..(149): Any amino acid
  MOD_RES (151)..(152): Any amino acid
  MOD_RES (154)..(158): Any amino acid
  MOD_RES (167)..(169): Any amino acid
  MOD_RES (171)..(177): Any amino acid
  MOD_RES (179)..(180): Any amino acid
  MOD_RES (182)..(186): Any amino acid
  MOD_RES (195)..(197): Any amino acid
  MOD_RES (199)..(209): Any amino acid
XXXXXXXXXCXXCXXXXXTSHSLTEHXXXHXXXXXXXCXXCXXXXXRSDELVRHXXXHXXXXXXXCXXCXXXXXQAGHLASHXXXHXXXXXXXCXXCXXXXXHRTTLTNHXXXHXXXXXXXCXXCXXXXXQSGNLTEHXXXHXXXXXXXCXXCXXXXXSKKHLAEHXXXHXXXXXXXCXXCXXXXXTSHSLTEHXXXHXXXXXXXXXXX

SEQ ID NO: 2352 - protein, 209 aa, Artificial Sequence
  source: /note="Description of Artificial Sequence: Synthetic polypeptide"
  MOD_RES (1)..(9): Any amino acid
  MOD_RES (11)..(12): Any amino acid
  MOD_RES (14)..(18): Any amino acid
  MOD_RES (27)..(29): Any amino acid
  MOD_RES (31)..(37): Any amino acid
  MOD_RES (39)..(40): Any amino acid
  MOD_RES (42)..(46): Any amino acid
  MOD_RES (55)..(57): Any amino acid
  MOD_RES (59)..(65): Any amino acid
  MOD_RES (67)..(68): Any amino acid
  MOD_RES (70)..(74): Any amino acid
  MOD_RES (83)..(85): Any amino acid
  MOD_RES (87)..(93): Any amino acid
  MOD_RES (95)..(96): Any amino acid
  MOD_RES (98)..(102): Any amino acid
  MOD_RES (111)..(113): Any amino acid
  MOD_RES (115)..(121): Any amino acid
  MOD_RES (123)..(124): Any amino acid
  MOD_RES (126)..(130): Any amino acid
  MOD_RES (139)..(141): Any amino acid
  MOD_RES (143)..(149): Any amino acid
  MOD_RES (151)..(152): Any amino acid
  MOD_RES (154)..(158): Any amino acid
  MOD_RES (167)..(169): Any amino acid
  MOD_RES (171)..(177): Any amino acid
  MOD_RES (179)..(180): Any amino acid
  MOD_RES (182)..(186): Any amino acid
  MOD_RES (195)..(197): Any amino acid
  MOD_RES (199)..(209): Any amino acid
XXXXXXXXXCXXCXXXXXRKDNLKNHXXXHXXXXXXXCXXCXXXXXTSHSLTEHXXXHXXXXXXXCXXCXXXXXRSDELVRHXXXHXXXXXXXCXXCXXXXXQAGHLASHXXXHXXXXXXXCXXCXXXXXHRTTLTNHXXXHXXXXXXXCXXCXXXXXQSGNLTEHXXXHXXXXXXXCXXCXXXXXSKKHLAEHXXXHXXXXXXXXXXX

SEQ ID NO: 2353 - protein, 209 aa, Artificial Sequence
  source: /note="Description of Artificial Sequence: Synthetic polypeptide"
  MOD_RES (1)..(9): Any amino acid
  MOD_RES (11)..(12): Any amino acid
  MOD_RES (14)..(18): Any amino acid
  MOD_RES (27)..(29): Any amino acid
  MOD_RES (31)..(37): Any amino acid
  MOD_RES (39)..(40): Any amino acid
  MOD_RES (42)..(46): Any amino acid
  MOD_RES (55)..(57): Any amino acid
  MOD_RES (59)..(65): Any amino acid
  MOD_RES (67)..(68): Any amino acid
  MOD_RES (70)..(74): Any amino acid
  MOD_RES (83)..(85): Any amino acid
  MOD_RES (87)..(93): Any amino acid
  MOD_RES (95)..(96): Any amino acid
  MOD_RES (98)..(102): Any amino acid
  MOD_RES (111)..(113): Any amino acid
  MOD_RES (115)..(121): Any amino acid
  MOD_RES (123)..(124): Any amino acid
  MOD_RES (126)..(130): Any amino acid
  MOD_RES (139)..(141): Any amino acid
  MOD_RES (143)..(149): Any amino acid
  MOD_RES (151)..(152): Any amino acid
  MOD_RES (154)..(158): Any amino acid
  MOD_RES (167)..(169): Any amino acid
  MOD_RES (171)..(177): Any amino acid
  MOD_RES (179)..(180): Any amino acid
  MOD_RES (182)..(186): Any amino acid
  MOD_RES (195)..(197): Any amino acid
  MOD_RES (199)..(209): Any amino acid
XXXXXXXXXCXXCXXXXXDKKDLTRHXXXHXXXXXXXCXXCXXXXXSKKALTEHXXXHXXXXXXXCXXCXXXXXRSDHLTNHXXXHXXXXXXXCXXCXXXXXSKKHLAEHXXXHXXXXXXXCXXCXXXXXQRAHLERHXXXHXXXXXXXCXXCXXXXXTKNSLTEHXXXHXXXXXXXCXXCXXXXXTSGELVRHXXXHXXXXXXXXXXX

SEQ ID NO: 2354 - protein, 209 aa, Artificial Sequence
  source: /note="Description of Artificial Sequence: Synthetic polypeptide"
  MOD_RES (1)..(9): Any amino acid
  MOD_RES (11)..(12): Any amino acid
  MOD_RES (14)..(18): Any amino acid
  MOD_RES (27)..(29): Any amino acid
  MOD_RES (31)..(37): Any amino acid
  MOD_RES (39)..(40): Any amino acid
  MOD_RES (42)..(46): Any amino acid
  MOD_RES (55)..(57): Any amino acid
  MOD_RES (59)..(65): Any amino acid
  MOD_RES (67)..(68): Any amino acid
  MOD_RES (70)..(74): Any amino acid
  MOD_RES (83)..(85): Any amino acid
  MOD_RES (87)..(93): Any amino acid
  MOD_RES (95)..(96): Any amino acid
  MOD_RES (98)..(102): Any amino acid
  MOD_RES (111)..(113): Any amino acid
  MOD_RES (115)..(121): Any amino acid
  MOD_RES (123)..(124): Any amino acid
  MOD_RES (126)..(130): Any amino acid
  MOD_RES (139)..(141): Any amino acid
  MOD_RES (143)..(149): Any amino acid
  MOD_RES (151)..(152): Any amino acid
  MOD_RES (154)..(158): Any amino acid
  MOD_RES (167)..(169): Any amino acid
  MOD_RES (171)..(177): Any amino acid
  MOD_RES (179)..(180): Any amino acid
  MOD_RES (182)..(186): Any amino acid
  MOD_RES (195)..(197): Any amino acid
  MOD_RES (199)..(209): Any amino acid
XXXXXXXXXCXXCXXXXXDCRDLARHXXXHXXXXXXXCXXCXXXXXTKNSLTEHXXXHXXXXXXXCXXCXXXXXSPADLTRHXXXHXXXXXXXCXXCXXXXXDPGHLVRHXXXHXXXXXXXCXXCXXXXXTSHSLTEHXXXHXXXXXXXCXXCXXXXXDPGNLVRHXXXHXXXXXXXCXXCXXXXXRNDALTEHXXXHXXXXXXXXXXX

SEQ ID NO: 2355 - protein, 209 aa, Artificial Sequence
  source: /note="Description of Artificial Sequence: Synthetic polypeptide"
  MOD_RES (1)..(9): Any amino acid
  MOD_RES (11)..(12): Any amino acid
  MOD_RES (14)..(18): Any amino acid
  MOD_RES (27)..(29): Any amino acid
  MOD_RES (31)..(37): Any amino acid
  MOD_RES (39)..(40): Any amino acid
  MOD_RES (42)..(46): Any amino acid
  MOD_RES (55)..(57): Any amino acid
  MOD_RES (59)..(65): Any amino acid
  MOD_RES (67)..(68): Any amino acid
  MOD_RES (70)..(74): Any amino acid
  MOD_RES (83)..(85): Any amino acid
  MOD_RES (87)..(93): Any amino acid
  MOD_RES (95)..(96): Any amino acid
  MOD_RES (98)..(102): Any amino acid
  MOD_RES (111)..(113): Any amino acid
  MOD_RES (115)..(121): Any amino acid
  MOD_RES (123)..(124): Any amino acid
  MOD_RES (126)..(130): Any amino acid
  MOD_RES (139)..(141): Any amino acid
  MOD_RES (143)..(149): Any amino acid
  MOD_RES (151)..(152): Any amino acid
  MOD_RES (154)..(158): Any amino acid
  MOD_RES (167)..(169): Any amino acid
  MOD_RES (171)..(177): Any amino acid
  MOD_RES (179)..(180): Any amino acid
  MOD_RES (182)..(186): Any amino acid
  MOD_RES (195)..(197): Any amino acid
  MOD_RES (199)..(209): Any amino acid
XXXXXXXXXCXXCXXXXXRSDKLVRHXXXHXXXXXXXCXXCXXXXXTKNSLTEHXXXHXXXXXXXCXXCXXXXXSPADLTRHXXXHXXXXXXXCXXCXXXXXDPGHLVRHXXXHXXXXXXXCXXCXXXXXTHLDLIRHXXXHXXXXXXXCXXCXXXXXSKKHLAEHXXXHXXXXXXXCXXCXXXXXDCRDLARHXXXHXXXXXXXXXXX

SEQ ID NO: 2356 - protein, 209 aa, Artificial Sequence
  source: /note="Description of Artificial Sequence: Synthetic polypeptide"
  MOD_RES (1)..(9): Any amino acid
  MOD_RES (11)..(12): Any amino acid
  MOD_RES (14)..(18): Any amino acid
  MOD_RES (27)..(29): Any amino acid
  MOD_RES (31)..(37): Any amino acid
  MOD_RES (39)..(40): Any amino acid
  MOD_RES (42)..(46): Any amino acid
  MOD_RES (55)..(57): Any amino acid
  MOD_RES (59)..(65): Any amino acid
  MOD_RES (67)..(68): Any amino acid
  MOD_RES (70)..(74): Any amino acid
  MOD_RES (83)..(85): Any amino acid
  MOD_RES (87)..(93): Any amino acid
  MOD_RES (95)..(96): Any amino acid
  MOD_RES (98)..(102): Any amino acid
  MOD_RES (111)..(113): Any amino acid
  MOD_RES (115)..(121): Any amino acid
  MOD_RES (123)..(124): Any amino acid
  MOD_RES (126)..(130): Any amino acid
  MOD_RES (139)..(141): Any amino acid
  MOD_RES (143)..(149): Any amino acid
  MOD_RES (151)..(152): Any amino acid
  MOD_RES (154)..(158): Any amino acid
  MOD_RES (167)..(169): Any amino acid
  MOD_RES (171)..(177): Any amino acid
  MOD_RES (179)..(180): Any amino acid
  MOD_RES (182)..(186): Any amino acid
  MOD_RES (195)..(197): Any amino acid
  MOD_RES (199)..(209): Any amino acid
XXXXXXXXXCXXCXXXXXTKNSLTEHXXXHXXXXXXXCXXCXXXXXSPADLTRHXXXHXXXXXXXCXXCXXXXXDPGHLVRHXXXHXXXXXXXCXXCXXXXXTHLDLIRHXXXHXXXXXXXCXXCXXXXXSKKHLAEHXXXHXXXXXXXCXXCXXXXXDCRDLARHXXXHXXXXXXXCXXCXXXXXTKNSLTEHXXXHXXXXXXXXXXX

SEQ ID NO: 2357 - protein, 209 aa, Artificial Sequence
  source: /note="Description of Artificial Sequence: Synthetic polypeptide"
  MOD_RES (1)..(9): Any amino acid
  MOD_RES (11)..(12): Any amino acid
  MOD_RES (14)..(18): Any amino acid
  MOD_RES (27)..(29): Any amino acid
  MOD_RES (31)..(37): Any amino acid
  MOD_RES (39)..(40): Any amino acid
  MOD_RES (42)..(46): Any amino acid
  MOD_RES (55)..(57): Any amino acid
  MOD_RES (59)..(65): Any amino acid
  MOD_RES (67)..(68): Any amino acid
  MOD_RES (70)..(74): Any amino acid
  MOD_RES (83)..(85): Any amino acid
  MOD_RES (87)..(93): Any amino acid
  MOD_RES (95)..(96): Any amino acid
  MOD_RES (98)..(102): Any amino acid
  MOD_RES (111)..(113): Any amino acid
  MOD_RES (115)..(121): Any amino acid
  MOD_RES (123)..(124): Any amino acid
  MOD_RES (126)..(130): Any amino acid
  MOD_RES (139)..(141): Any amino acid
  MOD_RES (143)..(149): Any amino acid
  MOD_RES (151)..(152): Any amino acid
  MOD_RES (154)..(158): Any amino acid
  MOD_RES (167)..(169): Any amino acid
  MOD_RES (171)..(177): Any amino acid
  MOD_RES (179)..(180): Any amino acid
  MOD_RES (182)..(186): Any amino acid
  MOD_RES (195)..(197): Any amino acid
  MOD_RES (199)..(209): Any amino acid
XXXXXXXXXCXXCXXXXXDPGHLVRHXXXHXXXXXXXCXXCXXXXXTHLDLIRHXXXHXXXXXXXCXXCXXXXXSKKHLAEHXXXHXXXXXXXCXXCXXXXXDCRDLARHXXXHXXXXXXXCXXCXXXXXTKNSLTEHXXXHXXXXXXXCXXCXXXXXSPADLTRHXXXHXXXXXXXCXXCXXXXXDPGHLVRHXXXHXXXXXXXXXXX

SEQ ID NO: 2358 - protein, 209 aa, Artificial Sequence
  source: /note="Description of Artificial Sequence: Synthetic polypeptide"
  MOD_RES (1)..(9): Any amino acid
  MOD_RES (11)..(12): Any amino acid
  MOD_RES (14)..(18): Any amino acid
  MOD_RES (27)..(29): Any amino acid
  MOD_RES (31)..(37): Any amino acid
  MOD_RES (39)..(40): Any amino acid
  MOD_RES (42)..(46): Any amino acid
  MOD_RES (55)..(57): Any amino acid
  MOD_RES (59)..(65): Any amino acid
  MOD_RES (67)..(68): Any amino acid
  MOD_RES (70)..(74): Any amino acid
  MOD_RES (83)..(85): Any amino acid
  MOD_RES (87)..(93): Any amino acid
  MOD_RES (95)..(96): Any amino acid
  MOD_RES (98)..(102): Any amino acid
  MOD_RES (111)..(113): Any amino acid
  MOD_RES (115)..(121): Any amino acid
  MOD_RES (123)..(124): Any amino acid
  MOD_RES (126)..(130): Any amino acid
  MOD_RES (139)..(141): Any amino acid
  MOD_RES (143)..(149): Any amino acid
  MOD_RES (151)..(152): Any amino acid
  MOD_RES (154)..(158): Any amino acid
  MOD_RES (167)..(169): Any amino acid
  MOD_RES (171)..(177): Any amino acid
  MOD_RES (179)..(180): Any amino acid
  MOD_RES (182)..(186): Any amino acid
  MOD_RES (195)..(197): Any amino acid
  MOD_RES (199)..(209): Any amino acid
XXXXXXXXXCXXCXXXXXSPADLTRHXXXHXXXXXXXCXXCXXXXXDPGHLVRHXXXHXXXXXXXCXXCXXXXXTHLDLIRHXXXHXXXXXXXCXXCXXXXXSKKHLAEHXXXHXXXXXXXCXXCXXXXXDCRDLARHXXXHXXXXXXXCXXCXXXXXTKNSLTEHXXXHXXXXXXXCXXCXXXXXSPADLTRHXXXHXXXXXXXXXXX

SEQ ID NO: 2359 - protein, 209 aa, Artificial Sequence
  source: /note="Description of Artificial Sequence: Synthetic polypeptide"
  MOD_RES (1)..(9): Any amino acid
  MOD_RES (11)..(12): Any amino acid
  MOD_RES (14)..(18): Any amino acid
  MOD_RES (27)..(29): Any amino acid
  MOD_RES (31)..(37): Any amino acid
  MOD_RES (39)..(40): Any amino acid
  MOD_RES (42)..(46): Any amino acid
  MOD_RES (55)..(57): Any amino acid
  MOD_RES (59)..(65): Any amino acid
  MOD_RES (67)..(68): Any amino acid
  MOD_RES (70)..(74): Any amino acid
  MOD_RES (83)..(85): Any amino acid
  MOD_RES (87)..(93): Any amino acid
  MOD_RES (95)..(96): Any amino acid
  MOD_RES (98)..(102): Any amino acid
  MOD_RES (111)..(113): Any amino acid
  MOD_RES (115)..(121): Any amino acid
  MOD_RES (123)..(124): Any amino acid
  MOD_RES (126)..(130): Any amino acid
  MOD_RES (139)..(141): Any amino acid
  MOD_RES (143)..(149): Any amino acid
  MOD_RES (151)..(152): Any amino acid
  MOD_RES (154)..(158): Any amino acid
  MOD_RES (167)..(169): Any amino acid
  MOD_RES (171)..(177): Any amino acid
  MOD_RES (179)..(180): Any amino acid
  MOD_RES (182)..(186): Any amino acid
  MOD_RES (195)..(197): Any amino acid
  MOD_RES (199)..(209): Any amino acid
XXXXXXXXXCXXCXXXXXTHLDLIRHXXXHXXXXXXXCXXCXXXXXSKKHLAEHXXXHXXXXXXXCXXCXXXXXDCRDLARHXXXHXXXXXXXCXXCXXXXXTKNSLTEHXXXHXXXXXXXCXXCXXXXXSPADLTRHXXXHXXXXXXXCXXCXXXXXDPGHLVRHXXXHXXXXXXXCXXCXXXXXTSHSLTEHXXXHXXXXXXXXXXX

SEQ ID NO: 2360 - protein, 209 aa, Artificial Sequence
  source: /note="Description of Artificial Sequence: Synthetic polypeptide"
  MOD_RES (1)..(9): Any amino acid
  MOD_RES (11)..(12): Any amino acid
  MOD_RES (14)..(18): Any amino acid
  MOD_RES (27)..(29): Any amino acid
  MOD_RES (31)..(37): Any amino acid
  MOD_RES (39)..(40): Any amino acid
  MOD_RES (42)..(46): Any amino acid
  MOD_RES (55)..(57): Any amino acid
  MOD_RES (59)..(65): Any amino acid
  MOD_RES (67)..(68): Any amino acid
  MOD_RES (70)..(74): Any amino acid
  MOD_RES (83)..(85): Any amino acid
  MOD_RES (87)..(93): Any amino acid
  MOD_RES (95)..(96): Any amino acid
  MOD_RES (98)..(102): Any amino acid
  MOD_RES (111)..(113): Any amino acid
  MOD_RES (115)..(121): Any amino acid
  MOD_RES (123)..(124): Any amino acid
  MOD_RES (126)..(130): Any amino acid
  MOD_RES (139)..(141): Any amino acid
  MOD_RES (143)..(149): Any amino acid
  MOD_RES (151)..(152): Any amino acid
  MOD_RES (154)..(158): Any amino acid
  MOD_RES (167)..(169): Any amino acid
  MOD_RES (171)..(177): Any amino acid
  MOD_RES (179)..(180): Any amino acid
  MOD_RES (182)..(186): Any amino acid
  MOD_RES (195)..(197): Any amino acid
  MOD_RES (199)..(209): Any amino acid
XXXXXXXXXCXXCXXXXXSKKALTEHXXXHXXXXXXXCXXCXXXXXRSDKLVRHXXXHXXXXXXXCXXCXXXXXTKNSLTEHXXXHXXXXXXXCXXCXXXXXSPADLTRHXXXHXXXXXXXCXXCXXXXXDPGHLVRHXXXHXXXXXXXCXXCXXXXXTHLDLIRHXXXHXXXXXXXCXXCXXXXXSKKHLAEHXXXHXXXXXXXXXXX

SEQ ID NO: 2361 - protein, 209 aa, Artificial Sequence
  source: /note="Description of Artificial Sequence: Synthetic polypeptide"
  MOD_RES (1)..(9): Any amino acid
  MOD_RES (11)..(12): Any amino acid
  MOD_RES (14)..(18): Any amino acid
  MOD_RES (27)..(29): Any amino acid
  MOD_RES (31)..(37): Any amino acid
  MOD_RES (39)..(40): Any amino acid
  MOD_RES (42)..(46): Any amino acid
  MOD_RES (55)..(57): Any amino acid
  MOD_RES (59)..(65): Any amino acid
  MOD_RES (67)..(68): Any amino acid
  MOD_RES (70)..(74): Any amino acid
  MOD_RES (83)..(85): Any amino acid
  MOD_RES (87)..(93): Any amino acid
  MOD_RES (95)..(96): Any amino acid
  MOD_RES (98)..(102): Any amino acid
  MOD_RES (111)..(113): Any amino acid
  MOD_RES (115)..(121): Any amino acid
  MOD_RES (123)..(124): Any amino acid
  MOD_RES (126)..(130): Any amino acid
  MOD_RES (139)..(141): Any amino acid
  MOD_RES (143)..(149): Any amino acid
  MOD_RES (151)..(152): Any amino acid
  MOD_RES (154)..(158): Any amino acid
  MOD_RES (167)..(169): Any amino acid
  MOD_RES (171)..(177): Any amino acid
  MOD_RES (179)..(180): Any amino acid
  MOD_RES (182)..(186): Any amino acid
  MOD_RES (195)..(197): Any amino acid
  MOD_RES (199)..(209): Any amino acid
XXXXXXXXXCXXCXXXXXSKKHLAEHXXXHXXXXXXXCXXCXXXXXDCRDLARHXXXHXXXXXXXCXXCXXXXXTKNSLTEHXXXHXXXXXXXCXXCXXXXXSPADLTRHXXXHXXXXXXXCXXCXXXXXDPGHLVRHXXXHXXXXXXXCXXCXXXXXTSHSLTEHXXXHXXXXXXXCXXCXXXXXDPGNLVRHXXXHXXXXXXXXXXX

SEQ ID NO: 2362 - protein, 209 aa, Artificial Sequence
  source: /note="Description of Artificial Sequence: Synthetic polypeptide"
  MOD_RES (1)..(9): Any amino acid
  MOD_RES (11)..(12): Any amino acid
  MOD_RES (14)..(18): Any amino acid
  MOD_RES (27)..(29): Any amino acid
  MOD_RES (31)..(37): Any amino acid
  MOD_RES (39)..(40): Any amino acid
  MOD_RES (42)..(46): Any amino acid
  MOD_RES (55)..(57): Any amino acid
  MOD_RES (59)..(65): Any amino acid
  MOD_RES (67)..(68): Any amino acid
  MOD_RES (70)..(74): Any amino acid
  MOD_RES (83)..(85): Any amino acid
  MOD_RES (87)..(93): Any amino acid
  MOD_RES (95)..(96): Any amino acid
  MOD_RES (98)..(102): Any amino acid
  MOD_RES (111)..(113): Any amino acid
  MOD_RES (115)..(121): Any amino acid
  MOD_RES (123)..(124): Any amino acid
  MOD_RES (126)..(130): Any amino acid
  MOD_RES (139)..(141): Any amino acid
  MOD_RES (143)..(149): Any amino acid
  MOD_RES (151)..(152): Any amino acid
  MOD_RES (154)..(158): Any amino acid
  MOD_RES (167)..(169): Any amino acid
  MOD_RES (171)..(177): Any amino acid
  MOD_RES (179)..(180): Any amino acid
  MOD_RES (182)..(186): Any amino acid
  MOD_RES (195)..(197): Any amino acid
  MOD_RES (199)..(209): Any amino acid
XXXXXXXXXCXXCXXXXXSPADLTRHXXXHXXXXXXXCXXCXXXXXDPGHLVRHXXXHXXXXXXXCXXCXXXXXRNDALTEHXXXHXXXXXXXCXXCXXXXXSKKALTEHXXXHXXXXXXXCXXCXXXXXQSGDLRRHXXXHXXXXXXXCXXCXXXXXRNDALTEHXXXHXXXXXXXCXXCXXXXXTSHSLTEHXXXHXXXXXXXXXXX

SEQ ID NO: 2363 - protein, 209 aa, Artificial Sequence
  source: /note="Description of Artificial Sequence: Synthetic polypeptide"
  MOD_RES (1)..(9): Any amino acid
  MOD_RES (11)..(12): Any amino acid
  MOD_RES (14)..(18): Any amino acid
  MOD_RES (27)..(29): Any amino acid
  MOD_RES (31)..(37): Any amino acid
  MOD_RES (39)..(40): Any amino acid
  MOD_RES (42)..(46): Any amino acid
  MOD_RES (55)..(57): Any amino acid
  MOD_RES (59)..(65): Any amino acid
  MOD_RES (67)..(68): Any amino acid
  MOD_RES (70)..(74): Any amino acid
  MOD_RES (83)..(85): Any amino acid
  MOD_RES (87)..(93): Any amino acid
  MOD_RES (95)..(96): Any amino acid
  MOD_RES (98)..(102): Any amino acid
  MOD_RES (111)..(113): Any amino acid
  MOD_RES (115)..(121): Any amino acid
  MOD_RES (123)..(124): Any amino acid
  MOD_RES (126)..(130): Any amino acid
  MOD_RES (139)..(141): Any amino acid
  MOD_RES (143)..(149): Any amino acid
  MOD_RES (151)..(152): Any amino acid
  MOD_RES (154)..(158): Any amino acid
  MOD_RES (167)..(169): Any amino acid
  MOD_RES (171)..(177): Any amino acid
  MOD_RES (179)..(180): Any amino acid
  MOD_RES (182)..(186): Any amino acid
  MOD_RES (195)..(197): Any amino acid
  MOD_RES (199)..(209): Any amino acid
XXXXXXXXXCXXCXXXXXQSGDLRRHXXXHXXXXXXXCXXCXXXXXRNDALTEHXXXHXXXXXXXCXXCXXXXXTSHSLTEHXXXHXXXXXXXCXXCXXXXXSKKHLAEHXXXHXXXXXXXCXXCXXXXXRNDALTEHXXXHXXXXXXXCXXCXXXXXSKKALTEHXXXHXXXXXXXCXXCXXXXXQSGDLRRHXXXHXXXXXXXXXXX

SEQ ID NO: 2364 - protein, 209 aa, Artificial Sequence
  source: /note="Description of Artificial Sequence: Synthetic polypeptide"
  MOD_RES (1)..(9): Any amino acid
  MOD_RES (11)..(12): Any amino acid
  MOD_RES (14)..(18): Any amino acid
  MOD_RES (27)..(29): Any amino acid
  MOD_RES (31)..(37): Any amino acid
  MOD_RES (39)..(40): Any amino acid
  MOD_RES (42)..(46): Any amino acid
  MOD_RES (55)..(57): Any amino acid
  MOD_RES (59)..(65): Any amino acid
  MOD_RES (67)..(68): Any amino acid
  MOD_RES (70)..(74): Any amino acid
  MOD_RES (83)..(85): Any amino acid
  MOD_RES (87)..(93): Any amino acid
  MOD_RES (95)..(96): Any amino acid
  MOD_RES (98)..(102): Any amino acid
  MOD_RES (111)..(113): Any amino acid
  MOD_RES (115)..(121): Any amino acid
  MOD_RES (123)..(124): Any amino acid
  MOD_RES (126)..(130): Any amino acid
  MOD_RES (139)..(141): Any amino acid
  MOD_RES (143)..(149): Any amino acid
  MOD_RES (151)..(152): Any amino acid
  MOD_RES (154)..(158): Any amino acid
  MOD_RES (167)..(169): Any amino acid
  MOD_RES (171)..(177): Any amino acid
  MOD_RES (179)..(180): Any amino acid
  MOD_RES (182)..(186): Any amino acid
  MOD_RES (195)..(197): Any amino acid
  MOD_RES (199)..(209): Any amino acid
XXXXXXXXXCXXCXXXXXRNDALTEHXXXHXXXXXXXCXXCXXXXXSKKALTEHXXXHXXXXXXXCXXCXXXXXQSGDLRRHXXXHXXXXXXXCXXCXXXXXRNDALTEHXXXHXXXXXXXCXXCXXXXXTSHSLTEHXXXHXXXXXXXCXXCXXXXXSKKHLAEHXXXHXXXXXXXCXXCXXXXXRNDALTEHXXXHXXXXXXXXXXX

SEQ ID NO: 2365 - protein, 209 aa, Artificial Sequence
  source: /note="Description of Artificial Sequence: Synthetic polypeptide"
  MOD_RES (1)..(9): Any amino acid
  MOD_RES (11)..(12): Any amino acid
  MOD_RES (14)..(18): Any amino acid
  MOD_RES (27)..(29): Any amino acid
  MOD_RES (31)..(37): Any amino acid
  MOD_RES (39)..(40): Any amino acid
  MOD_RES (42)..(46): Any amino acid
  MOD_RES (55)..(57): Any amino acid
  MOD_RES (59)..(65): Any amino acid
  MOD_RES (67)..(68): Any amino acid
  MOD_RES (70)..(74): Any amino acid
  MOD_RES (83)..(85): Any amino acid
  MOD_RES (87)..(93): Any amino acid
  MOD_RES (95)..(96): Any amino acid
  MOD_RES (98)..(102): Any amino acid
  MOD_RES (111)..(113): Any amino acid
  MOD_RES (115)..(121): Any amino acid
  MOD_RES (123)..(124): Any amino acid
  MOD_RES (126)..(130): Any amino acid
  MOD_RES (139)..(141): Any amino acid
  MOD_RES (143)..(149): Any amino acid
  MOD_RES (151)..(152): Any amino acid
  MOD_RES (154)..(158): Any amino acid
  MOD_RES (167)..(169): Any amino acid
  MOD_RES (171)..(177): Any amino acid
  MOD_RES (179)..(180): Any amino acid
  MOD_RES (182)..(186): Any amino acid
  MOD_RES (195)..(197): Any amino acid
  MOD_RES (199)..(209): Any amino acid
XXXXXXXXXCXXCXXXXXDPGHLVRHXXXHXXXXXXXCXXCXXXXXRNDALTEHXXXHXXXXXXXCXXCXXXXXSKKALTEHXXXHXXXXXXXCXXCXXXXXQSGDLRRHXXXHXXXXXXXCXXCXXXXXRNDALTEHXXXHXXXXXXXCXXCXXXXXTSHSLTEHXXXHXXXXXXXCXXCXXXXXSKKHLAEHXXXHXXXXXXXXXXX

SEQ ID NO: 2366 - protein, 209 aa, Artificial Sequence
  source: /note="Description of Artificial Sequence: Synthetic polypeptide"
  MOD_RES (1)..(9): Any amino acid
  MOD_RES (11)..(12): Any amino acid
  MOD_RES (14)..(18): Any amino acid
  MOD_RES (27)..(29): Any amino acid
  MOD_RES (31)..(37): Any amino acid
  MOD_RES (39)..(40): Any amino acid
  MOD_RES (42)..(46): Any amino acid
  MOD_RES (55)..(57): Any amino acid
  MOD_RES (59)..(65): Any amino acid
  MOD_RES (67)..(68): Any amino acid
  MOD_RES (70)..(74): Any amino acid
  MOD_RES (83)..(85): Any amino acid
  MOD_RES (87)..(93): Any amino acid
  MOD_RES (95)..(96): Any amino acid
  MOD_RES (98)..(102): Any amino acid
  MOD_RES (111)..(113): Any amino acid
  MOD_RES (115)..(121): Any amino acid
  MOD_RES (123)..(124): Any amino acid
  MOD_RES (126)..(130): Any amino acid
  MOD_RES (139)..(141): Any amino acid
  MOD_RES (143)..(149): Any amino acid
  MOD_RES (151)..(152): Any amino acid
  MOD_RES (154)..(158): Any amino acid
  MOD_RES (167)..(169): Any amino acid
  MOD_RES (171)..(177): Any amino acid
  MOD_RES (179)..(180): Any amino acid
  MOD_RES (182)..(186): Any amino acid
  MOD_RES (195)..(197): Any amino acid
  MOD_RES (199)..(209): Any amino acid
XXXXXXXXXCXXCXXXXXRNDALTEHXXXHXXXXXXXCXXCXXXXXTSHSLTEHXXXHXXXXXXXCXXCXXXXXSKKHLAEHXXXHXXXXXXXCXXCXXXXXRNDALTEHXXXHXXXXXXXCXXCXXXXXSKKALTEHXXXHXXXXXXXCXXCXXXXXQSGDLRRHXXXHXXXXXXXCXXCXXXXXRADNLTEHXXXHXXXXXXXXXXX

SEQ ID NO: 2367 - protein, 209 aa, Artificial Sequence
  source: /note="Description of Artificial Sequence: Synthetic polypeptide"
  MOD_RES (1)..(9): Any amino acid
  MOD_RES (11)..(12): Any amino acid
  MOD_RES (14)..(18): Any amino acid
  MOD_RES (27)..(29): Any amino acid
  MOD_RES (31)..(37): Any amino acid
  MOD_RES (39)..(40): Any amino acid
  MOD_RES (42)..(46): Any amino acid
  MOD_RES (55)..(57): Any amino acid
  MOD_RES (59)..(65): Any amino acid
  MOD_RES (67)..(68): Any amino acid
  MOD_RES (70)..(74): Any amino acid
  MOD_RES (83)..(85): Any amino acid
  MOD_RES (87)..(93): Any amino acid
  MOD_RES (95)..(96): Any amino acid
  MOD_RES (98)..(102): Any amino acid
  MOD_RES (111)..(113): Any amino acid
  MOD_RES (115)..(121): Any amino acid
  MOD_RES (123)..(124): Any amino acid
  MOD_RES (126)..(130): Any amino acid
  MOD_RES (139)..(141): Any amino acid
  MOD_RES (143)..(149): Any amino acid
  MOD_RES (151)..(152): Any amino acid
  MOD_RES (154)..(158): Any amino acid
  MOD_RES (167)..(169): Any amino acid
  MOD_RES (171)..(177): Any amino acid
  MOD_RES (179)..(180): Any amino acid
  MOD_RES (182)..(186): Any amino acid
  MOD_RES (195)..(197): Any amino acid
  MOD_RES (199)..(209): Any amino acid
XXXXXXXXXCXXCXXXXXSKKHLAEHXXXHXXXXXXXCXXCXXXXXRNDALTEHXXXHXXXXXXXCXXCXXXXXSKKALTEHXXXHXXXXXXXCXXCXXXXXQSGDLRRHXXXHXXXXXXXCXXCXXXXXRADNLTEHXXXHXXXXXXXCXXCXXXXXDKKDLTRHXXXHXXXXXXXCXXCXXXXXRSDHLTTHXXXHXXXXXXXXXXX

SEQ ID NO: 2368 - protein, 209 aa, Artificial Sequence
  source: /note="Description of Artificial Sequence: Synthetic polypeptide"
  MOD_RES (1)..(9): Any amino acid
  MOD_RES (11)..(12): Any amino acid
  MOD_RES (14)..(18): Any amino acid
  MOD_RES (27)..(29): Any amino acid
  MOD_RES (31)..(37): Any amino acid
  MOD_RES (39)..(40): Any amino acid
  MOD_RES (42)..(46): Any amino acid
  MOD_RES (55)..(57): Any amino acid
  MOD_RES (59)..(65): Any amino acid
  MOD_RES (67)..(68): Any amino acid
  MOD_RES (70)..(74): Any amino acid
  MOD_RES (83)..(85): Any amino acid
  MOD_RES (87)..(93): Any amino acid
  MOD_RES (95)..(96): Any amino acid
  MOD_RES (98)..(102): Any amino acid
  MOD_RES (111)..(113): Any amino acid
  MOD_RES (115)..(121): Any amino acid
  MOD_RES (123)..(124): Any amino acid
  MOD_RES (126)..(130): Any amino acid
  MOD_RES (139)..(141): Any amino acid
  MOD_RES (143)..(149): Any amino acid
  MOD_RES (151)..(152): Any amino acid
  MOD_RES (154)..(158): Any amino acid
  MOD_RES (167)..(169): Any amino acid
  MOD_RES (171)..(177): Any amino acid
  MOD_RES (179)..(180): Any amino acid
  MOD_RES (182)..(186): Any amino acid
  MOD_RES (195)..(197): Any amino acid
  MOD_RES (199)..(209): Any amino acid
XXXXXXXXXCXXCXXXXXTSHSLTEHXXXHXXXXXXXCXXCXXXXXSKKHLAEHXXXHXXXXXXXCXXCXXXXXRNDALTEHXXXHXXXXXXXCXXCXXXXXSKKALTEHXXXHXXXXXXXCXXCXXXXXQSGDLRRHXXXHXXXXXXXCXXCXXXXXRADNLTEHXXXHXXXXXXXCXXCXXXXXDKKDLTRHXXXHXXXXXXXXXXX

SEQ ID NO: 2369 - protein, 209 aa, Artificial Sequence
  source: /note="Description of Artificial Sequence: Synthetic polypeptide"
  MOD_RES (1)..(9): Any amino acid
  MOD_RES (11)..(12): Any amino acid
  MOD_RES (14)..(18): Any amino acid
  MOD_RES (27)..(29): Any amino acid
  MOD_RES (31)..(37): Any amino acid
  MOD_RES (39)..(40): Any amino acid
  MOD_RES (42)..(46): Any amino acid
  MOD_RES (55)..(57): Any amino acid
  MOD_RES (59)..(65): Any amino acid
  MOD_RES (67)..(68): Any amino acid
  MOD_RES (70)..(74): Any amino acid
  MOD_RES (83)..(85): Any amino acid
  MOD_RES (87)..(93): Any amino acid
  MOD_RES (95)..(96): Any amino acid
  MOD_RES (98)..(102): Any amino acid
  MOD_RES (111)..(113): Any amino acid
  MOD_RES (115)..(121): Any amino acid
  MOD_RES (123)..(124): Any amino acid
  MOD_RES (126)..(130): Any amino acid
  MOD_RES (139)..(141): Any amino acid
  MOD_RES (143)..(149): Any amino acid
  MOD_RES (151)..(152): Any amino acid
  MOD_RES (154)..(158): Any amino acid
  MOD_RES (167)..(169): Any amino acid
  MOD_RES (171)..(177): Any amino acid
  MOD_RES (179)..(180): Any amino acid
  MOD_RES (182)..(186): Any amino acid
  MOD_RES (195)..(197): Any amino acid
  MOD_RES (199)..(209): Any amino acid
XXXXXXXXXCXXCXXXXXSKKALTEHXXXHXXXXXXXCXXCXXXXXQSGDLRRHXXXHXXXXXXXCXXCXXXXXRNDALTEHXXXHXXXXXXXCXXCXXXXXTSHSLTEHXXXHXXXXXXXCXXCXXXXXSKKHLAEHXXXHXXXXXXXCXXCXXXXXRNDALTEHXXXHXXXXXXXCXXCXXXXXSKKALTEHXXXHXXXXXXXXXXX

SEQ ID NO: 2370 - protein, 209 aa, Artificial Sequence
  source: /note="Description of Artificial Sequence: Synthetic polypeptide"
  MOD_RES (1)..(9): Any amino acid
  MOD_RES (11)..(12): Any amino acid
  MOD_RES (14)..(18): Any amino acid
  MOD_RES (27)..(29): Any amino acid
  MOD_RES (31)..(37): Any amino acid
  MOD_RES (39)..(40): Any amino acid
  MOD_RES (42)..(46): Any amino acid
  MOD_RES (55)..(57): Any amino acid
  MOD_RES (59)..(65): Any amino acid
  MOD_RES (67)..(68): Any amino acid
  MOD_RES (70)..(74): Any amino acid
  MOD_RES (83)..(85): Any amino acid
  MOD_RES (87)..(93): Any amino acid
  MOD_RES (95)..(96): Any amino acid
  MOD_RES (98)..(102): Any amino acid
  MOD_RES (111)..(113): Any amino acid
  MOD_RES (115)..(121): Any amino acid
  MOD_RES (123)..(124): Any amino acid
  MOD_RES (126)..(130): Any amino acid
  MOD_RES (139)..(141): Any amino acid
  MOD_RES (143)..(149): Any amino acid
  MOD_RES (151)..(152): Any amino acid
  MOD_RES (154)..(158): Any amino acid
  MOD_RES (167)..(169): Any amino acid
  MOD_RES (171)..(177): Any amino acid
  MOD_RES (179)..(180): Any amino acid
  MOD_RES (182)..(186): Any amino acid
  MOD_RES (195)..(197): Any amino acid
  MOD_RES (199)..(209): Any amino acid
XXXXXXXXXCXXCXXXXXSRRTCRAHXXXHXXXXXXXCXXCXXXXXTSGNLTEHXXXHXXXXXXXCXXCXXXXXDCRDLARHXXXHXXXXXXXCXXCXXXXXHKNALQNHXXXHXXXXXXXCXXCXXXXXDKKDLTRHXXXHXXXXXXXCXXCXXXXXTKNSLTEHXXXHXXXXXXXCXXCXXXXXTSHSLTEHXXXHXXXXXXXXXXX

SEQ ID NO: 2371 - protein, 209 aa, Artificial Sequence
  source: /note="Description of Artificial Sequence: Synthetic polypeptide"
  MOD_RES (1)..(9): Any amino acid
  MOD_RES (11)..(12): Any amino acid
  MOD_RES (14)..(18): Any amino acid
  MOD_RES (27)..(29): Any amino acid
  MOD_RES (31)..(37): Any amino acid
  MOD_RES (39)..(40): Any amino acid
  MOD_RES (42)..(46): Any amino acid
  MOD_RES (55)..(57): Any amino acid
  MOD_RES (59)..(65): Any amino acid
  MOD_RES (67)..(68): Any amino acid
  MOD_RES (70)..(74): Any amino acid
  MOD_RES (83)..(85): Any amino acid
  MOD_RES (87)..(93): Any amino acid
  MOD_RES (95)..(96): Any amino acid
  MOD_RES (98)..(102): Any amino acid
  MOD_RES (111)..(113): Any amino acid
  MOD_RES (115)..(121): Any amino acid
  MOD_RES (123)..(124): Any amino acid
  MOD_RES (126)..(130): Any amino acid
  MOD_RES (139)..(141): Any amino acid
  MOD_RES (143)..(149): Any amino acid
  MOD_RES (151)..(152): Any amino acid
  MOD_RES (154)..(158): Any amino acid
  MOD_RES (167)..(169): Any amino acid
  MOD_RES (171)..(177): Any amino acid
  MOD_RES (179)..(180): Any amino acid
  MOD_RES (182)..(186): Any amino acid
  MOD_RES (195)..(197): Any amino acid
  MOD_RES (199)..(209): Any amino acid
XXXXXXXXXCXXCXXXXXRNDALTEHXXXHXXXXXXXCXXCXXXXXTSGNLTEHXXXHXXXXXXXCXXCXXXXXQSGDLRRHXXXHXXXXXXXCXXCXXXXXRSDHLTTHXXXHXXXXXXXCXXCXXXXXDKKDLTRHXXXHXXXXXXXCXXCXXXXXSKKALTEHXXXHXXXXXXXCXXCXXXXXRSDHLTTHXXXHXXXXXXXXXXX

SEQ ID NO: 2372 - protein, 209 aa, Artificial Sequence
  source: /note="Description of Artificial Sequence: Synthetic polypeptide"
  MOD_RES (1)..(9): Any amino acid
  MOD_RES (11)..(12): Any amino acid
  MOD_RES (14)..(18): Any amino acid
  MOD_RES (27)..(29): Any amino acid
  MOD_RES (31)..(37): Any amino acid
  MOD_RES (39)..(40): Any amino acid
  MOD_RES (42)..(46): Any amino acid
  MOD_RES (55)..(57): Any amino acid
  MOD_RES (59)..(65): Any amino acid
  MOD_RES (67)..(68): Any amino acid
  MOD_RES (70)..(74): Any amino acid
  MOD_RES (83)..(85): Any amino acid
  MOD_RES (87)..(93): Any amino acid
  MOD_RES (95)..(96): Any amino acid
  MOD_RES (98)..(102): Any amino acid
  MOD_RES (111)..(113): Any amino acid
  MOD_RES (115)..(121): Any amino acid
  MOD_RES (123)..(124): Any amino acid
  MOD_RES (126)..(130): Any amino acid
  MOD_RES (139)..(141): Any amino acid
  MOD_RES (143)..(149): Any amino acid
  MOD_RES (151)..(152): Any amino acid
  MOD_RES (154)..(158): Any amino acid
  MOD_RES (167)..(169): Any amino acid
  MOD_RES (171)..(177): Any amino acid
  MOD_RES (179)..(180): Any amino acid
  MOD_RES (182)..(186): Any amino acid
  MOD_RES (195)..(197): Any amino acid
  MOD_RES (199)..(209): Any amino acid
XXXXXXXXXCXXCXXXXXTSGNLTEHXXXHXXXXXXXCXXCXXXXXQSGDLRRHXXXHXXXXXXXCXXCXXXXXRSDHLTTHXXXHXXXXXXXCXXCXXXXXDKKDLTRHXXXHXXXXXXXCXXCXXXXXSKKALTEHXXXHXXXXXXXCXXCXXXXXRSDHLTTHXXXHXXXXXXXCXXCXXXXXSKKALTEHXXXHXXXXXXXXXXX

SEQ ID NO: 2373 - protein, 209 aa, Artificial Sequence
  source: /note="Description of Artificial Sequence: Synthetic polypeptide"
  MOD_RES (1)..(9): Any amino acid
  MOD_RES (11)..(12): Any amino acid
  MOD_RES (14)..(18): Any amino acid
  MOD_RES (27)..(29): Any amino acid
  MOD_RES (31)..(37): Any amino acid
  MOD_RES (39)..(40): Any amino acid
  MOD_RES (42)..(46): Any amino acid
  MOD_RES (55)..(57): Any amino acid
  MOD_RES (59)..(65): Any amino acid
  MOD_RES (67)..(68): Any amino acid
  MOD_RES (70)..(74): Any amino acid
  MOD_RES (83)..(85): Any amino acid
  MOD_RES (87)..(93): Any amino acid
  MOD_RES (95)..(96): Any amino acid
  MOD_RES (98)..(102): Any amino acid
  MOD_RES (111)..(113): Any amino acid
  MOD_RES (115)..(121): Any amino acid
  MOD_RES (123)..(124): Any amino acid
  MOD_RES (126)..(130): Any amino acid
  MOD_RES (139)..(141): Any amino acid
  MOD_RES (143)..(149): Any amino acid
  MOD_RES (151)..(152): Any amino acid
  MOD_RES (154)..(158): Any amino acid
  MOD_RES (167)..(169): Any amino acid
  MOD_RES (171)..(177): Any amino acid
  MOD_RES (179)..(180): Any amino acid
  MOD_RES (182)..(186): Any amino acid
  MOD_RES (195)..(197): Any amino acid
  MOD_RES (199)..(209): Any amino acid
XXXXXXXXXCXXCXXXXXDCRDLARHXXXHXXXXXXXCXXCXXXXXHKNALQNHXXXHXXXXXXXCXXCXXXXXDKKDLTRHXXXHXXXXXXXCXXCXXXXXTKNSLTEHXXXHXXXXXXXCXXCXXXXXTSHSLTEHXXXHXXXXXXXCXXCXXXXXSKKHLAEHXXXHXXXXXXXCXXCXXXXXRNDALTEHXXXHXXXXXXXXXXX

SEQ ID NO: 2374 - protein, 209 aa, Artificial Sequence
  source: /note="Description of Artificial Sequence: Synthetic polypeptide"
  MOD_RES (1)..(9): Any amino acid
  MOD_RES (11)..(12): Any amino acid
  MOD_RES (14)..(18): Any amino acid
  MOD_RES (27)..(29): Any amino acid
  MOD_RES (31)..(37): Any amino acid
  MOD_RES (39)..(40): Any amino acid
  MOD_RES (42)..(46): Any amino acid
  MOD_RES (55)..(57): Any amino acid
  MOD_RES (59)..(65): Any amino acid
  MOD_RES (67)..(68): Any amino acid
  MOD_RES (70)..(74): Any amino acid
  MOD_RES (83)..(85): Any amino acid
  MOD_RES (87)..(93): Any amino acid
  MOD_RES (95)..(96): Any amino acid
  MOD_RES (98)..(102): Any amino acid
  MOD_RES (111)..(113): Any amino acid
  MOD_RES (115)..(121): Any amino acid
  MOD_RES (123)..(124): Any amino acid
  MOD_RES (126)..(130): Any amino acid
  MOD_RES (139)..(141): Any amino acid
  MOD_RES (143)..(149): Any amino acid
  MOD_RES (151)..(152): Any amino acid
  MOD_RES (154)..(158): Any amino acid
  MOD_RES (167)..(169): Any amino acid
  MOD_RES (171)..(177): Any amino acid
  MOD_RES (179)..(180): Any amino acid
  MOD_RES (182)..(186): Any amino acid
  MOD_RES (195)..(197): Any amino acid
  MOD_RES (199)..(209): Any amino acid
XXXXXXXXXCXXCXXXXXTKNSLTEHXXXHXXXXXXXCXXCXXXXXTSHSLTEHXXXHXXXXXXXCXXCXXXXXSKKHLAEHXXXHXXXXXXXCXXCXXXXXRNDALTEHXXXHXXXXXXXCXXCXXXXXTSGNLTEHXXXHXXXXXXXCXXCXXXXXQSGDLRRHXXXHXXXXXXXCXXCXXXXXRSDHLTTHXXXHXXXXXXXXXXX

SEQ ID NO: 2375 - protein, 209 aa, Artificial Sequence
  source: /note="Description of Artificial Sequence: Synthetic polypeptide"
  MOD_RES (1)..(9): Any amino acid
  MOD_RES (11)..(12): Any amino acid
  MOD_RES (14)..(18): Any amino acid
  MOD_RES (27)..(29): Any amino acid
  MOD_RES (31)..(37): Any amino acid
  MOD_RES (39)..(40): Any amino acid
  MOD_RES (42)..(46): Any amino acid
  MOD_RES (55)..(57): Any amino acid
  MOD_RES (59)..(65): Any amino acid
  MOD_RES (67)..(68): Any amino acid
  MOD_RES (70)..(74): Any amino acid
  MOD_RES (83)..(85): Any amino acid
  MOD_RES (87)..(93): Any amino acid
  MOD_RES (95)..(96): Any amino acid
  MOD_RES (98)..(102): Any amino acid
  MOD_RES (111)..(113): Any amino acid
  MOD_RES (115)..(121): Any amino acid
  MOD_RES (123)..(124): Any amino acid
  MOD_RES (126)..(130): Any amino acid
  MOD_RES (139)..(141): Any amino acid
  MOD_RES (143)..(149): Any amino acid
  MOD_RES (151)..(152): Any amino acid
  MOD_RES (154)..(158): Any amino acid
  MOD_RES (167)..(169): Any amino acid
  MOD_RES (171)..(177): Any amino acid
  MOD_RES (179)..(180): Any amino acid
  MOD_RES (182)..(186): Any amino acid
  MOD_RES (195)..(197): Any amino acid
  MOD_RES (199)..(209): Any amino acid
XXXXXXXXXCXXCXXXXXTSHSLTEHXXXHXXXXXXXCXXCXXXXXSKKHLAEHXXXHXXXXXXXCXXCXXXXXRNDALTEHXXXHXXXXXXXCXXCXXXXXTSGNLTEHXXXHXXXXXXXCXXCXXXXXQSGDLRRHXXXHXXXXXXXCXXCXXXXXRSDHLTTHXXXHXXXXXXXCXXCXXXXXDKKDLTRHXXXHXXXXXXXXXXX

SEQ ID NO: 2376 - protein, 209 aa, Artificial Sequence
  source: /note="Description of Artificial Sequence: Synthetic polypeptide"
  MOD_RES (1)..(9): Any amino acid
  MOD_RES (11)..(12): Any amino acid
  MOD_RES (14)..(18): Any amino acid
  MOD_RES (27)..(29): Any amino acid
  MOD_RES (31)..(37): Any amino acid
  MOD_RES (39)..(40): Any amino acid
  MOD_RES (42)..(46): Any amino acid
  MOD_RES (55)..(57): Any amino acid
  MOD_RES (59)..(65): Any amino acid
  MOD_RES (67)..(68): Any amino acid
  MOD_RES (70)..(74): Any amino acid
  MOD_RES (83)..(85): Any amino acid
  MOD_RES (87)..(93): Any amino acid
  MOD_RES (95)..(96): Any amino acid
  MOD_RES (98)..(102): Any amino acid
  MOD_RES (111)..(113): Any amino acid
  MOD_RES (115)..(121): Any amino acid
  MOD_RES (123)..(124): Any amino acid
  MOD_RES (126)..(130): Any amino acid
  MOD_RES (139)..(141): Any amino acid
  MOD_RES (143)..(149): Any amino acid
  MOD_RES (151)..(152): Any amino acid
  MOD_RES (154)..(158): Any amino acid
  MOD_RES (167)..(169): Any amino acid
  MOD_RES (171)..(177): Any amino acid
  MOD_RES (179)..(180): Any amino acid
  MOD_RES (182)..(186): Any amino acid
  MOD_RES (195)..(197): Any amino acid
  MOD_RES (199)..(209): Any amino acid
XXXXXXXXXCXXCXXXXXDKKDLTRHXXXHXXXXXXXCXXCXXXXXTKNSLTEHXXXHXXXXXXXCXXCXXXXXTSHSLTEHXXXHXXXXXXXCXXCXXXXXSKKHLAEHXXXHXXXXXXXCXXCXXXXXRNDALTEHXXXHXXXXXXXCXXCXXXXXTSGNLTEHXXXHXXXXXXXCXXCXXXXXQSGDLRRHXXXHXXXXXXXXXXX

SEQ ID NO: 2377 - protein, 209 aa, Artificial Sequence
  source: /note="Description of Artificial Sequence: Synthetic polypeptide"
  MOD_RES (1)..(9): Any amino acid
  MOD_RES (11)..(12): Any amino acid
  MOD_RES (14)..(18): Any amino acid
  MOD_RES (27)..(29): Any amino acid
  MOD_RES (31)..(37): Any amino acid
  MOD_RES (39)..(40): Any amino acid
  MOD_RES (42)..(46): Any amino acid
  MOD_RES (55)..(57): Any amino acid
  MOD_RES (59)..(65): Any amino acid
  MOD_RES (67)..(68): Any amino acid
  MOD_RES (70)..(74): Any amino acid
  MOD_RES (83)..(85): Any amino acid
  MOD_RES (87)..(93): Any amino acid
  MOD_RES (95)..(96): Any amino acid
  MOD_RES (98)..(102): Any amino acid
  MOD_RES (111)..(113): Any amino acid
  MOD_RES (115)..(121): Any amino acid
  MOD_RES (123)..(124): Any amino acid
  MOD_RES (126)..(130): Any amino acid
  MOD_RES (139)..(141): Any amino acid
  MOD_RES (143)..(149): Any amino acid
  MOD_RES (151)..(152): Any amino acid
  MOD_RES (154)..(158): Any amino acid
  MOD_RES (167)..(169): Any amino acid
  MOD_RES (171)..(177): Any amino acid
  MOD_RES (179)..(180): Any amino acid
  MOD_RES (182)..(186): Any amino acid
  MOD_RES (195)..(197): Any amino acid
  MOD_RES (199)..(209): Any amino acid
XXXXXXXXXCXXCXXXXXQSGNLTEHXXXHXXXXXXXCXXCXXXXXSRRTCRAHXXXHXXXXXXXCXXCXXXXXTSGNLTEHXXXHXXXXXXXCXXCXXXXXDCRDLARHXXXHXXXXXXXCXXCXXXXXHKNALQNHXXXHXXXXXXXCXXCXXXXXDKKDLTRHXXXHXXXXXXXCXXCXXXXXTKNSLTEHXXXHXXXXXXXXXXX

SEQ ID NO: 2378 - protein, 209 aa, Artificial Sequence
  source: /note="Description of Artificial Sequence: Synthetic polypeptide"
  MOD_RES (1)..(9): Any amino acid
  MOD_RES (11)..(12): Any amino acid
  MOD_RES (14)..(18): Any amino acid
  MOD_RES (27)..(29): Any amino acid
  MOD_RES (31)..(37): Any amino acid
  MOD_RES (39)..(40): Any amino acid
  MOD_RES (42)..(46): Any amino acid
  MOD_RES (55)..(57): Any amino acid
  MOD_RES (59)..(65): Any amino acid
  MOD_RES (67)..(68): Any amino acid
  MOD_RES (70)..(74): Any amino acid
  MOD_RES (83)..(85): Any amino acid
  MOD_RES (87)..(93): Any amino acid
  MOD_RES (95)..(96): Any amino acid
  MOD_RES (98)..(102): Any amino acid
  MOD_RES (111)..(113): Any amino acid
  MOD_RES (115)..(121): Any amino acid
  MOD_RES (123)..(124): Any amino acid
  MOD_RES (126)..(130): Any amino acid
  MOD_RES (139)..(141): Any amino acid
  MOD_RES (143)..(149): Any amino acid
  MOD_RES (151)..(152): Any amino acid
  MOD_RES (154)..(158): Any amino acid
  MOD_RES (167)..(169): Any amino acid
  MOD_RES (171)..(177): Any amino acid
  MOD_RES (179)..(180): Any amino acid
  MOD_RES (182)..(186): Any amino acid
  MOD_RES (195)..(197): Any amino acid
  MOD_RES (199)..(209): Any amino acid
XXXXXXXXXCXXCXXXXXHKNALQNHXXXHXXXXXXXCXXCXXXXXDKKDLTRHXXXHXXXXXXXCXXCXXXXXTKNSLTEHXXXHXXXXXXXCXXCXXXXXTSHSLTEHXXXHXXXXXXXCXXCXXXXXSKKHLAEHXXXHXXXXXXXCXXCXXXXXRNDALTEHXXXHXXXXXXXCXXCXXXXXTSGNLTEHXXXHXXXXXXXXXXX

SEQ ID NO: 2379 - protein, 209 aa, Artificial Sequence
  source: /note="Description of Artificial Sequence: Synthetic polypeptide"
  MOD_RES (1)..(9): Any amino acid
  MOD_RES (11)..(12): Any amino acid
  MOD_RES (14)..(18): Any amino acid
  MOD_RES (27)..(29): Any amino acid
  MOD_RES (31)..(37): Any amino acid
  MOD_RES (39)..(40): Any amino acid
  MOD_RES (42)..(46): Any amino acid
  MOD_RES (55)..(57): Any amino acid
  MOD_RES (59)..(65): Any amino acid
  MOD_RES (67)..(68): Any amino acid
  MOD_RES (70)..(74): Any amino acid
  MOD_RES (83)..(85): Any amino acid
  MOD_RES (87)..(93): Any amino acid
  MOD_RES (95)..(96): Any amino acid
  MOD_RES (98)..(102): Any amino acid
  MOD_RES (111)..(113): Any amino acid
  MOD_RES (115)..(121): Any amino acid
  MOD_RES (123)..(124): Any amino acid
  MOD_RES (126)..(130): Any amino acid
  MOD_RES (139)..(141): Any amino acid
  MOD_RES (143)..(149): Any amino acid
  MOD_RES (151)..(152): Any amino acid
  MOD_RES (154)..(158): Any amino acid
  MOD_RES (167)..(169): Any amino acid
  MOD_RES (171)..(177): Any amino acid
  MOD_RES (179)..(180): Any amino acid
  MOD_RES (182)..(186): Any amino acid
  MOD_RES (195)..(197): Any amino acid
  MOD_RES (199)..(209): Any amino acid
XXXXXXXXXCXXCXXXXXQSGDLRRHXXXHXXXXXXXCXXCXXXXXRSDHLTTHXXXHXXXXXXXCXXCXXXXXDKKDLTRHXXXHXXXXXXXCXXCXXXXXSKKALTEHXXXHXXXXXXXCXXCXXXXXRSDHLTTHXXXHXXXXXXXCXXCXXXXXSKKALTEHXXXHXXXXXXXCXXCXXXXXSKKHLAEHXXXHXXXXXXXXXXX

SEQ ID NO: 2380 - protein, 209 aa, Artificial Sequence
  source: /note="Description of Artificial Sequence: Synthetic polypeptide"
  MOD_RES (1)..(9): Any amino acid
  MOD_RES (11)..(12): Any amino acid
  MOD_RES (14)..(18): Any amino acid
  MOD_RES (27)..(29): Any amino acid
  MOD_RES (31)..(37): Any amino acid
  MOD_RES (39)..(40): Any amino acid
  MOD_RES (42)..(46): Any amino acid
  MOD_RES (55)..(57): Any amino acid
  MOD_RES (59)..(65): Any amino acid
  MOD_RES (67)..(68): Any amino acid
  MOD_RES (70)..(74): Any amino acid
  MOD_RES (83)..(85): Any amino acid
  MOD_RES (87)..(93): Any amino acid
  MOD_RES (95)..(96): Any amino acid
  MOD_RES (98)..(102): Any amino acid
  MOD_RES (111)..(113): Any amino acid
  MOD_RES (115)..(121): Any amino acid
  MOD_RES (123)..(124): Any amino acid
  MOD_RES (126)..(130): Any amino acid
  MOD_RES (139)..(141): Any amino acid
  MOD_RES (143)..(149): Any amino acid
  MOD_RES (151)..(152): Any amino acid
  MOD_RES (154)..(158): Any amino acid
  MOD_RES (167)..(169): Any amino acid
  MOD_RES (171)..(177): Any amino acid
  MOD_RES (179)..(180): Any amino acid
  MOD_RES (182)..(186): Any amino acid
  MOD_RES (195)..(197): Any amino acid
  MOD_RES (199)..(209): Any amino acid
XXXXXXXXXCXXCXXXXXTSGNLTEHXXXHXXXXXXXCXXCXXXXXDCRDLARHXXXHXXXXXXXCXXCXXXXXHKNALQNHXXXHXXXXXXXCXXCXXXXXDKKDLTRHXXXHXXXXXXXCXXCXXXXXTKNSLTEHXXXHXXXXXXXCXXCXXXXXTSHSLTEHXXXHXXXXXXXCXXCXXXXXSKKHLAEHXXXHXXXXXXXXXXX

SEQ ID NO: 2381 - protein, 209 aa, Artificial Sequence
  source: /note="Description of Artificial Sequence: Synthetic polypeptide"
  MOD_RES (1)..(9): Any amino acid
  MOD_RES (11)..(12): Any amino acid
  MOD_RES (14)..(18): Any amino acid
  MOD_RES (27)..(29): Any amino acid
  MOD_RES (31)..(37): Any amino acid
  MOD_RES (39)..(40): Any amino acid
  MOD_RES (42)..(46): Any amino acid
  MOD_RES (55)..(57): Any amino acid
  MOD_RES (59)..(65): Any amino acid
  MOD_RES (67)..(68): Any amino acid
  MOD_RES (70)..(74): Any amino acid
  MOD_RES (83)..(85): Any amino acid
  MOD_RES (87)..(93): Any amino acid
  MOD_RES (95)..(96): Any amino acid
  MOD_RES (98)..(102): Any amino acid
  MOD_RES (111)..(113): Any amino acid
  MOD_RES (115)..(121): Any amino acid
  MOD_RES (123)..(124): Any amino acid
  MOD_RES (126)..(130): Any amino acid
  MOD_RES (139)..(141): Any amino acid
  MOD_RES (143)..(149): Any amino acid
  MOD_RES (151)..(152): Any amino acid
  MOD_RES (154)..(158): Any amino acid
  MOD_RES (167)..(169): Any amino acid
  MOD_RES (171)..(177): Any amino acid
  MOD_RES (179)..(180): Any amino acid
  MOD_RES (182)..(186): Any amino acid
  MOD_RES (195)..(197): Any amino acid
  MOD_RES (199)..(209): Any amino acid
XXXXXXXXXCXXCXXXXXSKKHLAEHXXXHXXXXXXXCXXCXXXXXRNDALTEHXXXHXXXXXXXCXXCXXXXXTSGNLTEHXXXHXXXXXXXCXXCXXXXXQSGDLRRHXXXHXXXXXXXCXXCXXXXXRSDHLTTHXXXHXXXXXXXCXXCXXXXXDKKDLTRHXXXHXXXXXXXCXXCXXXXXSKKALTEHXXXHXXXXXXXXXXX

SEQ ID NO: 2382 - protein, 209 aa, Artificial Sequence
  source: /note="Description of Artificial Sequence: Synthetic polypeptide"
  MOD_RES (1)..(9): Any amino acid
  MOD_RES (11)..(12): Any amino acid
  MOD_RES (14)..(18): Any amino acid
  MOD_RES (27)..(29): Any amino acid
  MOD_RES (31)..(37): Any amino acid
  MOD_RES (39)..(40): Any amino acid
  MOD_RES (42)..(46): Any amino acid
  MOD_RES (55)..(57): Any amino acid
  MOD_RES (59)..(65): Any amino acid
  MOD_RES (67)..(68): Any amino acid
  MOD_RES (70)..(74): Any amino acid
  MOD_RES (83)..(85): Any amino acid
  MOD_RES (87)..(93): Any amino acid
  MOD_RES (95)..(96): Any amino acid
  MOD_RES (98)..(102): Any amino acid
  MOD_RES (111)..(113): Any amino acid
  MOD_RES (115)..(121): Any amino acid
  MOD_RES (123)..(124): Any amino acid
  MOD_RES (126)..(130): Any amino acid
  MOD_RES (139)..(141): Any amino acid
  MOD_RES (143)..(149): Any amino acid
  MOD_RES (151)..(152): Any amino acid
  MOD_RES (154)..(158): Any amino acid
  MOD_RES (167)..(169): Any amino acid
  MOD_RES (171)..(177): Any amino acid
  MOD_RES (179)..(180): Any amino acid
  MOD_RES (182)..(186): Any amino acid
  MOD_RES (195)..(197): Any amino acid
  MOD_RES (199)..(209): Any amino acid
XXXXXXXXXCXXCXXXXXRNDALTEHXXXHXXXXXXXCXXCXXXXXSKKALTEHXXXHXXXXXXXCXXCXXXXXQSGNLTEHXXXHXXXXXXXCXXCXXXXXSRRTCRAHXXXHXXXXXXXCXXCXXXXXTSGNLTEHXXXHXXXXXXXCXXCXXXXXDCRDLARHXXXHXXXXXXXCXXCXXXXXHKNALQNHXXXHXXXXXXXXXXX

SEQ ID NO: 2383 - protein, 209 aa, Artificial Sequence
  source: /note="Description of Artificial Sequence: Synthetic polypeptide"
  MOD_RES (1)..(9): Any amino acid
  MOD_RES (11)..(12): Any amino acid
  MOD_RES (14)..(18): Any amino acid
  MOD_RES (27)..(29): Any amino acid
  MOD_RES (31)..(37): Any amino acid
  MOD_RES (39)..(40): Any amino acid
  MOD_RES (42)..(46): Any amino acid
  MOD_RES (55)..(57): Any amino acid
  MOD_RES (59)..(65): Any amino acid
  MOD_RES (67)..(68): Any amino acid
  MOD_RES (70)..(74): Any amino acid
  MOD_RES (83)..(85): Any amino acid
  MOD_RES (87)..(93): Any amino acid
  MOD_RES (95)..(96): Any amino acid
  MOD_RES (98)..(102): Any amino acid
  MOD_RES (111)..(113): Any amino acid
  MOD_RES (115)..(121): Any amino acid
  MOD_RES (123)..(124): Any amino acid
  MOD_RES (126)..(130): Any amino acid
  MOD_RES (139)..(141): Any amino acid
  MOD_RES (143)..(149): Any amino acid
  MOD_RES (151)..(152): Any amino acid
  MOD_RES (154)..(158): Any amino acid
  MOD_RES (167)..(169): Any amino acid
  MOD_RES (171)..(177): Any amino acid
  MOD_RES (179)..(180): Any amino acid
  MOD_RES (182)..(186): Any amino acid
  MOD_RES (195)..(197): Any amino acid
  MOD_RES (199)..(209): Any amino acid
XXXXXXXXXCXXCXXXXXHKNALQNHXXXHXXXXXXXCXXCXXXXXSKKALTEHXXXHXXXXXXXCXXCXXXXXRNDALTEHXXXHXXXXXXXCXXCXXXXXSKKALTEHXXXHXXXXXXXCXXCXXXXXQSGNLTEHXXXHXXXXXXXCXXCXXXXXSRRTCRAHXXXHXXXXXXXCXXCXXXXXTSGNLTEHXXXHXXXXXXXXXXX

SEQ ID NO: 2384 - protein, 209 aa, Artificial Sequence
  source: /note="Description of Artificial Sequence: Synthetic polypeptide"
  MOD_RES (1)..(9): Any amino acid
  MOD_RES (11)..(12): Any amino acid
  MOD_RES (14)..(18): Any amino acid
  MOD_RES (27)..(29): Any amino acid
  MOD_RES (31)..(37): Any amino acid
  MOD_RES (39)..(40): Any amino acid
  MOD_RES (42)..(46): Any amino acid
  MOD_RES (55)..(57): Any amino acid
  MOD_RES (59)..(65): Any amino acid
  MOD_RES (67)..(68): Any amino acid
  MOD_RES (70)..(74): Any amino acid
  MOD_RES (83)..(85): Any amino acid
  MOD_RES (87)..(93): Any amino acid
  MOD_RES (95)..(96): Any amino acid
  MOD_RES (98)..(102): Any amino acid
  MOD_RES (111)..(113): Any amino acid
  MOD_RES (115)..(121): Any amino acid
  MOD_RES (123)..(124): Any amino acid
  MOD_RES (126)..(130): Any amino acid
  MOD_RES (139)..(141): Any amino acid
  MOD_RES (143)..(149): Any amino acid
  MOD_RES (151)..(152): Any amino acid
  MOD_RES (154)..(158): Any amino acid
  MOD_RES (167)..(169): Any amino acid
  MOD_RES (171)..(177): Any amino acid
  MOD_RES (179)..(180): Any amino acid
  MOD_RES (182)..(186): Any amino acid
  MOD_RES (195)..(197): Any amino acid
  MOD_RES (199)..(209): Any amino acid
XXXXXXXXXCXXCXXXXXSKKALTEHXXXHXXXXXXXCXXCXXXXXQSGNLTEHXXXHXXXXXXXCXXCXXXXXSRRTCRAHXXXHXXXXXXXCXXCXXXXXTSGNLTEHXXXHXXXXXXXCXXCXXXXXDCRDLARHXXXHXXXXXXXCXXCXXXXXHKNALQNHXXXHXXXXXXXCXXCXXXXXDKKDLTRHXXXHXXXXXXXXXXX

SEQ ID NO: 2385 - protein, 209 aa, Artificial Sequence
  source: /note="Description of Artificial Sequence: Synthetic polypeptide"
  MOD_RES (1)..(9): Any amino acid
  MOD_RES (11)..(12): Any amino acid
  MOD_RES (14)..(18): Any amino acid
  MOD_RES (27)..(29): Any amino acid
  MOD_RES (31)..(37): Any amino acid
  MOD_RES (39)..(40): Any amino acid
  MOD_RES (42)..(46): Any amino acid
  MOD_RES (55)..(57): Any amino acid
  MOD_RES (59)..(65): Any amino acid
  MOD_RES (67)..(68): Any amino acid
  MOD_RES (70)..(74): Any amino acid
  MOD_RES (83)..(85): Any amino acid
  MOD_RES (87)..(93): Any amino acid
  MOD_RES (95)..(96): Any amino acid
  MOD_RES (98)..(102): Any amino acid
  MOD_RES (111)..(113): Any amino acid
  MOD_RES (115)..(121): Any amino acid
  MOD_RES (123)..(124): Any amino acid
  MOD_RES (126)..(130): Any amino acid
  MOD_RES (139)..(141): Any amino acid
  MOD_RES (143)..(149): Any amino acid
  MOD_RES (151)..(152): Any amino acid
  MOD_RES (154)..(158): Any amino acid
  MOD_RES (167)..(169): Any amino acid
  MOD_RES (171)..(177): Any amino acid
  MOD_RES (179)..(180): Any amino acid
  MOD_RES (182)..(186): Any amino acid
  MOD_RES (195)..(197): Any amino acid
  MOD_RES (199)..(209): Any amino acid
XXXXXXXXXCXXCXXXXXSKKALTEHXXXHXXXXXXXCXXCXXXXXRNDALTEHXXXHXXXXXXXCXXCXXXXXSKKALTEHXXXHXXXXXXXCXXCXXXXXQSGNLTEHXXXHXXXXXXXCXXCXXXXXSRRTCRAHXXXHXXXXXXXCXXCXXXXXTSGNLTEHXXXHXXXXXXXCXXCXXXXXDCRDLARHXXXHXXXXXXXXXXX

SEQ ID NO: 2386 - protein, 209 aa, Artificial Sequence
  source: /note="Description of Artificial Sequence: Synthetic polypeptide"
  MOD_RES (1)..(9): Any amino acid
  MOD_RES (11)..(12): Any amino acid
  MOD_RES (14)..(18): Any amino acid
  MOD_RES (27)..(29): Any amino acid
  MOD_RES (31)..(37): Any amino acid
  MOD_RES (39)..(40): Any amino acid
  MOD_RES (42)..(46): Any amino acid
  MOD_RES (55)..(57): Any amino acid
  MOD_RES (59)..(65): Any amino acid
  MOD_RES (67)..(68): Any amino acid
  MOD_RES (70)..(74): Any amino acid
  MOD_RES (83)..(85): Any amino acid
  MOD_RES (87)..(93): Any amino acid
  MOD_RES (95)..(96): Any amino acid
  MOD_RES (98)..(102): Any amino acid
  MOD_RES (111)..(113): Any amino acid
  MOD_RES (115)..(121): Any amino acid
  MOD_RES (123)..(124): Any amino acid
  MOD_RES (126)..(130): Any amino acid
  MOD_RES (139)..(141): Any amino acid
  MOD_RES (143)..(149): Any amino acid
  MOD_RES (151)..(152): Any amino acid
  MOD_RES (154)..(158): Any amino acid
  MOD_RES (167)..(169): Any amino acid
  MOD_RES (171)..(177): Any amino acid
  MOD_RES (179)..(180): Any amino acid
  MOD_RES (182)..(186): Any amino acid
  MOD_RES (195)..(197): Any amino acid
  MOD_RES (199)..(209): Any amino acid
XXXXXXXXXCXXCXXXXXDPGALVRHXXXHXXXXXXXCXXCXXXXXRSDHLTTHXXXHXXXXXXXCXXCXXXXXDPGHLVRHXXXHXXXXXXXCXXCXXXXXQSSSLVRHXXXHXXXXXXXCXXCXXXXXTSGHLVRHXXXHXXXXXXXCXXCXXXXXTSGHLVRHXXXHXXXXXXXCXXCXXXXXRADNLTEHXXXHXXXXXXXXXXX

SEQ ID NO: 2387 - protein, 209 aa, Artificial Sequence
  source: /note="Description of Artificial Sequence: Synthetic polypeptide"
  MOD_RES (1)..(9): Any amino acid
  MOD_RES (11)..(12): Any amino acid
  MOD_RES (14)..(18): Any amino acid
  MOD_RES (27)..(29): Any amino acid
  MOD_RES (31)..(37): Any amino acid
  MOD_RES (39)..(40): Any amino acid
  MOD_RES (42)..(46): Any amino acid
  MOD_RES (55)..(57): Any amino acid
  MOD_RES (59)..(65): Any amino acid
  MOD_RES (67)..(68): Any amino acid
  MOD_RES (70)..(74): Any amino acid
  MOD_RES (83)..(85): Any amino acid
  MOD_RES (87)..(93): Any amino acid
  MOD_RES (95)..(96): Any amino acid
  MOD_RES (98)..(102): Any amino acid
  MOD_RES (111)..(113): Any amino acid
  MOD_RES (115)..(121): Any amino acid
  MOD_RES (123)..(124): Any amino acid
  MOD_RES (126)..(130): Any amino acid
  MOD_RES (139)..(141): Any amino acid
  MOD_RES (143)..(149): Any amino acid
  MOD_RES (151)..(152): Any amino acid
  MOD_RES (154)..(158): Any amino acid
  MOD_RES (167)..(169): Any amino acid
  MOD_RES (171)..(177): Any amino acid
  MOD_RES (179)..(180): Any amino acid
  MOD_RES (182)..(186): Any amino acid
  MOD_RES (195)..(197): Any amino acid
  MOD_RES (199)..(209): Any amino acid
XXXXXXXXXCXXCXXXXXRADNLTEHXXXHXXXXXXXCXXCXXXXXDPGALVRHXXXHXXXXXXXCXXCXXXXXRSDHLTTHXXXHXXXXXXXCXXCXXXXXDPGHLVRHXXXHXXXXXXXCXXCXXXXXQSSSLVRHXXXHXXXXXXXCXXCXXXXXTSGHLVRHXXXHXXXXXXXCXXCXXXXXTSGHLVRHXXXHXXXXXXXXXXX

SEQ ID NO: 2388 - protein, 209 aa, Artificial Sequence
  source: /note="Description of Artificial Sequence: Synthetic polypeptide"
  MOD_RES (1)..(9): Any amino acid
  MOD_RES (11)..(12): Any amino acid
  MOD_RES (14)..(18): Any amino acid
  MOD_RES (27)..(29): Any amino acid
  MOD_RES (31)..(37): Any amino acid
  MOD_RES (39)..(40): Any amino acid
  MOD_RES (42)..(46): Any amino acid
  MOD_RES (55)..(57): Any amino acid
  MOD_RES (59)..(65): Any amino acid
  MOD_RES (67)..(68): Any amino acid
  MOD_RES (70)..(74): Any amino acid
  MOD_RES (83)..(85): Any amino acid
  MOD_RES (87)..(93): Any amino acid
  MOD_RES (95)..(96): Any amino acid
  MOD_RES (98)..(102): Any amino acid
  MOD_RES (111)..(113): Any amino acid
  MOD_RES (115)..(121): Any amino acid
  MOD_RES (123)..(124): Any amino acid
  MOD_RES (126)..(130): Any amino acid
  MOD_RES (139)..(141): Any amino acid
  MOD_RES (143)..(149): Any amino acid
  MOD_RES (151)..(152): Any amino acid
  MOD_RES (154)..(158): Any amino acid
  MOD_RES (167)..(169): Any amino acid
  MOD_RES (171)..(177): Any amino acid
  MOD_RES (179)..(180): Any amino acid
  MOD_RES (182)..(186): Any amino acid
  MOD_RES (195)..(197): Any amino acid
  MOD_RES (199)..(209): Any amino acid
XXXXXXXXXCXXCXXXXXSKKALTEHXXXHXXXXXXXCXXCXXXXXRADNLTEHXXXHXXXXXXXCXXCXXXXXRSDELVRHXXXHXXXXXXXCXXCXXXXXTSHSLTEHXXXHXXXXXXXCXXCXXXXXTSGHLVRHXXXHXXXXXXXCXXCXXXXXRNDALTEHXXXHXXXXXXXCXXCXXXXXRSDHLTNHXXXHXXXXXXXXXXX

SEQ ID NO: 2389 - protein, 209 aa, Artificial Sequence
  source: /note="Description of Artificial Sequence: Synthetic polypeptide"
  MOD_RES (1)..(9): Any amino acid
  MOD_RES (11)..(12): Any amino acid
  MOD_RES (14)..(18): Any amino acid
  MOD_RES (27)..(29): Any amino acid
  MOD_RES (31)..(37): Any amino acid
  MOD_RES (39)..(40): Any amino acid
  MOD_RES (42)..(46): Any amino acid
  MOD_RES (55)..(57): Any amino acid
  MOD_RES (59)..(65): Any amino acid
  MOD_RES (67)..(68): Any amino acid
  MOD_RES (70)..(74): Any amino acid
  MOD_RES (83)..(85): Any amino acid
  MOD_RES (87)..(93): Any amino acid
  MOD_RES (95)..(96): Any amino acid
  MOD_RES (98)..(102): Any amino acid
  MOD_RES (111)..(113): Any amino acid
  MOD_RES (115)..(121): Any amino acid
  MOD_RES (123)..(124): Any amino acid
  MOD_RES (126)..(130): Any amino acid
  MOD_RES (139)..(141): Any amino acid
  MOD_RES (143)..(149): Any amino acid
  MOD_RES (151)..(152): Any amino acid
  MOD_RES (154)..(158): Any amino acid
  MOD_RES (167)..(169): Any amino acid
  MOD_RES (171)..(177): Any amino acid
  MOD_RES (179)..(180): Any amino acid
  MOD_RES (182)..(186): Any amino acid
  MOD_RES (195)..(197): Any amino acid
  MOD_RES (199)..(209): Any amino acid
XXXXXXXXXCXXCXXXXXDPGALVRHXXXHXXXXXXXCXXCXXXXXTSGNLTEHXXXHXXXXXXXCXXCXXXXXDPGHLVRHXXXHXXXXXXXCXXCXXXXXDPGALVRHXXXHXXXXXXXCXXCXXXXXQSSSLVRHXXXHXXXXXXXCXXCXXXXXTHLDLIRHXXXHXXXXXXXCXXCXXXXXERSHLREHXXXHXXXXXXXXXXX

SEQ ID NO: 2390 - protein, 209 aa, Artificial Sequence
  source: /note="Description of Artificial Sequence: Synthetic polypeptide"
  MOD_RES (1)..(9): Any amino acid
  MOD_RES (11)..(12): Any amino acid
  MOD_RES (14)..(18): Any amino acid
  MOD_RES (27)..(29): Any amino acid
  MOD_RES (31)..(37): Any amino acid
  MOD_RES (39)..(40): Any amino acid
  MOD_RES (42)..(46): Any amino acid
  MOD_RES (55)..(57): Any amino acid
  MOD_RES (59)..(65): Any amino acid
  MOD_RES (67)..(68): Any amino acid
  MOD_RES (70)..(74): Any amino acid
  MOD_RES (83)..(85): Any amino acid
  MOD_RES (87)..(93): Any amino acid
  MOD_RES (95)..(96): Any amino acid
  MOD_RES (98)..(102): Any amino acid
  MOD_RES (111)..(113): Any amino acid
  MOD_RES (115)..(121): Any amino acid
  MOD_RES (123)..(124): Any amino acid
  MOD_RES (126)..(130): Any amino acid
  MOD_RES (139)..(141): Any amino acid
  MOD_RES (143)..(149): Any amino acid
  MOD_RES (151)..(152): Any amino acid
  MOD_RES (154)..(158): Any amino acid
  MOD_RES (167)..(169): Any amino acid
  MOD_RES (171)..(177): Any amino acid
  MOD_RES (179)..(180): Any amino acid
  MOD_RES (182)..(186): Any amino acid
  MOD_RES (195)..(197): Any amino acid
  MOD_RES (199)..(209): Any amino acid
XXXXXXXXXCXXCXXXXXTSGNLTEHXXXHXXXXXXXCXXCXXXXXDPGALVRHXXXHXXXXXXXCXXCXXXXXTSGNLTEHXXXHXXXXXXXCXXCXXXXXDPGHLVRHXXXHXXXXXXXCXXCXXXXXDPGALVRHXXXHXXXXXXXCXXCXXXXXQSSSLVRHXXXHXXXXXXXCXXCXXXXXTHLDLIRHXXXHXXXXXXXXXXX

SEQ ID NO: 2391 - protein, 209 aa, Artificial Sequence
  source: /note="Description of Artificial Sequence: Synthetic polypeptide"
  MOD_RES (1)..(9): Any amino acid
  MOD_RES (11)..(12): Any amino acid
  MOD_RES (14)..(18): Any amino acid
  MOD_RES (27)..(29): Any amino acid
  MOD_RES (31)..(37): Any amino acid
  MOD_RES (39)..(40): Any amino acid
  MOD_RES (42)..(46): Any amino acid
  MOD_RES (55)..(57): Any amino acid
  MOD_RES (59)..(65): Any amino acid
  MOD_RES (67)..(68): Any amino acid
  MOD_RES (70)..(74): Any amino acid
  MOD_RES (83)..(85): Any amino acid
  MOD_RES (87)..(93): Any amino acid
  MOD_RES (95)..(96): Any amino acid
  MOD_RES (98)..(102): Any amino acid
  MOD_RES (111)..(113): Any amino acid
  MOD_RES (115)..(121): Any amino acid
  MOD_RES (123)..(124): Any amino acid
  MOD_RES (126)..(130): Any amino acid
  MOD_RES (139)..(141): Any amino acid
  MOD_RES (143)..(149): Any amino acid
  MOD_RES (151)..(152): Any amino acid
  MOD_RES (154)..(158): Any amino acid
  MOD_RES (167)..(169): Any amino acid
  MOD_RES (171)..(177): Any amino acid
  MOD_RES (179)..(180): Any amino acid
  MOD_RES (182)..(186): Any amino acid
  MOD_RES (195)..(197): Any amino acid
  MOD_RES (199)..(209): Any amino acid
XXXXXXXXXCXXCXXXXXDPGALVRHXXXHXXXXXXXCXXCXXXXXTSGNLTEHXXXHXXXXXXXCXXCXXXXXDPGALVRHXXXHXXXXXXXCXXCXXXXXTSGNLTEHXXXHXXXXXXXCXXCXXXXXDPGHLVRHXXXHXXXXXXXCXXCXXXXXDPGALVRHXXXHXXXXXXXCXXCXXXXXQSSSLVRHXXXHXXXXXXXXXXX

SEQ ID NO: 2392 - protein, 209 aa, Artificial Sequence
  source: /note="Description of Artificial Sequence: Synthetic polypeptide"
  MOD_RES (1)..(9): Any amino acid
  MOD_RES (11)..(12): Any amino acid
  MOD_RES (14)..(18): Any amino acid
  MOD_RES (27)..(29): Any amino acid
  MOD_RES (31)..(37): Any amino acid
  MOD_RES (39)..(40): Any amino acid
  MOD_RES (42)..(46): Any amino acid
  MOD_RES (55)..(57): Any amino acid
  MOD_RES (59)..(65): Any amino acid
  MOD_RES (67)..(68): Any amino acid
  MOD_RES (70)..(74): Any amino acid
  MOD_RES (83)..(85): Any amino acid
  MOD_RES (87)..(93): Any amino acid
  MOD_RES (95)..(96): Any amino acid
  MOD_RES (98)..(102): Any amino acid
  MOD_RES (111)..(113): Any amino acid
  MOD_RES (115)..(121): Any amino acid
  MOD_RES (123)..(124): Any amino acid
  MOD_RES (126)..(130): Any amino acid
  MOD_RES (139)..(141): Any amino acid
  MOD_RES (143)..(149): Any amino acid
  MOD_RES (151)..(152): Any amino acid
  MOD_RES (154)..(158): Any amino acid
  MOD_RES (167)..(169): Any amino acid
  MOD_RES (171)..(177): Any amino acid
  MOD_RES (179)..(180): Any amino acid
  MOD_RES (182)..(186): Any amino acid
  MOD_RES (195)..(197): Any amino acid
  MOD_RES (199)..(209): Any amino acid
XXXXXXXXXCXXCXXXXXDPGNLVRHXXXHXXXXXXXCXXCXXXXXDPGALVRHXXXHXXXXXXXCXXCXXXXXTSGNLTEHXXXHXXXXXXXCXXCXXXXXDPGALVRHXXXHXXXXXXXCXXCXXXXXTSGNLTEHXXXHXXXXXXXCXXCXXXXXDPGHLVRHXXXHXXXXXXXCXXCXXXXXDPGALVRHXXXHXXXXXXXXXXX

SEQ ID NO: 2393 - protein, 209 aa, Artificial Sequence
  source: /note="Description of Artificial Sequence: Synthetic polypeptide"
  MOD_RES (1)..(9): Any amino acid
  MOD_RES (11)..(12): Any amino acid
  MOD_RES (14)..(18): Any amino acid
  MOD_RES (27)..(29): Any amino acid
  MOD_RES (31)..(37): Any amino acid
  MOD_RES (39)..(40): Any amino acid
  MOD_RES (42)..(46): Any amino acid
  MOD_RES (55)..(57): Any amino acid
  MOD_RES (59)..(65): Any amino acid
  MOD_RES (67)..(68): Any amino acid
  MOD_RES (70)..(74): Any amino acid
  MOD_RES (83)..(85): Any amino acid
  MOD_RES (87)..(93): Any amino acid
  MOD_RES (95)..(96): Any amino acid
  MOD_RES (98)..(102): Any amino acid
  MOD_RES (111)..(113): Any amino acid
  MOD_RES (115)..(121): Any amino acid
  MOD_RES (123)..(124): Any amino acid
  MOD_RES (126)..(130): Any amino acid
  MOD_RES (139)..(141): Any amino acid
  MOD_RES (143)..(149): Any amino acid
  MOD_RES (151)..(152): Any amino acid
  MOD_RES (154)..(158): Any amino acid
  MOD_RES (167)..(169): Any amino acid
  MOD_RES (171)..(177): Any amino acid
  MOD_RES (179)..(180): Any amino acid
  MOD_RES (182)..(186): Any amino acid
  MOD_RES (195)..(197): Any amino acid
  MOD_RES (199)..(209): Any amino acid
XXXXXXXXXCXXCXXXXXRSDNLVRHXXXHXXXXXXXCXXCXXXXXDPGNLVRHXXXHXXXXXXXCXXCXXXXXDPGALVRHXXXHXXXXXXXCXXCXXXXXTSGNLTEHXXXHXXXXXXXCXXCXXXXXDPGALVRHXXXHXXXXXXXCXXCXXXXXTSGNLTEHXXXHXXXXXXXCXXCXXXXXDPGHLVRHXXXHXXXXXXXXXXX

SEQ ID NO: 2394 - protein, 209 aa, Artificial Sequence
  source: /note="Description of Artificial Sequence: Synthetic polypeptide"
  MOD_RES (1)..(9): Any amino acid
  MOD_RES (11)..(12): Any amino acid
  MOD_RES (14)..(18): Any amino acid
  MOD_RES (27)..(29): Any amino acid
  MOD_RES (31)..(37): Any amino acid
  MOD_RES (39)..(40): Any amino acid
  MOD_RES (42)..(46): Any amino acid
  MOD_RES (55)..(57): Any amino acid
  MOD_RES (59)..(65): Any amino acid
  MOD_RES (67)..(68): Any amino acid
  MOD_RES (70)..(74): Any amino acid
  MOD_RES (83)..(85): Any amino acid
  MOD_RES (87)..(93): Any amino acid
  MOD_RES (95)..(96): Any amino acid
  MOD_RES (98)..(102): Any amino acid
  MOD_RES (111)..(113): Any amino acid
  MOD_RES (115)..(121): Any amino acid
  MOD_RES (123)..(124): Any amino acid
  MOD_RES (126)..(130): Any amino acid
  MOD_RES (139)..(141): Any amino acid
  MOD_RES (143)..(149): Any amino acid
  MOD_RES (151)..(152): Any amino acid
  MOD_RES (154)..(158): Any amino acid
  MOD_RES (167)..(169): Any amino acid
  MOD_RES (171)..(177): Any amino acid
  MOD_RES (179)..(180): Any amino acid
  MOD_RES (182)..(186): Any amino acid
  MOD_RES (195)..(197): Any amino acid
  MOD_RES (199)..(209): Any amino acid
XXXXXXXXXCXXCXXXXXTSGHLVRHXXXHXXXXXXXCXXCXXXXXRSDNLVRHXXXHXXXXXXXCXXCXXXXXDPGNLVRHXXXHXXXXXXXCXXCXXXXXDPGALVRHXXXHXXXXXXXCXXCXXXXXTSGNLTEHXXXHXXXXXXXCXXCXXXXXDPGALVRHXXXHXXXXXXXCXXCXXXXXTSGNLTEHXXXHXXXXXXXXXXX

SEQ ID NO: 2395 - protein, 209 aa, Artificial Sequence
  source: /note="Description of Artificial Sequence: Synthetic polypeptide"
  MOD_RES (1)..(9): Any amino acid
  MOD_RES (11)..(12): Any amino acid
  MOD_RES (14)..(18): Any amino acid
  MOD_RES (27)..(29): Any amino acid
  MOD_RES (31)..(37): Any amino acid
  MOD_RES (39)..(40): Any amino acid
  MOD_RES (42)..(46): Any amino acid
  MOD_RES (55)..(57): Any amino acid
  MOD_RES (59)..(65): Any amino acid
  MOD_RES (67)..(68): Any amino acid
  MOD_RES (70)..(74): Any amino acid
  MOD_RES (83)..(85): Any amino acid
  MOD_RES (87)..(93): Any amino acid
  MOD_RES (95)..(96): Any amino acid
  MOD_RES (98)..(102): Any amino acid
  MOD_RES (111)..(113): Any amino acid
  MOD_RES (115)..(121): Any amino acid
  MOD_RES (123)..(124): Any amino acid
  MOD_RES (126)..(130): Any amino acid
  MOD_RES (139)..(141): Any amino acid
  MOD_RES (143)..(149): Any amino acid
  MOD_RES (151)..(152): Any amino acid
  MOD_RES (154)..(158): Any amino acid
  MOD_RES (167)..(169): Any amino acid
  MOD_RES (171)..(177): Any amino acid
  MOD_RES (179)..(180): Any amino acid
  MOD_RES (182)..(186): Any amino acid
  MOD_RES (195)..(197): Any amino acid
  MOD_RES (199)..(209): Any amino acid
XXXXXXXXXCXXCXXXXXSKKALTEHXXXHXXXXXXXCXXCXXXXXDPGHLVRHXXXHXXXXXXXCXXCXXXXXHTGHLLEHXXXHXXXXXXXCXXCXXXXXHTGHLLEHXXXHXXXXXXXCXXCXXXXXTSHSLTEHXXXHXXXXXXXCXXCXXXXXTKNSLTEHXXXHXXXXXXXCXXCXXXXXRNDALTEHXXXHXXXXXXXXXXX

SEQ ID NO: 2396 - protein, 209 aa, Artificial Sequence
  source: /note="Description of Artificial Sequence: Synthetic polypeptide"
  MOD_RES (1)..(9): Any amino acid
  MOD_RES (11)..(12): Any amino acid
  MOD_RES (14)..(18): Any amino acid
  MOD_RES (27)..(29): Any amino acid
  MOD_RES (31)..(37): Any amino acid
  MOD_RES (39)..(40): Any amino acid
  MOD_RES (42)..(46): Any amino acid
  MOD_RES (55)..(57): Any amino acid
  MOD_RES (59)..(65): Any amino acid
  MOD_RES (67)..(68): Any amino acid
  MOD_RES (70)..(74): Any amino acid
  MOD_RES (83)..(85): Any amino acid
  MOD_RES (87)..(93): Any amino acid
  MOD_RES (95)..(96): Any amino acid
  MOD_RES (98)..(102): Any amino acid
  MOD_RES (111)..(113): Any amino acid
  MOD_RES (115)..(121): Any amino acid
  MOD_RES (123)..(124): Any amino acid
  MOD_RES (126)..(130): Any amino acid
  MOD_RES (139)..(141): Any amino acid
  MOD_RES (143)..(149): Any amino acid
  MOD_RES (151)..(152): Any amino acid
  MOD_RES (154)..(158): Any amino acid
  MOD_RES (167)..(169): Any amino acid
  MOD_RES (171)..(177): Any amino acid
  MOD_RES (179)..(180): Any amino acid
  MOD_RES (182)..(186): Any amino acid
  MOD_RES (195)..(197): Any amino acid
  MOD_RES (199)..(209): Any amino acid
XXXXXXXXXCXXCXXXXXRNDALTEHXXXHXXXXXXXCXXCXXXXXSKKALTEHXXXHXXXXXXXCXXCXXXXXDPGHLVRHXXXHXXXXXXXCXXCXXXXXHTGHLLEHXXXHXXXXXXXCXXCXXXXXHTGHLLEHXXXHXXXXXXXCXXCXXXXXTSHSLTEHXXXHXXXXXXXCXXCXXXXXTKNSLTEHXXXHXXXXXXXXXXX

SEQ ID NO: 2397 - protein, 209 aa, Artificial Sequence
  source: /note="Description of Artificial Sequence: Synthetic polypeptide"
  MOD_RES (1)..(9): Any amino acid
  MOD_RES (11)..(12): Any amino acid
  MOD_RES (14)..(18): Any amino acid
  MOD_RES (27)..(29): Any amino acid
  MOD_RES (31)..(37): Any amino acid
  MOD_RES (39)..(40): Any amino acid
  MOD_RES (42)..(46): Any amino acid
  MOD_RES (55)..(57): Any amino acid
  MOD_RES (59)..(65): Any amino acid
  MOD_RES (67)..(68): Any amino acid
  MOD_RES (70)..(74): Any amino acid
  MOD_RES (83)..(85): Any amino acid
  MOD_RES (87)..(93): Any amino acid
  MOD_RES (95)..(96): Any amino acid
  MOD_RES (98)..(102): Any amino acid
  MOD_RES (111)..(113): Any amino acid
  MOD_RES (115)..(121): Any amino acid
  MOD_RES (123)..(124): Any amino acid
  MOD_RES (126)..(130): Any amino acid
  MOD_RES (139)..(141): Any amino acid
  MOD_RES (143)..(149): Any amino acid
  MOD_RES (151)..(152): Any amino acid
  MOD_RES (154)..(158): Any amino acid
  MOD_RES (167)..(169): Any amino acid
  MOD_RES (171)..(177): Any amino acid
  MOD_RES (179)..(180): Any amino acid
  MOD_RES (182)..(186): Any amino acid
  MOD_RES (195)..(197): Any amino acid
  MOD_RES (199)..(209): Any amino acid
XXXXXXXXXCXXCXXXXXSKKHLAEHXXXHXXXXXXXCXXCXXXXXRNDALTEHXXXHXXXXXXXCXXCXXXXXSKKALTEHXXXHXXXXXXXCXXCXXXXXDPGHLVRHXXXHXXXXXXXCXXCXXXXXHTGHLLEHXXXHXXXXXXXCXXCXXXXXHTGHLLEHXXXHXXXXXXXCXXCXXXXXTSHSLTEHXXXHXXXXXXXXXXX

SEQ ID NO: 2398 - protein, 209 aa, Artificial Sequence
  source: /note="Description of Artificial Sequence: Synthetic polypeptide"
  MOD_RES (1)..(9): Any amino acid
  MOD_RES (11)..(12): Any amino acid
  MOD_RES (14)..(18): Any amino acid
  MOD_RES (27)..(29): Any amino acid
  MOD_RES (31)..(37): Any amino acid
  MOD_RES (39)..(40): Any amino acid
  MOD_RES (42)..(46): Any amino acid
  MOD_RES (55)..(57): Any amino acid
  MOD_RES (59)..(65): Any amino acid
  MOD_RES (67)..(68): Any amino acid
  MOD_RES (70)..(74): Any amino acid
  MOD_RES (83)..(85): Any amino acid
  MOD_RES (87)..(93): Any amino acid
  MOD_RES (95)..(96): Any amino acid
  MOD_RES (98)..(102): Any amino acid
  MOD_RES (111)..(113): Any amino acid
  MOD_RES (115)..(121): Any amino acid
  MOD_RES (123)..(124): Any amino acid
  MOD_RES (126)..(130): Any amino acid
  MOD_RES (139)..(141): Any amino acid
  MOD_RES (143)..(149): Any amino acid
  MOD_RES (151)..(152): Any amino acid
  MOD_RES (154)..(158): Any amino acid
  MOD_RES (167)..(169): Any amino acid
  MOD_RES (171)..(177): Any amino acid
  MOD_RES (179)..(180): Any amino acid
  MOD_RES (182)..(186): Any amino acid
  MOD_RES (195)..(197): Any amino acid
  MOD_RES (199)..(209): Any amino acid
XXXXXXXXXCXXCXXXXXRSDHLTTHXXXHXXXXXXXCXXCXXXXXSKKHLAEHXXXHXXXXXXXCXXCXXXXXQNSTLTEHXXXHXXXXXXXCXXCXXXXXDCRDLARHXXXHXXXXXXXCXXCXXXXXTKNSLTEHXXXHXXXXXXXCXXCXXXXXTSHSLTEHXXXHXXXXXXXCXXCXXXXXRSDKLTEHXXXHXXXXXXXXXXX

SEQ ID NO: 2399 - protein, 209 aa, Artificial Sequence
  source: /note="Description of Artificial Sequence: Synthetic polypeptide"
  MOD_RES (1)..(9): Any amino acid
  MOD_RES (11)..(12): Any amino acid
  MOD_RES (14)..(18): Any amino acid
  MOD_RES (27)..(29): Any amino acid
  MOD_RES (31)..(37): Any amino acid
  MOD_RES (39)..(40): Any amino acid
  MOD_RES (42)..(46): Any amino acid
  MOD_RES (55)..(57): Any amino acid
  MOD_RES (59)..(65): Any amino acid
  MOD_RES (67)..(68): Any amino acid
  MOD_RES (70)..(74): Any amino acid
  MOD_RES (83)..(85): Any amino acid
  MOD_RES (87)..(93): Any amino acid
  MOD_RES (95)..(96): Any amino acid
  MOD_RES (98)..(102): Any amino acid
  MOD_RES (111)..(113): Any amino acid
  MOD_RES (115)..(121): Any amino acid
  MOD_RES (123)..(124): Any amino acid
  MOD_RES (126)..(130): Any amino acid
  MOD_RES (139)..(141): Any amino acid
  MOD_RES (143)..(149): Any amino acid
  MOD_RES (151)..(152): Any amino acid
  MOD_RES (154)..(158): Any amino acid
  MOD_RES (167)..(169): Any amino acid
  MOD_RES (171)..(177): Any amino acid
  MOD_RES (179)..(180): Any amino acid
  MOD_RES (182)..(186): Any amino acid
  MOD_RES (195)..(197): Any amino acid
  MOD_RES (199)..(209): Any amino acid
XXXXXXXXXCXXCXXXXXQNSTLTEHXXXHXXXXXXXCXXCXXXXXDCRDLARHXXXHXXXXXXXCXXCXXXXXTKNSLTEHXXXHXXXXXXXCXXCXXXXXTSHSLTEHXXXHXXXXXXXCXXCXXXXXRSDKLTEHXXXHXXXXXXXCXXCXXXXXRNDTLTEHXXXHXXXXXXXCXXCXXXXXRTDTLRDHXXXHXXXXXXXXXXX

SEQ ID NO: 2400 - protein, 209 aa, Artificial Sequence
  source: /note="Description of Artificial Sequence: Synthetic polypeptide"
  MOD_RES (1)..(9): Any amino acid
  MOD_RES (11)..(12): Any amino acid
  MOD_RES (14)..(18): Any amino acid
  MOD_RES (27)..(29): Any amino acid
  MOD_RES (31)..(37): Any amino acid
  MOD_RES (39)..(40): Any amino acid
  MOD_RES (42)..(46): Any amino acid
  MOD_RES (55)..(57): Any amino acid
  MOD_RES (59)..(65): Any amino acid
  MOD_RES (67)..(68): Any amino acid
  MOD_RES (70)..(74): Any amino acid
  MOD_RES (83)..(85): Any amino acid
  MOD_RES (87)..(93): Any amino acid
  MOD_RES (95)..(96): Any amino acid
  MOD_RES (98)..(102): Any amino acid
  MOD_RES (111)..(113): Any amino acid
  MOD_RES (115)..(121): Any amino acid
  MOD_RES (123)..(124): Any amino acid
  MOD_RES (126)..(130): Any amino acid
  MOD_RES (139)..(141): Any amino acid
  MOD_RES (143)..(149): Any amino acid
  MOD_RES (151)..(152): Any amino acid
  MOD_RES (154)..(158): Any amino acid
  MOD_RES (167)..(169): Any amino acid
  MOD_RES (171)..(177): Any amino acid
  MOD_RES (179)..(180): Any amino acid
  MOD_RES (182)..(186): Any amino acid
  MOD_RES (195)..(197): Any amino acid
  MOD_RES (199)..(209): Any amino acid
XXXXXXXXXCXXCXXXXXSKKHLAEHXXXHXXXXXXXCXXCXXXXXQNSTLTEHXXXHXXXXXXXCXXCXXXXXDCRDLARHXXXHXXXXXXXCXXCXXXXXTKNSLTEHXXXHXXXXXXXCXXCXXXXXTSHSLTEHXXXHXXXXXXXCXXCXXXXXRSDKLTEHXXXHXXXXXXXCXXCXXXXXRNDTLTEHXXXHXXXXXXXXXXX

SEQ ID NO: 2401 - protein, 209 aa, Artificial Sequence
  source: /note="Description of Artificial Sequence: Synthetic polypeptide"
  MOD_RES (1)..(9): Any amino acid
  MOD_RES (11)..(12): Any amino acid
  MOD_RES (14)..(18): Any amino acid
  MOD_RES (27)..(29): Any amino acid
  MOD_RES (31)..(37): Any amino acid
  MOD_RES (39)..(40): Any amino acid
  MOD_RES (42)..(46): Any amino acid
  MOD_RES (55)..(57): Any amino acid
  MOD_RES (59)..(65): Any amino acid
  MOD_RES (67)..(68): Any amino acid
  MOD_RES (70)..(74): Any amino acid
  MOD_RES (83)..(85): Any amino acid
  MOD_RES (87)..(93): Any amino acid
  MOD_RES (95)..(96): Any amino acid
  MOD_RES (98)..(102): Any amino acid
  MOD_RES (111)..(113): Any amino acid
  MOD_RES (115)..(121): Any amino acid
  MOD_RES (123)..(124): Any amino acid
  MOD_RES (126)..(130): Any amino acid
  MOD_RES (139)..(141): Any amino acid
  MOD_RES (143)..(149): Any amino acid
  MOD_RES (151)..(152): Any amino acid
  MOD_RES (154)..(158): Any amino acid
  MOD_RES (167)..(169): Any amino acid
  MOD_RES (171)..(177): Any amino acid
  MOD_RES (179)..(180): Any amino acid
  MOD_RES (182)..(186): Any amino acid
  MOD_RES (195)..(197): Any amino acid
  MOD_RES (199)..(209): Any amino acid
XXXXXXXXXCXXCXXXXXRSDDLVRHXXXHXXXXXXXCXXCXXXXXRSDHLTTHXXXHXXXXXXXCXXCXXXXXSKKHLAEHXXXHXXXXXXXCXXCXXXXXQNSTLTEHXXXHXXXXXXXCXXCXXXXXDCRDLARHXXXHXXXXXXXCXXCXXXXXTKNSLTEHXXXHXXXXXXXCXXCXXXXXTSHSLTEHXXXHXXXXXXXXXXX

SEQ ID NO: 2402 - protein, 209 aa, Artificial Sequence
  source: /note="Description of Artificial Sequence: Synthetic polypeptide"
  MOD_RES (1)..(9): Any amino acid
  MOD_RES (11)..(12): Any amino acid
  MOD_RES (14)..(18): Any amino acid
  MOD_RES (27)..(29): Any amino acid
  MOD_RES (31)..(37): Any amino acid
  MOD_RES (39)..(40): Any amino acid
  MOD_RES (42)..(46): Any amino acid
  MOD_RES (55)..(57): Any amino acid
  MOD_RES (59)..(65): Any amino acid
  MOD_RES (67)..(68): Any amino acid
  MOD_RES (70)..(74): Any amino acid
  MOD_RES (83)..(85): Any amino acid
  MOD_RES (87)..(93): Any amino acid
  MOD_RES (95)..(96): Any amino acid
  MOD_RES (98)..(102): Any amino acid
  MOD_RES (111)..(113): Any amino acid
  MOD_RES (115)..(121): Any amino acid
  MOD_RES (123)..(124): Any amino acid
  MOD_RES (126)..(130): Any amino acid
  MOD_RES (139)..(141): Any amino acid
  MOD_RES (143)..(149): Any amino acid
  MOD_RES (151)..(152): Any amino acid
  MOD_RES (154)..(158): Any amino acid
  MOD_RES (167)..(169): Any amino acid
  MOD_RES (171)..(177): Any amino acid
  MOD_RES (179)..(180): Any amino acid
  MOD_RES (182)..(186): Any amino acid
  MOD_RES (195)..(197): Any amino acid
  MOD_RES (199)..(209): Any amino acid
XXXXXXXXXCXXCXXXXXSKKHLAEHXXXHXXXXXXXCXXCXXXXXRSDDLVRHXXXHXXXXXXXCXXCXXXXXRSDHLTTHXXXHXXXXXXXCXXCXXXXXSKKHLAEHXXXHXXXXXXXCXXCXXXXXQNSTLTEHXXXHXXXXXXXCXXCXXXXXDCRDLARHXXXHXXXXXXXCXXCXXXXXTKNSLTEHXXXHXXXXXXXXXXX

SEQ ID NO: 2403 - protein, 209 aa, Artificial Sequence
  source: /note="Description of Artificial Sequence: Synthetic polypeptide"
  MOD_RES (1)..(9): Any amino acid
  MOD_RES (11)..(12): Any amino acid
  MOD_RES (14)..(18): Any amino acid
  MOD_RES (27)..(29): Any amino acid
  MOD_RES (31)..(37): Any amino acid
  MOD_RES (39)..(40): Any amino acid
  MOD_RES (42)..(46): Any amino acid
  MOD_RES (55)..(57): Any amino acid
  MOD_RES (59)..(65): Any amino acid
  MOD_RES (67)..(68): Any amino acid
  MOD_RES (70)..(74): Any amino acid
  MOD_RES (83)..(85): Any amino acid
  MOD_RES (87)..(93): Any amino acid
  MOD_RES (95)..(96): Any amino acid
  MOD_RES (98)..(102): Any amino acid
  MOD_RES (111)..(113): Any amino acid
  MOD_RES (115)..(121): Any amino acid
  MOD_RES (123)..(124): Any amino acid
  MOD_RES (126)..(130): Any amino acid
  MOD_RES (139)..(141): Any amino acid
  MOD_RES (143)..(149): Any amino acid
  MOD_RES (151)..(152): Any amino acid
  MOD_RES (154)..(158): Any amino acid
  MOD_RES (167)..(169): Any amino acid
  MOD_RES (171)..(177): Any amino acid
  MOD_RES (179)..(180): Any amino acid
  MOD_RES (182)..(186): Any amino acid
  MOD_RES (195)..(197): Any amino acid
  MOD_RES (199)..(209): Any amino acid
XXXXXXXXXCXXCXXXXXDKKDLTRHXXXHXXXXXXXCXXCXXXXXSKKHLAEHXXXHXXXXXXXCXXCXXXXXRSDDLVRHXXXHXXXXXXXCXXCXXXXXRSDHLTTHXXXHXXXXXXXCXXCXXXXXSKKHLAEHXXXHXXXXXXXCXXCXXXXXQNSTLTEHXXXHXXXXXXXCXXCXXXXXDCRDLARHXXXHXXXXXXXXXXX

SEQ ID NO: 2404 - protein, 209 aa, Artificial Sequence
  source: /note="Description of Artificial Sequence: Synthetic polypeptide"
  MOD_RES (1)..(9): Any amino acid
  MOD_RES (11)..(12): Any amino acid
  MOD_RES (14)..(18): Any amino acid
  MOD_RES (27)..(29): Any amino acid
  MOD_RES (31)..(37): Any amino acid
  MOD_RES (39)..(40): Any amino acid
  MOD_RES (42)..(46): Any amino acid
  MOD_RES (55)..(57): Any amino acid
  MOD_RES (59)..(65): Any amino acid
  MOD_RES (67)..(68): Any amino acid
  MOD_RES (70)..(74): Any amino acid
  MOD_RES (83)..(85): Any amino acid
  MOD_RES (87)..(93): Any amino acid
  MOD_RES (95)..(96): Any amino acid
  MOD_RES (98)..(102): Any amino acid
  MOD_RES (111)..(113): Any amino acid
  MOD_RES (115)..(121): Any amino acid
  MOD_RES (123)..(124): Any amino acid
  MOD_RES (126)..(130): Any amino acid
  MOD_RES (139)..(141): Any amino acid
  MOD_RES (143)..(149): Any amino acid
  MOD_RES (151)..(152): Any amino acid
  MOD_RES (154)..(158): Any amino acid
  MOD_RES (167)..(169): Any amino acid
  MOD_RES (171)..(177): Any amino acid
  MOD_RES (179)..(180): Any amino acid
  MOD_RES (182)..(186): Any amino acid
  MOD_RES (195)..(197): Any amino acid
  MOD_RES (199)..(209): Any amino acid
XXXXXXXXXCXXCXXXXXRKDNLKNHXXXHXXXXXXXCXXCXXXXXRNDTLTEHXXXHXXXXXXXCXXCXXXXXDKKDLTRHXXXHXXXXXXXCXXCXXXXXSKKHLAEHXXXHXXXXXXXCXXCXXXXXRSDDLVRHXXXHXXXXXXXCXXCXXXXXRSDHLTTHXXXHXXXXXXXCXXCXXXXXSKKHLAEHXXXHXXXXXXXXXXX

SEQ ID NO: 2405 - protein, 209 aa, Artificial Sequence
  source: /note="Description of Artificial Sequence: Synthetic polypeptide"
  MOD_RES (1)..(9): Any amino acid
  MOD_RES (11)..(12): Any amino acid
  MOD_RES (14)..(18): Any amino acid
  MOD_RES (27)..(29): Any amino acid
  MOD_RES (31)..(37): Any amino acid
  MOD_RES (39)..(40): Any amino acid
  MOD_RES (42)..(46): Any amino acid
  MOD_RES (55)..(57): Any amino acid
  MOD_RES (59)..(65): Any amino acid
  MOD_RES (67)..(68): Any amino acid
  MOD_RES (70)..(74): Any amino acid
  MOD_RES (83)..(85): Any amino acid
  MOD_RES (87)..(93): Any amino acid
  MOD_RES (95)..(96): Any amino acid
  MOD_RES (98)..(102): Any amino acid
  MOD_RES (111)..(113): Any amino acid
  MOD_RES (115)..(121): Any amino acid
  MOD_RES (123)..(124): Any amino acid
  MOD_RES (126)..(130): Any amino acid
  MOD_RES (139)..(141): Any amino acid
  MOD_RES (143)..(149): Any amino acid
  MOD_RES (151)..(152): Any amino acid
  MOD_RES (154)..(158): Any amino acid
  MOD_RES (167)..(169): Any amino acid
  MOD_RES (171)..(177): Any amino acid
  MOD_RES (179)..(180): Any amino acid
  MOD_RES (182)..(186): Any amino acid
  MOD_RES (195)..(197): Any amino acid
  MOD_RES (199)..(209): Any amino acid
XXXXXXXXXCXXCXXXXXDCRDLARHXXXHXXXXXXXCXXCXXXXXRKDNLKNHXXXHXXXXXXXCXXCXXXXXRNDTLTEHXXXHXXXXXXXCXXCXXXXXDKKDLTRHXXXHXXXXXXXCXXCXXXXXSKKHLAEHXXXHXXXXXXXCXXCXXXXXRSDDLVRHXXXHXXXXXXXCXXCXXXXXRSDHLTTHXXXHXXXXXXXXXXX

SEQ ID NO: 2406 - protein, 209 aa, Artificial Sequence
  source: /note="Description of Artificial Sequence: Synthetic polypeptide"
  MOD_RES (1)..(9): Any amino acid
  MOD_RES (11)..(12): Any amino acid
  MOD_RES (14)..(18): Any amino acid
  MOD_RES (27)..(29): Any amino acid
  MOD_RES (31)..(37): Any amino acid
  MOD_RES (39)..(40): Any amino acid
  MOD_RES (42)..(46): Any amino acid
  MOD_RES (55)..(57): Any amino acid
  MOD_RES (59)..(65): Any amino acid
  MOD_RES (67)..(68): Any amino acid
  MOD_RES (70)..(74): Any amino acid
  MOD_RES (83)..(85): Any amino acid
  MOD_RES (87)..(93): Any amino acid
  MOD_RES (95)..(96): Any amino acid
  MOD_RES (98)..(102): Any amino acid
  MOD_RES (111)..(113): Any amino acid
  MOD_RES (115)..(121): Any amino acid
  MOD_RES (123)..(124): Any amino acid
  MOD_RES (126)..(130): Any amino acid
  MOD_RES (139)..(141): Any amino acid
  MOD_RES (143)..(149): Any amino acid
  MOD_RES (151)..(152): Any amino acid
  MOD_RES (154)..(158): Any amino acid
  MOD_RES (167)..(169): Any amino acid
  MOD_RES (171)..(177): Any amino acid
  MOD_RES (179)..(180): Any amino acid
  MOD_RES (182)..(186): Any amino acid
  MOD_RES (195)..(197): Any amino acid
  MOD_RES (199)..(209): Any amino acid
XXXXXXXXXCXXCXXXXXRNDTLTEHXXXHXXXXXXXCXXCXXXXXDKKDLTRHXXXHXXXXXXXCXXCXXXXXSKKHLAEHXXXHXXXXXXXCXXCXXXXXRSDDLVRHXXXHXXXXXXXCXXCXXXXXRSDHLTTHXXXHXXXXXXXCXXCXXXXXSKKHLAEHXXXHXXXXXXXCXXCXXXXXQNSTLTEHXXXHXXXXXXXXXXX

SEQ ID NO: 2407 - protein, 209 aa, Artificial Sequence
  source: /note="Description of Artificial Sequence: Synthetic polypeptide"
  MOD_RES (1)..(9): Any amino acid
  MOD_RES (11)..(12): Any amino acid
  MOD_RES (14)..(18): Any amino acid
  MOD_RES (27)..(29): Any amino acid
  MOD_RES (31)..(37): Any amino acid
  MOD_RES (39)..(40): Any amino acid
  MOD_RES (42)..(46): Any amino acid
  MOD_RES (55)..(57): Any amino acid
  MOD_RES (59)..(65): Any amino acid
  MOD_RES (67)..(68): Any amino acid
  MOD_RES (70)..(74): Any amino acid
  MOD_RES (83)..(85): Any amino acid
  MOD_RES (87)..(93): Any amino acid
  MOD_RES (95)..(96): Any amino acid
  MOD_RES (98)..(102): Any amino acid
  MOD_RES (111)..(113): Any amino acid
  MOD_RES (115)..(121): Any amino acid
  MOD_RES (123)..(124): Any amino acid
  MOD_RES (126)..(130): Any amino acid
  MOD_RES (139)..(141): Any amino acid
  MOD_RES (143)..(149): Any amino acid
  MOD_RES (151)..(152): Any amino acid
  MOD_RES (154)..(158): Any amino acid
  MOD_RES (167)..(169): Any amino acid
  MOD_RES (171)..(177): Any amino acid
  MOD_RES (179)..(180): Any amino acid
  MOD_RES (182)..(186): Any amino acid
  MOD_RES (195)..(197): Any amino acid
  MOD_RES (199)..(209): Any amino acid
XXXXXXXXXCXXCXXXXXDCRDLARHXXXHXXXXXXXCXXCXXXXXSKKHLAEHXXXHXXXXXXXCXXCXXXXXDCRDLARHXXXHXXXXXXXCXXCXXXXXRKDNLKNHXXXHXXXXXXXCXXCXXXXXRNDTLTEHXXXHXXXXXXXCXXCXXXXXDKKDLTRHXXXHXXXXXXXCXXCXXXXXSKKHLAEHXXXHXXXXXXXXXXX

SEQ ID NO: 2408 - protein, 209 aa, Artificial Sequence
  source: /note="Description of Artificial Sequence: Synthetic polypeptide"
  MOD_RES (1)..(9): Any amino acid
  MOD_RES (11)..(12): Any amino acid
  MOD_RES (14)..(18): Any amino acid
  MOD_RES (27)..(29): Any amino acid
  MOD_RES (31)..(37): Any amino acid
  MOD_RES (39)..(40): Any amino acid
  MOD_RES (42)..(46): Any amino acid
  MOD_RES (55)..(57): Any amino acid
  MOD_RES (59)..(65): Any amino acid
  MOD_RES (67)..(68): Any amino acid
  MOD_RES (70)..(74): Any amino acid
  MOD_RES (83)..(85): Any amino acid
  MOD_RES (87)..(93): Any amino acid
  MOD_RES (95)..(96): Any amino acid
  MOD_RES (98)..(102): Any amino acid
  MOD_RES (111)..(113): Any amino acid
  MOD_RES (115)..(121): Any amino acid
  MOD_RES (123)..(124): Any amino acid
  MOD_RES (126)..(130): Any amino acid
  MOD_RES (139)..(141): Any amino acid
  MOD_RES (143)..(149): Any amino acid
  MOD_RES (151)..(152): Any amino acid
  MOD_RES (154)..(158): Any amino acid
  MOD_RES (167)..(169): Any amino acid
  MOD_RES (171)..(177): Any amino acid
  MOD_RES (179)..(180): Any amino acid
  MOD_RES (182)..(186): Any amino acid
  MOD_RES (195)..(197): Any amino acid
  MOD_RES (199)..(209): Any amino acid
XXXXXXXXXCXXCXXXXXSKKHLAEHXXXHXXXXXXXCXXCXXXXXDCRDLARHXXXHXXXXXXXCXXCXXXXXRKDNLKNHXXXHXXXXXXXCXXCXXXXXRNDTLTEHXXXHXXXXXXXCXXCXXXXXDKKDLTRHXXXHXXXXXXXCXXCXXXXXSKKHLAEHXXXHXXXXXXXCXXCXXXXXRSDDLVRHXXXHXXXXXXXXXXX

SEQ ID NO: 2409 - protein, 209 aa, Artificial Sequence
  source: /note="Description of Artificial Sequence: Synthetic polypeptide"
  MOD_RES (1)..(9): Any amino acid
  MOD_RES (11)..(12): Any amino acid
  MOD_RES (14)..(18): Any amino acid
  MOD_RES (27)..(29): Any amino acid
  MOD_RES (31)..(37): Any amino acid
  MOD_RES (39)..(40): Any amino acid
  MOD_RES (42)..(46): Any amino acid
  MOD_RES (55)..(57): Any amino acid
  MOD_RES (59)..(65): Any amino acid
  MOD_RES (67)..(68): Any amino acid
  MOD_RES (70)..(74): Any amino acid
  MOD_RES (83)..(85): Any amino acid
  MOD_RES (87)..(93): Any amino acid
  MOD_RES (95)..(96): Any amino acid
  MOD_RES (98)..(102): Any amino acid
  MOD_RES (111)..(113): Any amino acid
  MOD_RES (115)..(121): Any amino acid
  MOD_RES (123)..(124): Any amino acid
  MOD_RES (126)..(130): Any amino acid
  MOD_RES (139)..(141): Any amino acid
  MOD_RES (143)..(149): Any amino acid
  MOD_RES (151)..(152): Any amino acid
  MOD_RES (154)..(158): Any amino acid
  MOD_RES (167)..(169): Any amino acid
  MOD_RES (171)..(177): Any amino acid
  MOD_RES (179)..(180): Any amino acid
  MOD_RES (182)..(186): Any amino acid
  MOD_RES (195)..(197): Any amino acid
  MOD_RES (199)..(209): Any amino acid
XXXXXXXXXCXXCXXXXXSKKHLAEHXXXHXXXXXXXCXXCXXXXXSKKALTEHXXXHXXXXXXXCXXCXXXXXDCRDLARHXXXHXXXXXXXCXXCXXXXXDPGHLVRHXXXHXXXXXXXCXXCXXXXXRNDALTEHXXXHXXXXXXXCXXCXXXXXDKKDLTRHXXXHXXXXXXXCXXCXXXXXTKNSLTEHXXXHXXXXXXXXXXX

SEQ ID NO: 2410 - protein, 209 aa, Artificial Sequence
  source: /note="Description of Artificial Sequence: Synthetic polypeptide"
  MOD_RES (1)..(9): Any amino acid
  MOD_RES (11)..(12): Any amino acid
  MOD_RES (14)..(18): Any amino acid
  MOD_RES (27)..(29): Any amino acid
  MOD_RES (31)..(37): Any amino acid
  MOD_RES (39)..(40): Any amino acid
  MOD_RES (42)..(46): Any amino acid
  MOD_RES (55)..(57): Any amino acid
  MOD_RES (59)..(65): Any amino acid
  MOD_RES (67)..(68): Any amino acid
  MOD_RES (70)..(74): Any amino acid
  MOD_RES (83)..(85): Any amino acid
  MOD_RES (87)..(93): Any amino acid
  MOD_RES (95)..(96): Any amino acid
  MOD_RES (98)..(102): Any amino acid
  MOD_RES (111)..(113): Any amino acid
  MOD_RES (115)..(121): Any amino acid
  MOD_RES (123)..(124): Any amino acid
  MOD_RES (126)..(130): Any amino acid
  MOD_RES (139)..(141): Any amino acid
  MOD_RES (143)..(149): Any amino acid
  MOD_RES (151)..(152): Any amino acid
  MOD_RES (154)..(158): Any amino acid
  MOD_RES (167)..(169): Any amino acid
  MOD_RES (171)..(177): Any amino acid
  MOD_RES (179)..(180): Any amino acid
  MOD_RES (182)..(186): Any amino acid
  MOD_RES (195)..(197): Any amino acid
  MOD_RES (199)..(209): Any amino acid
XXXXXXXXXCXXCXXXXXDPGHLVRHXXXHXXXXXXXCXXCXXXXXQSSNLVRHXXXHXXXXXXXCXXCXXXXXSKKHLAEHXXXHXXXXXXXCXXCXXXXXSKKALTEHXXXHXXXXXXXCXXCXXXXXDCRDLARHXXXHXXXXXXXCXXCXXXXXDPGHLVRHXXXHXXXXXXXCXXCXXXXXRNDALTEHXXXHXXXXXXXXXXX

SEQ ID NO: 2411 - protein, 209 aa, Artificial Sequence
  source: /note="Description of Artificial Sequence: Synthetic polypeptide"
  MOD_RES (1)..(9): Any amino acid
  MOD_RES (11)..(12): Any amino acid
  MOD_RES (14)..(18): Any amino acid
  MOD_RES (27)..(29): Any amino acid
  MOD_RES (31)..(37): Any amino acid
  MOD_RES (39)..(40): Any amino acid
  MOD_RES (42)..(46): Any amino acid
  MOD_RES (55)..(57): Any amino acid
  MOD_RES (59)..(65): Any amino acid
  MOD_RES (67)..(68): Any amino acid
  MOD_RES (70)..(74): Any amino acid
  MOD_RES (83)..(85): Any amino acid
  MOD_RES (87)..(93): Any amino acid
  MOD_RES (95)..(96): Any amino acid
  MOD_RES (98)..(102): Any amino acid
  MOD_RES (111)..(113): Any amino acid
  MOD_RES (115)..(121): Any amino acid
  MOD_RES (123)..(124): Any amino acid
  MOD_RES (126)..(130): Any amino acid
  MOD_RES (139)..(141): Any amino acid
  MOD_RES (143)..(149): Any amino acid
  MOD_RES (151)..(152): Any amino acid
  MOD_RES (154)..(158): Any amino acid
  MOD_RES (167)..(169): Any amino acid
  MOD_RES (171)..(177): Any amino acid
  MOD_RES (179)..(180): Any amino acid
  MOD_RES (182)..(186): Any amino acid
  MOD_RES (195)..(197): Any amino acid
  MOD_RES (199)..(209): Any amino acid
XXXXXXXXXCXXCXXXXXSKKHLAEHXXXHXXXXXXXCXXCXXXXXDPGHLVRHXXXHXXXXXXXCXXCXXXXXQSSNLVRHXXXHXXXXXXXCXXCXXXXXSKKHLAEHXXXHXXXXXXXCXXCXXXXXSKKALTEHXXXHXXXXXXXCXXCXXXXXDCRDLARHXXXHXXXXXXXCXXCXXXXXDPGHLVRHXXXHXXXXXXXXXXX

SEQ ID NO: 2412 - protein, 209 aa, Artificial Sequence
  source: /note="Description of Artificial Sequence: Synthetic polypeptide"
  MOD_RES (1)..(9): Any amino acid
  MOD_RES (11)..(12): Any amino acid
  MOD_RES (14)..(18): Any amino acid
  MOD_RES (27)..(29): Any amino acid
  MOD_RES (31)..(37): Any amino acid
  MOD_RES (39)..(40): Any amino acid
  MOD_RES (42)..(46): Any amino acid
  MOD_RES (55)..(57): Any amino acid
  MOD_RES (59)..(65): Any amino acid
  MOD_RES (67)..(68): Any amino acid
  MOD_RES (70)..(74): Any amino acid
  MOD_RES (83)..(85): Any amino acid
  MOD_RES (87)..(93): Any amino acid
  MOD_RES (95)..(96): Any amino acid
  MOD_RES (98)..(102): Any amino acid
  MOD_RES (111)..(113): Any amino acid
  MOD_RES (115)..(121): Any amino acid
  MOD_RES (123)..(124): Any amino acid
  MOD_RES (126)..(130): Any amino acid
  MOD_RES (139)..(141): Any amino acid
  MOD_RES (143)..(149): Any amino acid
  MOD_RES (151)..(152): Any amino acid
  MOD_RES (154)..(158): Any amino acid
  MOD_RES (167)..(169): Any amino acid
  MOD_RES (171)..(177): Any amino acid
  MOD_RES (179)..(180): Any amino acid
  MOD_RES (182)..(186): Any amino acid
  MOD_RES (195)..(197): Any amino acid
  MOD_RES (199)..(209): Any amino acid
XXXXXXXXXCXXCXXXXXTKNSLTEHXXXHXXXXXXXCXXCXXXXXHTGHLLEHXXXHXXXXXXXCXXCXXXXXSKKHLAEHXXXHXXXXXXXCXXCXXXXXDPGHLVRHXXXHXXXXXXXCXXCXXXXXQSSNLVRHXXXHXXXXXXXCXXCXXXXXSKKHLAEHXXXHXXXXXXXCXXCXXXXXSKKALTEHXXXHXXXXXXXXXXX

SEQ ID NO: 2413 - protein, 209 aa, Artificial Sequence
  source: /note="Description of Artificial Sequence: Synthetic polypeptide"
  MOD_RES (1)..(9): Any amino acid
  MOD_RES (11)..(12): Any amino acid
  MOD_RES (14)..(18): Any amino acid
  MOD_RES (27)..(29): Any amino acid
  MOD_RES (31)..(37): Any amino acid
  MOD_RES (39)..(40): Any amino acid
  MOD_RES (42)..(46): Any amino acid
  MOD_RES (55)..(57): Any amino acid
  MOD_RES (59)..(65): Any amino acid
  MOD_RES (67)..(68): Any amino acid
  MOD_RES (70)..(74): Any amino acid
  MOD_RES (83)..(85): Any amino acid
  MOD_RES (87)..(93): Any amino acid
  MOD_RES (95)..(96): Any amino acid
  MOD_RES (98)..(102): Any amino acid
  MOD_RES (111)..(113): Any amino acid
  MOD_RES (115)..(121): Any amino acid
  MOD_RES (123)..(124): Any amino acid
  MOD_RES (126)..(130): Any amino acid
  MOD_RES (139)..(141): Any amino acid
  MOD_RES (143)..(149): Any amino acid
  MOD_RES (151)..(152): Any amino acid
  MOD_RES (154)..(158): Any amino acid
  MOD_RES (167)..(169): Any amino acid
  MOD_RES (171)..(177): Any amino acid
  MOD_RES (179)..(180): Any amino acid
  MOD_RES (182)..(186): Any amino acid
  MOD_RES (195)..(197): Any amino acid
  MOD_RES (199)..(209): Any amino acid
XXXXXXXXXCXXCXXXXXHTGHLLEHXXXHXXXXXXXCXXCXXXXXSKKHLAEHXXXHXXXXXXXCXXCXXXXXDPGHLVRHXXXHXXXXXXXCXXCXXXXXQSSNLVRHXXXHXXXXXXXCXXCXXXXXSKKHLAEHXXXHXXXXXXXCXXCXXXXXSKKALTEHXXXHXXXXXXXCXXCXXXXXDCRDLARHXXXHXXXXXXXXXXX

SEQ ID NO: 2414 - protein, 209 aa, Artificial Sequence
  source: /note="Description of Artificial Sequence: Synthetic polypeptide"
  MOD_RES (1)..(9): Any amino acid
  MOD_RES (11)..(12): Any amino acid
  MOD_RES (14)..(18): Any amino acid
  MOD_RES (27)..(29): Any amino acid
  MOD_RES (31)..(37): Any amino acid
  MOD_RES (39)..(40): Any amino acid
  MOD_RES (42)..(46): Any amino acid
  MOD_RES (55)..(57): Any amino acid
  MOD_RES (59)..(65): Any amino acid
  MOD_RES (67)..(68): Any amino acid
  MOD_RES (70)..(74): Any amino acid
  MOD_RES (83)..(85): Any amino acid
  MOD_RES (87)..(93): Any amino acid
  MOD_RES (95)..(96): Any amino acid
  MOD_RES (98)..(102): Any amino acid
  MOD_RES (111)..(113): Any amino acid
  MOD_RES (115)..(121): Any amino acid
  MOD_RES (123)..(124): Any amino acid
  MOD_RES (126)..(130): Any amino acid
  MOD_RES (139)..(141): Any amino acid
  MOD_RES (143)..(149): Any amino acid
  MOD_RES (151)..(152): Any amino acid
  MOD_RES (154)..(158): Any amino acid
  MOD_RES (167)..(169): Any amino acid
  MOD_RES (171)..(177): Any amino acid
  MOD_RES (179)..(180): Any amino acid
  MOD_RES (182)..(186): Any amino acid
  MOD_RES (195)..(197): Any amino acid
  MOD_RES (199)..(209): Any amino acid
XXXXXXXXXCXXCXXXXXRNDTLTEHXXXHXXXXXXXCXXCXXXXXTKNSLTEHXXXHXXXXXXXCXXCXXXXXHTGHLLEHXXXHXXXXXXXCXXCXXXXXSKKHLAEHXXXHXXXXXXXCXXCXXXXXDPGHLVRHXXXHXXXXXXXCXXCXXXXXQSSNLVRHXXXHXXXXXXXCXXCXXXXXSKKHLAEHXXXHXXXXXXXXXXX

SEQ ID NO: 2415 - protein, 209 aa, Artificial Sequence
  source: /note="Description of Artificial Sequence: Synthetic polypeptide"
  MOD_RES (1)..(9): Any amino acid
  MOD_RES (11)..(12): Any amino acid
  MOD_RES (14)..(18): Any amino acid
  MOD_RES (27)..(29): Any amino acid
  MOD_RES (31)..(37): Any amino acid
  MOD_RES (39)..(40): Any amino acid
  MOD_RES (42)..(46): Any amino acid
  MOD_RES (55)..(57): Any amino acid
  MOD_RES (59)..(65): Any amino acid
  MOD_RES (67)..(68): Any amino acid
  MOD_RES (70)..(74): Any amino acid
  MOD_RES (83)..(85): Any amino acid
  MOD_RES (87)..(93): Any amino acid
  MOD_RES (95)..(96): Any amino acid
  MOD_RES (98)..(102): Any amino acid
  MOD_RES (111)..(113): Any amino acid
  MOD_RES (115)..(121): Any amino acid
  MOD_RES (123)..(124): Any amino acid
  MOD_RES (126)..(130): Any amino acid
  MOD_RES (139)..(141): Any amino acid
  MOD_RES (143)..(149): Any amino acid
  MOD_RES (151)..(152): Any amino acid
  MOD_RES (154)..(158): Any amino acid
  MOD_RES (167)..(169): Any amino acid
  MOD_RES (171)..(177): Any amino acid
  MOD_RES (179)..(180): Any amino acid
  MOD_RES (182)..(186): Any amino acid
  MOD_RES (195)..(197): Any amino acid
  MOD_RES (199)..(209): Any amino acid
XXXXXXXXXCXXCXXXXXSKKHLAEHXXXHXXXXXXXCXXCXXXXXRNDTLTEHXXXHXXXXXXXCXXCXXXXXTKNSLTEHXXXHXXXXXXXCXXCXXXXXHTGHLLEHXXXHXXXXXXXCXXCXXXXXSKKHLAEHXXXHXXXXXXXCXXCXXXXXDPGHLVRHXXXHXXXXXXXCXXCXXXXXQSSNLVRHXXXHXXXXXXXXXXX

SEQ ID NO: 2416 - protein, 209 aa, Artificial Sequence
  source: /note="Description of Artificial Sequence: Synthetic polypeptide"
  MOD_RES (1)..(9): Any amino acid
  MOD_RES (11)..(12): Any amino acid
  MOD_RES (14)..(18): Any amino acid
  MOD_RES (27)..(29): Any amino acid
  MOD_RES (31)..(37): Any amino acid
  MOD_RES (39)..(40): Any amino acid
  MOD_RES (42)..(46): Any amino acid
  MOD_RES (55)..(57): Any amino acid
  MOD_RES (59)..(65): Any amino acid
  MOD_RES (67)..(68): Any amino acid
  MOD_RES (70)..(74): Any amino acid
  MOD_RES (83)..(85): Any amino acid
  MOD_RES (87)..(93): Any amino acid
  MOD_RES (95)..(96): Any amino acid
  MOD_RES (98)..(102): Any amino acid
  MOD_RES (111)..(113): Any amino acid
  MOD_RES (115)..(121): Any amino acid
  MOD_RES (123)..(124): Any amino acid
  MOD_RES (126)..(130): Any amino acid
  MOD_RES (139)..(141): Any amino acid
  MOD_RES (143)..(149): Any amino acid
  MOD_RES (151)..(152): Any amino acid
  MOD_RES (154)..(158): Any amino acid
  MOD_RES (167)..(169): Any amino acid
  MOD_RES (171)..(177): Any amino acid
  MOD_RES (179)..(180): Any amino acid
  MOD_RES (182)..(186): Any amino acid
  MOD_RES (195)..(197): Any amino acid
  MOD_RES (199)..(209): Any amino acid
XXXXXXXXXCXXCXXXXXRSDHLTNHXXXHXXXXXXXCXXCXXXXXQSGHLTEHXXXHXXXXXXXCXXCXXXXXSKKHLAEHXXXHXXXXXXXCXXCXXXXXTSHSLTEHXXXHXXXXXXXCXXCXXXXXHTGHLLEHXXXHXXXXXXXCXXCXXXXXRSDKLVRHXXXHXXXXXXXCXXCXXXXXTKNSLTEHXXXHXXXXXXXXXXX

SEQ ID NO: 2417 - protein, 209 aa, Artificial Sequence
  source: /note="Description of Artificial Sequence: Synthetic polypeptide"
  MOD_RES (1)..(9): Any amino acid
  MOD_RES (11)..(12): Any amino acid
  MOD_RES (14)..(18): Any amino acid
  MOD_RES (27)..(29): Any amino acid
  MOD_RES (31)..(37): Any amino acid
  MOD_RES (39)..(40): Any amino acid
  MOD_RES (42)..(46): Any amino acid
  MOD_RES (55)..(57): Any amino acid
  MOD_RES (59)..(65): Any amino acid
  MOD_RES (67)..(68): Any amino acid
  MOD_RES (70)..(74): Any amino acid
  MOD_RES (83)..(85): Any amino acid
  MOD_RES (87)..(93): Any amino acid
  MOD_RES (95)..(96): Any amino acid
  MOD_RES (98)..(102): Any amino acid
  MOD_RES (111)..(113): Any amino acid
  MOD_RES (115)..(121): Any amino acid
  MOD_RES (123)..(124): Any amino acid
  MOD_RES (126)..(130): Any amino acid
  MOD_RES (139)..(141): Any amino acid
  MOD_RES (143)..(149): Any amino acid
  MOD_RES (151)..(152): Any amino acid
  MOD_RES (154)..(158): Any amino acid
  MOD_RES (167)..(169): Any amino acid
  MOD_RES (171)..(177): Any amino acid
  MOD_RES (179)..(180): Any amino acid
  MOD_RES (182)..(186): Any amino acid
  MOD_RES (195)..(197): Any amino acid
  MOD_RES (199)..(209): Any amino acid
XXXXXXXXXCXXCXXXXXSKKHLAEHXXXHXXXXXXXCXXCXXXXXRSDHLTNHXXXHXXXXXXXCXXCXXXXXQSGHLTEHXXXHXXXXXXXCXXCXXXXXSKKHLAEHXXXHXXXXXXXCXXCXXXXXTSHSLTEHXXXHXXXXXXXCXXCXXXXXHTGHLLEHXXXHXXXXXXXCXXCXXXXXRSDKLVRHXXXHXXXXXXXXXXX

SEQ ID NO: 2418 - protein, 209 aa, Artificial Sequence
  source: /note="Description of Artificial Sequence: Synthetic polypeptide"
  MOD_RES (1)..(9): Any amino acid
  MOD_RES (11)..(12): Any amino acid
  MOD_RES (14)..(18): Any amino acid
  MOD_RES (27)..(29): Any amino acid
  MOD_RES (31)..(37): Any amino acid
  MOD_RES (39)..(40): Any amino acid
  MOD_RES (42)..(46): Any amino acid
  MOD_RES (55)..(57): Any amino acid
  MOD_RES (59)..(65): Any amino acid
  MOD_RES (67)..(68): Any amino acid
  MOD_RES (70)..(74): Any amino acid
  MOD_RES (83)..(85): Any amino acid
  MOD_RES (87)..(93): Any amino acid
  MOD_RES (95)..(96): Any amino acid
  MOD_RES (98)..(102): Any amino acid
  MOD_RES (111)..(113): Any amino acid
  MOD_RES (115)..(121): Any amino acid
  MOD_RES (123)..(124): Any amino acid
  MOD_RES (126)..(130): Any amino acid
  MOD_RES (139)..(141): Any amino acid
  MOD_RES (143)..(149): Any amino acid
  MOD_RES (151)..(152): Any amino acid
  MOD_RES (154)..(158): Any amino acid
  MOD_RES (167)..(169): Any amino acid
  MOD_RES (171)..(177): Any amino acid
  MOD_RES (179)..(180): Any amino acid
  MOD_RES (182)..(186): Any amino acid
  MOD_RES (195)..(197): Any amino acid
  MOD_RES (199)..(209): Any amino acid
XXXXXXXXXCXXCXXXXXRNDTLTEHXXXHXXXXXXXCXXCXXXXXSKKHLAEHXXXHXXXXXXXCXXCXXXXXRSDHLTNHXXXHXXXXXXXCXXCXXXXXQSGHLTEHXXXHXXXXXXXCXXCXXXXXSKKHLAEHXXXHXXXXXXXCXXCXXXXXTSHSLTEHXXXHXXXXXXXCXXCXXXXXHTGHLLEHXXXHXXXXXXXXXXX

SEQ ID NO: 2419 - protein, 209 aa, Artificial Sequence
  source: /note="Description of Artificial Sequence: Synthetic polypeptide"
  MOD_RES (1)..(9): Any amino acid
  MOD_RES (11)..(12): Any amino acid
  MOD_RES (14)..(18): Any amino acid
  MOD_RES (27)..(29): Any amino acid
  MOD_RES (31)..(37): Any amino acid
  MOD_RES (39)..(40): Any amino acid
  MOD_RES (42)..(46): Any amino acid
  MOD_RES (55)..(57): Any amino acid
  MOD_RES (59)..(65): Any amino acid
  MOD_RES (67)..(68): Any amino acid
  MOD_RES (70)..(74): Any amino acid
  MOD_RES (83)..(85): Any amino acid
  MOD_RES (87)..(93): Any amino acid
  MOD_RES (95)..(96): Any amino acid
  MOD_RES (98)..(102): Any amino acid
  MOD_RES (111)..(113): Any amino acid
  MOD_RES (115)..(121): Any amino acid
  MOD_RES (123)..(124): Any amino acid
  MOD_RES (126)..(130): Any amino acid
  MOD_RES (139)..(141): Any amino acid
  MOD_RES (143)..(149): Any amino acid
  MOD_RES (151)..(152): Any amino acid
  MOD_RES (154)..(158): Any amino acid
  MOD_RES (167)..(169): Any amino acid
  MOD_RES (171)..(177): Any amino acid
  MOD_RES (179)..(180): Any amino acid
  MOD_RES (182)..(186): Any amino acid
  MOD_RES (195)..(197): Any amino acid
  MOD_RES (199)..(209): Any amino acid
XXXXXXXXXCXXCXXXXXSKKHLAEHXXXHXXXXXXXCXXCXXXXXRNDTLTEHXXXHXXXXXXXCXXCXXXXXSKKHLAEHXXXHXXXXXXXCXXCXXXXXRSDHLTNHXXXHXXXXXXXCXXCXXXXXQSGHLTEHXXXHXXXXXXXCXXCXXXXXSKKHLAEHXXXHXXXXXXXCXXCXXXXXTSHSLTEHXXXHXXXXXXXXXXX

SEQ ID NO: 2420 - protein, 209 aa, Artificial Sequence
  source: /note="Description of Artificial Sequence: Synthetic polypeptide"
  MOD_RES (1)..(9): Any amino acid
  MOD_RES (11)..(12): Any amino acid
  MOD_RES (14)..(18): Any amino acid
  MOD_RES (27)..(29): Any amino acid
  MOD_RES (31)..(37): Any amino acid
  MOD_RES (39)..(40): Any amino acid
  MOD_RES (42)..(46): Any amino acid
  MOD_RES (55)..(57): Any amino acid
  MOD_RES (59)..(65): Any amino acid
  MOD_RES (67)..(68): Any amino acid
  MOD_RES (70)..(74): Any amino acid
  MOD_RES (83)..(85): Any amino acid
  MOD_RES (87)..(93): Any amino acid
  MOD_RES (95)..(96): Any amino acid
  MOD_RES (98)..(102): Any amino acid
  MOD_RES (111)..(113): Any amino acid
  MOD_RES (115)..(121): Any amino acid
  MOD_RES (123)..(124): Any amino acid
  MOD_RES (126)..(130): Any amino acid
  MOD_RES (139)..(141): Any amino acid
  MOD_RES (143)..(149): Any amino acid
  MOD_RES (151)..(152): Any amino acid
  MOD_RES (154)..(158): Any amino acid
  MOD_RES (167)..(169): Any amino acid
  MOD_RES (171)..(177): Any amino acid
  MOD_RES (179)..(180): Any amino acid
  MOD_RES (182)..(186): Any amino acid
  MOD_RES (195)..(197): Any amino acid
  MOD_RES (199)..(209): Any amino acid
XXXXXXXXXCXXCXXXXXDCRDLARHXXXHXXXXXXXCXXCXXXXXHRTTLTNHXXXHXXXXXXXCXXCXXXXXSKKHLAEHXXXHXXXXXXXCXXCXXXXXTKNSLTEHXXXHXXXXXXXCXXCXXXXXTKNSLTEHXXXHXXXXXXXCXXCXXXXXRNDALTEHXXXHXXXXXXXCXXCXXXXXTSHSLTEHXXXHXXXXXXXXXXX

SEQ ID NO: 2421 - protein, 209 aa, Artificial Sequence
  source: /note="Description of Artificial Sequence: Synthetic polypeptide"
  MOD_RES (1)..(9): Any amino acid
  MOD_RES (11)..(12): Any amino acid
  MOD_RES (14)..(18): Any amino acid
  MOD_RES (27)..(29): Any amino acid
  MOD_RES (31)..(37): Any amino acid
  MOD_RES (39)..(40): Any amino acid
  MOD_RES (42)..(46): Any amino acid
  MOD_RES (55)..(57): Any amino acid
  MOD_RES (59)..(65): Any amino acid
  MOD_RES (67)..(68): Any amino acid
  MOD_RES (70)..(74): Any amino acid
  MOD_RES (83)..(85): Any amino acid
  MOD_RES (87)..(93): Any amino acid
  MOD_RES (95)..(96): Any amino acid
  MOD_RES (98)..(102): Any amino acid
  MOD_RES (111)..(113): Any amino acid
  MOD_RES (115)..(121): Any amino acid
  MOD_RES (123)..(124): Any amino acid
  MOD_RES (126)..(130): Any amino acid
  MOD_RES (139)..(141): Any amino acid
  MOD_RES (143)..(149): Any amino acid
  MOD_RES (151)..(152): Any amino acid
  MOD_RES (154)..(158): Any amino acid
  MOD_RES (167)..(169): Any amino acid
  MOD_RES (171)..(177): Any amino acid
  MOD_RES (179)..(180): Any amino acid
  MOD_RES (182)..(186): Any amino acid
  MOD_RES (195)..(197): Any amino acid
  MOD_RES (199)..(209): Any amino acid
XXXXXXXXXCXXCXXXXXDPGALVRHXXXHXXXXXXXCXXCXXXXXQRAHLERHXXXHXXXXXXXCXXCXXXXXRNDALTEHXXXHXXXXXXXCXXCXXXXXRNDALTEHXXXHXXXXXXXCXXCXXXXXTSGNLVRHXXXHXXXXXXXCXXCXXXXXQSSNLVRHXXXHXXXXXXXCXXCXXXXXRSDHLTTHXXXHXXXXXXXXXXX

SEQ ID NO: 2422 - protein, 209 aa, Artificial Sequence
  source: /note="Description of Artificial Sequence: Synthetic polypeptide"
  MOD_RES (1)..(9): Any amino acid
  MOD_RES (11)..(12): Any amino acid
  MOD_RES (14)..(18): Any amino acid
  MOD_RES (27)..(29): Any amino acid
  MOD_RES (31)..(37): Any amino acid
  MOD_RES (39)..(40): Any amino acid
  MOD_RES (42)..(46): Any amino acid
  MOD_RES (55)..(57): Any amino acid
  MOD_RES (59)..(65): Any amino acid
  MOD_RES (67)..(68): Any amino acid
  MOD_RES (70)..(74): Any amino acid
  MOD_RES (83)..(85): Any amino acid
  MOD_RES (87)..(93): Any amino acid
  MOD_RES (95)..(96): Any amino acid
  MOD_RES (98)..(102): Any amino acid
  MOD_RES (111)..(113): Any amino acid
  MOD_RES (115)..(121): Any amino acid
  MOD_RES (123)..(124): Any amino acid
  MOD_RES (126)..(130): Any amino acid
  MOD_RES (139)..(141): Any amino acid
  MOD_RES (143)..(149): Any amino acid
  MOD_RES (151)..(152): Any amino acid
  MOD_RES (154)..(158): Any amino acid
  MOD_RES (167)..(169): Any amino acid
  MOD_RES (171)..(177): Any amino acid
  MOD_RES (179)..(180): Any amino acid
  MOD_RES (182)..(186): Any amino acid
  MOD_RES (195)..(197): Any amino acid
  MOD_RES (199)..(209): Any amino acid
XXXXXXXXXCXXCXXXXXDCRDLARHXXXHXXXXXXXCXXCXXXXXQNSTLTEHXXXHXXXXXXXCXXCXXXXXDPGHLVRHXXXHXXXXXXXCXXCXXXXXTTGALTEHXXXHXXXXXXXCXXCXXXXXHRTTLTNHXXXHXXXXXXXCXXCXXXXXRSDKLVRHXXXHXXXXXXXCXXCXXXXXTSGELVRHXXXHXXXXXXXXXXX

SEQ ID NO: 2423 - protein, 209 aa, Artificial Sequence
  source: /note="Description of Artificial Sequence: Synthetic polypeptide"
  MOD_RES (1)..(9): Any amino acid
  MOD_RES (11)..(12): Any amino acid
  MOD_RES (14)..(18): Any amino acid
  MOD_RES (27)..(29): Any amino acid
  MOD_RES (31)..(37): Any amino acid
  MOD_RES (39)..(40): Any amino acid
  MOD_RES (42)..(46): Any amino acid
  MOD_RES (55)..(57): Any amino acid
  MOD_RES (59)..(65): Any amino acid
  MOD_RES (67)..(68): Any amino acid
  MOD_RES (70)..(74): Any amino acid
  MOD_RES (83)..(85): Any amino acid
  MOD_RES (87)..(93): Any amino acid
  MOD_RES (95)..(96): Any amino acid
  MOD_RES (98)..(102): Any amino acid
  MOD_RES (111)..(113): Any amino acid
  MOD_RES (115)..(121): Any amino acid
  MOD_RES (123)..(124): Any amino acid
  MOD_RES (126)..(130): Any amino acid
  MOD_RES (139)..(141): Any amino acid
  MOD_RES (143)..(149): Any amino acid
  MOD_RES (151)..(152): Any amino acid
  MOD_RES (154)..(158): Any amino acid
  MOD_RES (167)..(169): Any amino acid
  MOD_RES (171)..(177): Any amino acid
  MOD_RES (179)..(180): Any amino acid
  MOD_RES (182)..(186): Any amino acid
  MOD_RES (195)..(197): Any amino acid
  MOD_RES (199)..(209): Any amino acid
XXXXXXXXXCXXCXXXXXTSGHLVRHXXXHXXXXXXXCXXCXXXXXRSDHLTNHXXXHXXXXXXXCXXCXXXXXQAGHLASHXXXHXXXXXXXCXXCXXXXXRNDALTEHXXXHXXXXXXXCXXCXXXXXTKNSLTEHXXXHXXXXXXXCXXCXXXXXREDNLHTHXXXHXXXXXXXCXXCXXXXXDCRDLARHXXXHXXXXXXXXXXX

SEQ ID NO: 2424 - protein, 209 aa, Artificial Sequence
  source: /note="Description of Artificial Sequence: Synthetic polypeptide"
  MOD_RES (1)..(9): Any amino acid
  MOD_RES (11)..(12): Any amino acid
  MOD_RES (14)..(18): Any amino acid
  MOD_RES (27)..(29): Any amino acid
  MOD_RES (31)..(37): Any amino acid
  MOD_RES (39)..(40): Any amino acid
  MOD_RES (42)..(46): Any amino acid
  MOD_RES (55)..(57): Any amino acid
  MOD_RES (59)..(65): Any amino acid
  MOD_RES (67)..(68): Any amino acid
  MOD_RES (70)..(74): Any amino acid
  MOD_RES (83)..(85): Any amino acid
  MOD_RES (87)..(93): Any amino acid
  MOD_RES (95)..(96): Any amino acid
  MOD_RES (98)..(102): Any amino acid
  MOD_RES (111)..(113): Any amino acid
  MOD_RES (115)..(121): Any amino acid
  MOD_RES (123)..(124): Any amino acid
  MOD_RES (126)..(130): Any amino acid
  MOD_RES (139)..(141): Any amino acid
  MOD_RES (143)..(149): Any amino acid
  MOD_RES (151)..(152): Any amino acid
  MOD_RES (154)..(158): Any amino acid
  MOD_RES (167)..(169): Any amino acid
  MOD_RES (171)..(177): Any amino acid
  MOD_RES (179)..(180): Any amino acid
  MOD_RES (182)..(186): Any amino acid
  MOD_RES (195)..(197): Any amino acid
  MOD_RES (199)..(209): Any amino acid
XXXXXXXXXCXXCXXXXXQRAHLERHXXXHXXXXXXXCXXCXXXXXTSGHLVRHXXXHXXXXXXXCXXCXXXXXRSDHLTNHXXXHXXXXXXXCXXCXXXXXQAGHLASHXXXHXXXXXXXCXXCXXXXXRNDALTEHXXXHXXXXXXXCXXCXXXXXTKNSLTEHXXXHXXXXXXXCXXCXXXXXREDNLHTHXXXHXXXXXXXXXXX

SEQ ID NO: 2425 - protein, 209 aa, Artificial Sequence
  source: /note="Description of Artificial Sequence: Synthetic polypeptide"
  MOD_RES (1)..(9): Any amino acid
  MOD_RES (11)..(12): Any amino acid
  MOD_RES (14)..(18): Any amino acid
  MOD_RES (27)..(29): Any amino acid
  MOD_RES (31)..(37): Any amino acid
  MOD_RES (39)..(40): Any amino acid
  MOD_RES (42)..(46): Any amino acid
  MOD_RES (55)..(57): Any amino acid
  MOD_RES (59)..(65): Any amino acid
  MOD_RES (67)..(68): Any amino acid
  MOD_RES (70)..(74): Any amino acid
  MOD_RES (83)..(85): Any amino acid
  MOD_RES (87)..(93): Any amino acid
  MOD_RES (95)..(96): Any amino acid
  MOD_RES (98)..(102): Any amino acid
  MOD_RES (111)..(113): Any amino acid
  MOD_RES (115)..(121): Any amino acid
  MOD_RES (123)..(124): Any amino acid
  MOD_RES (126)..(130): Any amino acid
  MOD_RES (139)..(141): Any amino acid
  MOD_RES (143)..(149): Any amino acid
  MOD_RES (151)..(152): Any amino acid
  MOD_RES (154)..(158): Any amino acid
  MOD_RES (167)..(169): Any amino acid
  MOD_RES (171)..(177): Any amino acid
  MOD_RES (179)..(180): Any amino acid
  MOD_RES (182)..(186): Any amino acid
  MOD_RES (195)..(197): Any amino acid
  MOD_RES (199)..(209): Any amino acid
XXXXXXXXXCXXCXXXXXDPGHLVRHXXXHXXXXXXXCXXCXXXXXQRAHLERHXXXHXXXXXXXCXXCXXXXXTSGHLVRHXXXHXXXXXXXCXXCXXXXXRSDHLTNHXXXHXXXXXXXCXXCXXXXXQAGHLASHXXXHXXXXXXXCXXCXXXXXRNDALTEHXXXHXXXXXXXCXXCXXXXXTKNSLTEHXXXHXXXXXXXXXXX

SEQ ID NO: 2426 - protein, 209 aa, Artificial Sequence
  source: /note="Description of Artificial Sequence: Synthetic polypeptide"
  MOD_RES (1)..(9): Any amino acid
  MOD_RES (11)..(12): Any amino acid
  MOD_RES (14)..(18): Any amino acid
  MOD_RES (27)..(29): Any amino acid
  MOD_RES (31)..(37): Any amino acid
  MOD_RES (39)..(40): Any amino acid
  MOD_RES (42)..(46): Any amino acid
  MOD_RES (55)..(57): Any amino acid
  MOD_RES (59)..(65): Any amino acid
  MOD_RES (67)..(68): Any amino acid
  MOD_RES (70)..(74): Any amino acid
  MOD_RES (83)..(85): Any amino acid
  MOD_RES (87)..(93): Any amino acid
  MOD_RES (95)..(96): Any amino acid
  MOD_RES (98)..(102): Any amino acid
  MOD_RES (111)..(113): Any amino acid
  MOD_RES (115)..(121): Any amino acid
  MOD_RES (123)..(124): Any amino acid
  MOD_RES (126)..(130): Any amino acid
  MOD_RES (139)..(141): Any amino acid
  MOD_RES (143)..(149): Any amino acid
  MOD_RES (151)..(152): Any amino acid
  MOD_RES (154)..(158): Any amino acid
  MOD_RES (167)..(169): Any amino acid
  MOD_RES (171)..(177): Any amino acid
  MOD_RES (179)..(180): Any amino acid
  MOD_RES (182)..(186): Any amino acid
  MOD_RES (195)..(197): Any amino acid
  MOD_RES (199)..(209): Any amino acid
XXXXXXXXXCXXCXXXXXRSDKLVRHXXXHXXXXXXXCXXCXXXXXRNDTLTEHXXXHXXXXXXXCXXCXXXXXRNDALTEHXXXHXXXXXXXCXXCXXXXXTSGELVRHXXXHXXXXXXXCXXCXXXXXRSDNLVRHXXXHXXXXXXXCXXCXXXXXRSDELVRHXXXHXXXXXXXCXXCXXXXXRSDKLVRHXXXHXXXXXXXXXXX

SEQ ID NO: 2427 - protein, 209 aa, Artificial Sequence
  source: /note="Description of Artificial Sequence: Synthetic polypeptide"
  MOD_RES (1)..(9): Any amino acid
  MOD_RES (11)..(12): Any amino acid
  MOD_RES (14)..(18): Any amino acid
  MOD_RES (27)..(29): Any amino acid
  MOD_RES (31)..(37): Any amino acid
  MOD_RES (39)..(40): Any amino acid
  MOD_RES (42)..(46): Any amino acid
  MOD_RES (55)..(57): Any amino acid
  MOD_RES (59)..(65): Any amino acid
  MOD_RES (67)..(68): Any amino acid
  MOD_RES (70)..(74): Any amino acid
  MOD_RES (83)..(85): Any amino acid
  MOD_RES (87)..(93): Any amino acid
  MOD_RES (95)..(96): Any amino acid
  MOD_RES (98)..(102): Any amino acid
  MOD_RES (111)..(113): Any amino acid
  MOD_RES (115)..(121): Any amino acid
  MOD_RES (123)..(124): Any amino acid
  MOD_RES (126)..(130): Any amino acid
  MOD_RES (139)..(141): Any amino acid
  MOD_RES (143)..(149): Any amino acid
  MOD_RES (151)..(152): Any amino acid
  MOD_RES (154)..(158): Any amino acid
  MOD_RES (167)..(169): Any amino acid
  MOD_RES (171)..(177): Any amino acid
  MOD_RES (179)..(180): Any amino acid
  MOD_RES (182)..(186): Any amino acid
  MOD_RES (195)..(197): Any amino acid
  MOD_RES (199)..(209): Any amino acid
XXXXXXXXXCXXCXXXXXRSDHLTNHXXXHXXXXXXXCXXCXXXXXRSDKLVRHXXXHXXXXXXXCXXCXXXXXRNDTLTEHXXXHXXXXXXXCXXCXXXXXRNDALTEHXXXHXXXXXXXCXXCXXXXXTSGELVRHXXXHXXXXXXXCXXCXXXXXRSDNLVRHXXXHXXXXXXXCXXCXXXXXRSDELVRHXXXHXXXXXXXXXXX

SEQ ID NO: 2428 - protein, 209 aa, Artificial Sequence
  source: /note="Description of Artificial Sequence: Synthetic polypeptide"
  MOD_RES (1)..(9): Any amino acid
  MOD_RES (11)..(12): Any amino acid
  MOD_RES (14)..(18): Any amino acid
  MOD_RES (27)..(29): Any amino acid
  MOD_RES (31)..(37): Any amino acid
  MOD_RES (39)..(40): Any amino acid
  MOD_RES (42)..(46): Any amino acid
  MOD_RES (55)..(57): Any amino acid
  MOD_RES (59)..(65): Any amino acid
  MOD_RES (67)..(68): Any amino acid
  MOD_RES (70)..(74): Any amino acid
  MOD_RES (83)..(85): Any amino acid
  MOD_RES (87)..(93): Any amino acid
  MOD_RES (95)..(96): Any amino acid
  MOD_RES (98)..(102): Any amino acid
  MOD_RES (111)..(113): Any amino acid
  MOD_RES (115)..(121): Any amino acid
  MOD_RES (123)..(124): Any amino acid
  MOD_RES (126)..(130): Any amino acid
  MOD_RES (139)..(141): Any amino acid
  MOD_RES (143)..(149): Any amino acid
  MOD_RES (151)..(152): Any amino acid
  MOD_RES (154)..(158): Any amino acid
  MOD_RES (167)..(169): Any amino acid
  MOD_RES (171)..(177): Any amino acid
  MOD_RES (179)..(180): Any amino acid
  MOD_RES (182)..(186): Any amino acid
  MOD_RES (195)..(197): Any amino acid
  MOD_RES (199)..(209): Any amino acid
XXXXXXXXXCXXCXXXXXTSGHLVRHXXXHXXXXXXXCXXCXXXXXRSDHLTNHXXXHXXXXXXXCXXCXXXXXRSDKLVRHXXXHXXXXXXXCXXCXXXXXRNDTLTEHXXXHXXXXXXXCXXCXXXXXRNDALTEHXXXHXXXXXXXCXXCXXXXXTSGELVRHXXXHXXXXXXXCXXCXXXXXRSDNLVRHXXXHXXXXXXXXXXX

SEQ ID NO: 2429 - protein, 209 aa, Artificial Sequence
  source: /note="Description of Artificial Sequence: Synthetic polypeptide"
  MOD_RES (1)..(9): Any amino acid
  MOD_RES (11)..(12): Any amino acid
  MOD_RES (14)..(18): Any amino acid
  MOD_RES (27)..(29): Any amino acid
  MOD_RES (31)..(37): Any amino acid
  MOD_RES (39)..(40): Any amino acid
  MOD_RES (42)..(46): Any amino acid
  MOD_RES (55)..(57): Any amino acid
  MOD_RES (59)..(65): Any amino acid
  MOD_RES (67)..(68): Any amino acid
  MOD_RES (70)..(74): Any amino acid
  MOD_RES (83)..(85): Any amino acid
  MOD_RES (87)..(93): Any amino acid
  MOD_RES (95)..(96): Any amino acid
  MOD_RES (98)..(102): Any amino acid
  MOD_RES (111)..(113): Any amino acid
  MOD_RES (115)..(121): Any amino acid
  MOD_RES (123)..(124): Any amino acid
  MOD_RES (126)..(130): Any amino acid
  MOD_RES (139)..(141): Any amino acid
  MOD_RES (143)..(149): Any amino acid
  MOD_RES (151)..(152): Any amino acid
  MOD_RES (154)..(158): Any amino acid
  MOD_RES (167)..(169): Any amino acid
  MOD_RES (171)..(177): Any amino acid
  MOD_RES (179)..(180): Any amino acid
  MOD_RES (182)..(186): Any amino acid
  MOD_RES (195)..(197): Any amino acid
  MOD_RES (199)..(209): Any amino acid
XXXXXXXXXCXXCXXXXXRSDKLVRHXXXHXXXXXXXCXXCXXXXXTSGHLVRHXXXHXXXXXXXCXXCXXXXXRSDHLTNHXXXHXXXXXXXCXXCXXXXXRSDKLVRHXXXHXXXXXXXCXXCXXXXXRNDTLTEHXXXHXXXXXXXCXXCXXXXXRNDALTEHXXXHXXXXXXXCXXCXXXXXTSGELVRHXXXHXXXXXXXXXXX

SEQ ID NO: 2430 - protein, 209 aa, Artificial Sequence
  source: /note="Description of Artificial Sequence: Synthetic polypeptide"
  MOD_RES (1)..(9): Any amino acid
  MOD_RES (11)..(12): Any amino acid
  MOD_RES (14)..(18): Any amino acid
  MOD_RES (27)..(29): Any amino acid
  MOD_RES (31)..(37): Any amino acid
  MOD_RES (39)..(40): Any amino acid
  MOD_RES (42)..(46): Any amino acid
  MOD_RES (55)..(57): Any amino acid
  MOD_RES (59)..(65): Any amino acid
  MOD_RES (67)..(68): Any amino acid
  MOD_RES (70)..(74): Any amino acid
  MOD_RES (83)..(85): Any amino acid
  MOD_RES (87)..(93): Any amino acid
  MOD_RES (95)..(96): Any amino acid
  MOD_RES (98)..(102): Any amino acid
  MOD_RES (111)..(113): Any amino acid
  MOD_RES (115)..(121): Any amino acid
  MOD_RES (123)..(124): Any amino acid
  MOD_RES (126)..(130): Any amino acid
  MOD_RES (139)..(141): Any amino acid
  MOD_RES (143)..(149): Any amino acid
  MOD_RES (151)..(152): Any amino acid
  MOD_RES (154)..(158): Any amino acid
  MOD_RES (167)..(169): Any amino acid
  MOD_RES (171)..(177): Any amino acid
  MOD_RES (179)..(180): Any amino acid
  MOD_RES (182)..(186): Any amino acid
  MOD_RES (195)..(197): Any amino acid
  MOD_RES (199)..(209): Any amino acid
XXXXXXXXXCXXCXXXXXTSGHLVRHXXXHXXXXXXXCXXCXXXXXRSDKLVRHXXXHXXXXXXXCXXCXXXXXTSGHLVRHXXXHXXXXXXXCXXCXXXXXRSDHLTNHXXXHXXXXXXXCXXCXXXXXRSDKLVRHXXXHXXXXXXXCXXCXXXXXRNDTLTEHXXXHXXXXXXXCXXCXXXXXRNDALTEHXXXHXXXXXXXXXXX

SEQ ID NO: 2431 - protein, 209 aa, Artificial Sequence
  source: /note="Description of Artificial Sequence: Synthetic polypeptide"
  MOD_RES (1)..(9): Any amino acid
  MOD_RES (11)..(12): Any amino acid
  MOD_RES (14)..(18): Any amino acid
  MOD_RES (27)..(29): Any amino acid
  MOD_RES (31)..(37): Any amino acid
  MOD_RES (39)..(40): Any amino acid
  MOD_RES (42)..(46): Any amino acid
  MOD_RES (55)..(57): Any amino acid
  MOD_RES (59)..(65): Any amino acid
  MOD_RES (67)..(68): Any amino acid
  MOD_RES (70)..(74): Any amino acid
  MOD_RES (83)..(85): Any amino acid
  MOD_RES (87)..(93): Any amino acid
  MOD_RES (95)..(96): Any amino acid
  MOD_RES (98)..(102): Any amino acid
  MOD_RES (111)..(113): Any amino acid
  MOD_RES (115)..(121): Any amino acid
  MOD_RES (123)..(124): Any amino acid
  MOD_RES (126)..(130): Any amino acid
  MOD_RES (139)..(141): Any amino acid
  MOD_RES (143)..(149): Any amino acid
  MOD_RES (151)..(152): Any amino acid
  MOD_RES (154)..(158): Any amino acid
  MOD_RES (167)..(169): Any amino acid
  MOD_RES (171)..(177): Any amino acid
  MOD_RES (179)..(180): Any amino acid
  MOD_RES (182)..(186): Any amino acid
  MOD_RES (195)..(197): Any amino acid
  MOD_RES (199)..(209): Any amino acid
XXXXXXXXXCXXCXXXXXTTGNLTVHXXXHXXXXXXXCXXCXXXXXTSGSLVRHXXXHXXXXXXXCXXCXXXXXRSDKLVRHXXXHXXXXXXXCXXCXXXXXRSDELVRHXXXHXXXXXXXCXXCXXXXXRSDKLVRHXXXHXXXXXXXCXXCXXXXXQRAHLERHXXXHXXXXXXXCXXCXXXXXRSDKLTEHXXXHXXXXXXXXXXX

SEQ ID NO: 2432 - protein, 209 aa, Artificial Sequence
  source: /note="Description of Artificial Sequence: Synthetic polypeptide"
  MOD_RES (1)..(9): Any amino acid
  MOD_RES (11)..(12): Any amino acid
  MOD_RES (14)..(18): Any amino acid
  MOD_RES (27)..(29): Any amino acid
  MOD_RES (31)..(37): Any amino acid
  MOD_RES (39)..(40): Any amino acid
  MOD_RES (42)..(46): Any amino acid
  MOD_RES (55)..(57): Any amino acid
  MOD_RES (59)..(65): Any amino acid
  MOD_RES (67)..(68): Any amino acid
  MOD_RES (70)..(74): Any amino acid
  MOD_RES (83)..(85): Any amino acid
  MOD_RES (87)..(93): Any amino acid
  MOD_RES (95)..(96): Any amino acid
  MOD_RES (98)..(102): Any amino acid
  MOD_RES (111)..(113): Any amino acid
  MOD_RES (115)..(121): Any amino acid
  MOD_RES (123)..(124): Any amino acid
  MOD_RES (126)..(130): Any amino acid
  MOD_RES (139)..(141): Any amino acid
  MOD_RES (143)..(149): Any amino acid
  MOD_RES (151)..(152): Any amino acid
  MOD_RES (154)..(158): Any amino acid
  MOD_RES (167)..(169): Any amino acid
  MOD_RES (171)..(177): Any amino acid
  MOD_RES (179)..(180): Any amino acid
  MOD_RES (182)..(186): Any amino acid
  MOD_RES (195)..(197): Any amino acid
  MOD_RES (199)..(209): Any amino acid
XXXXXXXXXCXXCXXXXXRSDHLTTHXXXHXXXXXXXCXXCXXXXXHKNALQNHXXXHXXXXXXXCXXCXXXXXRSDKLVRHXXXHXXXXXXXCXXCXXXXXQSGDLRRHXXXHXXXXXXXCXXCXXXXXTSGELVRHXXXHXXXXXXXCXXCXXXXXRSDKLVRHXXXHXXXXXXXCXXCXXXXXDPGHLVRHXXXHXXXXXXXXXXX

SEQ ID NO: 2433 - protein, 209 aa, Artificial Sequence
  source: /note="Description of Artificial Sequence: Synthetic polypeptide"
  MOD_RES (1)..(9): Any amino acid
  MOD_RES (11)..(12): Any amino acid
  MOD_RES (14)..(18): Any amino acid
  MOD_RES (27)..(29): Any amino acid
  MOD_RES (31)..(37): Any amino acid
  MOD_RES (39)..(40): Any amino acid
  MOD_RES (42)..(46): Any amino acid
  MOD_RES (55)..(57): Any amino acid
  MOD_RES (59)..(65): Any amino acid
  MOD_RES (67)..(68): Any amino acid
  MOD_RES (70)..(74): Any amino acid
  MOD_RES (83)..(85): Any amino acid
  MOD_RES (87)..(93): Any amino acid
  MOD_RES (95)..(96): Any amino acid
  MOD_RES (98)..(102): Any amino acid
  MOD_RES (111)..(113): Any amino acid
  MOD_RES (115)..(121): Any amino acid
  MOD_RES (123)..(124): Any amino acid
  MOD_RES (126)..(130): Any amino acid
  MOD_RES (139)..(141): Any amino acid
  MOD_RES (143)..(149): Any amino acid
  MOD_RES (151)..(152): Any amino acid
  MOD_RES (154)..(158): Any amino acid
  MOD_RES (167)..(169): Any amino acid
  MOD_RES (171)..(177): Any amino acid
  MOD_RES (179)..(180): Any amino acid
  MOD_RES (182)..(186): Any amino acid
  MOD_RES (195)..(197): Any amino acid
  MOD_RES (199)..(209): Any amino acid
XXXXXXXXXCXXCXXXXXHKNALQNHXXXHXXXXXXXCXXCXXXXXRSDKLVRHXXXHXXXXXXXCXXCXXXXXQSGDLRRHXXXHXXXXXXXCXXCXXXXXTSGELVRHXXXHXXXXXXXCXXCXXXXXRSDKLVRHXXXHXXXXXXXCXXCXXXXXDPGHLVRHXXXHXXXXXXXCXXCXXXXXRNDALTEHXXXHXXXXXXXXXXX

SEQ ID NO: 2434 - protein, 209 aa, Artificial Sequence
  source: /note="Description of Artificial Sequence: Synthetic polypeptide"
  MOD_RES (1)..(9): Any amino acid
  MOD_RES (11)..(12): Any amino acid
  MOD_RES (14)..(18): Any amino acid
  MOD_RES (27)..(29): Any amino acid
  MOD_RES (31)..(37): Any amino acid
  MOD_RES (39)..(40): Any amino acid
  MOD_RES (42)..(46): Any amino acid
  MOD_RES (55)..(57): Any amino acid
  MOD_RES (59)..(65): Any amino acid
  MOD_RES (67)..(68): Any amino acid
  MOD_RES (70)..(74): Any amino acid
  MOD_RES (83)..(85): Any amino acid
  MOD_RES (87)..(93): Any amino acid
  MOD_RES (95)..(96): Any amino acid
  MOD_RES (98)..(102): Any amino acid
  MOD_RES (111)..(113): Any amino acid
  MOD_RES (115)..(121): Any amino acid
  MOD_RES (123)..(124): Any amino acid
  MOD_RES (126)..(130): Any amino acid
  MOD_RES (139)..(141): Any amino acid
  MOD_RES (143)..(149): Any amino acid
  MOD_RES (151)..(152): Any amino acid
  MOD_RES (154)..(158): Any amino acid
  MOD_RES (167)..(169): Any amino acid
  MOD_RES (171)..(177): Any amino acid
  MOD_RES (179)..(180): Any amino acid
  MOD_RES (182)..(186): Any amino acid
  MOD_RES (195)..(197): Any amino acid
  MOD_RES (199)..(209): Any amino acid
XXXXXXXXXCXXCXXXXXRNDALTEHXXXHXXXXXXXCXXCXXXXXRSDHLTTHXXXHXXXXXXXCXXCXXXXXHKNALQNHXXXHXXXXXXXCXXCXXXXXRSDKLVRHXXXHXXXXXXXCXXCXXXXXQSGDLRRHXXXHXXXXXXXCXXCXXXXXTSGELVRHXXXHXXXXXXXCXXCXXXXXRSDKLVRHXXXHXXXXXXXXXXX

SEQ ID NO: 2435 - protein, 209 aa, Artificial Sequence
  source: /note="Description of Artificial Sequence: Synthetic polypeptide"
  MOD_RES (1)..(9): Any amino acid
  MOD_RES (11)..(12): Any amino acid
  MOD_RES (14)..(18): Any amino acid
  MOD_RES (27)..(29): Any amino acid
  MOD_RES (31)..(37): Any amino acid
  MOD_RES (39)..(40): Any amino acid
  MOD_RES (42)..(46): Any amino acid
  MOD_RES (55)..(57): Any amino acid
  MOD_RES (59)..(65): Any amino acid
  MOD_RES (67)..(68): Any amino acid
  MOD_RES (70)..(74): Any amino acid
  MOD_RES (83)..(85): Any amino acid
  MOD_RES (87)..(93): Any amino acid
  MOD_RES (95)..(96): Any amino acid
  MOD_RES (98)..(102): Any amino acid
  MOD_RES (111)..(113): Any amino acid
  MOD_RES (115)..(121): Any amino acid
  MOD_RES (123)..(124): Any amino acid
  MOD_RES (126)..(130): Any amino acid
  MOD_RES (139)..(141): Any amino acid
  MOD_RES (143)..(149): Any amino acid
  MOD_RES (151)..(152): Any amino acid
  MOD_RES (154)..(158): Any amino acid
  MOD_RES (167)..(169): Any amino acid
  MOD_RES (171)..(177): Any amino acid
  MOD_RES (179)..(180): Any amino acid
  MOD_RES (182)..(186): Any amino acid
  MOD_RES (195)..(197): Any amino acid
  MOD_RES (199)..(209): Any amino acid
XXXXXXXXXCXXCXXXXXTSGELVRHXXXHXXXXXXXCXXCXXXXXRSDKLVRHXXXHXXXXXXXCXXCXXXXXDPGHLVRHXXXHXXXXXXXCXXCXXXXXRNDALTEHXXXHXXXXXXXCXXCXXXXXRSDHLTNHXXXHXXXXXXXCXXCXXXXXTSGNLVRHXXXHXXXXXXXCXXCXXXXXRSDELVRHXXXHXXXXXXXXXXX

SEQ ID NO: 2436 - protein, 209 aa, Artificial Sequence
  source: /note="Description of Artificial Sequence: Synthetic polypeptide"
  MOD_RES (1)..(9): Any amino acid
  MOD_RES (11)..(12): Any amino acid
  MOD_RES (14)..(18): Any amino acid
  MOD_RES (27)..(29): Any amino acid
  MOD_RES (31)..(37): Any amino acid
  MOD_RES (39)..(40): Any amino acid
  MOD_RES (42)..(46): Any amino acid
  MOD_RES (55)..(57): Any amino acid
  MOD_RES (59)..(65): Any amino acid
  MOD_RES (67)..(68): Any amino acid
  MOD_RES (70)..(74): Any amino acid
  MOD_RES (83)..(85): Any amino acid
  MOD_RES (87)..(93): Any amino acid
  MOD_RES (95)..(96): Any amino acid
  MOD_RES (98)..(102): Any amino acid
  MOD_RES (111)..(113): Any amino acid
  MOD_RES (115)..(121): Any amino acid
  MOD_RES (123)..(124): Any amino acid
  MOD_RES (126)..(130): Any amino acid
  MOD_RES (139)..(141): Any amino acid
  MOD_RES (143)..(149): Any amino acid
  MOD_RES (151)..(152): Any amino acid
  MOD_RES (154)..(158): Any amino acid
  MOD_RES (167)..(169): Any amino acid
  MOD_RES (171)..(177): Any amino acid
  MOD_RES (179)..(180): Any amino acid
  MOD_RES (182)..(186): Any amino acid
  MOD_RES (195)..(197): Any amino acid
  MOD_RES (199)..(209): Any amino acid
XXXXXXXXXCXXCXXXXXQSGDLRRHXXXHXXXXXXXCXXCXXXXXTSGELVRHXXXHXXXXXXXCXXCXXXXXRSDKLVRHXXXHXXXXXXXCXXCXXXXXDPGHLVRHXXXHXXXXXXXCXXCXXXXXRNDALTEHXXXHXXXXXXXCXXCXXXXXRSDHLTNHXXXHXXXXXXXCXXCXXXXXTSGNLVRHXXXHXXXXXXXXXXX

SEQ ID NO: 2437 - protein, 209 aa, Artificial Sequence
  source: /note="Description of Artificial Sequence: Synthetic polypeptide"
  MOD_RES (1)..(9): Any amino acid
  MOD_RES (11)..(12): Any amino acid
  MOD_RES (14)..(18): Any amino acid
  MOD_RES (27)..(29): Any amino acid
  MOD_RES (31)..(37): Any amino acid
  MOD_RES (39)..(40): Any amino acid
  MOD_RES (42)..(46): Any amino acid
  MOD_RES (55)..(57): Any amino acid
  MOD_RES (59)..(65): Any amino acid
  MOD_RES (67)..(68): Any amino acid
  MOD_RES (70)..(74): Any amino acid
  MOD_RES (83)..(85): Any amino acid
  MOD_RES (87)..(93): Any amino acid
  MOD_RES (95)..(96): Any amino acid
  MOD_RES (98)..(102): Any amino acid
  MOD_RES (111)..(113): Any amino acid
  MOD_RES (115)..(121): Any amino acid
  MOD_RES (123)..(124): Any amino acid
  MOD_RES (126)..(130): Any amino acid
  MOD_RES (139)..(141): Any amino acid
  MOD_RES (143)..(149): Any amino acid
  MOD_RES (151)..(152): Any amino acid
  MOD_RES (154)..(158): Any amino acid
  MOD_RES (167)..(169): Any amino acid
  MOD_RES (171)..(177): Any amino acid
  MOD_RES (179)..(180): Any amino acid
  MOD_RES (182)..(186): Any amino acid
  MOD_RES (195)..(197): Any amino acid
  MOD_RES (199)..(209): Any amino acid
XXXXXXXXXCXXCXXXXXRSDKLVRHXXXHXXXXXXXCXXCXXXXXDPGHLVRHXXXHXXXXXXXCXXCXXXXXRNDALTEHXXXHXXXXXXXCXXCXXXXXRSDHLTNHXXXHXXXXXXXCXXCXXXXXTSGNLVRHXXXHXXXXXXXCXXCXXXXXRSDELVRHXXXHXXXXXXXCXXCXXXXXRNDTLTEHXXXHXXXXXXXXXXX

SEQ ID NO: 2438 - protein, 209 aa, Artificial Sequence
  source: /note="Description of Artificial Sequence: Synthetic polypeptide"
  MOD_RES (1)..(9): Any amino acid
  MOD_RES (11)..(12): Any amino acid
  MOD_RES (14)..(18): Any amino acid
  MOD_RES (27)..(29): Any amino acid
  MOD_RES (31)..(37): Any amino acid
  MOD_RES (39)..(40): Any amino acid
  MOD_RES (42)..(46): Any amino acid
  MOD_RES (55)..(57): Any amino acid
  MOD_RES (59)..(65): Any amino acid
  MOD_RES (67)..(68): Any amino acid
  MOD_RES (70)..(74): Any amino acid
  MOD_RES (83)..(85): Any amino acid
  MOD_RES (87)..(93): Any amino acid
  MOD_RES (95)..(96): Any amino acid
  MOD_RES (98)..(102): Any amino acid
  MOD_RES (111)..(113): Any amino acid
  MOD_RES (115)..(121): Any amino acid
  MOD_RES (123)..(124): Any amino acid
  MOD_RES (126)..(130): Any amino acid
  MOD_RES (139)..(141): Any amino acid
  MOD_RES (143)..(149): Any amino acid
  MOD_RES (151)..(152): Any amino acid
  MOD_RES (154)..(158): Any amino acid
  MOD_RES (167)..(169): Any amino acid
  MOD_RES (171)..(177): Any amino acid
  MOD_RES (179)..(180): Any amino acid
  MOD_RES (182)..(186): Any amino acid
  MOD_RES (195)..(197): Any amino acid
  MOD_RES (199)..(209): Any amino acid
XXXXXXXXXCXXCXXXXXDPGHLVRHXXXHXXXXXXXCXXCXXXXXRNDALTEHXXXHXXXXXXXCXXCXXXXXRSDHLTNHXXXHXXXXXXXCXXCXXXXXTSGNLVRHXXXHXXXXXXXCXXCXXXXXRSDELVRHXXXHXXXXXXXCXXCXXXXXRNDTLTEHXXXHXXXXXXXCXXCXXXXXRNDTLTEHXXXHXXXXXXXXXXX

SEQ ID NO: 2439 - protein, 209 aa, Artificial Sequence
  source: /note="Description of Artificial Sequence: Synthetic polypeptide"
  MOD_RES (1)..(9): Any amino acid
  MOD_RES (11)..(12): Any amino acid
  MOD_RES (14)..(18): Any amino acid
  MOD_RES (27)..(29): Any amino acid
  MOD_RES (31)..(37): Any amino acid
  MOD_RES (39)..(40): Any amino acid
  MOD_RES (42)..(46): Any amino acid
  MOD_RES (55)..(57): Any amino acid
  MOD_RES (59)..(65): Any amino acid
  MOD_RES (67)..(68): Any amino acid
  MOD_RES (70)..(74): Any amino acid
  MOD_RES (83)..(85): Any amino acid
  MOD_RES (87)..(93): Any amino acid
  MOD_RES (95)..(96): Any amino acid
  MOD_RES (98)..(102): Any amino acid
  MOD_RES (111)..(113): Any amino acid
  MOD_RES (115)..(121): Any amino acid
  MOD_RES (123)..(124): Any amino acid
  MOD_RES (126)..(130): Any amino acid
  MOD_RES (139)..(141): Any amino acid
  MOD_RES (143)..(149): Any amino acid
  MOD_RES (151)..(152): Any amino acid
  MOD_RES (154)..(158): Any amino acid
  MOD_RES (167)..(169): Any amino acid
  MOD_RES (171)..(177): Any amino acid
  MOD_RES (179)..(180): Any amino acid
  MOD_RES (182)..(186): Any amino acid
  MOD_RES (195)..(197): Any amino acid
  MOD_RES (199)..(209): Any amino acid
XXXXXXXXXCXXCXXXXXRNDALTEHXXXHXXXXXXXCXXCXXXXXRSDHLTNHXXXHXXXXXXXCXXCXXXXXTSGNLVRHXXXHXXXXXXXCXXCXXXXXRSDELVRHXXXHXXXXXXXCXXCXXXXXRNDTLTEHXXXHXXXXXXXCXXCXXXXXRNDTLTEHXXXHXXXXXXXCXXCXXXXXSKKHLAEHXXXHXXXXXXXXXXX

SEQ ID NO: 2440 - protein, 209 aa, Artificial Sequence
  source: /note="Description of Artificial Sequence: Synthetic polypeptide"
  MOD_RES (1)..(9): Any amino acid
  MOD_RES (11)..(12): Any amino acid
  MOD_RES (14)..(18): Any amino acid
  MOD_RES (27)..(29): Any amino acid
  MOD_RES (31)..(37): Any amino acid
  MOD_RES (39)..(40): Any amino acid
  MOD_RES (42)..(46): Any amino acid
  MOD_RES (55)..(57): Any amino acid
  MOD_RES (59)..(65): Any amino acid
  MOD_RES (67)..(68): Any amino acid
  MOD_RES (70)..(74): Any amino acid
  MOD_RES (83)..(85): Any amino acid
  MOD_RES (87)..(93): Any amino acid
  MOD_RES (95)..(96): Any amino acid
  MOD_RES (98)..(102): Any amino acid
  MOD_RES (111)..(113): Any amino acid
  MOD_RES (115)..(121): Any amino acid
  MOD_RES (123)..(124): Any amino acid
  MOD_RES (126)..(130): Any amino acid
  MOD_RES (139)..(141): Any amino acid
  MOD_RES (143)..(149): Any amino acid
  MOD_RES (151)..(152): Any amino acid
  MOD_RES (154)..(158): Any amino acid
  MOD_RES (167)..(169): Any amino acid
  MOD_RES (171)..(177): Any amino acid
  MOD_RES (179)..(180): Any amino acid
  MOD_RES (182)..(186): Any amino acid
  MOD_RES (195)..(197): Any amino acid
  MOD_RES (199)..(209): Any amino acid
XXXXXXXXXCXXCXXXXXRSDHLTNHXXXHXXXXXXXCXXCXXXXXTSGNLVRHXXXHXXXXXXXCXXCXXXXXRSDELVRHXXXHXXXXXXXCXXCXXXXXRNDTLTEHXXXHXXXXXXXCXXCXXXXXRNDTLTEHXXXHXXXXXXXCXXCXXXXXSKKHLAEHXXXHXXXXXXXCXXCXXXXXTSGHLVRHXXXHXXXXXXXXXXX

SEQ ID NO: 2441 - protein, 209 aa, Artificial Sequence
  source: /note="Description of Artificial Sequence: Synthetic polypeptide"
  MOD_RES (1)..(9): Any amino acid
  MOD_RES (11)..(12): Any amino acid
  MOD_RES (14)..(18): Any amino acid
  MOD_RES (27)..(29): Any amino acid
  MOD_RES (31)..(37): Any amino acid
  MOD_RES (39)..(40): Any amino acid
  MOD_RES (42)..(46): Any amino acid
  MOD_RES (55)..(57): Any amino acid
  MOD_RES (59)..(65): Any amino acid
  MOD_RES (67)..(68): Any amino acid
  MOD_RES (70)..(74): Any amino acid
  MOD_RES (83)..(85): Any amino acid
  MOD_RES (87)..(93): Any amino acid
  MOD_RES (95)..(96): Any amino acid
  MOD_RES (98)..(102): Any amino acid
  MOD_RES (111)..(113): Any amino acid
  MOD_RES (115)..(121): Any amino acid
  MOD_RES (123)..(124): Any amino acid
  MOD_RES (126)..(130): Any amino acid
  MOD_RES (139)..(141): Any amino acid
  MOD_RES (143)..(149): Any amino acid
  MOD_RES (151)..(152): Any amino acid
  MOD_RES (154)..(158): Any amino acid
  MOD_RES (167)..(169): Any amino acid
  MOD_RES (171)..(177): Any amino acid
  MOD_RES (179)..(180): Any amino acid
  MOD_RES (182)..(186): Any amino acid
  MOD_RES (195)..(197): Any amino acid
  MOD_RES (199)..(209): Any amino acid
XXXXXXXXXCXXCXXXXXRADNLTEHXXXHXXXXXXXCXXCXXXXXRNDALTEHXXXHXXXXXXXCXXCXXXXXRSDKLVRHXXXHXXXXXXXCXXCXXXXXRSDDLVRHXXXHXXXXXXXCXXCXXXXXRSDHLTTHXXXHXXXXXXXCXXCXXXXXDPGHLVRHXXXHXXXXXXXCXXCXXXXXQKSSLIAHXXXHXXXXXXXXXXX

SEQ ID NO: 2442 - protein, 209 aa, Artificial Sequence
  source: /note="Description of Artificial Sequence: Synthetic polypeptide"
  MOD_RES (1)..(9): Any amino acid
  MOD_RES (11)..(12): Any amino acid
  MOD_RES (14)..(18): Any amino acid
  MOD_RES (27)..(29): Any amino acid
  MOD_RES (31)..(37): Any amino acid
  MOD_RES (39)..(40): Any amino acid
  MOD_RES (42)..(46): Any amino acid
  MOD_RES (55)..(57): Any amino acid
  MOD_RES (59)..(65): Any amino acid
  MOD_RES (67)..(68): Any amino acid
  MOD_RES (70)..(74): Any amino acid
  MOD_RES (83)..(85): Any amino acid
  MOD_RES (87)..(93): Any amino acid
  MOD_RES (95)..(96): Any amino acid
  MOD_RES (98)..(102): Any amino acid
  MOD_RES (111)..(113): Any amino acid
  MOD_RES (115)..(121): Any amino acid
  MOD_RES (123)..(124): Any amino acid
  MOD_RES (126)..(130): Any amino acid
  MOD_RES (139)..(141): Any amino acid
  MOD_RES (143)..(149): Any amino acid
  MOD_RES (151)..(152): Any amino acid
  MOD_RES (154)..(158): Any amino acid
  MOD_RES (167)..(169): Any amino acid
  MOD_RES (171)..(177): Any amino acid
  MOD_RES (179)..(180): Any amino acid
  MOD_RES (182)..(186): Any amino acid
  MOD_RES (195)..(197): Any amino acid
  MOD_RES (199)..(209): Any amino acid
XXXXXXXXXCXXCXXXXXRSDKLVRHXXXHXXXXXXXCXXCXXXXXRSDDLVRHXXXHXXXXXXXCXXCXXXXXRSDHLTTHXXXHXXXXXXXCXXCXXXXXDPGHLVRHXXXHXXXXXXXCXXCXXXXXQKSSLIAHXXXHXXXXXXXCXXCXXXXXRSDHLTTHXXXHXXXXXXXCXXCXXXXXRSDKLTEHXXXHXXXXXXXXXXX

SEQ ID NO: 2443 - protein, 209 aa, Artificial Sequence
  source: /note="Description of Artificial Sequence: Synthetic polypeptide"
  MOD_RES (1)..(9): Any amino acid
  MOD_RES (11)..(12): Any amino acid
  MOD_RES (14)..(18): Any amino acid
  MOD_RES (27)..(29): Any amino acid
  MOD_RES (31)..(37): Any amino acid
  MOD_RES (39)..(40): Any amino acid
  MOD_RES (42)..(46): Any amino acid
  MOD_RES (55)..(57): Any amino acid
  MOD_RES (59)..(65): Any amino acid
  MOD_RES (67)..(68): Any amino acid
  MOD_RES (70)..(74): Any amino acid
  MOD_RES (83)..(85): Any amino acid
  MOD_RES (87)..(93): Any amino acid
  MOD_RES (95)..(96): Any amino acid
  MOD_RES (98)..(102): Any amino acid
  MOD_RES (111)..(113): Any amino acid
  MOD_RES (115)..(121): Any amino acid
  MOD_RES (123)..(124): Any amino acid
  MOD_RES (126)..(130): Any amino acid
  MOD_RES (139)..(141): Any amino acid
  MOD_RES (143)..(149): Any amino acid
  MOD_RES (151)..(152): Any amino acid
  MOD_RES (154)..(158): Any amino acid
  MOD_RES (167)..(169): Any amino acid
  MOD_RES (171)..(177): Any amino acid
  MOD_RES (179)..(180): Any amino acid
  MOD_RES (182)..(186): Any amino acid
  MOD_RES (195)..(197): Any amino acid
  MOD_RES (199)..(209): Any amino acid
XXXXXXXXXCXXCXXXXXRNDALTEHXXXHXXXXXXXCXXCXXXXXRSDKLVRHXXXHXXXXXXXCXXCXXXXXRSDDLVRHXXXHXXXXXXXCXXCXXXXXRSDHLTTHXXXHXXXXXXXCXXCXXXXXDPGHLVRHXXXHXXXXXXXCXXCXXXXXQKSSLIAHXXXHXXXXXXXCXXCXXXXXRSDHLTTHXXXHXXXXXXXXXXX

SEQ ID NO: 2444 - protein, 209 aa, Artificial Sequence
  source: /note="Description of Artificial Sequence: Synthetic polypeptide"
  MOD_RES (1)..(9): Any amino acid
  MOD_RES (11)..(12): Any amino acid
  MOD_RES (14)..(18): Any amino acid
  MOD_RES (27)..(29): Any amino acid
  MOD_RES (31)..(37): Any amino acid
  MOD_RES (39)..(40): Any amino acid
  MOD_RES (42)..(46): Any amino acid
  MOD_RES (55)..(57): Any amino acid
  MOD_RES (59)..(65): Any amino acid
  MOD_RES (67)..(68): Any amino acid
  MOD_RES (70)..(74): Any amino acid
  MOD_RES (83)..(85): Any amino acid
  MOD_RES (87)..(93): Any amino acid
  MOD_RES (95)..(96): Any amino acid
  MOD_RES (98)..(102): Any amino acid
  MOD_RES (111)..(113): Any amino acid
  MOD_RES (115)..(121): Any amino acid
  MOD_RES (123)..(124): Any amino acid
  MOD_RES (126)..(130): Any amino acid
  MOD_RES (139)..(141): Any amino acid
  MOD_RES (143)..(149): Any amino acid
  MOD_RES (151)..(152): Any amino acid
  MOD_RES (154)..(158): Any amino acid
  MOD_RES (167)..(169): Any amino acid
  MOD_RES (171)..(177): Any amino acid
  MOD_RES (179)..(180): Any amino acid
  MOD_RES (182)..(186): Any amino acid
  MOD_RES (195)..(197): Any amino acid
  MOD_RES (199)..(209): Any amino acid
XXXXXXXXXCXXCXXXXXRSDDLVRHXXXHXXXXXXXCXXCXXXXXRSDHLTTHXXXHXXXXXXXCXXCXXXXXDPGHLVRHXXXHXXXXXXXCXXCXXXXXQKSSLIAHXXXHXXXXXXXCXXCXXXXXRSDHLTTHXXXHXXXXXXXCXXCXXXXXRSDKLTEHXXXHXXXXXXXCXXCXXXXXHTGHLLEHXXXHXXXXXXXXXXX

SEQ ID NO: 2445 - protein, 209 aa, Artificial Sequence
  source: /note="Description of Artificial Sequence: Synthetic polypeptide"
  MOD_RES (1)..(9): Any amino acid
  MOD_RES (11)..(12): Any amino acid
  MOD_RES (14)..(18): Any amino acid
  MOD_RES (27)..(29): Any amino acid
  MOD_RES (31)..(37): Any amino acid
  MOD_RES (39)..(40): Any amino acid
  MOD_RES (42)..(46): Any amino acid
  MOD_RES (55)..(57): Any amino acid
  MOD_RES (59)..(65): Any amino acid
  MOD_RES (67)..(68): Any amino acid
  MOD_RES (70)..(74): Any amino acid
  MOD_RES (83)..(85): Any amino acid
  MOD_RES (87)..(93): Any amino acid
  MOD_RES (95)..(96): Any amino acid
  MOD_RES (98)..(102): Any amino acid
  MOD_RES (111)..(113): Any amino acid
  MOD_RES (115)..(121): Any amino acid
  MOD_RES (123)..(124): Any amino acid
  MOD_RES (126)..(130): Any amino acid
  MOD_RES (139)..(141): Any amino acid
  MOD_RES (143)..(149): Any amino acid
  MOD_RES (151)..(152): Any amino acid
  MOD_RES (154)..(158): Any amino acid
  MOD_RES (167)..(169): Any amino acid
  MOD_RES (171)..(177): Any amino acid
  MOD_RES (179)..(180): Any amino acid
  MOD_RES (182)..(186): Any amino acid
  MOD_RES (195)..(197): Any amino acid
  MOD_RES (199)..(209): Any amino acid
XXXXXXXXXCXXCXXXXXDPGHLVRHXXXHXXXXXXXCXXCXXXXXQKSSLIAHXXXHXXXXXXXCXXCXXXXXRSDHLTTHXXXHXXXXXXXCXXCXXXXXRSDKLTEHXXXHXXXXXXXCXXCXXXXXHTGHLLEHXXXHXXXXXXXCXXCXXXXXSKKHLAEHXXXHXXXXXXXCXXCXXXXXDPGALVRHXXXHXXXXXXXXXXX

SEQ ID NO: 2446 - protein, 209 aa, Artificial Sequence
  source: /note="Description of Artificial Sequence: Synthetic polypeptide"
  MOD_RES (1)..(9): Any amino acid
  MOD_RES (11)..(12): Any amino acid
  MOD_RES (14)..(18): Any amino acid
  MOD_RES (27)..(29): Any amino acid
  MOD_RES (31)..(37): Any amino acid
  MOD_RES (39)..(40): Any amino acid
  MOD_RES (42)..(46): Any amino acid
  MOD_RES (55)..(57): Any amino acid
  MOD_RES (59)..(65): Any amino acid
  MOD_RES (67)..(68): Any amino acid
  MOD_RES (70)..(74): Any amino acid
  MOD_RES (83)..(85): Any amino acid
  MOD_RES (87)..(93): Any amino acid
  MOD_RES (95)..(96): Any amino acid
  MOD_RES (98)..(102): Any amino acid
  MOD_RES (111)..(113): Any amino acid
  MOD_RES (115)..(121): Any amino acid
  MOD_RES (123)..(124): Any amino acid
  MOD_RES (126)..(130): Any amino acid
  MOD_RES (139)..(141): Any amino acid
  MOD_RES (143)..(149): Any amino acid
  MOD_RES (151)..(152): Any amino acid
  MOD_RES (154)..(158): Any amino acid
  MOD_RES (167)..(169): Any amino acid
  MOD_RES (171)..(177): Any amino acid
  MOD_RES (179)..(180): Any amino acid
  MOD_RES (182)..(186): Any amino acid
  MOD_RES (195)..(197): Any amino acid
  MOD_RES (199)..(209): Any amino acid
XXXXXXXXXCXXCXXXXXRSDHLTTHXXXHXXXXXXXCXXCXXXXXDPGHLVRHXXXHXXXXXXXCXXCXXXXXQKSSLIAHXXXHXXXXXXXCXXCXXXXXRSDHLTTHXXXHXXXXXXXCXXCXXXXXRSDKLTEHXXXHXXXXXXXCXXCXXXXXHTGHLLEHXXXHXXXXXXXCXXCXXXXXSKKHLAEHXXXHXXXXXXXXXXX

SEQ ID NO: 2447 - protein, 209 aa, Artificial Sequence
  source: /note="Description of Artificial Sequence: Synthetic polypeptide"
  MOD_RES (1)..(9): Any amino acid
  MOD_RES (11)..(12): Any amino acid
  MOD_RES (14)..(18): Any amino acid
  MOD_RES (27)..(29): Any amino acid
  MOD_RES (31)..(37): Any amino acid
  MOD_RES (39)..(40): Any amino acid
  MOD_RES (42)..(46): Any amino acid
  MOD_RES (55)..(57): Any amino acid
  MOD_RES (59)..(65): Any amino acid
  MOD_RES (67)..(68): Any amino acid
  MOD_RES (70)..(74): Any amino acid
  MOD_RES (83)..(85): Any amino acid
  MOD_RES (87)..(93): Any amino acid
  MOD_RES (95)..(96): Any amino acid
  MOD_RES (98)..(102): Any amino acid
  MOD_RES (111)..(113): Any amino acid
  MOD_RES (115)..(121): Any amino acid
  MOD_RES (123)..(124): Any amino acid
  MOD_RES (126)..(130): Any amino acid
  MOD_RES (139)..(141): Any amino acid
  MOD_RES (143)..(149): Any amino acid
  MOD_RES (151)..(152): Any amino acid
  MOD_RES (154)..(158): Any amino acid
  MOD_RES (167)..(169): Any amino acid
  MOD_RES (171)..(177): Any amino acid
  MOD_RES (179)..(180): Any amino acid
  MOD_RES (182)..(186): Any amino acid
  MOD_RES (195)..(197): Any amino acid
  MOD_RES (199)..(209): Any amino acid
XXXXXXXXXCXXCXXXXXQRAHLERHXXXHXXXXXXXCXXCXXXXXRADNLTEHXXXHXXXXXXXCXXCXXXXXRNDALTEHXXXHXXXXXXXCXXCXXXXXRSDKLVRHXXXHXXXXXXXCXXCXXXXXRSDDLVRHXXXHXXXXXXXCXXCXXXXXRSDHLTTHXXXHXXXXXXXCXXCXXXXXDPGHLVRHXXXHXXXXXXXXXXX

SEQ ID NO: 2448 - protein, 209 aa, Artificial Sequence
  source: /note="Description of Artificial Sequence: Synthetic polypeptide"
  MOD_RES (1)..(9): Any amino acid
  MOD_RES (11)..(12): Any amino acid
  MOD_RES (14)..(18): Any amino acid
  MOD_RES (27)..(29): Any amino acid
  MOD_RES (31)..(37): Any amino acid
  MOD_RES (39)..(40): Any amino acid
  MOD_RES (42)..(46): Any amino acid
  MOD_RES (55)..(57): Any amino acid
  MOD_RES (59)..(65): Any amino acid
  MOD_RES (67)..(68): Any amino acid
  MOD_RES (70)..(74): Any amino acid
  MOD_RES (83)..(85): Any amino acid
  MOD_RES (87)..(93): Any amino acid
  MOD_RES (95)..(96): Any amino acid
  MOD_RES (98)..(102): Any amino acid
  MOD_RES (111)..(113): Any amino acid
  MOD_RES (115)..(121): Any amino acid
  MOD_RES (123)..(124): Any amino acid
  MOD_RES (126)..(130): Any amino acid
  MOD_RES (139)..(141): Any amino acid
  MOD_RES (143)..(149): Any amino acid
  MOD_RES (151)..(152): Any amino acid
  MOD_RES (154)..(158): Any amino acid
  MOD_RES (167)..(169): Any amino acid
  MOD_RES (171)..(177): Any amino acid
  MOD_RES (179)..(180): Any amino acid
  MOD_RES (182)..(186): Any amino acid
  MOD_RES (195)..(197): Any amino acid
  MOD_RES (199)..(209): Any amino acid
XXXXXXXXXCXXCXXXXXDPGHLVRHXXXHXXXXXXXCXXCXXXXXRSDKLTEHXXXHXXXXXXXCXXCXXXXXRSDKLVRHXXXHXXXXXXXCXXCXXXXXTSGELVRHXXXHXXXXXXXCXXCXXXXXREDNLHTHXXXHXXXXXXXCXXCXXXXXQRAHLERHXXXHXXXXXXXCXXCXXXXXTSGHLVRHXXXHXXXXXXXXXXX

SEQ ID NO: 2449 - protein, 209 aa, Artificial Sequence
  source: /note="Description of Artificial Sequence: Synthetic polypeptide"
  MOD_RES (1)..(9): Any amino acid
  MOD_RES (11)..(12): Any amino acid
  MOD_RES (14)..(18): Any amino acid
  MOD_RES (27)..(29): Any amino acid
  MOD_RES (31)..(37): Any amino acid
  MOD_RES (39)..(40): Any amino acid
  MOD_RES (42)..(46): Any amino acid
  MOD_RES (55)..(57): Any amino acid
  MOD_RES (59)..(65): Any amino acid
  MOD_RES (67)..(68): Any amino acid
  MOD_RES (70)..(74): Any amino acid
  MOD_RES (83)..(85): Any amino acid
  MOD_RES (87)..(93): Any amino acid
  MOD_RES (95)..(96): Any amino acid
  MOD_RES (98)..(102): Any amino acid
  MOD_RES (111)..(113): Any amino acid
  MOD_RES (115)..(121): Any amino acid
  MOD_RES (123)..(124): Any amino acid
  MOD_RES (126)..(130): Any amino acid
  MOD_RES (139)..(141): Any amino acid
  MOD_RES (143)..(149): Any amino acid
  MOD_RES (151)..(152): Any amino acid
  MOD_RES (154)..(158): Any amino acid
  MOD_RES (167)..(169): Any amino acid
  MOD_RES (171)..(177): Any amino acid
  MOD_RES (179)..(180): Any amino acid
  MOD_RES (182)..(186): Any amino acid
  MOD_RES (195)..(197): Any amino acid
  MOD_RES (199)..(209): Any amino acid
XXXXXXXXXCXXCXXXXXRSDKLTEHXXXHXXXXXXXCXXCXXXXXRSDKLVRHXXXHXXXXXXXCXXCXXXXXTSGELVRHXXXHXXXXXXXCXXCXXXXXREDNLHTHXXXHXXXXXXXCXXCXXXXXQRAHLERHXXXHXXXXXXXCXXCXXXXXTSGHLVRHXXXHXXXXXXXCXXCXXXXXDCRDLARHXXXHXXXXXXXXXXX

SEQ ID NO: 2450 - protein, 209 aa, Artificial Sequence
  source: /note="Description of Artificial Sequence: Synthetic polypeptide"
  MOD_RES (1)..(9): Any amino acid
  MOD_RES (11)..(12): Any amino acid
  MOD_RES (14)..(18): Any amino acid
  MOD_RES (27)..(29): Any amino acid
  MOD_RES (31)..(37): Any amino acid
  MOD_RES (39)..(40): Any amino acid
  MOD_RES (42)..(46): Any amino acid
  MOD_RES (55)..(57): Any amino acid
  MOD_RES (59)..(65): Any amino acid
  MOD_RES (67)..(68): Any amino acid
  MOD_RES (70)..(74): Any amino acid
  MOD_RES (83)..(85): Any amino acid
  MOD_RES (87)..(93): Any amino acid
  MOD_RES (95)..(96): Any amino acid
  MOD_RES (98)..(102): Any amino acid
  MOD_RES (111)..(113): Any amino acid
  MOD_RES (115)..(121): Any amino acid
  MOD_RES (123)..(124): Any amino acid
  MOD_RES (126)..(130): Any amino acid
  MOD_RES (139)..(141): Any amino acid
  MOD_RES (143)..(149): Any amino acid
  MOD_RES (151)..(152): Any amino acid
  MOD_RES (154)..(158): Any amino acid
  MOD_RES (167)..(169): Any amino acid
  MOD_RES (171)..(177): Any amino acid
  MOD_RES (179)..(180): Any amino acid
  MOD_RES (182)..(186): Any amino acid
  MOD_RES (195)..(197): Any amino acid
  MOD_RES (199)..(209): Any amino acid
XXXXXXXXXCXXCXXXXXRSDKLVRHXXXHXXXXXXXCXXCXXXXXTSGELVRHXXXHXXXXXXXCXXCXXXXXREDNLHTHXXXHXXXXXXXCXXCXXXXXQRAHLERHXXXHXXXXXXXCXXCXXXXXTSGHLVRHXXXHXXXXXXXCXXCXXXXXDCRDLARHXXXHXXXXXXXCXXCXXXXXSKKHLAEHXXXHXXXXXXXXXXX

SEQ ID NO: 2451 - protein, 209 aa, Artificial Sequence
  source: /note="Description of Artificial Sequence: Synthetic polypeptide"
  MOD_RES (1)..(9): Any amino acid
  MOD_RES (11)..(12): Any amino acid
  MOD_RES (14)..(18): Any amino acid
  MOD_RES (27)..(29): Any amino acid
  MOD_RES (31)..(37): Any amino acid
  MOD_RES (39)..(40): Any amino acid
  MOD_RES (42)..(46): Any amino acid
  MOD_RES (55)..(57): Any amino acid
  MOD_RES (59)..(65): Any amino acid
  MOD_RES (67)..(68): Any amino acid
  MOD_RES (70)..(74): Any amino acid
  MOD_RES (83)..(85): Any amino acid
  MOD_RES (87)..(93): Any amino acid
  MOD_RES (95)..(96): Any amino acid
  MOD_RES (98)..(102): Any amino acid
  MOD_RES (111)..(113): Any amino acid
  MOD_RES (115)..(121): Any amino acid
  MOD_RES (123)..(124): Any amino acid
  MOD_RES (126)..(130): Any amino acid
  MOD_RES (139)..(141): Any amino acid
  MOD_RES (143)..(149): Any amino acid
  MOD_RES (151)..(152): Any amino acid
  MOD_RES (154)..(158): Any amino acid
  MOD_RES (167)..(169): Any amino acid
  MOD_RES (171)..(177): Any amino acid
  MOD_RES (179)..(180): Any amino acid
  MOD_RES (182)..(186): Any amino acid
  MOD_RES (195)..(197): Any amino acid
  MOD_RES (199)..(209): Any amino acid
XXXXXXXXXCXXCXXXXXTTGNLTVHXXXHXXXXXXXCXXCXXXXXTSGELVRHXXXHXXXXXXXCXXCXXXXXTSGHLVRHXXXHXXXXXXXCXXCXXXXXRSDKLTEHXXXHXXXXXXXCXXCXXXXXDKKDLTRHXXXHXXXXXXXCXXCXXXXXDPGNLVRHXXXHXXXXXXXCXXCXXXXXTSGELVRHXXXHXXXXXXXXXXX

SEQ ID NO: 2452 - protein, 209 aa, Artificial Sequence
  source: /note="Description of Artificial Sequence: Synthetic polypeptide"
  MOD_RES (1)..(9): Any amino acid
  MOD_RES (11)..(12): Any amino acid
  MOD_RES (14)..(18): Any amino acid
  MOD_RES (27)..(29): Any amino acid
  MOD_RES (31)..(37): Any amino acid
  MOD_RES (39)..(40): Any amino acid
  MOD_RES (42)..(46): Any amino acid
  MOD_RES (55)..(57): Any amino acid
  MOD_RES (59)..(65): Any amino acid
  MOD_RES (67)..(68): Any amino acid
  MOD_RES (70)..(74): Any amino acid
  MOD_RES (83)..(85): Any amino acid
  MOD_RES (87)..(93): Any amino acid
  MOD_RES (95)..(96): Any amino acid
  MOD_RES (98)..(102): Any amino acid
  MOD_RES (111)..(113): Any amino acid
  MOD_RES (115)..(121): Any amino acid
  MOD_RES (123)..(124): Any amino acid
  MOD_RES (126)..(130): Any amino acid
  MOD_RES (139)..(141): Any amino acid
  MOD_RES (143)..(149): Any amino acid
  MOD_RES (151)..(152): Any amino acid
  MOD_RES (154)..(158): Any amino acid
  MOD_RES (167)..(169): Any amino acid
  MOD_RES (171)..(177): Any amino acid
  MOD_RES (179)..(180): Any amino acid
  MOD_RES (182)..(186): Any amino acid
  MOD_RES (195)..(197): Any amino acid
  MOD_RES (199)..(209): Any amino acid
XXXXXXXXXCXXCXXXXXTSGELVRHXXXHXXXXXXXCXXCXXXXXTSGHLVRHXXXHXXXXXXXCXXCXXXXXRSDKLTEHXXXHXXXXXXXCXXCXXXXXDKKDLTRHXXXHXXXXXXXCXXCXXXXXDPGNLVRHXXXHXXXXXXXCXXCXXXXXTSGELVRHXXXHXXXXXXXCXXCXXXXXRNDALTEHXXXHXXXXXXXXXXX

SEQ ID NO: 2453 - protein, 209 aa, Artificial Sequence
  source: /note="Description of Artificial Sequence: Synthetic polypeptide"
  MOD_RES (1)..(9): Any amino acid
  MOD_RES (11)..(12): Any amino acid
  MOD_RES (14)..(18): Any amino acid
  MOD_RES (27)..(29): Any amino acid
  MOD_RES (31)..(37): Any amino acid
  MOD_RES (39)..(40): Any amino acid
  MOD_RES (42)..(46): Any amino acid
  MOD_RES (55)..(57): Any amino acid
  MOD_RES (59)..(65): Any amino acid
  MOD_RES (67)..(68): Any amino acid
  MOD_RES (70)..(74): Any amino acid
  MOD_RES (83)..(85): Any amino acid
  MOD_RES (87)..(93): Any amino acid
  MOD_RES (95)..(96): Any amino acid
  MOD_RES (98)..(102): Any amino acid
  MOD_RES (111)..(113): Any amino acid
  MOD_RES (115)..(121): Any amino acid
  MOD_RES (123)..(124): Any amino acid
  MOD_RES (126)..(130): Any amino acid
  MOD_RES (139)..(141): Any amino acid
  MOD_RES (143)..(149): Any amino acid
  MOD_RES (151)..(152): Any amino acid
  MOD_RES (154)..(158): Any amino acid
  MOD_RES (167)..(169): Any amino acid
  MOD_RES (171)..(177): Any amino acid
  MOD_RES (179)..(180): Any amino acid
  MOD_RES (182)..(186): Any amino acid
  MOD_RES (195)..(197): Any amino acid
  MOD_RES (199)..(209): Any amino acid
XXXXXXXXXCXXCXXXXXTHLDLIRHXXXHXXXXXXXCXXCXXXXXQNSTLTEHXXXHXXXXXXXCXXCXXXXXDCRDLARHXXXHXXXXXXXCXXCXXXXXRSDKLVRHXXXHXXXXXXXCXXCXXXXXTSGELVRHXXXHXXXXXXXCXXCXXXXXTHLDLIRHXXXHXXXXXXXCXXCXXXXXSPADLTRHXXXHXXXXXXXXXXX

SEQ ID NO: 2454 - protein, 209 aa, Artificial Sequence
  source: /note="Description of Artificial Sequence: Synthetic polypeptide"
  MOD_RES (1)..(9): Any amino acid
  MOD_RES (11)..(12): Any amino acid
  MOD_RES (14)..(18): Any amino acid
  MOD_RES (27)..(29): Any amino acid
  MOD_RES (31)..(37): Any amino acid
  MOD_RES (39)..(40): Any amino acid
  MOD_RES (42)..(46): Any amino acid
  MOD_RES (55)..(57): Any amino acid
  MOD_RES (59)..(65): Any amino acid
  MOD_RES (67)..(68): Any amino acid
  MOD_RES (70)..(74): Any amino acid
  MOD_RES (83)..(85): Any amino acid
  MOD_RES (87)..(93): Any amino acid
  MOD_RES (95)..(96): Any amino acid
  MOD_RES (98)..(102): Any amino acid
  MOD_RES (111)..(113): Any amino acid
  MOD_RES (115)..(121): Any amino acid
  MOD_RES (123)..(124): Any amino acid
  MOD_RES (126)..(130): Any amino acid
  MOD_RES (139)..(141): Any amino acid
  MOD_RES (143)..(149): Any amino acid
  MOD_RES (151)..(152): Any amino acid
  MOD_RES (154)..(158): Any amino acid
  MOD_RES (167)..(169): Any amino acid
  MOD_RES (171)..(177): Any amino acid
  MOD_RES (179)..(180): Any amino acid
  MOD_RES (182)..(186): Any amino acid
  MOD_RES (195)..(197): Any amino acid
  MOD_RES (199)..(209): Any amino acid
XXXXXXXXXCXXCXXXXXDCRDLARHXXXHXXXXXXXCXXCXXXXXRSDKLVRHXXXHXXXXXXXCXXCXXXXXTSGELVRHXXXHXXXXXXXCXXCXXXXXTHLDLIRHXXXHXXXXXXXCXXCXXXXXSPADLTRHXXXHXXXXXXXCXXCXXXXXHKNALQNHXXXHXXXXXXXCXXCXXXXXQNSTLTEHXXXHXXXXXXXXXXX

SEQ ID NO: 2455 - protein, 209 aa, Artificial Sequence
  source: /note="Description of Artificial Sequence: Synthetic polypeptide"
  MOD_RES (1)..(9): Any amino acid
  MOD_RES (11)..(12): Any amino acid
  MOD_RES (14)..(18): Any amino acid
  MOD_RES (27)..(29): Any amino acid
  MOD_RES (31)..(37): Any amino acid
  MOD_RES (39)..(40): Any amino acid
  MOD_RES (42)..(46): Any amino acid
  MOD_RES (55)..(57): Any amino acid
  MOD_RES (59)..(65): Any amino acid
  MOD_RES (67)..(68): Any amino acid
  MOD_RES (70)..(74): Any amino acid
  MOD_RES (83)..(85): Any amino acid
  MOD_RES (87)..(93): Any amino acid
  MOD_RES (95)..(96): Any amino acid
  MOD_RES (98)..(102): Any amino acid
  MOD_RES (111)..(113): Any amino acid
  MOD_RES (115)..(121): Any amino acid
  MOD_RES (123)..(124): Any amino acid
  MOD_RES (126)..(130): Any amino acid
  MOD_RES (139)..(141): Any amino acid
  MOD_RES (143)..(149): Any amino acid
  MOD_RES (151)..(152): Any amino acid
  MOD_RES (154)..(158): Any amino acid
  MOD_RES (167)..(169): Any amino acid
  MOD_RES (171)..(177): Any amino acid
  MOD_RES (179)..(180): Any amino acid
  MOD_RES (182)..(186): Any amino acid
  MOD_RES (195)..(197): Any amino acid
  MOD_RES (199)..(209): Any amino acid
XXXXXXXXXCXXCXXXXXQNSTLTEHXXXHXXXXXXXCXXCXXXXXDCRDLARHXXXHXXXXXXXCXXCXXXXXRSDKLVRHXXXHXXXXXXXCXXCXXXXXTSGELVRHXXXHXXXXXXXCXXCXXXXXTHLDLIRHXXXHXXXXXXXCXXCXXXXXSPADLTRHXXXHXXXXXXXCXXCXXXXXHKNALQNHXXXHXXXXXXXXXXX

SEQ ID NO: 2456 - protein, 209 aa, Artificial Sequence
  source: /note="Description of Artificial Sequence: Synthetic polypeptide"
  MOD_RES (1)..(9): Any amino acid
  MOD_RES (11)..(12): Any amino acid
  MOD_RES (14)..(18): Any amino acid
  MOD_RES (27)..(29): Any amino acid
  MOD_RES (31)..(37): Any amino acid
  MOD_RES (39)..(40): Any amino acid
  MOD_RES (42)..(46): Any amino acid
  MOD_RES (55)..(57): Any amino acid
  MOD_RES (59)..(65): Any amino acid
  MOD_RES (67)..(68): Any amino acid
  MOD_RES (70)..(74): Any amino acid
  MOD_RES (83)..(85): Any amino acid
  MOD_RES (87)..(93): Any amino acid
  MOD_RES (95)..(96): Any amino acid
  MOD_RES (98)..(102): Any amino acid
  MOD_RES (111)..(113): Any amino acid
  MOD_RES (115)..(121): Any amino acid
  MOD_RES (123)..(124): Any amino acid
  MOD_RES (126)..(130): Any amino acid
  MOD_RES (139)..(141): Any amino acid
  MOD_RES (143)..(149): Any amino acid
  MOD_RES (151)..(152): Any amino acid
  MOD_RES (154)..(158): Any amino acid
  MOD_RES (167)..(169): Any amino acid
  MOD_RES (171)..(177): Any amino acid
  MOD_RES (179)..(180): Any amino acid
  MOD_RES (182)..(186): Any amino acid
  MOD_RES (195)..(197): Any amino acid
  MOD_RES (199)..(209): Any amino acid
XXXXXXXXXCXXCXXXXXRSDKLVRHXXXHXXXXXXXCXXCXXXXXTSGELVRHXXXHXXXXXXXCXXCXXXXXTHLDLIRHXXXHXXXXXXXCXXCXXXXXSPADLTRHXXXHXXXXXXXCXXCXXXXXHKNALQNHXXXHXXXXXXXCXXCXXXXXQNSTLTEHXXXHXXXXXXXCXXCXXXXXRSDELVRHXXXHXXXXXXXXXXX

SEQ ID NO: 2457 - protein, 209 aa, Artificial Sequence
  source: /note="Description of Artificial Sequence: Synthetic polypeptide"
  MOD_RES (1)..(9): Any amino acid
  MOD_RES (11)..(12): Any amino acid
  MOD_RES (14)..(18): Any amino acid
  MOD_RES (27)..(29): Any amino acid
  MOD_RES (31)..(37): Any amino acid
  MOD_RES (39)..(40): Any amino acid
  MOD_RES (42)..(46): Any amino acid
  MOD_RES (55)..(57): Any amino acid
  MOD_RES (59)..(65): Any amino acid
  MOD_RES (67)..(68): Any amino acid
  MOD_RES (70)..(74): Any amino acid
  MOD_RES (83)..(85): Any amino acid
  MOD_RES (87)..(93): Any amino acid
  MOD_RES (95)..(96): Any amino acid
  MOD_RES (98)..(102): Any amino acid
  MOD_RES (111)..(113): Any amino acid
  MOD_RES (115)..(121): Any amino acid
  MOD_RES (123)..(124): Any amino acid
  MOD_RES (126)..(130): Any amino acid
  MOD_RES (139)..(141): Any amino acid
  MOD_RES (143)..(149): Any amino acid
  MOD_RES (151)..(152): Any amino acid
  MOD_RES (154)..(158): Any amino acid
  MOD_RES (167)..(169): Any amino acid
  MOD_RES (171)..(177): Any amino acid
  MOD_RES (179)..(180): Any amino acid
  MOD_RES (182)..(186): Any amino acid
  MOD_RES (195)..(197): Any amino acid
  MOD_RES (199)..(209): Any amino acid
XXXXXXXXXCXXCXXXXXTSGELVRHXXXHXXXXXXXCXXCXXXXXTHLDLIRHXXXHXXXXXXXCXXCXXXXXSPADLTRHXXXHXXXXXXXCXXCXXXXXHKNALQNHXXXHXXXXXXXCXXCXXXXXQNSTLTEHXXXHXXXXXXXCXXCXXXXXRSDELVRHXXXHXXXXXXXCXXCXXXXXRSDKLVRHXXXHXXXXXXXXXXX

SEQ ID NO: 2458 - protein, 209 aa, Artificial Sequence
  source: /note="Description of Artificial Sequence: Synthetic polypeptide"
  MOD_RES (1)..(9): Any amino acid
  MOD_RES (11)..(12): Any amino acid
  MOD_RES (14)..(18): Any amino acid
  MOD_RES (27)..(29): Any amino acid
  MOD_RES (31)..(37): Any amino acid
  MOD_RES (39)..(40): Any amino acid
  MOD_RES (42)..(46): Any amino acid
  MOD_RES (55)..(57): Any amino acid
  MOD_RES (59)..(65): Any amino acid
  MOD_RES (67)..(68): Any amino acid
  MOD_RES (70)..(74): Any amino acid
  MOD_RES (83)..(85): Any amino acid
  MOD_RES (87)..(93): Any amino acid
  MOD_RES (95)..(96): Any amino acid
  MOD_RES (98)..(102): Any amino acid
  MOD_RES (111)..(113): Any amino acid
  MOD_RES (115)..(121): Any amino acid
  MOD_RES (123)..(124): Any amino acid
  MOD_RES (126)..(130): Any amino acid
  MOD_RES (139)..(141): Any amino acid
  MOD_RES (143)..(149): Any amino acid
  MOD_RES (151)..(152): Any amino acid
  MOD_RES (154)..(158): Any amino acid
  MOD_RES (167)..(169): Any amino acid
  MOD_RES (171)..(177): Any amino acid
  MOD_RES (179)..(180): Any amino acid
  MOD_RES (182)..(186): Any amino acid
  MOD_RES (195)..(197): Any amino acid
  MOD_RES (199)..(209): Any amino acid
XXXXXXXXXCXXCXXXXXSKKALTEHXXXHXXXXXXXCXXCXXXXXTHLDLIRHXXXHXXXXXXXCXXCXXXXXQNSTLTEHXXXHXXXXXXXCXXCXXXXXDCRDLARHXXXHXXXXXXXCXXCXXXXXRSDKLVRHXXXHXXXXXXXCXXCXXXXXTSGELVRHXXXHXXXXXXXCXXCXXXXXTHLDLIRHXXXHXXXXXXXXXXX

SEQ ID NO: 2459 - protein, 209 aa, Artificial Sequence
  source: /note="Description of Artificial Sequence: Synthetic polypeptide"
  MOD_RES (1)..(9): Any amino acid
  MOD_RES (11)..(12): Any amino acid
  MOD_RES (14)..(18): Any amino acid
  MOD_RES (27)..(29): Any amino acid
  MOD_RES (31)..(37): Any amino acid
  MOD_RES (39)..(40): Any amino acid
  MOD_RES (42)..(46): Any amino acid
  MOD_RES (55)..(57): Any amino acid
  MOD_RES (59)..(65): Any amino acid
  MOD_RES (67)..(68): Any amino acid
  MOD_RES (70)..(74): Any amino acid
  MOD_RES (83)..(85): Any amino acid
  MOD_RES (87)..(93): Any amino acid
  MOD_RES (95)..(96): Any amino acid
  MOD_RES (98)..(102): Any amino acid
  MOD_RES (111)..(113): Any amino acid
  MOD_RES (115)..(121): Any amino acid
  MOD_RES (123)..(124): Any amino acid
  MOD_RES (126)..(130): Any amino acid
  MOD_RES (139)..(141): Any amino acid
  MOD_RES (143)..(149): Any amino acid
  MOD_RES (151)..(152): Any amino acid
  MOD_RES (154)..(158): Any amino acid
  MOD_RES (167)..(169): Any amino acid
  MOD_RES (171)..(177): Any amino acid
  MOD_RES (179)..(180): Any amino acid
  MOD_RES (182)..(186): Any amino acid
  MOD_RES (195)..(197): Any amino acid
  MOD_RES (199)..(209): Any amino acid
XXXXXXXXXCXXCXXXXXTHLDLIRHXXXHXXXXXXXCXXCXXXXXSPADLTRHXXXHXXXXXXXCXXCXXXXXHKNALQNHXXXHXXXXXXXCXXCXXXXXQNSTLTEHXXXHXXXXXXXCXXCXXXXXRSDELVRHXXXHXXXXXXXCXXCXXXXXRSDKLVRHXXXHXXXXXXXCXXCXXXXXSKKHLAEHXXXHXXXXXXXXXXX

SEQ ID NO: 2460 - protein, 209 aa, Artificial Sequence
  source: /note="Description of Artificial Sequence: Synthetic polypeptide"
  MOD_RES (1)..(9): Any amino acid
  MOD_RES (11)..(12): Any amino acid
  MOD_RES (14)..(18): Any amino acid
  MOD_RES (27)..(29): Any amino acid
  MOD_RES (31)..(37): Any amino acid
  MOD_RES (39)..(40): Any amino acid
  MOD_RES (42)..(46): Any amino acid
  MOD_RES (55)..(57): Any amino acid
  MOD_RES (59)..(65): Any amino acid
  MOD_RES (67)..(68): Any amino acid
  MOD_RES (70)..(74): Any amino acid
  MOD_RES (83)..(85): Any amino acid
  MOD_RES (87)..(93): Any amino acid
  MOD_RES (95)..(96): Any amino acid
  MOD_RES (98)..(102): Any amino acid
  MOD_RES (111)..(113): Any amino acid
  MOD_RES (115)..(121): Any amino acid
  MOD_RES (123)..(124): Any amino acid
  MOD_RES (126)..(130): Any amino acid
  MOD_RES (139)..(141): Any amino acid
  MOD_RES (143)..(149): Any amino acid
  MOD_RES (151)..(152): Any amino acid
  MOD_RES (154)..(158): Any amino acid
  MOD_RES (167)..(169): Any amino acid
  MOD_RES (171)..(177): Any amino acid
  MOD_RES (179)..(180): Any amino acid
  MOD_RES (182)..(186): Any amino acid
  MOD_RES (195)..(197): Any amino acid
  MOD_RES (199)..(209): Any amino acid
XXXXXXXXXCXXCXXXXXQNSTLTEHXXXHXXXXXXXCXXCXXXXXRSDELVRHXXXHXXXXXXXCXXCXXXXXRSDKLVRHXXXHXXXXXXXCXXCXXXXXSKKHLAEHXXXHXXXXXXXCXXCXXXXXSPADLTRHXXXHXXXXXXXCXXCXXXXXRNDALTEHXXXHXXXXXXXCXXCXXXXXRSDHLTTHXXXHXXXXXXXXXXX

SEQ ID NO: 2461 - protein, 209 aa, Artificial Sequence
  source: /note="Description of Artificial Sequence: Synthetic polypeptide"
  MOD_RES (1)..(9): Any amino acid
  MOD_RES (11)..(12): Any amino acid
  MOD_RES (14)..(18): Any amino acid
  MOD_RES (27)..(29): Any amino acid
  MOD_RES (31)..(37): Any amino acid
  MOD_RES (39)..(40): Any amino acid
  MOD_RES (42)..(46): Any amino acid
  MOD_RES (55)..(57): Any amino acid
  MOD_RES (59)..(65): Any amino acid
  MOD_RES (67)..(68): Any amino acid
  MOD_RES (70)..(74): Any amino acid
  MOD_RES (83)..(85): Any amino acid
  MOD_RES (87)..(93): Any amino acid
  MOD_RES (95)..(96): Any amino acid
  MOD_RES (98)..(102): Any amino acid
  MOD_RES (111)..(113): Any amino acid
  MOD_RES (115)..(121): Any amino acid
  MOD_RES (123)..(124): Any amino acid
  MOD_RES (126)..(130): Any amino acid
  MOD_RES (139)..(141): Any amino acid
  MOD_RES (143)..(149): Any amino acid
  MOD_RES (151)..(152): Any amino acid
  MOD_RES (154)..(158): Any amino acid
  MOD_RES (167)..(169): Any amino acid
  MOD_RES (171)..(177): Any amino acid
  MOD_RES (179)..(180): Any amino acid
  MOD_RES (182)..(186): Any amino acid
  MOD_RES (195)..(197): Any amino acid
  MOD_RES (199)..(209): Any amino acid
XXXXXXXXXCXXCXXXXXSPADLTRHXXXHXXXXXXXCXXCXXXXXHKNALQNHXXXHXXXXXXXCXXCXXXXXQNSTLTEHXXXHXXXXXXXCXXCXXXXXRSDELVRHXXXHXXXXXXXCXXCXXXXXRSDKLVRHXXXHXXXXXXXCXXCXXXXXSKKHLAEHXXXHXXXXXXXCXXCXXXXXSPADLTRHXXXHXXXXXXXXXXX

SEQ ID NO: 2462 - protein, 209 aa, Artificial Sequence
  source: /note="Description of Artificial Sequence: Synthetic polypeptide"
  MOD_RES (1)..(9): Any amino acid
  MOD_RES (11)..(12): Any amino acid
  MOD_RES (14)..(18): Any amino acid
  MOD_RES (27)..(29): Any amino acid
  MOD_RES (31)..(37): Any amino acid
  MOD_RES (39)..(40): Any amino acid
  MOD_RES (42)..(46): Any amino acid
  MOD_RES (55)..(57): Any amino acid
  MOD_RES (59)..(65): Any amino acid
  MOD_RES (67)..(68): Any amino acid
  MOD_RES (70)..(74): Any amino acid
  MOD_RES (83)..(85): Any amino acid
  MOD_RES (87)..(93): Any amino acid
  MOD_RES (95)..(96): Any amino acid
  MOD_RES (98)..(102): Any amino acid
  MOD_RES (111)..(113): Any amino acid
  MOD_RES (115)..(121): Any amino acid
  MOD_RES (123)..(124): Any amino acid
  MOD_RES (126)..(130): Any amino acid
  MOD_RES (139)..(141): Any amino acid
  MOD_RES (143)..(149): Any amino acid
  MOD_RES (151)..(152): Any amino acid
  MOD_RES (154)..(158): Any amino acid
  MOD_RES (167)..(169): Any amino acid
  MOD_RES (171)..(177): Any amino acid
  MOD_RES (179)..(180): Any amino acid
  MOD_RES (182)..(186): Any amino acid
  MOD_RES (195)..(197): Any amino acid
  MOD_RES (199)..(209): Any amino acid
XXXXXXXXXCXXCXXXXXHKNALQNHXXXHXXXXXXXCXXCXXXXXQNSTLTEHXXXHXXXXXXXCXXCXXXXXRSDELVRHXXXHXXXXXXXCXXCXXXXXRSDKLVRHXXXHXXXXXXXCXXCXXXXXSKKHLAEHXXXHXXXXXXXCXXCXXXXXSPADLTRHXXXHXXXXXXXCXXCXXXXXRNDALTEHXXXHXXXXXXXXXXX

SEQ ID NO: 2463 - protein, 209 aa, Artificial Sequence
  source: /note="Description of Artificial Sequence: Synthetic polypeptide"
  MOD_RES (1)..(9): Any amino acid
  MOD_RES (11)..(12): Any amino acid
  MOD_RES (14)..(18): Any amino acid
  MOD_RES (27)..(29): Any amino acid
  MOD_RES (31)..(37): Any amino acid
  MOD_RES (39)..(40): Any amino acid
  MOD_RES (42)..(46): Any amino acid
  MOD_RES (55)..(57): Any amino acid
  MOD_RES (59)..(65): Any amino acid
  MOD_RES (67)..(68): Any amino acid
  MOD_RES (70)..(74): Any amino acid
  MOD_RES (83)..(85): Any amino acid
  MOD_RES (87)..(93): Any amino acid
  MOD_RES (95)..(96): Any amino acid
  MOD_RES (98)..(102): Any amino acid
  MOD_RES (111)..(113): Any amino acid
  MOD_RES (115)..(121): Any amino acid
  MOD_RES (123)..(124): Any amino acid
  MOD_RES (126)..(130): Any amino acid
  MOD_RES (139)..(141): Any amino acid
  MOD_RES (143)..(149): Any amino acid
  MOD_RES (151)..(152): Any amino acid
  MOD_RES (154)..(158): Any amino acid
  MOD_RES (167)..(169): Any amino acid
  MOD_RES (171)..(177): Any amino acid
  MOD_RES (179)..(180): Any amino acid
  MOD_RES (182)..(186): Any amino acid
  MOD_RES (195)..(197): Any amino acid
  MOD_RES (199)..(209): Any amino acid
XXXXXXXXXCXXCXXXXXQSGHLTEHXXXHXXXXXXXCXXCXXXXXSKKALTEHXXXHXXXXXXXCXXCXXXXXTHLDLIRHXXXHXXXXXXXCXXCXXXXXQNSTLTEHXXXHXXXXXXXCXXCXXXXXDCRDLARHXXXHXXXXXXXCXXCXXXXXRSDKLVRHXXXHXXXXXXXCXXCXXXXXTSGELVRHXXXHXXXXXXXXXXX

SEQ ID NO: 2464 - protein, 209 aa, Artificial Sequence
  source: /note="Description of Artificial Sequence: Synthetic polypeptide"
  MOD_RES (1)..(9): Any amino acid
  MOD_RES (11)..(12): Any amino acid
  MOD_RES (14)..(18): Any amino acid
  MOD_RES (27)..(29): Any amino acid
  MOD_RES (31)..(37): Any amino acid
  MOD_RES (39)..(40): Any amino acid
  MOD_RES (42)..(46): Any amino acid
  MOD_RES (55)..(57): Any amino acid
  MOD_RES (59)..(65): Any amino acid
  MOD_RES (67)..(68): Any amino acid
  MOD_RES (70)..(74): Any amino acid
  MOD_RES (83)..(85): Any amino acid
  MOD_RES (87)..(93): Any amino acid
  MOD_RES (95)..(96): Any amino acid
  MOD_RES (98)..(102): Any amino acid
  MOD_RES (111)..(113): Any amino acid
  MOD_RES (115)..(121): Any amino acid
  MOD_RES (123)..(124): Any amino acid
  MOD_RES (126)..(130): Any amino acid
  MOD_RES (139)..(141): Any amino acid
  MOD_RES (143)..(149): Any amino acid
  MOD_RES (151)..(152): Any amino acid
  MOD_RES (154)..(158): Any amino acid
  MOD_RES (167)..(169): Any amino acid
  MOD_RES (171)..(177): Any amino acid
  MOD_RES (179)..(180): Any amino acid
  MOD_RES (182)..(186): Any amino acid
  MOD_RES (195)..(197): Any amino acid
  MOD_RES (199)..(209): Any amino acid
XXXXXXXXXCXXCXXXXXTSGNLTEHXXXHXXXXXXXCXXCXXXXXTSGNLTEHXXXHXXXXXXXCXXCXXXXXRSDHLTNHXXXHXXXXXXXCXXCXXXXXDPGHLVRHXXXHXXXXXXXCXXCXXXXXQSGNLTEHXXXHXXXXXXXCXXCXXXXXQSSSLVRHXXXHXXXXXXXCXXCXXXXXHKNALQNHXXXHXXXXXXXXXXX

SEQ ID NO: 2465 - protein, 209 aa, Artificial Sequence
  source: /note="Description of Artificial Sequence: Synthetic polypeptide"
  MOD_RES (1)..(9): Any amino acid
  MOD_RES (11)..(12): Any amino acid
  MOD_RES (14)..(18): Any amino acid
  MOD_RES (27)..(29): Any amino acid
  MOD_RES (31)..(37): Any amino acid
  MOD_RES (39)..(40): Any amino acid
  MOD_RES (42)..(46): Any amino acid
  MOD_RES (55)..(57): Any amino acid
  MOD_RES (59)..(65): Any amino acid
  MOD_RES (67)..(68): Any amino acid
  MOD_RES (70)..(74): Any amino acid
  MOD_RES (83)..(85): Any amino acid
  MOD_RES (87)..(93): Any amino acid
  MOD_RES (95)..(96): Any amino acid
  MOD_RES (98)..(102): Any amino acid
  MOD_RES (111)..(113): Any amino acid
  MOD_RES (115)..(121): Any amino acid
  MOD_RES (123)..(124): Any amino acid
  MOD_RES (126)..(130): Any amino acid
  MOD_RES (139)..(141): Any amino acid
  MOD_RES (143)..(149): Any amino acid
  MOD_RES (151)..(152): Any amino acid
  MOD_RES (154)..(158): Any amino acid
  MOD_RES (167)..(169): Any amino acid
  MOD_RES (171)..(177): Any amino acid
  MOD_RES (179)..(180): Any amino acid
  MOD_RES (182)..(186): Any amino acid
  MOD_RES (195)..(197): Any amino acid
  MOD_RES (199)..(209): Any amino acid
XXXXXXXXXCXXCXXXXXDPGNLVRHXXXHXXXXXXXCXXCXXXXXTSGNLTEHXXXHXXXXXXXCXXCXXXXXTSGNLTEHXXXHXXXXXXXCXXCXXXXXRSDHLTNHXXXHXXXXXXXCXXCXXXXXDPGHLVRHXXXHXXXXXXXCXXCXXXXXQSGNLTEHXXXHXXXXXXXCXXCXXXXXQSSSLVRHXXXHXXXXXXXXXXX

SEQ ID NO: 2466 - protein, 209 aa, Artificial Sequence
  source: /note="Description of Artificial Sequence: Synthetic polypeptide"
  MOD_RES (1)..(9): Any amino acid
  MOD_RES (11)..(12): Any amino acid
  MOD_RES (14)..(18): Any amino acid
  MOD_RES (27)..(29): Any amino acid
  MOD_RES (31)..(37): Any amino acid
  MOD_RES (39)..(40): Any amino acid
  MOD_RES (42)..(46): Any amino acid
  MOD_RES (55)..(57): Any amino acid
  MOD_RES (59)..(65): Any amino acid
  MOD_RES (67)..(68): Any amino acid
  MOD_RES (70)..(74): Any amino acid
  MOD_RES (83)..(85): Any amino acid
  MOD_RES (87)..(93): Any amino acid
  MOD_RES (95)..(96): Any amino acid
  MOD_RES (98)..(102): Any amino acid
  MOD_RES (111)..(113): Any amino acid
  MOD_RES (115)..(121): Any amino acid
  MOD_RES (123)..(124): Any amino acid
  MOD_RES (126)..(130): Any amino acid
  MOD_RES (139)..(141): Any amino acid
  MOD_RES (143)..(149): Any amino acid
  MOD_RES (151)..(152): Any amino acid
  MOD_RES (154)..(158): Any amino acid
  MOD_RES (167)..(169): Any amino acid
  MOD_RES (171)..(177): Any amino acid
  MOD_RES (179)..(180): Any amino acid
  MOD_RES (182)..(186): Any amino acid
  MOD_RES (195)..(197): Any amino acid
  MOD_RES (199)..(209): Any amino acid
XXXXXXXXXCXXCXXXXXQSGDLRRHXXXHXXXXXXXCXXCXXXXXRADNLTEHXXXHXXXXXXXCXXCXXXXXHRTTLTNHXXXHXXXXXXXCXXCXXXXXTSHSLTEHXXXHXXXXXXXCXXCXXXXXDKKDLTRHXXXHXXXXXXXCXXCXXXXXDPGALVRHXXXHXXXXXXXCXXCXXXXXHKNALQNHXXXHXXXXXXXXXXX

SEQ ID NO: 2467 - protein, 209 aa, Artificial Sequence
  source: /note="Description of Artificial Sequence: Synthetic polypeptide"
  MOD_RES (1)..(9): Any amino acid
  MOD_RES (11)..(12): Any amino acid
  MOD_RES (14)..(18): Any amino acid
  MOD_RES (27)..(29): Any amino acid
  MOD_RES (31)..(37): Any amino acid
  MOD_RES (39)..(40): Any amino acid
  MOD_RES (42)..(46): Any amino acid
  MOD_RES (55)..(57): Any amino acid
  MOD_RES (59)..(65): Any amino acid
  MOD_RES (67)..(68): Any amino acid
  MOD_RES (70)..(74): Any amino acid
  MOD_RES (83)..(85): Any amino acid
  MOD_RES (87)..(93): Any amino acid
  MOD_RES (95)..(96): Any amino acid
  MOD_RES (98)..(102): Any amino acid
  MOD_RES (111)..(113): Any amino acid
  MOD_RES (115)..(121): Any amino acid
  MOD_RES (123)..(124): Any amino acid
  MOD_RES (126)..(130): Any amino acid
  MOD_RES (139)..(141): Any amino acid
  MOD_RES (143)..(149): Any amino acid
  MOD_RES (151)..(152): Any amino acid
  MOD_RES (154)..(158): Any amino acid
  MOD_RES (167)..(169): Any amino acid
  MOD_RES (171)..(177): Any amino acid
  MOD_RES (179)..(180): Any amino acid
  MOD_RES (182)..(186): Any amino acid
  MOD_RES (195)..(197): Any amino acid
  MOD_RES (199)..(209): Any amino acid
XXXXXXXXXCXXCXXXXXRADNLTEHXXXHXXXXXXXCXXCXXXXXHRTTLTNHXXXHXXXXXXXCXXCXXXXXTSHSLTEHXXXHXXXXXXXCXXCXXXXXDKKDLTRHXXXHXXXXXXXCXXCXXXXXDPGALVRHXXXHXXXXXXXCXXCXXXXXHKNALQNHXXXHXXXXXXXCXXCXXXXXDCRDLARHXXXHXXXXXXXXXXX

SEQ ID NO: 2468 - protein, 209 aa, Artificial Sequence
  source: /note="Description of Artificial Sequence: Synthetic polypeptide"
  MOD_RES (1)..(9): Any amino acid
  MOD_RES (11)..(12): Any amino acid
  MOD_RES (14)..(18): Any amino acid
  MOD_RES (27)..(29): Any amino acid
  MOD_RES (31)..(37): Any amino acid
  MOD_RES (39)..(40): Any amino acid
  MOD_RES (42)..(46): Any amino acid
  MOD_RES (55)..(57): Any amino acid
  MOD_RES (59)..(65): Any amino acid
  MOD_RES (67)..(68): Any amino acid
  MOD_RES (70)..(74): Any amino acid
  MOD_RES (83)..(85): Any amino acid
  MOD_RES (87)..(93): Any amino acid
  MOD_RES (95)..(96): Any amino acid
  MOD_RES (98)..(102): Any amino acid
  MOD_RES (111)..(113): Any amino acid
  MOD_RES (115)..(121): Any amino acid
  MOD_RES (123)..(124): Any amino acid
  MOD_RES (126)..(130): Any amino acid
  MOD_RES (139)..(141): Any amino acid
  MOD_RES (143)..(149): Any amino acid
  MOD_RES (151)..(152): Any amino acid
  MOD_RES (154)..(158): Any amino acid
  MOD_RES (167)..(169): Any amino acid
  MOD_RES (171)..(177): Any amino acid
  MOD_RES (179)..(180): Any amino acid
  MOD_RES (182)..(186): Any amino acid
  MOD_RES (195)..(197): Any amino acid
  MOD_RES (199)..(209): Any amino acid
XXXXXXXXXCXXCXXXXXHRTTLTNHXXXHXXXXXXXCXXCXXXXXTSHSLTEHXXXHXXXXXXXCXXCXXXXXDKKDLTRHXXXHXXXXXXXCXXCXXXXXDPGALVRHXXXHXXXXXXXCXXCXXXXXHKNALQNHXXXHXXXXXXXCXXCXXXXXDCRDLARHXXXHXXXXXXXCXXCXXXXXQSGNLTEHXXXHXXXXXXXXXXX

SEQ ID NO: 2469 - protein, 209 aa, Artificial Sequence
  source: /note="Description of Artificial Sequence: Synthetic polypeptide"
  MOD_RES (1)..(9): Any amino acid
  MOD_RES (11)..(12): Any amino acid
  MOD_RES (14)..(18): Any amino acid
  MOD_RES (27)..(29): Any amino acid
  MOD_RES (31)..(37): Any amino acid
  MOD_RES (39)..(40): Any amino acid
  MOD_RES (42)..(46): Any amino acid
  MOD_RES (55)..(57): Any amino acid
  MOD_RES (59)..(65): Any amino acid
  MOD_RES (67)..(68): Any amino acid
  MOD_RES (70)..(74): Any amino acid
  MOD_RES (83)..(85): Any amino acid
  MOD_RES (87)..(93): Any amino acid
  MOD_RES (95)..(96): Any amino acid
  MOD_RES (98)..(102): Any amino acid
  MOD_RES (111)..(113): Any amino acid
  MOD_RES (115)..(121): Any amino acid
  MOD_RES (123)..(124): Any amino acid
  MOD_RES (126)..(130): Any amino acid
  MOD_RES (139)..(141): Any amino acid
  MOD_RES (143)..(149): Any amino acid
  MOD_RES (151)..(152): Any amino acid
  MOD_RES (154)..(158): Any amino acid
  MOD_RES (167)..(169): Any amino acid
  MOD_RES (171)..(177): Any amino acid
  MOD_RES (179)..(180): Any amino acid
  MOD_RES (182)..(186): Any amino acid
  MOD_RES (195)..(197): Any amino acid
  MOD_RES (199)..(209): Any amino acid
XXXXXXXXXCXXCXXXXXRNDTLTEHXXXHXXXXXXXCXXCXXXXXTKNSLTEHXXXHXXXXXXXCXXCXXXXXQNSTLTEHXXXHXXXXXXXCXXCXXXXXERSHLREHXXXHXXXXXXXCXXCXXXXXDPGNLVRHXXXHXXXXXXXCXXCXXXXXTHLDLIRHXXXHXXXXXXXCXXCXXXXXDPGHLVRHXXXHXXXXXXXXXXX

SEQ ID NO: 2470 - protein, 209 aa, Artificial Sequence
  source: /note="Description of Artificial Sequence: Synthetic polypeptide"
  MOD_RES (1)..(9): Any amino acid
  MOD_RES (11)..(12): Any amino acid
  MOD_RES (14)..(18): Any amino acid
  MOD_RES (27)..(29): Any amino acid
  MOD_RES (31)..(37): Any amino acid
  MOD_RES (39)..(40): Any amino acid
  MOD_RES (42)..(46): Any amino acid
  MOD_RES (55)..(57): Any amino acid
  MOD_RES (59)..(65): Any amino acid
  MOD_RES (67)..(68): Any amino acid
  MOD_RES (70)..(74): Any amino acid
  MOD_RES (83)..(85): Any amino acid
  MOD_RES (87)..(93): Any amino acid
  MOD_RES (95)..(96): Any amino acid
  MOD_RES (98)..(102): Any amino acid
  MOD_RES (111)..(113): Any amino acid
  MOD_RES (115)..(121): Any amino acid
  MOD_RES (123)..(124): Any amino acid
  MOD_RES (126)..(130): Any amino acid
  MOD_RES (139)..(141): Any amino acid
  MOD_RES (143)..(149): Any amino acid
  MOD_RES (151)..(152): Any amino acid
  MOD_RES (154)..(158): Any amino acid
  MOD_RES (167)..(169): Any amino acid
  MOD_RES (171)..(177): Any amino acid
  MOD_RES (179)..(180): Any amino acid
  MOD_RES (182)..(186): Any amino acid
  MOD_RES (195)..(197): Any amino acid
  MOD_RES (199)..(209): Any amino acid
XXXXXXXXXCXXCXXXXXQLAHLRAHXXXHXXXXXXXCXXCXXXXXRNDTLTEHXXXHXXXXXXXCXXCXXXXXTKNSLTEHXXXHXXXXXXXCXXCXXXXXQNSTLTEHXXXHXXXXXXXCXXCXXXXXERSHLREHXXXHXXXXXXXCXXCXXXXXDPGNLVRHXXXHXXXXXXXCXXCXXXXXTHLDLIRHXXXHXXXXXXXXXXX

SEQ ID NO: 2471 - protein, 209 aa, Artificial Sequence
  source: /note="Description of Artificial Sequence: Synthetic polypeptide"
  MOD_RES (1)..(9): Any amino acid
  MOD_RES (11)..(12): Any amino acid
  MOD_RES (14)..(18): Any amino acid
  MOD_RES (27)..(29): Any amino acid
  MOD_RES (31)..(37): Any amino acid
  MOD_RES (39)..(40): Any amino acid
  MOD_RES (42)..(46): Any amino acid
  MOD_RES (55)..(57): Any amino acid
  MOD_RES (59)..(65): Any amino acid
  MOD_RES (67)..(68): Any amino acid
  MOD_RES (70)..(74): Any amino acid
  MOD_RES (83)..(85): Any amino acid
  MOD_RES (87)..(93): Any amino acid
  MOD_RES (95)..(96): Any amino acid
  MOD_RES (98)..(102): Any amino acid
  MOD_RES (111)..(113): Any amino acid
  MOD_RES (115)..(121): Any amino acid
  MOD_RES (123)..(124): Any amino acid
  MOD_RES (126)..(130): Any amino acid
  MOD_RES (139)..(141): Any amino acid
  MOD_RES (143)..(149): Any amino acid
  MOD_RES (151)..(152): Any amino acid
  MOD_RES (154)..(158): Any amino acid
  MOD_RES (167)..(169): Any amino acid
  MOD_RES (171)..(177): Any amino acid
  MOD_RES (179)..(180): Any amino acid
  MOD_RES (182)..(186): Any amino acid
  MOD_RES (195)..(197): Any amino acid
  MOD_RES (199)..(209): Any amino acid
XXXXXXXXXCXXCXXXXXSKKHLAEHXXXHXXXXXXXCXXCXXXXXQNSTLTEHXXXHXXXXXXXCXXCXXXXXTTGALTEHXXXHXXXXXXXCXXCXXXXXQAGHLASHXXXHXXXXXXXCXXCXXXXXTSGNLTEHXXXHXXXXXXXCXXCXXXXXTTGNLTVHXXXHXXXXXXXCXXCXXXXXTSHSLTEHXXXHXXXXXXXXXXX

SEQ ID NO: 2472 - protein, 209 aa, Artificial Sequence
  source: /note="Description of Artificial Sequence: Synthetic polypeptide"
  MOD_RES (1)..(9): Any amino acid
  MOD_RES (11)..(12): Any amino acid
  MOD_RES (14)..(18): Any amino acid
  MOD_RES (27)..(29): Any amino acid
  MOD_RES (31)..(37): Any amino acid
  MOD_RES (39)..(40): Any amino acid
  MOD_RES (42)..(46): Any amino acid
  MOD_RES (55)..(57): Any amino acid
  MOD_RES (59)..(65): Any amino acid
  MOD_RES (67)..(68): Any amino acid
  MOD_RES (70)..(74): Any amino acid
  MOD_RES (83)..(85): Any amino acid
  MOD_RES (87)..(93): Any amino acid
  MOD_RES (95)..(96): Any amino acid
  MOD_RES (98)..(102): Any amino acid
  MOD_RES (111)..(113): Any amino acid
  MOD_RES (115)..(121): Any amino acid
  MOD_RES (123)..(124): Any amino acid
  MOD_RES (126)..(130): Any amino acid
  MOD_RES (139)..(141): Any amino acid
  MOD_RES (143)..(149): Any amino acid
  MOD_RES (151)..(152): Any amino acid
  MOD_RES (154)..(158): Any amino acid
  MOD_RES (167)..(169): Any amino acid
  MOD_RES (171)..(177): Any amino acid
  MOD_RES (179)..(180): Any amino acid
  MOD_RES (182)..(186): Any amino acid
  MOD_RES (195)..(197): Any amino acid
  MOD_RES (199)..(209): Any amino acid
XXXXXXXXXCXXCXXXXXTSGNLTEHXXXHXXXXXXXCXXCXXXXXSKKHLAEHXXXHXXXXXXXCXXCXXXXXRNDALTEHXXXHXXXXXXXCXXCXXXXXRSDHLTNHXXXHXXXXXXXCXXCXXXXXQKSSLIAHXXXHXXXXXXXCXXCXXXXXRSDNLVRHXXXHXXXXXXXCXXCXXXXXQSGDLRRHXXXHXXXXXXXXXXX

SEQ ID NO: 2473 - protein, 209 aa, Artificial Sequence
  source: /note="Description of Artificial Sequence: Synthetic polypeptide"
  MOD_RES (1)..(9): Any amino acid
  MOD_RES (11)..(12): Any amino acid
  MOD_RES (14)..(18): Any amino acid
  MOD_RES (27)..(29): Any amino acid
  MOD_RES (31)..(37): Any amino acid
  MOD_RES (39)..(40): Any amino acid
  MOD_RES (42)..(46): Any amino acid
  MOD_RES (55)..(57): Any amino acid
  MOD_RES (59)..(65): Any amino acid
  MOD_RES (67)..(68): Any amino acid
  MOD_RES (70)..(74): Any amino acid
  MOD_RES (83)..(85): Any amino acid
  MOD_RES (87)..(93): Any amino acid
  MOD_RES (95)..(96): Any amino acid
  MOD_RES (98)..(102): Any amino acid
  MOD_RES (111)..(113): Any amino acid
  MOD_RES (115)..(121): Any amino acid
  MOD_RES (123)..(124): Any amino acid
  MOD_RES (126)..(130): Any amino acid
  MOD_RES (139)..(141): Any amino acid
  MOD_RES (143)..(149): Any amino acid
  MOD_RES (151)..(152): Any amino acid
  MOD_RES (154)..(158): Any amino acid
  MOD_RES (167)..(169): Any amino acid
  MOD_RES (171)..(177): Any amino acid
  MOD_RES (179)..(180): Any amino acid
  MOD_RES (182)..(186): Any amino acid
  MOD_RES (195)..(197): Any amino acid
  MOD_RES (199)..(209): Any amino acid
XXXXXXXXXCXXCXXXXXDPGHLVRHXXXHXXXXXXXCXXCXXXXXTSGNLTEHXXXHXXXXXXXCXXCXXXXXSKKHLAEHXXXHXXXXXXXCXXCXXXXXRNDALTEHXXXHXXXXXXXCXXCXXXXXRSDHLTNHXXXHXXXXXXXCXXCXXXXXQKSSLIAHXXXHXXXXXXXCXXCXXXXXRSDNLVRHXXXHXXXXXXXXXXX

SEQ ID NO: 2474 - protein, 209 aa, Artificial Sequence
  source: /note="Description of Artificial Sequence: Synthetic polypeptide"
  MOD_RES (1)..(9): Any amino acid
  MOD_RES (11)..(12): Any amino acid
  MOD_RES (14)..(18): Any amino acid
  MOD_RES (27)..(29): Any amino acid
  MOD_RES (31)..(37): Any amino acid
  MOD_RES (39)..(40): Any amino acid
  MOD_RES (42)..(46): Any amino acid
  MOD_RES (55)..(57): Any amino acid
  MOD_RES (59)..(65): Any amino acid
  MOD_RES (67)..(68): Any amino acid
  MOD_RES (70)..(74): Any amino acid
  MOD_RES (83)..(85): Any amino acid
  MOD_RES (87)..(93): Any amino acid
  MOD_RES (95)..(96): Any amino acid
  MOD_RES (98)..(102): Any amino acid
  MOD_RES (111)..(113): Any amino acid
  MOD_RES (115)..(121): Any amino acid
  MOD_RES (123)..(124): Any amino acid
  MOD_RES (126)..(130): Any amino acid
  MOD_RES (139)..(141): Any amino acid
  MOD_RES (143)..(149): Any amino acid
  MOD_RES (151)..(152): Any amino acid
  MOD_RES (154)..(158): Any amino acid
  MOD_RES (167)..(169): Any amino acid
  MOD_RES (171)..(177): Any amino acid
  MOD_RES (179)..(180): Any amino acid
  MOD_RES (182)..(186): Any amino acid
  MOD_RES (195)..(197): Any amino acid
  MOD_RES (199)..(209): Any amino acid
XXXXXXXXXCXXCXXXXXTSHSLTEHXXXHXXXXXXXCXXCXXXXXDPGHLVRHXXXHXXXXXXXCXXCXXXXXTSGNLTEHXXXHXXXXXXXCXXCXXXXXSKKHLAEHXXXHXXXXXXXCXXCXXXXXRNDALTEHXXXHXXXXXXXCXXCXXXXXRSDHLTNHXXXHXXXXXXXCXXCXXXXXQKSSLIAHXXXHXXXXXXXXXXX

SEQ ID NO: 2475 - protein, 209 aa, Artificial Sequence
  source: /note="Description of Artificial Sequence: Synthetic polypeptide"
  MOD_RES (1)..(9): Any amino acid
  MOD_RES (11)..(12): Any amino acid
  MOD_RES (14)..(18): Any amino acid
  MOD_RES (27)..(29): Any amino acid
  MOD_RES (31)..(37): Any amino acid
  MOD_RES (39)..(40): Any amino acid
  MOD_RES (42)..(46): Any amino acid
  MOD_RES (55)..(57): Any amino acid
  MOD_RES (59)..(65): Any amino acid
  MOD_RES (67)..(68): Any amino acid
  MOD_RES (70)..(74): Any amino acid
  MOD_RES (83)..(85): Any amino acid
  MOD_RES (87)..(93): Any amino acid
  MOD_RES (95)..(96): Any amino acid
  MOD_RES (98)..(102): Any amino acid
  MOD_RES (111)..(113): Any amino acid
  MOD_RES (115)..(121): Any amino acid
  MOD_RES (123)..(124): Any amino acid
  MOD_RES (126)..(130): Any amino acid
  MOD_RES (139)..(141): Any amino acid
  MOD_RES (143)..(149): Any amino acid
  MOD_RES (151)..(152): Any amino acid
  MOD_RES (154)..(158): Any amino acid
  MOD_RES (167)..(169): Any amino acid
  MOD_RES (171)..(177): Any amino acid
  MOD_RES (179)..(180): Any amino acid
  MOD_RES (182)..(186): Any amino acid
  MOD_RES (195)..(197): Any amino acid
  MOD_RES (199)..(209): Any amino acid
XXXXXXXXXCXXCXXXXXQSGHLTEHXXXHXXXXXXXCXXCXXXXXTSHSLTEHXXXHXXXXXXXCXXCXXXXXDPGHLVRHXXXHXXXXXXXCXXCXXXXXTSGNLTEHXXXHXXXXXXXCXXCXXXXXSKKHLAEHXXXHXXXXXXXCXXCXXXXXRNDALTEHXXXHXXXXXXXCXXCXXXXXRSDHLTNHXXXHXXXXXXXXXXX

SEQ ID NO: 2476 - protein, 209 aa, Artificial Sequence
  source: /note="Description of Artificial Sequence: Synthetic polypeptide"
  MOD_RES (1)..(9): Any amino acid
  MOD_RES (11)..(12): Any amino acid
  MOD_RES (14)..(18): Any amino acid
  MOD_RES (27)..(29): Any amino acid
  MOD_RES (31)..(37): Any amino acid
  MOD_RES (39)..(40): Any amino acid
  MOD_RES (42)..(46): Any amino acid
  MOD_RES (55)..(57): Any amino acid
  MOD_RES (59)..(65): Any amino acid
  MOD_RES (67)..(68): Any amino acid
  MOD_RES (70)..(74): Any amino acid
  MOD_RES (83)..(85): Any amino acid
  MOD_RES (87)..(93): Any amino acid
  MOD_RES (95)..(96): Any amino acid
  MOD_RES (98)..(102): Any amino acid
  MOD_RES (111)..(113): Any amino acid
  MOD_RES (115)..(121): Any amino acid
  MOD_RES (123)..(124): Any amino acid
  MOD_RES (126)..(130): Any amino acid
  MOD_RES (139)..(141): Any amino acid
  MOD_RES (143)..(149): Any amino acid
  MOD_RES (151)..(152): Any amino acid
  MOD_RES (154)..(158): Any amino acid
  MOD_RES (167)..(169): Any amino acid
  MOD_RES (171)..(177): Any amino acid
  MOD_RES (179)..(180): Any amino acid
  MOD_RES (182)..(186): Any amino acid
  MOD_RES (195)..(197): Any amino acid
  MOD_RES (199)..(209): Any amino acid
XXXXXXXXXCXXCXXXXXRSDHLTTHXXXHXXXXXXXCXXCXXXXXTSHSLTEHXXXHXXXXXXXCXXCXXXXXDCRDLARHXXXHXXXXXXXCXXCXXXXXTSGELVRHXXXHXXXXXXXCXXCXXXXXRKDNLKNHXXXHXXXXXXXCXXCXXXXXTSGNLVRHXXXHXXXXXXXCXXCXXXXXQLAHLRAHXXXHXXXXXXXXXXX

SEQ ID NO: 2477 - protein, 209 aa, Artificial Sequence
  source: /note="Description of Artificial Sequence: Synthetic polypeptide"
  MOD_RES (1)..(9): Any amino acid
  MOD_RES (11)..(12): Any amino acid
  MOD_RES (14)..(18): Any amino acid
  MOD_RES (27)..(29): Any amino acid
  MOD_RES (31)..(37): Any amino acid
  MOD_RES (39)..(40): Any amino acid
  MOD_RES (42)..(46): Any amino acid
  MOD_RES (55)..(57): Any amino acid
  MOD_RES (59)..(65): Any amino acid
  MOD_RES (67)..(68): Any amino acid
  MOD_RES (70)..(74): Any amino acid
  MOD_RES (83)..(85): Any amino acid
  MOD_RES (87)..(93): Any amino acid
  MOD_RES (95)..(96): Any amino acid
  MOD_RES (98)..(102): Any amino acid
  MOD_RES (111)..(113): Any amino acid
  MOD_RES (115)..(121): Any amino acid
  MOD_RES (123)..(124): Any amino acid
  MOD_RES (126)..(130): Any amino acid
  MOD_RES (139)..(141): Any amino acid
  MOD_RES (143)..(149): Any amino acid
  MOD_RES (151)..(152): Any amino acid
  MOD_RES (154)..(158): Any amino acid
  MOD_RES (167)..(169): Any amino acid
  MOD_RES (171)..(177): Any amino acid
  MOD_RES (179)..(180): Any amino acid
  MOD_RES (182)..(186): Any amino acid
  MOD_RES (195)..(197): Any amino acid
  MOD_RES (199)..(209): Any amino acid
XXXXXXXXXCXXCXXXXXQRANLRAHXXXHXXXXXXXCXXCXXXXXTKNSLTEHXXXHXXXXXXXCXXCXXXXXQRANLRAHXXXHXXXXXXXCXXCXXXXXREDNLHTHXXXHXXXXXXXCXXCXXXXXHKNALQNHXXXHXXXXXXXCXXCXXXXXRTDTLRDHXXXHXXXXXXXCXXCXXXXXSKKHLAEHXXXHXXXXXXXXXXX

SEQ ID NO: 2478 - protein, 209 aa, Artificial Sequence
  source: /note="Description of Artificial Sequence: Synthetic polypeptide"
  MOD_RES (1)..(9): Any amino acid
  MOD_RES (11)..(12): Any amino acid
  MOD_RES (14)..(18): Any amino acid
  MOD_RES (27)..(29): Any amino acid
  MOD_RES (31)..(37): Any amino acid
  MOD_RES (39)..(40): Any amino acid
  MOD_RES (42)..(46): Any amino acid
  MOD_RES (55)..(57): Any amino acid
  MOD_RES (59)..(65): Any amino acid
  MOD_RES (67)..(68): Any amino acid
  MOD_RES (70)..(74): Any amino acid
  MOD_RES (83)..(85): Any amino acid
  MOD_RES (87)..(93): Any amino acid
  MOD_RES (95)..(96): Any amino acid
  MOD_RES (98)..(102): Any amino acid
  MOD_RES (111)..(113): Any amino acid
  MOD_RES (115)..(121): Any amino acid
  MOD_RES (123)..(124): Any amino acid
  MOD_RES (126)..(130): Any amino acid
  MOD_RES (139)..(141): Any amino acid
  MOD_RES (143)..(149): Any amino acid
  MOD_RES (151)..(152): Any amino acid
  MOD_RES (154)..(158): Any amino acid
  MOD_RES (167)..(169): Any amino acid
  MOD_RES (171)..(177): Any amino acid
  MOD_RES (179)..(180): Any amino acid
  MOD_RES (182)..(186): Any amino acid
  MOD_RES (195)..(197): Any amino acid
  MOD_RES (199)..(209): Any amino acid
XXXXXXXXXCXXCXXXXXTKNSLTEHXXXHXXXXXXXCXXCXXXXXQRANLRAHXXXHXXXXXXXCXXCXXXXXREDNLHTHXXXHXXXXXXXCXXCXXXXXHKNALQNHXXXHXXXXXXXCXXCXXXXXRTDTLRDHXXXHXXXXXXXCXXCXXXXXSKKHLAEHXXXHXXXXXXXCXXCXXXXXRSDHLTTHXXXHXXXXXXXXXXX

SEQ ID NO: 2479 - protein, 209 aa, Artificial Sequence
  source: /note="Description of Artificial Sequence: Synthetic polypeptide"
  MOD_RES (1)..(9): Any amino acid
  MOD_RES (11)..(12): Any amino acid
  MOD_RES (14)..(18): Any amino acid
  MOD_RES (27)..(29): Any amino acid
  MOD_RES (31)..(37): Any amino acid
  MOD_RES (39)..(40): Any amino acid
  MOD_RES (42)..(46): Any amino acid
  MOD_RES (55)..(57): Any amino acid
  MOD_RES (59)..(65): Any amino acid
  MOD_RES (67)..(68): Any amino acid
  MOD_RES (70)..(74): Any amino acid
  MOD_RES (83)..(85): Any amino acid
  MOD_RES (87)..(93): Any amino acid
  MOD_RES (95)..(96): Any amino acid
  MOD_RES (98)..(102): Any amino acid
  MOD_RES (111)..(113): Any amino acid
  MOD_RES (115)..(121): Any amino acid
  MOD_RES (123)..(124): Any amino acid
  MOD_RES (126)..(130): Any amino acid
  MOD_RES (139)..(141): Any amino acid
  MOD_RES (143)..(149): Any amino acid
  MOD_RES (151)..(152): Any amino acid
  MOD_RES (154)..(158): Any amino acid
  MOD_RES (167)..(169): Any amino acid
  MOD_RES (171)..(177): Any amino acid
  MOD_RES (179)..(180): Any amino acid
  MOD_RES (182)..(186): Any amino acid
  MOD_RES (195)..(197): Any amino acid
  MOD_RES (199)..(209): Any amino acid
XXXXXXXXXCXXCXXXXXQRANLRAHXXXHXXXXXXXCXXCXXXXXREDNLHTHXXXHXXXXXXXCXXCXXXXXHKNALQNHXXXHXXXXXXXCXXCXXXXXRTDTLRDHXXXHXXXXXXXCXXCXXXXXSKKHLAEHXXXHXXXXXXXCXXCXXXXXRSDHLTTHXXXHXXXXXXXCXXCXXXXXTSHSLTEHXXXHXXXXXXXXXXX

SEQ ID NO: 2480 - protein, 209 aa, Artificial Sequence
  source: /note="Description of Artificial Sequence: Synthetic polypeptide"
  MOD_RES (1)..(9): Any amino acid
  MOD_RES (11)..(12): Any amino acid
  MOD_RES (14)..(18): Any amino acid
  MOD_RES (27)..(29): Any amino acid
  MOD_RES (31)..(37): Any amino acid
  MOD_RES (39)..(40): Any amino acid
  MOD_RES (42)..(46): Any amino acid
  MOD_RES (55)..(57): Any amino acid
  MOD_RES (59)..(65): Any amino acid
  MOD_RES (67)..(68): Any amino acid
  MOD_RES (70)..(74): Any amino acid
  MOD_RES (83)..(85): Any amino acid
  MOD_RES (87)..(93): Any amino acid
  MOD_RES (95)..(96): Any amino acid
  MOD_RES (98)..(102): Any amino acid
  MOD_RES (111)..(113): Any amino acid
  MOD_RES (115)..(121): Any amino acid
  MOD_RES (123)..(124): Any amino acid
  MOD_RES (126)..(130): Any amino acid
  MOD_RES (139)..(141): Any amino acid
  MOD_RES (143)..(149): Any amino acid
  MOD_RES (151)..(152): Any amino acid
  MOD_RES (154)..(158): Any amino acid
  MOD_RES (167)..(169): Any amino acid
  MOD_RES (171)..(177): Any amino acid
  MOD_RES (179)..(180): Any amino acid
  MOD_RES (182)..(186): Any amino acid
  MOD_RES (195)..(197): Any amino acid
  MOD_RES (199)..(209): Any amino acid
XXXXXXXXXCXXCXXXXXREDNLHTHXXXHXXXXXXXCXXCXXXXXHKNALQNHXXXHXXXXXXXCXXCXXXXXRTDTLRDHXXXHXXXXXXXCXXCXXXXXSKKHLAEHXXXHXXXXXXXCXXCXXXXXRSDHLTTHXXXHXXXXXXXCXXCXXXXXTSHSLTEHXXXHXXXXXXXCXXCXXXXXDCRDLARHXXXHXXXXXXXXXXX

SEQ ID NO: 2481 - protein, 209 aa, Artificial Sequence
  source: /note="Description of Artificial Sequence: Synthetic polypeptide"
  MOD_RES (1)..(9): Any amino acid
  MOD_RES (11)..(12): Any amino acid
  MOD_RES (14)..(18): Any amino acid
  MOD_RES (27)..(29): Any amino acid
  MOD_RES (31)..(37): Any amino acid
  MOD_RES (39)..(40): Any amino acid
  MOD_RES (42)..(46): Any amino acid
  MOD_RES (55)..(57): Any amino acid
  MOD_RES (59)..(65): Any amino acid
  MOD_RES (67)..(68): Any amino acid
  MOD_RES (70)..(74): Any amino acid
  MOD_RES (83)..(85): Any amino acid
  MOD_RES (87)..(93): Any amino acid
  MOD_RES (95)..(96): Any amino acid
  MOD_RES (98)..(102): Any amino acid
  MOD_RES (111)..(113): Any amino acid
  MOD_RES (115)..(121): Any amino acid
  MOD_RES (123)..(124): Any amino acid
  MOD_RES (126)..(130): Any amino acid
  MOD_RES (139)..(141): Any amino acid
  MOD_RES (143)..(149): Any amino acid
  MOD_RES (151)..(152): Any amino acid
  MOD_RES (154)..(158): Any amino acid
  MOD_RES (167)..(169): Any amino acid
  MOD_RES (171)..(177): Any amino acid
  MOD_RES (179)..(180): Any amino acid
  MOD_RES (182)..(186): Any amino acid
  MOD_RES (195)..(197): Any amino acid
  MOD_RES (199)..(209): Any amino acid
XXXXXXXXXCXXCXXXXXSKKHLAEHXXXHXXXXXXXCXXCXXXXXRSDHLTTHXXXHXXXXXXXCXXCXXXXXTSHSLTEHXXXHXXXXXXXCXXCXXXXXDCRDLARHXXXHXXXXXXXCXXCXXXXXTSGELVRHXXXHXXXXXXXCXXCXXXXXRKDNLKNHXXXHXXXXXXXCXXCXXXXXTSGNLVRHXXXHXXXXXXXXXXX

SEQ ID NO: 2482 - protein, 209 aa, Artificial Sequence
  source: /note="Description of Artificial Sequence: Synthetic polypeptide"
  MOD_RES (1)..(9): Any amino acid
  MOD_RES (11)..(12): Any amino acid
  MOD_RES (14)..(18): Any amino acid
  MOD_RES (27)..(29): Any amino acid
  MOD_RES (31)..(37): Any amino acid
  MOD_RES (39)..(40): Any amino acid
  MOD_RES (42)..(46): Any amino acid
  MOD_RES (55)..(57): Any amino acid
  MOD_RES (59)..(65): Any amino acid
  MOD_RES (67)..(68): Any amino acid
  MOD_RES (70)..(74): Any amino acid
  MOD_RES (83)..(85): Any amino acid
  MOD_RES (87)..(93): Any amino acid
  MOD_RES (95)..(96): Any amino acid
  MOD_RES (98)..(102): Any amino acid
  MOD_RES (111)..(113): Any amino acid
  MOD_RES (115)..(121): Any amino acid
  MOD_RES (123)..(124): Any amino acid
  MOD_RES (126)..(130): Any amino acid
  MOD_RES (139)..(141): Any amino acid
  MOD_RES (143)..(149): Any amino acid
  MOD_RES (151)..(152): Any amino acid
  MOD_RES (154)..(158): Any amino acid
  MOD_RES (167)..(169): Any amino acid
  MOD_RES (171)..(177): Any amino acid
  MOD_RES (179)..(180): Any amino acid
  MOD_RES (182)..(186): Any amino acid
  MOD_RES (195)..(197): Any amino acid
  MOD_RES (199)..(209): Any amino acid
XXXXXXXXXCXXCXXXXXHKNALQNHXXXHXXXXXXXCXXCXXXXXRTDTLRDHXXXHXXXXXXXCXXCXXXXXSKKHLAEHXXXHXXXXXXXCXXCXXXXXRSDHLTTHXXXHXXXXXXXCXXCXXXXXTSHSLTEHXXXHXXXXXXXCXXCXXXXXDCRDLARHXXXHXXXXXXXCXXCXXXXXTSGELVRHXXXHXXXXXXXXXXX

SEQ ID NO: 2483 - protein, 209 aa, Artificial Sequence
  source: /note="Description of Artificial Sequence: Synthetic polypeptide"
  MOD_RES (1)..(9): Any amino acid
  MOD_RES (11)..(12): Any amino acid
  MOD_RES (14)..(18): Any amino acid
  MOD_RES (27)..(29): Any amino acid
  MOD_RES (31)..(37): Any amino acid
  MOD_RES (39)..(40): Any amino acid
  MOD_RES (42)..(46): Any amino acid
  MOD_RES (55)..(57): Any amino acid
  MOD_RES (59)..(65): Any amino acid
  MOD_RES (67)..(68): Any amino acid
  MOD_RES (70)..(74): Any amino acid
  MOD_RES (83)..(85): Any amino acid
  MOD_RES (87)..(93): Any amino acid
  MOD_RES (95)..(96): Any amino acid
  MOD_RES (98)..(102): Any amino acid
  MOD_RES (111)..(113): Any amino acid
  MOD_RES (115)..(121): Any amino acid
  MOD_RES (123)..(124): Any amino acid
  MOD_RES (126)..(130): Any amino acid
  MOD_RES (139)..(141): Any amino acid
  MOD_RES (143)..(149): Any amino acid
  MOD_RES (151)..(152): Any amino acid
  MOD_RES (154)..(158): Any amino acid
  MOD_RES (167)..(169): Any amino acid
  MOD_RES (171)..(177): Any amino acid
  MOD_RES (179)..(180): Any amino acid
  MOD_RES (182)..(186): Any amino acid
  MOD_RES (195)..(197): Any amino acid
  MOD_RES (199)..(209): Any amino acid
XXXXXXXXXCXXCXXXXXRTDTLRDHXXXHXXXXXXXCXXCXXXXXSKKHLAEHXXXHXXXXXXXCXXCXXXXXRSDHLTTHXXXHXXXXXXXCXXCXXXXXTSHSLTEHXXXHXXXXXXXCXXCXXXXXDCRDLARHXXXHXXXXXXXCXXCXXXXXTSGELVRHXXXHXXXXXXXCXXCXXXXXRKDNLKNHXXXHXXXXXXXXXXX

SEQ ID NO: 2484 - protein, 209 aa, Artificial Sequence
  source: /note="Description of Artificial Sequence: Synthetic polypeptide"
  MOD_RES (1)..(9): Any amino acid
  MOD_RES (11)..(12): Any amino acid
  MOD_RES (14)..(18): Any amino acid
  MOD_RES (27)..(29): Any amino acid
  MOD_RES (31)..(37): Any amino acid
  MOD_RES (39)..(40): Any amino acid
  MOD_RES (42)..(46): Any amino acid
  MOD_RES (55)..(57): Any amino acid
  MOD_RES (59)..(65): Any amino acid
  MOD_RES (67)..(68): Any amino acid
  MOD_RES (70)..(74): Any amino acid
  MOD_RES (83)..(85): Any amino acid
  MOD_RES (87)..(93): Any amino acid
  MOD_RES (95)..(96): Any amino acid
  MOD_RES (98)..(102): Any amino acid
  MOD_RES (111)..(113): Any amino acid
  MOD_RES (115)..(121): Any amino acid
  MOD_RES (123)..(124): Any amino acid
  MOD_RES (126)..(130): Any amino acid
  MOD_RES (139)..(141): Any amino acid
  MOD_RES (143)..(149): Any amino acid
  MOD_RES (151)..(152): Any amino acid
  MOD_RES (154)..(158): Any amino acid
  MOD_RES (167)..(169): Any amino acid
  MOD_RES (171)..(177): Any amino acid
  MOD_RES (179)..(180): Any amino acid
  MOD_RES (182)..(186): Any amino acid
  MOD_RES (195)..(197): Any amino acid
  MOD_RES (199)..(209): Any amino acid
XXXXXXXXXCXXCXXXXXSKKHLAEHXXXHXXXXXXXCXXCXXXXXRSDHLTNHXXXHXXXXXXXCXXCXXXXXSKKHLAEHXXXHXXXXXXXCXXCXXXXXTTGNLTVHXXXHXXXXXXXCXXCXXXXXQNSTLTEHXXXHXXXXXXXCXXCXXXXXDSGNLRVHXXXHXXXXXXXCXXCXXXXXQLAHLRAHXXXHXXXXXXXXXXX

SEQ ID NO: 2485 - protein, 209 aa, Artificial Sequence
  source: /note="Description of Artificial Sequence: Synthetic polypeptide"
  MOD_RES (1)..(9): Any amino acid
  MOD_RES (11)..(12): Any amino acid
  MOD_RES (14)..(18): Any amino acid
  MOD_RES (27)..(29): Any amino acid
  MOD_RES (31)..(37): Any amino acid
  MOD_RES (39)..(40): Any amino acid
  MOD_RES (42)..(46): Any amino acid
  MOD_RES (55)..(57): Any amino acid
  MOD_RES (59)..(65): Any amino acid
  MOD_RES (67)..(68): Any amino acid
  MOD_RES (70)..(74): Any amino acid
  MOD_RES (83)..(85): Any amino acid
  MOD_RES (87)..(93): Any amino acid
  MOD_RES (95)..(96): Any amino acid
  MOD_RES (98)..(102): Any amino acid
  MOD_RES (111)..(113): Any amino acid
  MOD_RES (115)..(121): Any amino acid
  MOD_RES (123)..(124): Any amino acid
  MOD_RES (126)..(130): Any amino acid
  MOD_RES (139)..(141): Any amino acid
  MOD_RES (143)..(149): Any amino acid
  MOD_RES (151)..(152): Any amino acid
  MOD_RES (154)..(158): Any amino acid
  MOD_RES (167)..(169): Any amino acid
  MOD_RES (171)..(177): Any amino acid
  MOD_RES (179)..(180): Any amino acid
  MOD_RES (182)..(186): Any amino acid
  MOD_RES (195)..(197): Any amino acid
  MOD_RES (199)..(209): Any amino acid
XXXXXXXXXCXXCXXXXXRADNLTEHXXXHXXXXXXXCXXCXXXXXSKKHLAEHXXXHXXXXXXXCXXCXXXXXRSDHLTNHXXXHXXXXXXXCXXCXXXXXSKKHLAEHXXXHXXXXXXXCXXCXXXXXTTGNLTVHXXXHXXXXXXXCXXCXXXXXQNSTLTEHXXXHXXXXXXXCXXCXXXXXDSGNLRVHXXXHXXXXXXXXXXX

SEQ ID NO: 2486 - protein, 209 aa, Artificial Sequence
  source: /note="Description of Artificial Sequence: Synthetic polypeptide"
  MOD_RES (1)..(9): Any amino acid
  MOD_RES (11)..(12): Any amino acid
  MOD_RES (14)..(18): Any amino acid
  MOD_RES (27)..(29): Any amino acid
  MOD_RES (31)..(37): Any amino acid
  MOD_RES (39)..(40): Any amino acid
  MOD_RES (42)..(46): Any amino acid
  MOD_RES (55)..(57): Any amino acid
  MOD_RES (59)..(65): Any amino acid
  MOD_RES (67)..(68): Any amino acid
  MOD_RES (70)..(74): Any amino acid
  MOD_RES (83)..(85): Any amino acid
  MOD_RES (87)..(93): Any amino acid
  MOD_RES (95)..(96): Any amino acid
  MOD_RES (98)..(102): Any amino acid
  MOD_RES (111)..(113): Any amino acid
  MOD_RES (115)..(121): Any amino acid
  MOD_RES (123)..(124): Any amino acid
  MOD_RES (126)..(130): Any amino acid
  MOD_RES (139)..(141): Any amino acid
  MOD_RES (143)..(149): Any amino acid
  MOD_RES (151)..(152): Any amino acid
  MOD_RES (154)..(158): Any amino acid
  MOD_RES (167)..(169): Any amino acid
  MOD_RES (171)..(177): Any amino acid
  MOD_RES (179)..(180): Any amino acid
  MOD_RES (182)..(186): Any amino acid
  MOD_RES (195)..(197): Any amino acid
  MOD_RES (199)..(209): Any amino acid
XXXXXXXXXCXXCXXXXXRRDELNVHXXXHXXXXXXXCXXCXXXXXRADNLTEHXXXHXXXXXXXCXXCXXXXXSKKHLAEHXXXHXXXXXXXCXXCXXXXXRSDHLTNHXXXHXXXXXXXCXXCXXXXXSKKHLAEHXXXHXXXXXXXCXXCXXXXXTTGNLTVHXXXHXXXXXXXCXXCXXXXXQNSTLTEHXXXHXXXXXXXXXXX

SEQ ID NO: 2487 - protein, 209 aa, Artificial Sequence
  source: /note="Description of Artificial Sequence: Synthetic polypeptide"
  MOD_RES (1)..(9): Any amino acid
  MOD_RES (11)..(12): Any amino acid
  MOD_RES (14)..(18): Any amino acid
  MOD_RES (27)..(29): Any amino acid
  MOD_RES (31)..(37): Any amino acid
  MOD_RES (39)..(40): Any amino acid
  MOD_RES (42)..(46): Any amino acid
  MOD_RES (55)..(57): Any amino acid
  MOD_RES (59)..(65): Any amino acid
  MOD_RES (67)..(68): Any amino acid
  MOD_RES (70)..(74): Any amino acid
  MOD_RES (83)..(85): Any amino acid
  MOD_RES (87)..(93): Any amino acid
  MOD_RES (95)..(96): Any amino acid
  MOD_RES (98)..(102): Any amino acid
  MOD_RES (111)..(113): Any amino acid
  MOD_RES (115)..(121): Any amino acid
  MOD_RES (123)..(124): Any amino acid
  MOD_RES (126)..(130): Any amino acid
  MOD_RES (139)..(141): Any amino acid
  MOD_RES (143)..(149): Any amino acid
  MOD_RES (151)..(152): Any amino acid
  MOD_RES (154)..(158): Any amino acid
  MOD_RES (167)..(169): Any amino acid
  MOD_RES (171)..(177): Any amino acid
  MOD_RES (179)..(180): Any amino acid
  MOD_RES (182)..(186): Any amino acid
  MOD_RES (195)..(197): Any amino acid
  MOD_RES (199)..(209): Any amino acid
XXXXXXXXXCXXCXXXXXTSHSLTEHXXXHXXXXXXXCXXCXXXXXRRDELNVHXXXHXXXXXXXCXXCXXXXXRADNLTEHXXXHXXXXXXXCXXCXXXXXSKKHLAEHXXXHXXXXXXXCXXCXXXXXRSDHLTNHXXXHXXXXXXXCXXCXXXXXSKKHLAEHXXXHXXXXXXXCXXCXXXXXTTGNLTVHXXXHXXXXXXXXXXX

SEQ ID NO: 2488 - protein, 209 aa, Artificial Sequence
  source: /note="Description of Artificial Sequence: Synthetic polypeptide"
  MOD_RES (1)..(9): Any amino acid
  MOD_RES (11)..(12): Any amino acid
  MOD_RES (14)..(18): Any amino acid
  MOD_RES (27)..(29): Any amino acid
  MOD_RES (31)..(37): Any amino acid
  MOD_RES (39)..(40): Any amino acid
  MOD_RES (42)..(46): Any amino acid
  MOD_RES (55)..(57): Any amino acid
  MOD_RES (59)..(65): Any amino acid
  MOD_RES (67)..(68): Any amino acid
  MOD_RES (70)..(74): Any amino acid
  MOD_RES (83)..(85): Any amino acid
  MOD_RES (87)..(93): Any amino acid
  MOD_RES (95)..(96): Any amino acid
  MOD_RES (98)..(102): Any amino acid
  MOD_RES (111)..(113): Any amino acid
  MOD_RES (115)..(121): Any amino acid
  MOD_RES (123)..(124): Any amino acid
  MOD_RES (126)..(130): Any amino acid
  MOD_RES (139)..(141): Any amino acid
  MOD_RES (143)..(149): Any amino acid
  MOD_RES (151)..(152): Any amino acid
  MOD_RES (154)..(158): Any amino acid
  MOD_RES (167)..(169): Any amino acid
  MOD_RES (171)..(177): Any amino acid
  MOD_RES (179)..(180): Any amino acid
  MOD_RES (182)..(186): Any amino acid
  MOD_RES (195)..(197): Any amino acid
  MOD_RES (199)..(209): Any amino acid
XXXXXXXXXCXXCXXXXXTTGALTEHXXXHXXXXXXXCXXCXXXXXTTGNLTVHXXXHXXXXXXXCXXCXXXXXDCRDLARHXXXHXXXXXXXCXXCXXXXXTSGNLVRHXXXHXXXXXXXCXXCXXXXXTSHSLTEHXXXHXXXXXXXCXXCXXXXXDCRDLARHXXXHXXXXXXXCXXCXXXXXRADNLTEHXXXHXXXXXXXXXXX

SEQ ID NO: 2489 - protein, 209 aa, Artificial Sequence
  source: /note="Description of Artificial Sequence: Synthetic polypeptide"
  MOD_RES (1)..(9): Any amino acid
  MOD_RES (11)..(12): Any amino acid
  MOD_RES (14)..(18): Any amino acid
  MOD_RES (27)..(29): Any amino acid
  MOD_RES (31)..(37): Any amino acid
  MOD_RES (39)..(40): Any amino acid
  MOD_RES (42)..(46): Any amino acid
  MOD_RES (55)..(57): Any amino acid
  MOD_RES (59)..(65): Any amino acid
  MOD_RES (67)..(68): Any amino acid
  MOD_RES (70)..(74): Any amino acid
  MOD_RES (83)..(85): Any amino acid
  MOD_RES (87)..(93): Any amino acid
  MOD_RES (95)..(96): Any amino acid
  MOD_RES (98)..(102): Any amino acid
  MOD_RES (111)..(113): Any amino acid
  MOD_RES (115)..(121): Any amino acid
  MOD_RES (123)..(124): Any amino acid
  MOD_RES (126)..(130): Any amino acid
  MOD_RES (139)..(141): Any amino acid
  MOD_RES (143)..(149): Any amino acid
  MOD_RES (151)..(152): Any amino acid
  MOD_RES (154)..(158): Any amino acid
  MOD_RES (167)..(169): Any amino acid
  MOD_RES (171)..(177): Any amino acid
  MOD_RES (179)..(180): Any amino acid
  MOD_RES (182)..(186): Any amino acid
  MOD_RES (195)..(197): Any amino acid
  MOD_RES (199)..(209): Any amino acid
XXXXXXXXXCXXCXXXXXTKNSLTEHXXXHXXXXXXXCXXCXXXXXTSGNLVRHXXXHXXXXXXXCXXCXXXXXRNDALTEHXXXHXXXXXXXCXXCXXXXXTTGALTEHXXXHXXXXXXXCXXCXXXXXTTGNLTVHXXXHXXXXXXXCXXCXXXXXDCRDLARHXXXHXXXXXXXCXXCXXXXXTSGNLVRHXXXHXXXXXXXXXXX

SEQ ID NO: 2490 - protein, 209 aa, Artificial Sequence
  source: /note="Description of Artificial Sequence: Synthetic polypeptide"
  MOD_RES (1)..(9): Any amino acid
  MOD_RES (11)..(12): Any amino acid
  MOD_RES (14)..(18): Any amino acid
  MOD_RES (27)..(29): Any amino acid
  MOD_RES (31)..(37): Any amino acid
  MOD_RES (39)..(40): Any amino acid
  MOD_RES (42)..(46): Any amino acid
  MOD_RES (55)..(57): Any amino acid
  MOD_RES (59)..(65): Any amino acid
  MOD_RES (67)..(68): Any amino acid
  MOD_RES (70)..(74): Any amino acid
  MOD_RES (83)..(85): Any amino acid
  MOD_RES (87)..(93): Any amino acid
  MOD_RES (95)..(96): Any amino acid
  MOD_RES (98)..(102): Any amino acid
  MOD_RES (111)..(113): Any amino acid
  MOD_RES (115)..(121): Any amino acid
  MOD_RES (123)..(124): Any amino acid
  MOD_RES (126)..(130): Any amino acid
  MOD_RES (139)..(141): Any amino acid
  MOD_RES (143)..(149): Any amino acid
  MOD_RES (151)..(152): Any amino acid
  MOD_RES (154)..(158): Any amino acid
  MOD_RES (167)..(169): Any amino acid
  MOD_RES (171)..(177): Any amino acid
  MOD_RES (179)..(180): Any amino acid
  MOD_RES (182)..(186): Any amino acid
  MOD_RES (195)..(197): Any amino acid
  MOD_RES (199)..(209): Any amino acid
XXXXXXXXXCXXCXXXXXRNDALTEHXXXHXXXXXXXCXXCXXXXXTTGALTEHXXXHXXXXXXXCXXCXXXXXTTGNLTVHXXXHXXXXXXXCXXCXXXXXDCRDLARHXXXHXXXXXXXCXXCXXXXXTSGNLVRHXXXHXXXXXXXCXXCXXXXXTSHSLTEHXXXHXXXXXXXCXXCXXXXXDCRDLARHXXXHXXXXXXXXXXX

SEQ ID NO: 2491 - protein, 209 aa, Artificial Sequence
  source: /note="Description of Artificial Sequence: Synthetic polypeptide"
  MOD_RES (1)..(9): Any amino acid
  MOD_RES (11)..(12): Any amino acid
  MOD_RES (14)..(18): Any amino acid
  MOD_RES (27)..(29): Any amino acid
  MOD_RES (31)..(37): Any amino acid
  MOD_RES (39)..(40): Any amino acid
  MOD_RES (42)..(46): Any amino acid
  MOD_RES (55)..(57): Any amino acid
  MOD_RES (59)..(65): Any amino acid
  MOD_RES (67)..(68): Any amino acid
  MOD_RES (70)..(74): Any amino acid
  MOD_RES (83)..(85): Any amino acid
  MOD_RES (87)..(93): Any amino acid
  MOD_RES (95)..(96): Any amino acid
  MOD_RES (98)..(102): Any amino acid
  MOD_RES (111)..(113): Any amino acid
  MOD_RES (115)..(121): Any amino acid
  MOD_RES (123)..(124): Any amino acid
  MOD_RES (126)..(130): Any amino acid
  MOD_RES (139)..(141): Any amino acid
  MOD_RES (143)..(149): Any amino acid
  MOD_RES (151)..(152): Any amino acid
  MOD_RES (154)..(158): Any amino acid
  MOD_RES (167)..(169): Any amino acid
  MOD_RES (171)..(177): Any amino acid
  MOD_RES (179)..(180): Any amino acid
  MOD_RES (182)..(186): Any amino acid
  MOD_RES (195)..(197): Any amino acid
  MOD_RES (199)..(209): Any amino acid
XXXXXXXXXCXXCXXXXXTSGNLVRHXXXHXXXXXXXCXXCXXXXXRNDALTEHXXXHXXXXXXXCXXCXXXXXTTGALTEHXXXHXXXXXXXCXXCXXXXXTTGNLTVHXXXHXXXXXXXCXXCXXXXXDCRDLARHXXXHXXXXXXXCXXCXXXXXTSGNLVRHXXXHXXXXXXXCXXCXXXXXTSHSLTEHXXXHXXXXXXXXXXX

SEQ ID NO: 2492 - protein, 209 aa, Artificial Sequence
  source: /note="Description of Artificial Sequence: Synthetic polypeptide"
  MOD_RES (1)..(9): Any amino acid
  MOD_RES (11)..(12): Any amino acid
  MOD_RES (14)..(18): Any amino acid
  MOD_RES (27)..(29): Any amino acid
  MOD_RES (31)..(37): Any amino acid
  MOD_RES (39)..(40): Any amino acid
  MOD_RES (42)..(46): Any amino acid
  MOD_RES (55)..(57): Any amino acid
  MOD_RES (59)..(65): Any amino acid
  MOD_RES (67)..(68): Any amino acid
  MOD_RES (70)..(74): Any amino acid
  MOD_RES (83)..(85): Any amino acid
  MOD_RES (87)..(93): Any amino acid
  MOD_RES (95)..(96): Any amino acid
  MOD_RES (98)..(102): Any amino acid
  MOD_RES (111)..(113): Any amino acid
  MOD_RES (115)..(121): Any amino acid
  MOD_RES (123)..(124): Any amino acid
  MOD_RES (126)..(130): Any amino acid
  MOD_RES (139)..(141): Any amino acid
  MOD_RES (143)..(149): Any amino acid
  MOD_RES (151)..(152): Any amino acid
  MOD_RES (154)..(158): Any amino acid
  MOD_RES (167)..(169): Any amino acid
  MOD_RES (171)..(177): Any amino acid
  MOD_RES (179)..(180): Any amino acid
  MOD_RES (182)..(186): Any amino acid
  MOD_RES (195)..(197): Any amino acid
  MOD_RES (199)..(209): Any amino acid
XXXXXXXXXCXXCXXXXXQRAHLERHXXXHXXXXXXXCXXCXXXXXTHLDLIRHXXXHXXXXXXXCXXCXXXXXRSDHLTTHXXXHXXXXXXXCXXCXXXXXQSSNLVRHXXXHXXXXXXXCXXCXXXXXQSGDLRRHXXXHXXXXXXXCXXCXXXXXQRAHLERHXXXHXXXXXXXCXXCXXXXXRNDALTEHXXXHXXXXXXXXXXX

SEQ ID NO: 2493 - protein, 209 aa, Artificial Sequence
  source: /note="Description of Artificial Sequence: Synthetic polypeptide"
  MOD_RES (1)..(9): Any amino acid
  MOD_RES (11)..(12): Any amino acid
  MOD_RES (14)..(18): Any amino acid
  MOD_RES (27)..(29): Any amino acid
  MOD_RES (31)..(37): Any amino acid
  MOD_RES (39)..(40): Any amino acid
  MOD_RES (42)..(46): Any amino acid
  MOD_RES (55)..(57): Any amino acid
  MOD_RES (59)..(65): Any amino acid
  MOD_RES (67)..(68): Any amino acid
  MOD_RES (70)..(74): Any amino acid
  MOD_RES (83)..(85): Any amino acid
  MOD_RES (87)..(93): Any amino acid
  MOD_RES (95)..(96): Any amino acid
  MOD_RES (98)..(102): Any amino acid
  MOD_RES (111)..(113): Any amino acid
  MOD_RES (115)..(121): Any amino acid
  MOD_RES (123)..(124): Any amino acid
  MOD_RES (126)..(130): Any amino acid
  MOD_RES (139)..(141): Any amino acid
  MOD_RES (143)..(149): Any amino acid
  MOD_RES (151)..(152): Any amino acid
  MOD_RES (154)..(158): Any amino acid
  MOD_RES (167)..(169): Any amino acid
  MOD_RES (171)..(177): Any amino acid
  MOD_RES (179)..(180): Any amino acid
  MOD_RES (182)..(186): Any amino acid
  MOD_RES (195)..(197): Any amino acid
  MOD_RES (199)..(209): Any amino acid
XXXXXXXXXCXXCXXXXXTHLDLIRHXXXHXXXXXXXCXXCXXXXXRSDHLTTHXXXHXXXXXXXCXXCXXXXXQSSNLVRHXXXHXXXXXXXCXXCXXXXXQSGDLRRHXXXHXXXXXXXCXXCXXXXXQRAHLERHXXXHXXXXXXXCXXCXXXXXRNDALTEHXXXHXXXXXXXCXXCXXXXXSKKHLAEHXXXHXXXXXXXXXXX

SEQ ID NO: 2494 - protein, 209 aa, Artificial Sequence
  source: /note="Description of Artificial Sequence: Synthetic polypeptide"
  MOD_RES (1)..(9): Any amino acid
  MOD_RES (11)..(12): Any amino acid
  MOD_RES (14)..(18): Any amino acid
  MOD_RES (27)..(29): Any amino acid
  MOD_RES (31)..(37): Any amino acid
  MOD_RES (39)..(40): Any amino acid
  MOD_RES (42)..(46): Any amino acid
  MOD_RES (55)..(57): Any amino acid
  MOD_RES (59)..(65): Any amino acid
  MOD_RES (67)..(68): Any amino acid
  MOD_RES (70)..(74): Any amino acid
  MOD_RES (83)..(85): Any amino acid
  MOD_RES (87)..(93): Any amino acid
  MOD_RES (95)..(96): Any amino acid
  MOD_RES (98)..(102): Any amino acid
  MOD_RES (111)..(113): Any amino acid
  MOD_RES (115)..(121): Any amino acid
  MOD_RES (123)..(124): Any amino acid
  MOD_RES (126)..(130): Any amino acid
  MOD_RES (139)..(141): Any amino acid
  MOD_RES (143)..(149): Any amino acid
  MOD_RES (151)..(152): Any amino acid
  MOD_RES (154)..(158): Any amino acid
  MOD_RES (167)..(169): Any amino acid
  MOD_RES (171)..(177): Any amino acid
  MOD_RES (179)..(180): Any amino acid
  MOD_RES (182)..(186): Any amino acid
  MOD_RES (195)..(197): Any amino acid
  MOD_RES (199)..(209): Any amino acid
XXXXXXXXXCXXCXXXXXHRTTLTNHXXXHXXXXXXXCXXCXXXXXQRAHLERHXXXHXXXXXXXCXXCXXXXXTHLDLIRHXXXHXXXXXXXCXXCXXXXXRSDHLTTHXXXHXXXXXXXCXXCXXXXXQSSNLVRHXXXHXXXXXXXCXXCXXXXXQSGDLRRHXXXHXXXXXXXCXXCXXXXXQRAHLERHXXXHXXXXXXXXXXX

SEQ ID NO: 2495 - protein, 209 aa, Artificial Sequence
  source: /note="Description of Artificial Sequence: Synthetic polypeptide"
  MOD_RES (1)..(9): Any amino acid
  MOD_RES (11)..(12): Any amino acid
  MOD_RES (14)..(18): Any amino acid
  MOD_RES (27)..(29): Any amino acid
  MOD_RES (31)..(37): Any amino acid
  MOD_RES (39)..(40): Any amino acid
  MOD_RES (42)..(46): Any amino acid
  MOD_RES (55)..(57): Any amino acid
  MOD_RES (59)..(65): Any amino acid
  MOD_RES (67)..(68): Any amino acid
  MOD_RES (70)..(74): Any amino acid
  MOD_RES (83)..(85): Any amino acid
  MOD_RES (87)..(93): Any amino acid
  MOD_RES (95)..(96): Any amino acid
  MOD_RES (98)..(102): Any amino acid
  MOD_RES (111)..(113): Any amino acid
  MOD_RES (115)..(121): Any amino acid
  MOD_RES (123)..(124): Any amino acid
  MOD_RES (126)..(130): Any amino acid
  MOD_RES (139)..(141): Any amino acid
  MOD_RES (143)..(149): Any amino acid
  MOD_RES (151)..(152): Any amino acid
  MOD_RES (154)..(158): Any amino acid
  MOD_RES (167)..(169): Any amino acid
  MOD_RES (171)..(177): Any amino acid
  MOD_RES (179)..(180): Any amino acid
  MOD_RES (182)..(186): Any amino acid
  MOD_RES (195)..(197): Any amino acid
  MOD_RES (199)..(209): Any amino acid
XXXXXXXXXCXXCXXXXXRSDHLTTHXXXHXXXXXXXCXXCXXXXXQSSNLVRHXXXHXXXXXXXCXXCXXXXXQSGDLRRHXXXHXXXXXXXCXXCXXXXXQRAHLERHXXXHXXXXXXXCXXCXXXXXRNDALTEHXXXHXXXXXXXCXXCXXXXXSKKHLAEHXXXHXXXXXXXCXXCXXXXXTSGSLVRHXXXHXXXXXXXXXXX

SEQ ID NO: 2496 - protein, 209 aa, Artificial Sequence
  source: /note="Description of Artificial Sequence: Synthetic polypeptide"
  MOD_RES (1)..(9): Any amino acid
  MOD_RES (11)..(12): Any amino acid
  MOD_RES (14)..(18): Any amino acid
  MOD_RES (27)..(29): Any amino acid
  MOD_RES (31)..(37): Any amino acid
  MOD_RES (39)..(40): Any amino acid
  MOD_RES (42)..(46): Any amino acid
  MOD_RES (55)..(57): Any amino acid
  MOD_RES (59)..(65): Any amino acid
  MOD_RES (67)..(68): Any amino acid
  MOD_RES (70)..(74): Any amino acid
  MOD_RES (83)..(85): Any amino acid
  MOD_RES (87)..(93): Any amino acid
  MOD_RES (95)..(96): Any amino acid
  MOD_RES (98)..(102): Any amino acid
  MOD_RES (111)..(113): Any amino acid
  MOD_RES (115)..(121): Any amino acid
  MOD_RES (123)..(124): Any amino acid
  MOD_RES (126)..(130): Any amino acid
  MOD_RES (139)..(141): Any amino acid
  MOD_RES (143)..(149): Any amino acid
  MOD_RES (151)..(152): Any amino acid
  MOD_RES (154)..(158): Any amino acid
  MOD_RES (167)..(169): Any amino acid
  MOD_RES (171)..(177): Any amino acid
  MOD_RES (179)..(180): Any amino acid
  MOD_RES (182)..(186): Any amino acid
  MOD_RES (195)..(197): Any amino acid
  MOD_RES (199)..(209): Any amino acid
XXXXXXXXXCXXCXXXXXQSSNLVRHXXXHXXXXXXXCXXCXXXXXQSGDLRRHXXXHXXXXXXXCXXCXXXXXQRAHLERHXXXHXXXXXXXCXXCXXXXXRNDALTEHXXXHXXXXXXXCXXCXXXXXSKKHLAEHXXXHXXXXXXXCXXCXXXXXTSGSLVRHXXXHXXXXXXXCXXCXXXXXRNDTLTEHXXXHXXXXXXXXXXX

SEQ ID NO: 2497 - protein, 209 aa, Artificial Sequence
  source: /note="Description of Artificial Sequence: Synthetic polypeptide"
  MOD_RES (1)..(9): Any amino acid
  MOD_RES (11)..(12): Any amino acid
  MOD_RES (14)..(18): Any amino acid
  MOD_RES (27)..(29): Any amino acid
  MOD_RES (31)..(37): Any amino acid
  MOD_RES (39)..(40): Any amino acid
  MOD_RES (42)..(46): Any amino acid
  MOD_RES (55)..(57): Any amino acid
  MOD_RES (59)..(65): Any amino acid
  MOD_RES (67)..(68): Any amino acid
  MOD_RES (70)..(74): Any amino acid
  MOD_RES (83)..(85): Any amino acid
  MOD_RES (87)..(93): Any amino acid
  MOD_RES (95)..(96): Any amino acid
  MOD_RES (98)..(102): Any amino acid
  MOD_RES (111)..(113): Any amino acid
  MOD_RES (115)..(121): Any amino acid
  MOD_RES (123)..(124): Any amino acid
  MOD_RES (126)..(130): Any amino acid
  MOD_RES (139)..(141): Any amino acid
  MOD_RES (143)..(149): Any amino acid
  MOD_RES (151)..(152): Any amino acid
  MOD_RES (154)..(158): Any amino acid
  MOD_RES (167)..(169): Any amino acid
  MOD_RES (171)..(177): Any amino acid
  MOD_RES (179)..(180): Any amino acid
  MOD_RES (182)..(186): Any amino acid
  MOD_RES (195)..(197): Any amino acid
  MOD_RES (199)..(209): Any amino acid
XXXXXXXXXCXXCXXXXXQSSNLVRHXXXHXXXXXXXCXXCXXXXXRNDALTEHXXXHXXXXXXXCXXCXXXXXQRAHLERHXXXHXXXXXXXCXXCXXXXXTTGNLTVHXXXHXXXXXXXCXXCXXXXXRADNLTEHXXXHXXXXXXXCXXCXXXXXRSDNLVRHXXXHXXXXXXXCXXCXXXXXRSDHLTTHXXXHXXXXXXXXXXX

SEQ ID NO: 2498 - protein, 209 aa, Artificial Sequence
  source: /note="Description of Artificial Sequence: Synthetic polypeptide"
  MOD_RES (1)..(9): Any amino acid
  MOD_RES (11)..(12): Any amino acid
  MOD_RES (14)..(18): Any amino acid
  MOD_RES (27)..(29): Any amino acid
  MOD_RES (31)..(37): Any amino acid
  MOD_RES (39)..(40): Any amino acid
  MOD_RES (42)..(46): Any amino acid
  MOD_RES (55)..(57): Any amino acid
  MOD_RES (59)..(65): Any amino acid
  MOD_RES (67)..(68): Any amino acid
  MOD_RES (70)..(74): Any amino acid
  MOD_RES (83)..(85): Any amino acid
  MOD_RES (87)..(93): Any amino acid
  MOD_RES (95)..(96): Any amino acid
  MOD_RES (98)..(102): Any amino acid
  MOD_RES (111)..(113): Any amino acid
  MOD_RES (115)..(121): Any amino acid
  MOD_RES (123)..(124): Any amino acid
  MOD_RES (126)..(130): Any amino acid
  MOD_RES (139)..(141): Any amino acid
  MOD_RES (143)..(149): Any amino acid
  MOD_RES (151)..(152): Any amino acid
  MOD_RES (154)..(158): Any amino acid
  MOD_RES (167)..(169): Any amino acid
  MOD_RES (171)..(177): Any amino acid
  MOD_RES (179)..(180): Any amino acid
  MOD_RES (182)..(186): Any amino acid
  MOD_RES (195)..(197): Any amino acid
  MOD_RES (199)..(209): Any amino acid
XXXXXXXXXCXXCXXXXXRNDALTEHXXXHXXXXXXXCXXCXXXXXQRAHLERHXXXHXXXXXXXCXXCXXXXXTTGNLTVHXXXHXXXXXXXCXXCXXXXXRADNLTEHXXXHXXXXXXXCXXCXXXXXRSDNLVRHXXXHXXXXXXXCXXCXXXXXRSDHLTTHXXXHXXXXXXXCXXCXXXXXSKKHLAEHXXXHXXXXXXXXXXX

SEQ ID NO: 2499 - protein, 209 aa, Artificial Sequence
  source: /note="Description of Artificial Sequence: Synthetic polypeptide"
  MOD_RES (1)..(9): Any amino acid
  MOD_RES (11)..(12): Any amino acid
  MOD_RES (14)..(18): Any amino acid
  MOD_RES (27)..(29): Any amino acid
  MOD_RES (31)..(37): Any amino acid
  MOD_RES (39)..(40): Any amino acid
  MOD_RES (42)..(46): Any amino acid
  MOD_RES (55)..(57): Any amino acid
  MOD_RES (59)..(65): Any amino acid
  MOD_RES (67)..(68): Any amino acid
  MOD_RES (70)..(74): Any amino acid
  MOD_RES (83)..(85): Any amino acid
  MOD_RES (87)..(93): Any amino acid
  MOD_RES (95)..(96): Any amino acid
  MOD_RES (98)..(102): Any amino acid
  MOD_RES (111)..(113): Any amino acid
  MOD_RES (115)..(121): Any amino acid
  MOD_RES (123)..(124): Any amino acid
  MOD_RES (126)..(130): Any amino acid
  MOD_RES (139)..(141): Any amino acid
  MOD_RES (143)..(149): Any amino acid
  MOD_RES (151)..(152): Any amino acid
  MOD_RES (154)..(158): Any amino acid
  MOD_RES (167)..(169): Any amino acid
  MOD_RES (171)..(177): Any amino acid
  MOD_RES (179)..(180): Any amino acid
  MOD_RES (182)..(186): Any amino acid
  MOD_RES (195)..(197): Any amino acid
  MOD_RES (199)..(209): Any amino acid
XXXXXXXXXCXXCXXXXXRADNLTEHXXXHXXXXXXXCXXCXXXXXDPGHLVRHXXXHXXXXXXXCXXCXXXXXRSDNLVRHXXXHXXXXXXXCXXCXXXXXRSDHLTTHXXXHXXXXXXXCXXCXXXXXTSGSLVRHXXXHXXXXXXXCXXCXXXXXQSSNLVRHXXXHXXXXXXXCXXCXXXXXRNDALTEHXXXHXXXXXXXXXXX

SEQ ID NO: 2500 - protein, 209 aa, Artificial Sequence
  source: /note="Description of Artificial Sequence: Synthetic polypeptide"
  MOD_RES (1)..(9): Any amino acid
  MOD_RES (11)..(12): Any amino acid
  MOD_RES (14)..(18): Any amino acid
  MOD_RES (27)..(29): Any amino acid
  MOD_RES (31)..(37): Any amino acid
  MOD_RES (39)..(40): Any amino acid
  MOD_RES (42)..(46): Any amino acid
  MOD_RES (55)..(57): Any amino acid
  MOD_RES (59)..(65): Any amino acid
  MOD_RES (67)..(68): Any amino acid
  MOD_RES (70)..(74): Any amino acid
  MOD_RES (83)..(85): Any amino acid
  MOD_RES (87)..(93): Any amino acid
  MOD_RES (95)..(96): Any amino acid
  MOD_RES (98)..(102): Any amino acid
  MOD_RES (111)..(113): Any amino acid
  MOD_RES (115)..(121): Any amino acid
  MOD_RES (123)..(124): Any amino acid
  MOD_RES (126)..(130): Any amino acid
  MOD_RES (139)..(141): Any amino acid
  MOD_RES (143)..(149): Any amino acid
  MOD_RES (151)..(152): Any amino acid
  MOD_RES (154)..(158): Any amino acid
  MOD_RES (167)..(169): Any amino acid
  MOD_RES (171)..(177): Any amino acid
  MOD_RES (179)..(180): Any amino acid
  MOD_RES (182)..(186): Any amino acid
  MOD_RES (195)..(197): Any amino acid
  MOD_RES (199)..(209): Any amino acid
XXXXXXXXXCXXCXXXXXHKNALQNHXXXHXXXXXXXCXXCXXXXXRADNLTEHXXXHXXXXXXXCXXCXXXXXDPGHLVRHXXXHXXXXXXXCXXCXXXXXRSDNLVRHXXXHXXXXXXXCXXCXXXXXRSDHLTTHXXXHXXXXXXXCXXCXXXXXTSGSLVRHXXXHXXXXXXXCXXCXXXXXQSSNLVRHXXXHXXXXXXXXXXX

(The sequence listing continues in the following parts.)
